United States Patent Application Publication US 2011/0183924 A1 - sequence listing, part 120

SEQ ID NO: 343807 - DNA, 4720 bp, Homo sapiens
gtaatcttagtgcactacaacctcaaactcctgggctcaagtgatcctcctgcatcaccttcctgtgtagctgggactacagccctgcaccactgtgcacagcttccacacagtgtggaagaactgtgtgtggaagctgtgctggcttccatggctttgaagccgaatgttgtgcaagtgttgaagcagaatgttgaattagtcaattagttactttttttaaaattttctctttcctcctctctcttttctttcatctcctcccacttattatttaaagtagcagatttcttgctgaaaagcatttagataagcaaaaccaatttgttgtagaatacagttaaaggatgtcagctgatggtgctggctgtttttccagaggcctcacagaatggtattggcttgttgataagagagttatgagtccaggactcagccttataggctcagaaacccaactgttgacagtataataaccacaaatctattcctgatatgagggaccctcaaattaaccaaactagaaagacttgtgtatactcagaaggctaatttataaattttctaaaaactggtacctgttgaacagattagaatactctctttgatgagtgagaagggagcttggtaaacatgggcgtgagaatgagaataattgaagtgatttgagtgtccaagagccatcaaggataagattcataacttgatttgcagtgacctgtaagagtatggatttcaattacatttcactatccttgggcagtaacgcagcatatacatagctttgacagtgaccatcttctctgtgatgaatactttcattcttttcatatgtttaaaccctcaattttacattggtccacagaaaactggcatcaaatactcacaacatagctcaggatctgtcaaacaaaagttcttatggactcaaaggggcttggaagaattctgtggaagagtggacaacagaagactggactgaagatctttctgaaacaaaggtcttcactgcctcatctgctccagcagagaatcacatcttacctgggcaaagcattgatctggtagccttgctccagaagcctgttcctcacagtcaagcctcagaagccaactcctttgaaacttcccaacagcagggctttggccaagcccttgtcttcacaaattcgcaacacaacaatcagatggcaccagggactggcagctccactgccgtcaactcctgttctcctcagagcctgtcatccgtccttggctcaggatttggagagcttgcaccaccaaaaatggcaaacatcaccagctcccagattttggaccagttgaaagctccgagtttgggccagtttaccaccaccccaagtacacagcagaatagtacaagtcaccctacaactactacttcttgggacctcaagcccccaacatcccagtcctcagtcctcagtcatcttgacttcaaatctcaacctgagccatccccagttcttagccagttgagccagcgacaacagcaccagagccaggcagtcactgttcctcctcctggtttggagtcctttccttcccaggcaaaacttcgagaatcaacacctggagacagtccctccactgtgaacaagcttttgcagcttcccagcacgaccattgaaaatatctctgtgtctgtccaccagccacagcccaaacacatcaaacttgctaagcggcggatacccccagcttctaagatcccagcttctgcagtggaaatgcctggttcagcagatgtcacaggattaaatgtgcagtttggggctctggaatttgggtcagaaccttctctctctgaatttggatcagctccaagcagtgaaaatagtaatcagattcccatcagcttgtattcgaagtctttaagtgagcctttgaatacatctttatcaatgaccagtgcagtacagaactccacatatacaacttccgtcattacctcctgcagtctgacaagctcatcactgaattctgctagtccagtagcaatgtcttcctcttatgaccagagttctgtgcataacaggatcccataccaaagccctgtgagttcatcagagtcagctccaggaaccatcatgaatggacatggtggtggtcgaagtcagcagacactagacactccaaagacaacaggccctccctctgccctcccgtctgtgagctccctgcccagcaccacctcctgcactgcacttctgccgtccacatcccagcacactggcgacctgactagcagccctctctctcagcttagcagttcgctctccagccaccagagcagcctctctgcacatgcagccctctcctcgagcacgtcacacacacatgccagtgtggagagcgcctcttcccaccagtcctcagccaccttctccacggcagcgacctccgtctcaagttccgcatcctcaggcgtcagcctgtccagtagcatgaacaccgcgaacagcctctgtctgggtgggacccccgcgagtgcatccagcagcagtagcagggccgcgcccttggtgacctcaggcaaagcacccccaaacttacctcagggggtgcctcccctgctgcacaaccagtacctcgtaggtcccggaggactgcttcctgcctacccgatctatggctatgacgagctccagatgctgcagtcacggctgccagtggactactatggaattccctttgctgcacccacagcgcttgccagccgagatgggagcctagctaataatccatatccaggtgatgtcacaaagtttggccgtggggactctgcatcccctgcacccgctaccacaccagctcagccacagcagagccaatcacagacccaccacacagcccagcagcccttcgtgaatcctgcactgccacctggctatagctacactggtcttccctactacacaggcatgcccagtgccttccagtatggccccaccatgtttgtccctccagcctcagccaagcaacatggggtgaacctcagcactcccacacctcccttccagcaggccagtggttatggccagcacggctacagtacaggttatgacgacctgacccaggggacagcagcaggagactactccaaaggtggctatgctggatcatcgcaggcaccaaacaagtctgcaggttctgggcctggcaaaggagtatcagtgtcttcaagcaccactggtctacctgatatgactggttctgtctacaataagacacagacttttgacaagcagggatttcatgcagggacgcctccacctttcagcctgccctcggtcttgggctccactgggcccctggcctcgggagcggcccctggctatgcacccccaccattcctacacatcttgccagcccaccagcagccccactcacagctgctgcaccaccaccttccgcaggatgcacagagtggctcgggtcagcgcagccagcccagctccctgcagcccaagtctcaagcctccaaacctgcctacggcaactctccatactggacaaactaaacccagaagagaggggtgggctggggcaaggcttatcctgggcaggagagaacacacgagcacgtatttgggagcccagtgccctttcctagaattcccgacatgtgtcagccatgcctctgtggggagtctgcctcccagactggctactgtatgtaatgtatttatgtatgtatttgtaaatgtgatagaagtctgggggggagttgggggatggcggcagatgttagccaggtctgccctccccattcaagccccttctccactgtagcaaaataagcacccccaccccatctgccttcaggtcttcttcacagcctgcactgcccagtgggccactaggggcagtctctggaagggctggttcaaggctgtttgggtataggggtcaggtaccaatgaagaatcacgacttgtctcactcctttggaaattgttttctttcctgtgtaattacttcatacctctgtttttgagaaactgttccgtttgtcatctgtcatggtctccttccaccaaatcttcatctgggaatagcagcggtatccctccacccaagtatggccacctgtttgtcttcatatagaacaggggcttctggtctggtcatgtccctagagacttactagagactggctgaccatgaaaaaaaaaaaaataatctgagttattcagccagtcagctcccctttaaaaatctaaggtatctccaagcaacacatctccattctagttgtcttgaaccacgtgggcaactgtttcaggggttttctcttgcccaatccccacctaataaagttctgagagcatgaaaaaaaaaaattaaaaaaaaaaaaaaaaaaaaaaaaaaaaaattttggggggcgccggggccccagaaaaaagcttttagaacacaccatccgggtgggggcggcggggccccaagggagaaagggacacacggggacaaaaaggggtacacaaggaaacccggggacaggagaaaaggggcgggggattctctcccccaaataataaaaacgcgccggggggagaacacgcggagggttttggagaacaaatcccaaagaggagggtccgggagggccaaacagggagactctatacaaagagggaggtccaaagagggagaccacgaaattacaaaatagaccccggaacgcgggcgg

SEQ ID NO: 343808 - DNA, 2554 bp, Homo sapiens
  misc_feature (743)..(743): n is a, c, g, or t
cggcggcggcagcgggtcttgggtcctccgagagcagcagcgattttctattttgtacatacattattttgtatatactgtatatgatgacttcagtgagcagtgaccattgtcgaggtgctcgggaaaaaccacagatttcagcagcacaatcaacgcaaccacagaaacaagtggtacaggcaacagctgaacagatgcgtctcgctcaagtgatctttgataagaatgattcagattttgaagctaaagttaagcagcttatggaagtgacagggaaaaatcaggatgaatgcatagtggccctacatgattgtaatggagatgtgaacaaagctatcaatatattgctggaagggaattcagacacaacttcatgggagactgtagggtgtaagaaaaagaattttgcaaaagaaaattcagaaaacaaagagaatagagagaagaggacggctgctgctgaactgtccagcagccctctctctcagctcagcagctccctctctggccaccagaacagcatgacctctgcacatgcgacacgttccacaagcacgccacacactcatgccagcgtggagagcaccgcatcctccgccgccttctcagcagcggcgacctctgctccaagtgccccgtcctcaggggttgtcctgcctgggagcatgagcactgtgagcagcctgtgcctgggggggaccactgtgagcgtccctagcagcagcaccagggccacggcnttggtgacctcgcaaagcacccccaaacttacctcagggggtgcctcccctgctgcacaaccagtacctcgtaggtcccggaggactgcttcctgcctacccgatctatggctatgacgagctccagatgctgcagtcacggctgccagtggactactatggaattccctttgctgcacccacagcgcttgccagccgagatgggagcctagctaataatccatatccaggtgatgtcacaaagtttggccgtggggactctgcatcccctgcacccgctaccacaccagctcagccacagcagagccaatcacagacccaccacacagcccagcagcccttcgtgaatcctgcactgccacctggctatagctacactggtcttccctactacacaggcatgcccagtgccttccagtatggccccaccatgtttgtccctccagcctcagccaagcaacatggggtgaacctcagcactcccacacctcccttccagcaggccagtggttatggccagcacggctacagtacaggttatgacgacctgacccaggggacagcagcaggagactactccaaaggtggctatgctggatcatcgcaggcaccaaacaagtctgcaggttctgggcctggcaaaggagtatcagtgtcttcaagcaccactggtctacctgatatgactggttctgtctacaataagacacagacttttgacaagcagggatttcatgcagggacgcctccacctttcagcctgccctcggtcttgggctccactgggcccctggcctcgggagcggcccctggctatgcacccccaccattcctacacatcttgccagcccaccagcagccccactcacagctgctgcaccaccaccttccgcaggatgcacagagtggctcgggtcagcgcagccagcccagctccctgcagcccaagtctcaagcctccaaacctgcctacggcaactctccatactggacaaactaaacccagaagagaggggtgggctggggcaaggcttatcctgggcaggagagaacacacgagcacgtatttgggagcccagtgccctttcctagaattcccgacatgtgtcagccatgcctctgtggggagtctgcctcccagactggctactgtatgtaatgtatttatgtatgtatttgtaaatgtgatagaagtctgggggggagttgggggatggcggcagatgttagccaggtctgccctccccattcaagccccttctccactgtagcaaaataagcacccccaccccatctgccttcaggtcttcttcacagcctgcactgcccagtgggccactaggggcagtctctggaagggctggttcaaggctgtttgggtataggggtcaggtaccaatgaagaatcacgacttgtctcactcctttggaaattgttttctttcctgtgtaattacttcatacctctgtttttgagaaactgttccgtttgtcatctgtcatggtctccttccaccaaatcttcatctgggaatagcagcggtatccctccacccaagtatggccacctgtttgtcttcatatagaacaggggcttctggtctggtcatgtccctagagacttactagagactggctgaccatgaaaaaaaaaaaaataatctgagttattcagccagtcagctcccctttaaaaatctaaggtatctccaagcaacacatctccattctagttgtcttgaaccacgtgggcaactgtttcaggggttttctcttgcccaatccccacctaataaagttctgagagcatg

SEQ ID NO: 343809 - DNA, 4700 bp, Homo sapiens
cggcggcggcagcgggtcttgggtcctccgagagcagcagcgattttctattttgtacatacattattttgtatatactgtatatgatgacttcagtgagcagtgaccattgtcgaggtgctcgggaaaaaccacagatttcagcagcacaatcaacgcaaccacagaaacaagtggtacaggcaacagctgaacagatgcgtctcgctcaagtgatctttgataagaatgattcagattttgaagctaaagttaagcagcttatggaagtgacagggaaaaatcaggatgaatgcatagtggccctacatgattgtaatggagatgtgaacaaagctatcaatatattgctggaagggaattcagacacaacttcatgggagactgtagggtgtaagaaaaagaattttgcaaaagaaaattcagaaaacaaagagaatagagagaagaaaagcgagaaagaatcgagtcgtggacgtggaaacaacaaccggaaaggaagaggcggcaatcgtggcagagaatttagaggtgaagaaaatggaattgattgcaatcaagtggacaaaccttcagatcgtggcaagcgagcccggggtagaggatttggacgtggcagagggagaggggcaggaaggttctcaacccaaggcatggggacatttaatcctgcagactattcagattctacatctacagatgtgtgtgggacaaagctagtagtttgggaagctgctcagaatggtgcagatgagggaactgaactggcatcaaatactcacaacatagctcaggatctgtcaaacaaaagttcttatggactcaaaggggcttggaagaattctgtggaagagtggacaacagaagactggactgaagatctttctgaaacaaaggtcttcactgcctcatctgctccagcagagaatcacatcttacctgggcaaagcattgatctggtagccttgctccagaagcctgttcctcacagtcaagcctcagaagccaactcctttgaaacttcccaacagcagggctttggccaagcccttgtcttcacaaattcgcaacacaacaatcagatggcaccagggactggcagctccactgccgtcaactcctgttctcctcagagcctgtcatccgtccttggctcaggatttggagagcttgcaccaccaaaaatggcaaacatcaccagctcccagattttggaccagttgaaagctccgagtttgggccagtttaccaccaccccaagtacacagcagaatagtacaagtcaccctacaactactacttcttgggacctcaagcccccaacatcccagtcctcagtcctcagtcatcttgacttcaaatctcaacctgagccatccccagttcttagccagttgagccagcgacaacagcaccagagccaggcagtcactgttcctcctcctggtttggagtcctttccttcccaggcaaaacttcgagaatcaacacctggagacagtccctccactgtgaacaagcttttgcagcttcccagcacgaccattgaaaatatctctgtgtctgtccaccagccacagcccaaacacatcaaacttgctaagcggcggatacccccagcttctaagatcccagcttctgcagtggaaatgcctggttcagcagatgtcacaggattaaatgtgcagtttggggctctggaatttgggtcagaaccttctctctctgaatttggatcagctccaagcagtgaaaatagtaatcagattcccatcagcttgtattcgaagtctttaagtgagcctttgaatacatctttatcaatgaccagtgcagtacagaactccacatatacaacttccgtcattacctcctgcagtctgacaagctcatcactgaattctgctagtccagtagcaatgtcttcctcttatgaccagagttctgtgcataacaggatcccataccaaagccctgtgagttcatcagagtcagctccaggaaccatcatgaatggacatggtggtggtcgaagtcagcagacactagacactccaaagacaacaggccctccctctgccctcccgtctgtgagctccctgcccagcaccacctcctgcactgcacttctgccgtccacatcccagcacactggcgacctgactagcagccctctctctcagcttagcagttcgctctccagccaccagagcagcctctctgcacatgcagccctctcctcgagcacgtcacacacacatgccagtgtggagagcgcctcttcccaccagtcctcagccaccttctccacggcagcgacctccgtctcaagttccgcatcctcaggcgtcagcctgtccagtagcatgaacaccgcgaacagcctctgtctgggtgggacccccgcgagtgcatccagcagcagtagcagggccgcgcccttggtgacctcaggcaaagcacccccaaacttacctcagggggtgcctcccctgctgcacaaccagtacctcgtaggtcccggaggactgcttcctgcctacccgatctatggctatgacgagctccagatgctgcagtcacggctgccagtggactactatggaattccctttgctgcacccacagcgcttgccagccgagatgggagcctagctaataatccatatccaggtgatgtcacaaagtttggccgtggggactctgcatcccctgcacccgctaccacaccagctcagccacagcagagccaatcacagacccaccacacagcccagcagcccttcgtgaatcctgcactgccacctggctatagctacactggtcttccctactacacaggcatgcccagtgccttccagtatggccccaccatgtttgtccctccagcctcagccaagcaacatggggtgaacctcagcactcccacacctcccttccagcaggccagtggttatggccagcacggctacagtacaggtgaggggtacttcccagacagagacacatggggttagacaggcttgcctggctcacacttgcctcttgtaccctgccacgctaggttatgacgacctgacccaggggacagcagcaggagactactccaaaggtggctatgctggatcatcgcaggcaccaaacaagtctgcaggttctgggcctggcaaaggagtatcagtgtcttcaagcaccactggtctacctgatatgactggttctgtctacaataagacacagacttttgacaagcagggatttcatgcagggacgcctccacctttcagcctgccctcggtcttgggctccactgggcccctggcctcgggagcggcccctggctatgcacccccaccattcctacacatcttgccagcccaccagcagccccactcacagctgctgcaccaccaccttccgcaggatgcacagagtggctcgggtcagcgcagccagcccagctccctgcagcccaagtctcaagcctccaaacctgcctacggcaactctccatactggacaaactaaacccagaagagaggggtgggctggggcaaggcttatcctgggcaggagagaacacacgagcacgtatttgggagcccagtgccctttcctagaattcccgacatgtgtcagccatgcctctgtggggagtctgcctcccagactggctactgtatgtaatgtatttatgtatgtatttgtaaatgtgatagaagtctgggggggagttgggggatggcggcagatgttagccaggtctgccctccccattcaagccccttctccactgtagcaaaataagcacccccaccccatctgccttcaggtcttcttcacagcctgcactgcccagtgggccactaggggcagtctctggaagggctggttcaaggctgtttgggtataggggtcaggtaccaatgaagaatcacgacttgtctcactcctttggaaattgttttctttcctgtgtaattacttcatacctctgtttttgagaaactgttccgtttgtcatctgtcatggtctccttccaccaaatcttcatctgggaatagcagcggtatccctccacccaagtatggccacctgtttgtcttcatatagaacaggggcttctggtctggtcatgtccctagagacttactagagactggctgaccatgaaaaaaaaaaaaataatctgagttattcagccagtcagctcccctttaaaaatctaaggtatctccaagcaacacatctccattctagttgtcttgaaccacgtgggcaactgtttcaggggttttctcttgcccaatccccacctaataaagttctgagagcatgaaaaaaaaaaattaaaaaaaaaaaaaaaaaaaaaaaaaaaaaattttggggggcgccggggccccagaaaaaagcttttagaacacaccatccgggtgggggcggcggggccccaagggagaaagggacacacggggacaaaaaggggtacacaaggaaacccggggacaggagaaaaggggcgggggattctctcccccaaataataaaaacgcgccggggggagaacacgcggagggttttggagaacaaatcccaaagaggagggtccgggagggccaaacagggagactctatacaaagagggaggtccaaagagggagaccacgaaattacaaaatagaccccggaacgcgggcgg

SEQ ID NO: 343810 - DNA, 4560 bp, Homo sapiens
cggcggcggcagcgggtcttgggtcctccgagagcagcagcgattttctattttgtacatacattattttgtatatactgtatatgatgacttcagtgagcagtgaccattgtcgaggtgctcgggaaaaaccacagatttcagcagcacaatcaacgcaaccacagaaacaagtggtacaggcaacagctgaacagatgcgtctcgctcaagtgatctttgataagaatgattcagattttgaagctaaagttaagcagcttatggaagtgacagggaaaaatcaggatgaatgcatagtggccctacatgattgtaatggagatgtgaacaaagctatcaatatattgctggaagggaattcagacacaacttcatgggagactgtagggtgtaagaaaaagaattttgcaaaagaaaattcagaaaacaaagagaatagagagaagaaaagcgagaaagaatcgagtcgtggacgtggaaacaacaaccggaaaggaagaggcggcaatcgtggcagagaatttagaggtgaagaaaatggaattgattgcaatcaagtggacaaaccttcagatcgtggcaagcgagcccggggtagaggatttggacgtggcagagggagaggggcaggaaggttctcaacccaaggcatggggacatttaatcctgcagactattcagattctacatctacagatgtgtgtgggacaaagctagtagtttgggaagctgctcagaatggtgcagatgagggaactgaactggcatcaaatactcacaacatagctcaggatctgtcaaacaaaagttcttatggactcaaaggggcttggaagaattctgtggaagagtggacaacagaagactggactgaagatctttctgaaacaaaggtcttcactgcctcatctgctccagcagagaatcacatcttacctgggcaaagcattgatctggtagccttgctccagaagcctgttcctcacagtcaagcctcagaagccaactcctttgaaacttcccaacagcagggctttggccaagcccttgtcttcacaaattcgcaacacaacaatcagatggcaccagggactggcagctccactgccgtcaactcctgttctcctcagagcctgtcatccgtccttggctcaggatttggagagcttgcaccaccaaaaatggcaaacatcaccagctcccagattttggaccagttgaaagctccgagtttgggccagtttaccaccaccccaagtacacagcagaatagtacaagtcaccctacaactactacttcttgggacctcaagcccccaacatcccagtcctcagtcctcagtcatcttgacttcaaatctcaacctgagccatccccagttcttagccagttgagccagcgacaacagcaccagagccaggcagtcactgttcctcctcctggtttggagtcctttccttcccaggcaaaacttcgagaatcaacacctggagacagtccctccactgtgaacaagcttttgcagcttcccagcacgaccattgaaaatatctctgtgtctgtccaccagccacagcccaaacacatcaaacttgctaagcggcggatacccccagcttctaagatcccagcttctgcagtggaaatgcctggttcagcagatgtcacaggattaaatgtgcagtttggggctctggaatttgggtcagaaccttctctctctgaatttggatcagctccaagcagtgaaaatagtaatcagattcccatcagcttgtattcgaagtctttaagtgagcctttgaatacatctttatcaatgaccagtgcagtacagaactccacatatacaacttccgtcattacctcctgcagtctgacaagctcatcactgaattctgctagtccagtagcaatgtcttcctcttatgaccagagttctgtgcataacaggatcccataccaaagccctgtgagttcatcagagtcagctccaggaaccatcatgaatggacatggtggtggtcgaagtcagcagacactagacactccaaagacaacaggccctccctctgccctcccgtctgtgagctccctgcccagcaccacctcctgcactgcacttctgccgtccacatcccagcacactggcgacctgactagcagccctctctctcagcttagcagttcgctctccagccaccagagcagcctctctgcacatgcagccctctcctcgagcacgtcacacacacatgccagtgtggagagcgcctcttcccaccagtcctcagccaccttctccacggcagcgacctccgtctcaagttccgcatcctcaggcgtcagcctgtccagtagcatgaacaccgcgaacagcctctgtctgggtgggacccccgcgagtgcatccagcagcagtagcagggccgcgcccttggtgacctcaggcaaagcacccccaaacttacctcagggggtgcctcccctgctgcacaaccagtacctcgtaggtcccggaggactgcttcctgcctacccgatctatggctatgacgagctccagatgctgcagtcacggctgccagtggactactatggaattccctttgctgcacccacagcgcttgccagccgagatgggagcctagctaataatccatatccaggtgatgtcacaaagtttggccgtggggactctgcatcccctgcacccgctaccacaccagctcagccacagcagagccaatcacagacccaccacacagcccagcagcccttcgtgaatcctgcactgccacctggctatagctacactggtcttccctactacacaggcatgcccagtgccttccagtatggccccaccatgtttgtccctccagcctcagccaagcaacatggggtgaacctcagcactcccacacctcccttccagcaggccagtggttatggccagcacggctacagtacaggttatgacgacctgacccaggggacagcagcaggagactactccaaaggtggctatgctggatcatcgcaggcaccaaacaagtctgcaggttctgggcctggcaaaggagtatcagtgtcttcaagcaccactggtctacctgatatgactggttctgtctacaataagacacagacttttgacaagcagggatttcatgcagggacgcctccacctttcagcctgccctcggtcttgggctccactgggcccctggcctcgggagcggcccctggctatgcacccccaccattcctacacatcttgccagcccaccagcagccccactcacagctgctgcaccaccaccttccgcaggatgcacagagtggctcgggtcagcgcagccagcccagctccctgcagcccaagtctcaagcctccaaacctgcctacggcaactctccatactggacaaactaaacccagaagagaggggtgggctggggcaaggcttatcctgggcaggagagaacacacgagcacgtatttgggagcccagtgccctttcctagaattcccgacatgtgtcagccatgcctctgtggggagtctgcctcccagactggctactgtatgtaatgtatttatgtatgtatttgtaaatgtgatagaagtctgggggggagttgggggatggcggcagatgttagccaggtctgccctccccattcaagccccttctccactgttgcccagtgggccactaggggcagtctctggaagggctggttcaaggctgtttgggtataggggtcaggtaccaatgaagaatcacgacttgtctcactcctttggaaattgttttctttcctgtgtaattacttcatacctctgtttttgagaaactgttccgtttgtcatctgtcatggtctccttccaccaaatcttcatctgggaatagcagcggtatccctccacccaagtatggccacctgtttgtcttcatatagaacaggggcttctggtctggtcatgtccctagagacttactagagactggctgaccatgaaaaaaaaaaaaataatctgagttattcagccagtcagctcccctttaaaaatctaaggtatctccaagcaacacatctccattctagttgtcttgaaccacgtgggcaactgtttcaggggttttctcttgcccaatccccacctaataaagttctgagagcatgaaaaaaaaaaattaaaaaaaaaaaaaaaaaaaaaaaaaaaaaattttggggggcgccggggccccagaaaaaagcttttagaacacaccatccgggtgggggcggcggggccccaagggagaaagggacacacggggacaaaaaggggtacacaaggaaacccggggacaggagaaaaggggcgggggattctctcccccaaataataaaaacgcgccggggggagaacacgcggagggttttggagaacaaatcccaaagaggagggtccgggagggccaaacagggagactctatacaaagagggaggtccaaagagggagaccacgaaattacaaaatagaccccggaacgcgggcgg

SEQ ID NO: 343811 - DNA, 3580 bp, Homo sapiens
  misc_feature (3580)..(3580): n is a, c, g, or t
cggcggcggcagcgggtcttgggtcctccgagagcagcagcgattttctattttgtacatacattattttgtatatactgtatatgatgacttcagtgagcagtgaccattgtcgaggtgctcgggaaaaaccacagatttcagcagcacaatcaacgcaaccacagaaacaagtggtacaggcaacagctgaacagatgcgtctcgctcaagtgatctttgataagaatgattcagattttgaagctaaagttaagcagcttatggaagtgacagggaaaaatcaggatgaatgcatagtggccctacatgattgtaatggagatgtgaacaaagctatcaatatattgctggaagggaattcagacacaacttcatgggagactgtagggtgtaagaaaaagaattttgcaaaagaaaattcagaaaacaaagagaatagagagaagaaaagcgagaaagaatcgagtcgtggacgtggaaacaacaaccggaaaggaagaggcggcaatcgtggcagagaatttagaggtgaagaaaatggaattgattgcaatcaagtggacaaaccttcagatcgtggcaagcgagcccggggtagaggatttggacgtggcagagggagaggggcaggaaggttctcaacccaaggcatggggacatttaatcctgcagactattcagattctacatctacagatgtgtgtgggacaaagctagtagtttgggaagctgctcagaatggtgcagatgagggaactgaactggcatcaaatactcacaacatagctcaggatctgtcaaacaaaagttcttatggactcaaaggggcttggaagaattctgtggaagagtggacaacagaagactggactgaagatctttctgaaacaaaggtcttcactgcctcatctgctccagcagagaatcacatcttacctgggcaaagcattgatctggtagccttgctccagaagcctgttcctcacagtcaagcctcagaagccaactcctttgaaacttcccaacagcagggctttggccaagcccttgtcttcacaaattcgcaacacaacaatcagatggcaccagggactggcagctccactgccgtcaactcctgttctcctcagagcctgtcatccgtccttggctcaggatttggagagcttgcaccaccaaaaatggcaaacatcaccagctcccagattttggaccagttgaaagctccgagtttgggccagtttaccaccaccccaagtacacagcagaatagtacaagtcaccctacaactactacttcttgggacctcaagcccccaacatcccagtcctcagtcctcagtcatcttgacttcaaatctcaacctgagccatccccagttcttagccagttgagccagcgacaacagcaccagagccaggcagtcactgttcctcctcctggtttggagtcctttccttcccaggcaaaacttcgagaatcaacacctggagacagtccctccactgtgaacaagcttttgcagcttcccagcacgaccattgaaaatatctctgtgtctgtccaccagccacagcccaaacacatcaaacttgctaagcggcggatacccccagcttctaagatcccagcttctgcagtggaaatgcctggttcagcagatgtcacaggattaaatgtgcagtttggggctctggaatttgggtcagaaccttctctctctgaatttggatcagctccaagcagtgaaaatagtaatcagattcccatcagcttgtattcgaagtctttaagtgagcctttgaatacatctttatcaatgaccagtgcagtacagaactccacatatacaacttccgtcattacctcctgcagtctgacaagctcatcactgaattctgctagtccagtagcaatgtcttcctcttatgaccagagttctgtgcataacaggatcccataccaaagccctgtgagttcatcagagtcagctccaggaaccatcatgaatggacatggtggtggtcgaagtcagcagacactagacactccaaagacaacaggccctccctctgccctcccgtctgtgagctccctgcccagcaccacctcctgcactgcacttctgccgtccacatcccagcacactggcgacctgactagcagccctctctctcagcttagcagttcgctctccagccaccagagcagcctctctgcacatgcagccctctcctcgagcacgtcacacacacatgccagtgtggagagcgcctcttcccaccagtcctcagccaccttctccacggcagcgacctccgtctcaagttccgcatcctcaggcgtcagcctgtccagtagcatgaacaccgcgaacagcctctgtctgggtgggacccccgcgagtgcatccagcagcagtagcagggccgcgcccttggtgacctcaggcaaagcacccccaaacttacctcagggggtgcctcccctgctgcacaaccagtacctcgtaggtcccggaggactgcttcctgcctacccgatctatggctatgacgagctccagatgctgcagtcacggctgccagtggactactatggaattccctttgctgcacccacagcgcttgccagccgagatgggagcctagctaataatccatatccaggtgatgtcacaaagtttggccgtggggactctgcatcccctgcacccgctaccacaccagctcagccacagcagagccaatcacagacccaccacacagcccagcagcccttcgtgaatcctgcactgccacctggctatagctacactggtcttccctactacacaggcatgcccagtgccttccagtatggccccaccatgtttgtccctccagcctcagccaagcaacatggggtgaacctcagcactcccacacctcccttccagcaggccagtggttatggccagcacggctacagtacaggttatgacgacctgacccaggggacagcagcaggagactactccaaaggtggctatgctggatcatcgcaggcaccaaacaagtctgcaggttctgggcctggcaaaggagtatcagtgtcttcaagcaccactggtctacctgatatgactggttctgtctacaataagacacagacttttgacaagcagggatttcatgcagggacgcctccacctttcagcctgccctcggtcttgggctccactgggcccctggcctcgggagcggcccctggctatgcacccccaccattcctacacatcttgccagcccaccagcagccccactcacagctgctgcaccaccaccttccgcaggatgcacagagtggtcgggtcagcgcagcagccgtcctgagccagtctcagctccaactgctcgcactctcctctggcaactaaccggaaagggggtcgggcccggttctgggggggaaccgctttgggccgcgtctatccggtggcggtcttgggggccccggcgtggttttttttgagggggggggggccccctgccctttccgctcgcggtgctcttgtcgtggttggttccctccggn

SEQ ID NO: 343812 - DNA, 3187 bp, Homo sapiens
cggcggcggcagcgggtcttgggtcctccgagagcagcagcgattttctattttgtacatacattattttgtatatactgtatatgatgacttcagtgagcagtgaccattgtcgaggtgctcgggaaaaaccacagatttcagcagcacaatcaacgcaaccacagaaacaagtggtacaggcaacagctgaacagatgcgtctcgctcaagtgatctttgataagaatgattcagattttgaagctaaagttaagcagcttatggaagtgacagggaaaaatcaggatgaatgcatagtggccctacatgattgtaatggagatgtgaacaaagctatcaatatattgctggaagggaattcagacacaacttcatgggagactgtagggtgtaagaaaaagaattttgcaaaagaaaattcagaaaacaaagagaatagagagaagaaaagcgagaaagaatcgagtcgtggacgtggaaacaacaaccggaaaggaagaggcggcaatcgtggcagagaatttagaggtgaagaaaatggaattgattgcaatcaagtggacaaaccttcagatcgtggcaagcgagcccggggtagaggatttggacgtggcagagggagaggggcaggaaggttctcaacccaaggcatggggacatttaatcctgcagactattcagattctacatctacagatgtgtgtgggacaaagctagtagtttgggaagctgctcagaatggtgcagatgagggaactgaactggcatcaaatactcacaacatagctcaggatctgtcaaacaaaagttcttatggactcaaaggggcttggaagaattctgtggaagagtggacaacagaagactggactgaagatctttctgaaacaaaggtcttcactgcctcatctgctccagcagagaatcacatcttacctgggcaaagcattgatctggtagccttgctccagaagcctgttcctcacagtcaagcctcagaagccaactcctttgaaacttcccaacagcagggctttggccaagcccttgtcttcacaaattcgcaacacaacaatcagatggcaccagggactggcagctccactgccgtcaactcctgttctcctcagagcctgtcatccgtccttggctcaggatttggagagcttgcaccaccaaaaatggcaaacatcaccagctcccagattttggaccagttgaaagctccgagtttgggccagtttaccaccaccccaagtacacagcagaatagtacaagtcaccctacaactactacttcttgggacctcaagcccccaacatcccagtcctcagtcctcagtcatcttgacttcaaatctcaacctgagccatccccagttcttagccagttgagccagcgacaacagcaccagagccaggcagtcactgttcctcctcctggtttggagtcctttccttcccaggcaaaacttcgagaatcaacacctggagacagtccctccactgtgaacaagcttttgcagcttcccagcacgaccattgaaaatatctctgtgtctgtccaccagccacagcccaaacacatcaaacttgctaagcggcggatacccccagcttctaagatcccagcttctgcagtggaaatgcctggttcagcagatgtcacaggattaaatgtgcagtttggggctctggaatttgggtcagaaccttctctctctgaatttggatcagctccaagcagtgaaaatagtaatcagattcccatcagcttgtattcgaagtctttaagtgagcctttgaatacatctttatcaatgaccagtgcagtacagaactccacatatacaacttccgtcattacctcctgcagtctgacaagctcatcactgaattctgctagtccagtagcaatgtcttcctcttatgaccagagttctgtgcataacaggatcccataccaaagccctgtgagttcatcagagtcagctccaggaaccatcatgaatggacatggtggtggtcgaagtcagcagacactagacactccaaagacaacaggccctccctctgccctcccgtctgtgagctccctgcccagcaccacctcctgcactgcacttctgccgtccacatcccagcacactggcgacctgactagcagccctctctctcagcttagcagttcgctctccagccaccagagcagcctctctgcacatgcagccctctcctcgagcacgtcacacacacatgccagtgtggagagcgcctcttcccaccagtcctcagccaccttctccacggcagcgacctccgtctcaagttccgcatcctcaggcgtcagcctgtccagtagcatgaacaccgcgaacagcctctgtctgggtgggacccccgcgagtgcatccagcagcagtagcagggccgcgcccttggtgacctcaggcaaagcacccccaaacttacctcagggggtgcctcccctgctgcacaaccagtacctcgtaggtcccggaggactgcttcctgcctacccgatctatggctatgacgagctccagatgctgcagtcacggctgccagtggactactatggaattccctttgctgcacccacagcgcttgccagccgagatgggagcctagctaataatccatatccaggtgatgtcacaaagtttggccgtggggactctgcatcccctgcacccgctaccacaccagctcagccacagcagagccaatcacagacccaccacacagcccagcagcccttcgtgaatcctgcactgccacctggctatagctacactggtcttccctactacacaggcatgcccagtgccttccagtatggccccaccatgtttgtgagtatttcagagggtgtgactgtgtctcctggccttgggttgctggcaggtggaaacctgggacctatcttccagcagggagggagggttgtgattccactccgtcttacctggtcttcagaaactgttcaggctggggacaaggtcacttttcccctgctgtgtttagatccagcatgtgttgcactaatgaaaacacaggtcccctgtggttgtgggtatgtcacctgctgccttaggctctggcaggggtacctgaccagcctcagcttgcctcttcctacactaatacctcatctgcttgc

SEQ ID NO: 343813 - DNA, 2488 bp, Homo sapiens
cggcggcggcagcgggtcttgggtcctccgagagcagcagcgattttctattttgtacatacattattttgtatatactgtatatgatgacttcagtgagcagtgaccattgtcgaggtgctcgggaaaaaccacagatttcagcagcacaatcaacgcaaccacagaaacaagtggtacaggcaacagctgaacagatgcgtctcgctcaagtgatctttgataagaatgattcagattttgaagctaaagttaagcagcttatggaagtgacagggaaaaatcaggatgaatgcatagtggccctacatgattgtaatggagatgtgaacaaagctatcaatatattgctggaagggaattcagacacaacttcatgggagactgtagggtgtaagaaaaagaattttgcaaaagaaaattcagaaaacaaagagaatagagagaagaaaagcgagaaagaatcgagtcgtggacgtggaaacaacaaccggaaaggaagaggcggcaatcgtggcagagaatttagaggtgaagaaaatggaattgattgcaatcaagtggacaaaccttcagatcgtggcaagcgagcccggggtagaggatttggacgtggcagagggagaggggcaggaaggttctcaacccaaggcatggggacatttaatcctgcagactattcagattctacatctacagatgtgtgtgggacaaagctagtagtttgggaagctgctcagaatggtgcagatgagggaactgaactggcatcaaatactcacaacatagctcaggatctgtcaaacaaaagttcttatggactcaaaggggcttggaagaattctgtggaagagtggacaacagaagactggactgaagatctttctgaaacaaaggtcttcactgcctcatctgctccagcagagaatcacatcttacctgggcaaagcattgatctggtagccttgctccagaagcctgttcctcacagtcaagcctcagaagccaactcctttgaaacttcccaacagcagggctttggccaagcccttgtcttcacaaattcgcaacacaacaatcagatggcaccagggactggcagctccactgccgtcaactcctgttctcctcagagcctgtcatccgtccttggctcaggatttggagagcttgcaccaccaaaaatggcaaacatcaccagctcccagattttggaccagttgaaagctccgagtttgggccagtttaccaccaccccaagtacacagcagaatagtacaagtcaccctacaactactacttcttgggacctcaagcccccaacatcccagtcctcagtcctcagtcatcttgacttcaaatctcaacctgagccatccccagttcttagccagttgagccagcgacaacagcaccagagccaggcagtcactgttcctcctcctggtttggagtcctttccttcccaggcaaaacttcgagaatcaacacctggagacagtccctccactgtgaacaagcttttgcagcttcccagcacgaccattgaaaatatctctgtgtctgtccaccagccacagcccaaacacatcaaacttgctaagcggcggatacccccagcttctaagatcccagcttctgcagtggaaatgcctggttcagcagatgtcacaggattaaatgtgcagtttggggctctggaatttgggtcagaaccttctctctctgaatttggatcagctccaagcagtgaaaatagtaatcagattcccatcagcttgtattcgaagtctttaagtgagcctttgaatacatctttatcaatgaccagtgcagtacagaactccacatatacaacttccgtcattacctcctgcagtctgacaagctcatcactgaattctgctagtccagtagcaatgtcttcctcttatgaccagagttctgtgcataacaggatcccataccaaagccctgtgagttcatcagagtcagctccaggaaccatcatgaatggacatggtggtggtcgaagtcagcagacactagacactccaaagacaacaggccctccctctgccctcccgtctgtgagctccctgcccagcaccacctcctgcactgcacttctgccgtccacatcccagcacactggcgacctgactagcagccctctctctcagcttagcagttcgctctccagccaccagagcagcctctctgcacatgcagccctctcctcgagcacgtcacacacacatgccagtgtggagagcgcctcttcccaccagtcctcagccaccttctccacggcagcgacctccgtctcaagttccgcatcctcaggcgtcagcctgtccagtagcatgaacaccgcgaacagcctctgtctgggtgggacccccgcgagtgcatccagcagcagtagcagggccgcgcccttggtgacctcaggtatttgctccagaggcctttcctgcccacccct

SEQ ID NO: 343814 - DNA, 989 bp, Homo sapiens
tccgttatattaggaggtgtattaaagaggtgtgggagtgctgaggtcacccatgttgcttggctgaggctggagggacaaactatgtggggccatactggaaggcactgggcatgcctgtttagtagggaagaccagtgtagctattgccaggtggcagggcagtctctggaagggctggttcaaggctgtttgggtataggggtcaggtaccaatgaagaatcacgacttgtctcactcctttggaaattgttttctttcctgtgtaattacttcatacctctgtttttgagaaactgttccgtttgtcatctgtcatggtctccttccaccaaatcttcatctgggaatagcagcggtatccctccacccaagtatggccacctgtttgtcttcatatagaacaggggcttctggtctggtcatgtccctagagacttactagagactggctgaccatgaaaaaaaaaaaaataatctgagttattcagccagtcagctcccctttaaaaatctaaggtatctccaagcaacacatctccattctagttgtcttgaaccacgtgggcaactgtttcaggggttttctcttgcccaatccccacctaataaagttctgagagcatgaaaaaaaaaaattaaaaaaaaaaaaaaaaaaaaaaaaaaaaaattttggggggcgccggggccccagaaaaaagcttttagaacacaccatccgggtgggggcggcggggccccaagggagaaagggacacacggggacaaaaaggggtacacaaggaaacccggggacaggagaaaaggggcgggggattctctcccccaaataataaaaacgcgccggggggagaacacgcggagggttttggagaacaaatcccaaagaggagggtccgggagggccaaacagggagactctatacaaagagggaggtccaaagagggagaccacgaaattacaaaatagaccccggaacgcgggcgg

SEQ ID NO: 343815 - DNA, 1776 bp, Homo sapiens
cggcggcggcagcgggtcttgggtcctccgagagcagcagcgattttctattttgtacatacattattttgtatatactgtatatgatgacttcagtgagcagtgaccattgtcgaggtgctcgggaaaaaccacagatttcagcagcacaatcaacgcaaccacagaaacaagtggtacaggcaacagctgaacagatgcgtctcgctcaagtgatctttgataagaatgattcagattttgaagctaaagttaagcagcttatggaagtgacagggaaaaatcaggatgaatgcatagtggccctacatgattgtaatggagatgtgaacaaagctatcaatatattgctggaagggaattcagacacaacttccatgggcagcactgtagggtgtcagcaacacaagcaattttgcaacacagcaacacattccagacacacacgaacagcagcaccatcagcagcagcacgcaaaagctgcagcaaagcacatccgcagtctgtggcacgtgagaaaacaacaacctggcaacaggcacagcaggccggccaatccgtggtccagcagcaattctagcacggtgcacagacaaatggcacattgcattgcacatccaagctggacgaaaccattcagcattcgtgggcaaagcgcagccccgggcgtagcaggcatttgcgacgtggccagagggcagcaggggcacggacaccgttctcaaccgcaaggccatgggggtaccatttaagtcccagcagacctattcacgactacctagcactctacacgactgtgtgctgggaccaaacacgctaagaaagatattggagaacgctgacatcagaacatggcagcacgaatgaacgagcgacactgaaacatgggcacatcaacataacaaccacaacgataaactcacggatacttgtccagaacacacaagagcgtttcatataatagggaccatctcacaaacgcgggcgcccttagccgcaaggcaacattcccagtcgcgccaacgacgccagcgcaccacaaccagacacagcaactcggcaacatcgaccagaatccccatccctatgaaaaaatcgacaaacgagcgtagtatcccacactgccacctccacactacctcgacgtccgccacgcgcacacacaactcaccacattaaactgtaacacaatgtgaatagcacaaacaaggccactacggagagctcacagtacgattacgcaccactcggccctacgcccacgccacaacgacacatgagacaccacacatccagacacgacacccagagggacaacacaaagagcaccagcgcccaacaagatccaatacagagtaacacagcatgccacagaaaatacaacaaacgcacgaggcactcacagacgccacaagcacccaccacgcgcaccgtcacaacccacaacactagcacaaacaaacagcctataccacaaacattaagacaatagtgccccaacactgtggcactacagtcagtccatacgatcccaactgatgcggcttcctacactccaatgcaatgctatccatcctaatacaccacttatatccatctaggtatcctacttgcaaactctaccagacagataatagaagaccaacgagactttgcacccctaacacacaacacacatacgcgaccaaaaaaacatagacaaacaaactacacatcttcatgaatacacagcactaaaagtacgcggcatgaatcatgggacccagagatataaa

SEQ ID NO: 343816 - DNA, 493 bp, Homo sapiens
gaaatagaggtgctgaacaaaatgttttcttctttatctaatgtttctgtaaaggagcatataaatctaagctgtaaaagccaaacttggattctgacttgggaagaaaatacctgttgcctatttatgccttatttttcagcaggactctcataagagctcttattctgccttgaaagattatacgtctccttgtctgctttaggatgcagaggaccgtgtttcaggaaaataaggctattataccagaatgtgtggaaggtccctaggcaacttctggttttcacatctgcatctccatggctggcagaattagttatatttaaataggggaaggagaggtgatgtcttttacagtggctgtgagaaggcactgggcttgtttggtggaagatcatgtatggttaatattttggcttaggtgtttgcttcttttgcctttattatttctttatttcaaaccccaggacatttaatcctgcagactattcag

SEQ ID NO: 343817 - DNA, 435 bp, Homo sapiens
gcaccactggtctacctgatatgactggttctgtctacaataagacacaggtgagggacaaaggtgggttgggtgtataggtttttgagaggttacagcccaacctgaccttcaccattgtcttctttgccctgtagacttttgacaagcagggatttcatgcagggacgcctccacctttcagcctgccctcggtcttgggctccactgggcccctggcctcgggagcggcccctggctatgcacccccaccattcctacacatcttgccagcccaccagcagccccactcacagctgctgcaccaccaccttccgcaggatgcacaggtgagtacagtgatggaggcagccaccctactctgggccaggggttctgctccagccttgacagccttcccttctcctcttcctcagagtggctcgggtcagcgca

SEQ ID NO: 343818 - DNA, 423 bp, Homo sapiens
gggcagatcacgaggtcaggagatcgagaccatcatggctaacacgatgaaaccccatctccactaaaaatacaaaaaattagttgggcgtggtggcaggcgcctgtagtcccagctactcaggagactgaggcaggagaatgttgtgaacctgggaggcggagcttgcagtgagctgagagggcgccatgcactccagcctgggcgacagagcgagactccgtctcaaaaaaaaaaaaaaaaagaaagatacatgcatgtgcctttgataattgtacacactttgaatgataaatgattaacagccgttctctctgatagacttcatgggagactgtagggtgtaagaaaaagaattttgcaaaagaaaattcagaaaacaaagagaatagagagaagaaaagcgagaaagaatcgagtcgt

SEQ ID NO: 343819 - DNA, 319 bp, Homo sapiens
gtttttaagtcacttttgtttttgtttttcctgtttttgaacccgttgtttaaattgtagcctgtttgtcattccttctttgcctttaataggtgcttgataaggttatgtacaagaggtttggaaatggaaatttgatttttctgctcttttccccctagttagaggtgaagaaaatggaattgattgcaatcaagtggacaaaccttcagatcgtggcaagcgagcccggggtagaggtaagctagagtaagagggaagaaaatgctttcaattagggggaagaagcaggcagttgcgttgctggactgtgactagg

SEQ ID NO: 343820 - DNA, 424 bp, Homo sapiens
ctgtttgcagaagccagtgtggcctttctctggttggaggaagggcagtggctggagtcagtgctctttcctaggtgatgtcacaaagtttggccgtggggactctgcatcccctgcacccgctaccacaccagctcagccacagcagagccaatcacagacccaccacacagcccagcagcccttcgtgaatcctgcactgccacctggctatagctacactggtcttccctactacacaggcatgcccagtgccttccagtatggccccaccatgtttgtgagtatttcagagggtgtgactgtgtctcctggccttgggttgctggcaggtggaaacctgggacctatcttccagcagggagggagggttgtgattccactccgtcttacctggtcttcagaaactgttcaggctggggac

SEQ ID NO: 343821 - DNA, 4254 bp, Homo sapiens
cggcggcggcagcgggtcttgggtcctccgagagcagcagcgattttctattttgtacatacattattttgtatatactgtatatgatgacttcagtgagcagtgaccattgtcgaggtgctcgggaaaaaccacagatttcagcagcacaatcaacgcaaccacagaaacaagtggtacaggcaacagctgaacagatgcgtctcgctcaagtgatctttgataagaatgattcagattttgaagctaaagttaagcagcttatggaagtgacagggaaaaatcaggatgaatgcatagtggccctacatgattgtaatggagatgtgaacaaagctatcaatatattgctggaagggaattcagacacaacttcatgggagactgtagggtgtaagaaaaagaattttgcaaaagaaaattcagaaaacaaagagaatagagagaagaaaagcgagaaagaatcgagtcgtggacgtggaaacaacaaccggaaaggaagaggcggcaatcgtggcagagaatttagaggtgaagaaaatggaattgattgcaatcaagtggacaaaccttcagatcgtggcaagcgagcccggggtagaggatttggacgtggcagagggagaggggcaggaaggttctcaacccaaggcatggggacatttaatcctgcagactattcagattctacatctacagatgtgtgtgggacaaagctagtagtttgggaagctgctcagaatggtgcagatgagggaactgaactggcatcaaatactcacaacatagctcaggatctgtcaaacaaaagttcttatggactcaaaggggcttggaagaattctgtggaagagtggacaacagaagactggactgaagatctttctgaaacaaaggtcttcactgcctcatctgctccagcagagaatcacatcttacctgggcaaagcattgatctggtagccttgctccagaagcctgttcctcacagtcaagcctcagaagccaactcctttgaaacttcccaacagcagggctttggccaagcccttgtcttcacaaattcgcaacacaacaatcagatggcaccagggactggcagctccactgccgtcaactcctgttctcctcagagcctgtcatccgtccttggctcaggatttggagagcttgcaccaccaaaaatggcaaacatcaccagctcccagattttggaccagttgaaagctccgagtttgggccagtttaccaccaccccaagtacacagcagaatagtacaagtcaccctacaactactacttcttgggacctcaagcccccaacatcccagtcctcagtcctcagtcatcttgacttcaaatctcaacctgagccatccccagttcttagccagttgagccagcgacaacagcaccagagccaggcagtcactgttcctcctcctggtttggagtcctttccttcccaggcaaaacttcgagaatcaacacctggagacagtccctccactgtgaacaagcttttgcagcttcccagcacgaccattgaaaatatctctgtgtctgtccaccagccacagcccaaacacatcaaacttgctaagcggcggatacccccagcttctaagatcccagcttctgcagtggaaatgcctggttcagcagatgtcacaggattaaatgtgcagtttggggctctggaatttgggtcagaaccttctctctctgaatttggatcagctccaagcagtgaaaatagtaatcagattcccatcagcttgtattcgaagtctttaagtgagcctttgaatacatctttatcaatgaccagtgcagtacagaactccacatatacaacttccgtcattacctcctgcagtctgacaagctcatcactgaattctgctagtccagtagcaatgtcttcctcttatgaccagagttctgtgcataacaggatcccataccaaagccctgtgagttcatcagagtcagctccaggaaccatcatgaatggacatggtggtggtcgaagtcagcagacactagacactccaaagacaacaggccctccctctgccctcccgtctgtgagctccctgcccagcaccacctcctgcactgcacttctgccgtccacatcccagcacactggcgacctgactagcagccctctctctcagcttagcagttcgctctccagccaccagagcagcctctctgcacatgcagccctctcctcgagcacgtcacacacacatgccagtgtggagagcgcctcttcccaccagtcctcagccaccttctccacggcagcgacctccgtctcaagttccgcatcctcaggcgtcagcctgtccagtagcatgaacaccgcgaacagcctctgtctgggtgggacccccgcgagtgcatccagcagcagtagcagggccgcgcccttggtgacctcaggcaaagcacccccaaacttacctcagggggtgcctcccctgctgcacaaccagtacctcgtaggtcccggaggactgcttcctgcctacccgatctatggctatgacgagctccagatgctgcagtcacggctgccagtggactactatggaattccctttgctgcacccacagcgcttgccagccgagatgggagcctagctaataatccatatccaggtgatgtcacaaagtttggccgtggggactctgcatcccctgcacccgctaccacaccagctcagccacagcagagccaatcacagacccaccacacagcccagcagcccttcgtgaatcctgcactgccacctggctatagctacactggtcttccctactacacaggcatgcccagtgccttccagtatggccccaccatgtttgtccctccagcctcagccaagcaacatggggtgaacctcagcactcccacacctcccttccagcaggccagtggttatggccagcacggctacagtacaggttatgacgacctgacccaggggacagcagcaggagactactccaaaggtggctatgctggatcatcgcaggcaccaaacaagtctgcaggttctgggcctggcaaaggagtatcagtgtcttcaagcaccactggtctacctgatatgactggttctgtctacaataagacacagacttttgacaagcagggatttcatgcagggacgcctccacctttcagcctgccctcggtcttgggctccactgggcccctggcctcgggagcggcccctggctatgcacccccaccattcctacacatcttgccagcccaccagcagccccactcacagctgctgcaccaccaccttccgcaggatgcacagagtggctcgggtcagcgcagccagcccagctccctgcagcccaagtctcaagcctccaaacctgcctacggcaactctccatactggacaaactaaacccagaagagaggggtgggctggggcaaggcttatcctgggcaggagagaacacacgagcacgtatttgggagcccagtgccctttcctagaattcccgacatgtgtcagccatgcctctgtggggagtctgcctcccagactggctactgtatgtaatgtatttatgtatgtatttgtaaatgtgatagaagtctgggggggagttgggggatggcggcagatgttagccaggtctgccctccccattcaagccccttctccactgtagcaaaataagcacccccaccccatctgccttcaggtcttcttcacagcctgcactgcccagtgggccactaggggcagtctctggaagggctggttcaaggctgtttgggtataggggtcaggtaccaatgaagaatcacgacttgtctcactcctttggaaattgttttctttcctgtgtaattacttcatacctctgtttttgagaaactgttccgtttgtcatctgtcatggtctccttccaccaaatcttcatctgggaatagcagcggtatccctccacccaagtatggccacctgtttgtcttcatatagaacaggggcttctggtctggtcatgtccctagagacttactagagactggctgaccatgaaaaaaaaaaaaataatctgagttattcagccagtcagctcccctttaaaaatctaaggtatctccaagcaacacatctccattctagttgtcttgaaccacgtgggcaactgtttcaggggttttctcttgcccaatccccacctaataaagttctgagagcatg

SEQ ID NO: 343822 - DNA, 4491 bp, Homo sapiens
cgcccgtgacgcgaggtcacgtgacgggttgggcagcctgtgccgccgccgccgctttgtaagaggcacattggcagattttctattttgtacatacattattttgtatatactgtatatgatgacttcagtgagcagtgaccattgtcgaggtgctcgggaaaaaccacagatttcagcagcacaatcaacgcaaccacagaaacaagtggtacaggcaacagctgaacagatgcgtctcgctcaagtgatctttgataagaatgattcagattttgaagctaaagttaagcagcttatggaagtgacagggaaaaatcaggatgaatgcatagtggccctacatgattgtaatggagatgtgaacaaagctatcaatatattgctggaagggaattcagacacaacttcatgggagactgtagggtgtaagaaaaagaattttgcaaaagaaaattcagaaaacaaagagaatagagagaagaaaagcgagaaagaatcgagtcgtggacgtggaaacaacaaccggaaaggaagaggcggcaatcgtggcagagaatttagaggtgaagaaaatggaattgattgcaatcaagtggacaaaccttcagatcgtggcaagcgagcccggggtagagaactggcatcaaatactcacaacatagctcaggatctgtcaaacaaaagttcttatggactcaaaggggcttggaagaattctgtggaagagtggacaacagaagactggactgaagatctttctgaaacaaaggtcttcactgcctcatctgctccagcagagaatcacatcttacctgggcaaagcattgatctggtagccttgctccagaagcctgttcctcacagtcaagcctcagaagccaactcctttgaaacttcccaacagcagggctttggccaagcccttgtcttcacaaattcgcaacacaacaatcagatggcaccagggactggcagctccactgccgtcaactcctgttctcctcagagcctgtcatccgtccttggctcaggatttggagagcttgcaccaccaaaaatggcaaacatcaccagctcccagattttggaccagttgaaagctccgagtttgggccagtttaccaccaccccaagtacacagcagaatagtacaagtcaccctacaactactacttcttgggacctcaagcccccaacatcccagtcctcagtcctcagtcatcttgacttcaaatctcaacctgagccatccccagttcttagccagttgagccagcgacaacagcaccagagccaggcagtcactgttcctcctcctggtttggagtcctttccttcccaggcaaaacttcgagaatcaacacctggagacagtccctccactgtgaacaagcttttgcagcttcccagcacgaccattgaaaatatctctgtgtctgtccaccagccacagcccaaacacatcaaacttgctaagcggcggatacccccagcttctaagatcccagcttctgcagtggaaatgcctggttcagcagatgtcacaggattaaatgtgcagtttggggctctggaatttgggtcagaaccttctctctctgaatttggatcagctccaagcagtgaaaatagtaatcagattcccatcagcttgtattcgaagtctttaagtgagcctttgaatacatctttatcaatgaccagtgcagtacagaactccacatatacaacttccgtcattacctcctgcagtctgacaagctcatcactgaattctgctagtccagtagcaatgtcttcctcttatgaccagagttctgtgcataacaggatcccataccaaagccctgtgagttcatcagagtcagctccaggaaccatcatgaatggacatggtggtggtcgaagtcagcagacactagacactccaaagacaacaggccctccctctgccctcccgtctgtgagctccctgcccagcaccacctcctgcactgcacttctgccgtccacatcccagcacactggcgacctgactagcagccctctctctcagcttagcagttcgctctccagccaccagagcagcctctctgcacatgcagccctctcctcgagcacgtcacacacacatgccagtgtggagagcgcctcttcccaccagtcctcagccaccttctccacggcagcgacctccgtctcaagttccgcatcctcaggcgtcagcctgtccagtagcatgaacaccgcgaacagcctctgtctgggtgggacccccgcgagtgcatccagcagcagtagcagggccgcgcccttggtgacctcaggcaaagcacccccaaacttacctcagggggtgcctcccctgctgcacaaccagtacctcgtaggtcccggaggactgcttcctgcctacccgatctatggctatgacgagctccagatgctgcagtcacggctgccagtggactactatggaattccctttgctgcacccacagcgcttgccagccgagatgggagcctagctaataatccatatccaggtgatgtcacaaagtttggccgtggggactctgcatcccctgcacccgctaccacaccagctcagccacagcagagccaatcacagacccaccacacagcccagcagcccttcgtgaatcctgcactgccacctggctatagctacactggtcttccctactacacaggcatgcccagtgccttccagtatggccccaccatgtttgtccctccagcctcagccaagcaacatggggtgaacctcagcactcccacacctcccttccagcaggccagtggttatggccagcacggctacagtacaggttatgacgacctgacccaggggacagcagcaggagactactccaaaggtggctatgctggatcatcgcaggcaccaaacaagtctgcaggttctgggcctggcaaaggagtatcagtgtcttcaagcaccactggtctacctgatatgactggttctgtctacaataagacacagacttttgacaagcagggatttcatgcagggacgcctccacctttcagcctgccctcggtcttgggctccactgggcccctggcctcgggagcggcccctggctatgcacccccaccattcctacacatcttgccagcccaccagcagccccactcacagctgctgcaccaccaccttccgcaggatgcacagagtggctcgggtcagcgcagccagcccagctccctgcagcccaagtctcaagcctccaaacctgcctacggcaactctccatactggacaaactaaacccagaagagaggggtgggctggggcaaggcttatcctgggcaggagagaacacacgagcacgtatttgggagcccagtgccctttcctagaattcccgacatgtgtcagccatgcctctgtggggagtctgcctcccagactggctactgtatgtaatgtatttatgtatgtatttgtaaatgtgatagaagtctgggggggagttgggggatggcggcagatgttagccaggtctgccctccccattcaagccccttctccactgtagcaaaataagcacccccaccccatctgccttcaggtcttcttcacagcctgcactgcccagtgggccactaggggcagtctctggaagggctggttcaaggctgtttgggtataggggtcaggtaccaatgaagaatcacgacttgtctcactcctttggaaattgttttctttcctgtgtaattacttcatacctctgtttttgagaaactgttccgtttgtcatctgtcatggtctccttccaccaaatcttcatctgggaatagcagcggtatccctccacccaagtatggccacctgtttgtcttcatatagaacaggggcttctggtctggtcatgtccctagagacttactagagactggctgaccatgaaaaaaaaaaaaataatctgagttattcagccagtcagctcccctttaaaaatctaaggtatctccaagcaacacatctccattctagttgtcttgaaccacgtgggcaactgtttcaggggttttctcttgcccaatccccacctaataaagttctgagagcatgaaaaaaaaaaattaaaaaaaaaaaaaaaaaaaaaaaaaaaaaattttggggggcgccggggccccagaaaaaagcttttagaacacaccatccgggtgggggcggcggggccccaagggagaaagggacacacggggacaaaaaggggtacacaaggaaacccggggacaggagaaaaggggcgggggattctctcccccaaataataaaaacgcgccggggggagaacacgcggagggttttggagaacaaatcccaaagaggagggtccgggagggccaaacagggagactctatacaaagagggaggtccaaagagggagaccacgaaattacaaaatagaccccggaacgcgggcgg

SEQ ID NO: 343823 - DNA, 3814 bp, Homo sapiens
  misc_feature (12)..(12): n is a, c, g, or t
  misc_feature (17)..(17): n is a, c, g, or t
ggctcggtaccnattangctcctagacggaactggcatcaaatactcacaacatagctcaggatctgtcaaacaaaagttcttatggactcaaaggggcttggaagaattctgtggaagagtggacaacagaagactggactgaagatcattgatctggtagccttgctccagaagcctgttcctcacagtcaagcctcagaagccaactcctttgaaacttcccaacagcagggctttggccaagcccttgtcttcacaaattcgcaacacaacaatcagatggcaccagggactggcagctccactgccgtcaactcctgttctcctcagagcctgtcatccgtccttggctcaggatttggagagcttgcaccaccaaaaatggcaaacatcaccagctcccagattttggaccagttgaaagctccgagtttgggccagtttaccaccaccccaagtacacagcagaatagtacaagtcaccctacaactactacttcttgggacctcaagcccccaacatcccagtcctcagtcctcagtcatcttgacttcaaatctcaacctgagccatccccagttcttagccagttgagccagcgacaacagcaccagagccaggcagtcactgttcctcctcctggtttggagtcctttccttcccaggcaaaacttcgagaatcaacacctggagacagtccctccactgtgaacaagcttttgcagcttcccagcacgaccattgaaaatatctctgtgtctgtccaccagccacagcccaaacacatcaaacttgctaagcggcggatacccccagcttctaagatcccagcttctgcagtggaaatgcctggttcagcagatgtcacaggattaaatgtgcagtttggggctctggaatttgggtcagaaccttctctctctgaatttggatcagctccaagcagtgaaaatagtaatcagattcccatcagcttgtattcgaagtctttaagtgagcctttgaatacatctttatcaatgaccagtgcagtacagaactccacatatacaacttccgtcattacctcctgcagtctgacaagctcatcactgaattctgctagtccagtagcaatgtcttcctcttatgaccagagttctgtgcataacaggatcccataccaaagccctgtgagttcatcagagtcagctccaggaaccatcatgaatggacatggtggtggtcgaagtcagcagacactagacactccaaagacaacaggccctccctctgccctcccgtctgtgagctccctgcccagcaccacctcctgcactgcacttctgccgtccacatcccagcacactggcgacctgactagcagccctctctctcagcttagcagttcgctctccagccaccagagcagcctctctgcacatgcagccctctcctcgagcacgtcacacacacatgccagtgtggagagcgcctcttcccaccagtcctcagccaccttctccacggcagcgacctccgtctcaagttccgcatcctcaggcgtcagcctgtccagtagcatgaacaccgcgaacagcctctgtctgggtgggacccccgcgagtgcatccagcagcagtagcagggccgcgcccttggtgacctcaggcaaagcacccccaaacttacctcagggggtgcctcccctgctgcacaaccagtacctcgtaggtcccggaggactgcttcctgcctacccgatctatggctatgacgagctccagatgctgcagtcacggctgccagtggactactatggaattccctttgctgcacccacagcgcttgccagccgagatgggagcctagctaataatccatatccaggtgatgtcacaaagtttggccgtggggactctgcatcccctgcacccgctaccacaccagctcagccacagcagagccaatcacagacccaccacacagcccagcagcccttcgtgaatcctgcactgccacctggctatagctacactggtcttccctactacacaggcatgcccagtgccttccagtatggccccaccatgtttgtccctccagcctcagccaagcaacatggggtgaacctcagcactcccacacctcccttccagcaggccagtggttatggccagcacggctacagtacaggttatgacgacctgacccaggggacagcagcaggagactactccaaaggtggctatgctggatcatcgcaggcaccaaacaagtctgcaggttctgggcctggcaaaggagtatcagtgtcttcaagcaccactggtctacctgatatgactggttctgtctacaataagacacagacttttgacaagcagggatttcatgcagggacgcctccacctttcagcctgccctcggtcttgggctccactgggcccctggcctcgggagcggcccctggctatgcacccccaccattcctacacatcttgccagcccaccagcagccccactcacagctgctgcaccaccaccttccgcaggatgcacagagtggctcgggtcagcgcagccagcccagctccctgcagcccaagtctcaagcctccaaacctgcctacggcaactctccatactggacaaactaaacccagaagagaggggtgggctggggcaaggcttatcctgggcaggagagaacacacgagcacgtatttgggagcccagtgccctttcctagaattcccgacatgtgtcagccatgcctctgtggggagtctgcctcccagactggctactgtatgtaatgtatttatgtatgtatttgtaaatgtgatagaagtctgggggggagttgggggatggcggcagatgttagccaggtctgccctccccattcaagccccttctccactgtagcaaaataagcacccccaccccatctgccttcaggtcttcttcacagcctgcactgcccagtgggccactaggggcagtctctggaagggctggttcaaggctgtttgggtataggggtcaggtaccaatgaagaatcacgacttgtctcactcctttggaaattgttttctttcctgtgtaattacttcatacctctgtttttgagaaactgttccgtttgtcatctgtcatggtctccttccaccaaatcttcatctgggaatagcagcggtatccctccacccaagtatggccacctgtttgtcttcatatagaacaggggcttctggtctggtcatgtccctagagacttactagagactggctgaccatgaaaaaaaaaaaaataatctgagttattcagccagtcagctcccctttaaaaatctaaggtatctccaagcaacacatctccattctagttgtcttgaaccacgtgggcaactgtttcaggggttttctcttgcccaatccccacctaataaagttctgagagcatgaaaaaaaaaaattaaaaaaaaaaaaaaaaaaaaaaaaaaaaaattttggggggcgccggggccccagaaaaaagcttttagaacacaccatccgggtgggggcggcggggccccaagggagaaagggacacacggggacaaaaaggggtacacaaggaaacccggggacaggagaaaaggggcgggggattctctcccccaaataataaaaacgcgccggggggagaacacgcggagggttttggagaacaaatcccaaagaggagggtccgggagggccaaacagggagactctatacaaagagggaggtccaaagagggagaccacgaaattacaaaatagaccccggaacgcgggcgg

SEQ ID NO: 343824 - DNA, 4548 bp, Homo sapiens
cggcggcggcagcgggtcttgggtcctccgagagcagcagcgattttctattttgtacatacattattttgtatatactgtatatgatgacttcagtgagcagtgaccattgtcgaggtgctcgggaaaaaccacagatttcagcagcacaatcaacgcaaccacagaaacaagtggtacaggcaacagctgaacagatgcgtctcgctcaagtgatctttgataagaatgattcagattttgaagctaaagttaagcagcttatggaagtgacagggaaaaatcaggatgaatgcatagtggccctacatgattgtaatggagatgtgaacaaagctatcaatatattgctggaagggaattcagacacaacttcatgggagactgtagggtgtaagaaaaagaattttgcaaaagaaaattcagaaaacaaagagaatagagagaagaaaagcgagaaagaatcgagtcgtggacgtggaaacaacaaccggaaaggaagaggcggcaatcgtggcagagaatttagaggtgaagaaaatggaattgattgcaatcaagtggacaaaccttcagatcgtggcaagcgagcccggggtagaggatttggacgtggcagagggagaggggcaggaaggttctcaacccaaggcatggggacatttaatcctgcagactattcagattctacatctacagatgtgtgtgggacaaagctagtagtttgggaagctgctcagaatggtgcagatgagggaactgaactggcatcaaatactcacaacatagctcaggatctgtcaaacaaaagttcttatggactcaaaggggcttggaagaattctgtggaagagtggacaacagaagactggactgaagatctttctgaaacaaaggtcttcactgcctcatctgctccagcagagaatcacatcttacctgggcaaagcattgatctggtagccttgctccagaagcctgttcctcacagtcaagcctcagaagccaactcctttgaaacttcccaacagcagggctttggccaagcccttgtcttcacaaattcgcaacacaacaatcagatggcaccagggactggcagctccactgccgtcaactcctgttctcctcagagcctgtcatccgtccttggctcaggatttggagagcttgcaccaccaaaaatggcaaacatcaccagctcccagattttggaccagttgaaagctccgagtttgggccagtttaccaccaccccaagtacacagcagaatagtacaagtcaccctacaactactacttcttgggacctcaagcccccaacatcccagtcctcagtcctcagtcatcttgacttcaaatctcaacctgagccatccccagttcttagccagttgagccagcgacaacagcaccagagccaggcagtcactgttcctcctcctggtttggagtcctttccttcccaggcaaaacttcgagaatcaacacctggagacagtccctccactgtgaacaagcttttgcagcttcccagcacgaccattgaaaatatctctgtgtctgtccaccagccacagcccaaacacatcaaacttgctaagcggcggatacccccagcttctaagatcccagcttctgcagtggaaatgcctggttcagcagatgtcacaggattaaatgtgcagtttggggctctggaatttgggtcagaaccttctctctctgaatttggatcagctccaagcagtgaaaatagtaatcagattcccatcagcttgtattcgaagtctttaagtgagcctttgaatacatctttatcaatgaccagtgcagtacagaactccacatatacaacttccgtcattacctcctgcagtctgacaagctcatcactgaattctgctagtccagtagcaatgtcttcctcttatgaccagagttctgtgcataacaggatcccataccaaagccctgtgagttcatcagagtcagctccaggaaccatcatgaatggacatggtggtggtcgaagtcagcagacactagacactccaaagacaacaggccctccctctgccctcccgtctgtgagctccctgcccagcaccacctcctgcactgcacttctgccgtccacatcccagcacactggcgacctgactagcagccctctctctcagcttagcagcatgccagtgtggagagcgcctcttcccaccagtcctcagccaccttctccacggcagcgacctccgtctcaagttccgcatcctcaggcgtcagcctgtccagtagcatgaacaccgcgaacagcctctgtctgggtgggacccccgcgagtgcatccagcagcagtagcagggccgcgcccttggtgacctcaggcaaagcacccccaaacttacctcagggggtgcctcccctgctgcacaaccagtacctcgtaggtcccggaggactgcttcctgcctacccgatctatggctatgacgagctccagatgctgcagtcacggctgccagtggactactatggaattccctttgctgcacccacagcgcttgccagccgagatgggagcctagctaataatccatatccaggtgatgtcacaaagtttggccgtggggactctgcatcccctgcacccgctaccacaccagctcagccacagcagagccaatcacagacccaccacacagcccagcagcccttcgtgaatcctgcactgccacctggctatagctacactggtcttccctactacacaggcatgcccagtgccttccagtatggccccaccatgtttgtccctccagcctcagccaagcaacatggggtgaacctcagcactcccacacctcccttccagcaggccagtggttatggccagcacggctacagtacaggttatgacgacctgacccaggggacagcagcaggagactactccaaaggtggctatgctggatcatcgcaggcaccaaacaagtctgcaggttctgggcctggcaaaggagtatcagtgtcttcaagcaccactggtctacctgatatgactggttctgtctacaataagacacagacttttgacaagcagggatttcatgcagggacgcctccacctttcagcctgccctcggtcttgggctccactgggcccctggcctcgggagcggcccctggctatgcacccccaccattcctacacatcttgccagcccaccagcagccccactcacagctgctgcaccaccaccttccgcaggatgcacagagtggctcgggtcagcgcagccagcccagctccctgcagcccaagtctcaagcctccaaacctgcctacggcaactctccatactggacaaactaaacccagaagagaggggtgggctggggcaaggcttatcctgggcaggagagaacacacgagcacgtatttgggagcccagtgccctttcctagaattcccgacatgtgtcagccatgcctctgtggggagtctgcctcccagactggctactgtatgtaatgtatttatgtatgtatttgtaaatgtgatagaagtctgggggggagttgggggatggcggcagatgttagccaggtctgccctccccattcaagccccttctccactgtagcaaaataagcacccccaccccatctgccttcaggtcttcttcacagcctgcactgcccagtgggccactaggggcagtctctggaagggctggttcaaggctgtttgggtataggggtcaggtaccaatgaagaatcacgacttgtctcactcctttggaaattgttttctttcctgtgtaattacttcatacctctgtttttgagaaactgttccgtttgtcatctgtcatggtctccttccaccaaatcttcatctgggaatagcagcggtatccctccacccaagtatggccacctgtttgtcttcatatagaacaggggcttctggtctggtcatgtccctagagacttactagagactggctgaccatgaaaaaaaaaaaaataatctgagttattcagccagtcagctcccctttaaaaatctaaggtatctccaagcaacacatctccattctagttgtcttgaaccacgtgggcaactgtttcaggggttttctcttgcccaatccccacctaataaagttctgagagcatgaaaaaaaaaaattaaaaaaaaaaaaaaaaaaaaaaaaaaaaaattttggggggcgccggggccccagaaaaaagcttttagaacacaccatccgggtgggggcggcggggccccaagggagaaagggacacacggggacaaaaaggggtacacaaggaaacccggggacaggagaaaaggggcgggggattctctcccccaaataataaaaacgcgccggggggagaacacgcggagggttttggagaacaaatcccaaagaggagggtccgggagggccaaacagggagactctatacaaagagggaggtccaaagagggagaccacgaaattacaaaatagaccccggaacgcgggcgg

SEQ ID NO: 343825 - DNA, 3070 bp, Homo sapiens
tttatctatgaacaaggtttatatatggaagagactgccaataaaaagaaggcctctgtaagaactgacctaggtgtaagttgaccctttcattgcttatgtttgtttttgacctgcccttcctttagagactcaagtgctttccctgggttttagaagggtcaaggttgctcctctttcctaactggaaaagacaatgatgttttatttccaagcacatatctgagttgtatgtgtggacagcactgagactgagtctttccacagctaggactgagtgtctccacatcctttctgaagcctacgaagctcatttatgtgctctgagatacatctattcaagcacataccaaggaaatgctcactgtgcatttggaagtaggtgttggacagttggactgcagatgttaggtgtctgtgtctctccacaacataggcatcaaccccaatctgccttacgttggccgtgagcattggtagagtcagcctgacttggcggaagcacgtctccaaagacaacaggccctccctctgccctcccgtctgtgagctccctgcccagcaccacctcctgcactgcacttctgccgtccacatcccagcacactggcgacctgactagcagccctctctctcagcttagcagttcgctctccagccaccagagcagcctctctgcacatgcagccctctcctcgagcacgtcacacacacatgccagtgtggagagcgcctcttcccaccagtcctcagccaccttctccacggcagcgacctccgtctcaagttccgcatcctcaggcgtcagcctgtccagtagcatgaacaccgcgaacagcctctgtctgggtgggacccccgcgagtgcatccagcagcagtagcagggccgcgcccttggtgacctcaggcaaagcacccccaaacttacctcagggggtgcctcccctgctgcacaaccagtacctcgtaggtcccggaggactgcttcctgcctacccgatctatggctatgacgagctccagatgctgcagtcacggctgccagtggactactatggaattccctttgctgcacccacagcgcttgccagccgagatgggagcctagctaataatccatatccaggtgatgtcacaaagtttggccgtggggactctgcatcccctgcacccgctaccacaccagctcagccacagcagagccaatcacagacccaccacacagcccagcagcccttcgtgaatcctgcactgccacctggctatagctacactggtcttccctactacacaggcatgcccagtgccttccagtatggccccaccatgtttgtccctccagcctcagccaagcaacatggggtgaacctcagcactcccacacctcccttccagcaggccagtggttatggccagcacggctacagtacaggttatgacgacctgacccaggggacagcagcaggagactactccaaaggtggctatgctggatcatcgcaggcaccaaacaagtctgcaggttctgggcctggcaaaggagtatcagtgtcttcaagcaccactggtctacctgatatgactggttctgtctacaataagacacagacttttgacaagcagggatttcatgcagggacgcctccacctttcagcctgccctcggtcttgggctccactgggcccctggcctcgggagcggcccctggctatgcacccccaccattcctacacatcttgccagcccaccagcagccccactcacagctgctgcaccaccaccttccgcaggatgcacagagtggctcgggtcagcgcagccagcccagctccctgcagcccaagtctcaagcctccaaacctgcctacggcaactctccatactggacaaactaaacccagaagagaggggtgggctggggcaaggcttatcctgggcaggagagaacacacgagcacgtatttgggagcccagtgccctttcctagaattcccgacatgtgtcagccatgcctctgtggggagtctgcctcccagactggctactgtatgtaatgtatttatgtatgtatttgtaaatgtgatagaagtctgggggggagttgggggatggcggcagatgttagccaggtctgccctccccattcaagccccttctccactgtagcaaaataagcacccccaccccatctgccttcaggtcttcttcacagcctgcactgcccagtgggccactaggggcagtctctggaagggctggttcaaggctgtttgggtataggggtcaggtaccaatgaagaatcacgacttgtctcactcctttggaaattgttttctttcctgtgtaattacttcatacctctgtttttgagaaactgttccgtttgtcatctgtcatggtctccttccaccaaatcttcatctgggaatagcagcggtatccctccacccaagtatggccacctgtttgtcttcatatagaacaggggcttctggtctggtcatgtccctagagacttactagagactggctgaccatgaaaaaaaaaaaaataatctgagttattcagccagtcagctcccctttaaaaatctaaggtatctccaagcaacacatctccattctagttgtcttgaaccacgtgggcaactgtttcaggggttttctcttgcccaatccccacctaataaagttctgagagcatgaaaaaaaaaaattaaaaaaaaaaaaaaaaaaaaaaaaaaaaaattttggggggcgccggggccccagaaaaaagcttttagaacacaccatccgggtgggggcggcggggccccaagggagaaagggacacacggggacaaaaaggggtacacaaggaaacccggggacaggagaaaaggggcgggggattctctcccccaaataataaaaacgcgccggggggagaacacgcggagggttttggagaacaaatcccaaagaggagggtccgggagggccaaacagggagactctatacaaagagggaggtccaaagagggagaccacgaaattacaaaatagaccccggaacgcgggcgg

SEQ ID NO: 343826 - DNA, 2390 bp, Homo sapiens
cagatccatgtgtcctggcttttcttttgccagcatgccagtgtggagagcgcctcttcccaccagtcctcagccaccttctccacggcagcgacctccgtctcaagttccgcatcctcaggcgtcagcctgtccagtagcatgaacaccgcgaacagcctctgtctgggtgggacccccgcgagtgcatccagcagcagtagcagggccgcgcccttggtgacctcaggcaaagcacccccaaacttacctcagggggtgcctcccctgctgcacaaccagtacctcgtaggtcccggaggactgcttcctgcctacccgatctatggctatgacgagctccagatgctgcagtcacggctgccagtggactactatggaattccctttgctgcacccacagcgcttgccagccgagatgggagcctagctaataatccatatccaggtgatgtcacaaagtttggccgtggggactctgcatcccctgcacccgctaccacaccagctcagccacagcagagccaatcacagacccaccacacagcccagcagcccttcgtgaatcctgcactgccacctggctatagctacactggtcttccctactacacaggcatgcccagtgccttccagtatggccccaccatgtttgtccctccagcctcagccaagcaacatggggtgaacctcagcactcccacacctcccttccagcaggccagtggttatggccagcacggctacagtacaggttatgacgacctgacccaggggacagcagcaggagactactccaaaggtggctatgctggatcatcgcaggcaccaaacaagtctgcaggttctgggcctggcaaaggagtatcagtgtcttcaagcaccactggtctacctgatatgactggttctgtctacaataagacacagacttttgacaagcagggatttcatgcagggacgcctccacctttcagcctgccctcggtcttgggctccactgggcccctggcctcgggagcggcccctggctatgcacccccaccattcctacacatcttgccagcccaccagcagccccactcacagctgctgcaccaccaccttccgcaggatgcacagagtggctcgggtcagcgcagccagcccagctccctgcagcccaagtctcaagcctccaaacctgcctacggcaactctccatactggacaaactaaacccagaagagaggggtgggctggggcaaggcttatcctgggcaggagagaacacacgagcacgtatttgggagcccagtgccctttcctagaattcccgacatgtgtcagccatgcctctgtggggagtctgcctcccagactggctactgtatgtaatgtatttatgtatgtatttgtaaatgtgatagaagtctgggggggagttgggggatggcggcagatgttagccaggtctgccctccccattcaagccccttctccactgtagcaaaataagcacccccaccccatctgccttcaggtcttcttcacagcctgcactgcccagtgggccactaggggcagtctctggaagggctggttcaaggctgtttgggtataggggtcaggtaccaatgaagaatcacgacttgtctcactcctttggaaattgttttctttcctgtgtaattacttcatacctctgtttttgagaaactgttccgtttgtcatctgtcatggtctccttccaccaaatcttcatctgggaatagcagcggtatccctccacccaagtatggccacctgtttgtcttcatatagaacaggggcttctggtctggtcatgtccctagagacttactagagactggctgaccatgaaaaaaaaaaaaataatctgagttattcagccagtcagctcccctttaaaaatctaaggtatctccaagcaacacatctccattctagttgtcttgaaccacgtgggcaactgtttcaggggttttctcttgcccaatccccacctaataaagttctgagagcatgaaaaaaaaaaattaaaaaaaaaaaaaaaaaaaaaaaaaaaaaattttggggggcgccggggccccagaaaaaagcttttagaacacaccatccgggtgggggcggcggggccccaagggagaaagggacacacggggacaaaaaggggtacacaaggaaacccggggacaggagaaaaggggcgggggattctctcccccaaataataaaaacgcgccggggggagaacacgcggagggttttggagaacaaatcccaaagaggagggtccgggagggccaaacagggagactctatacaaagagggaggtccaaagagggagaccacgaaattacaaaatagaccccggaacgcgggcgg

SEQ ID NO: 343827 - DNA, 3803 bp, Homo sapiens
cggcggcggcagcgggtcttgggtcctccgagagcagcagcgattttctattttgtacatacattattttgtatatactgtatatgatgacttcagtgagcagtgaccattgtcgaggtgctcgggaaaaaccacagatttcagcagcacaatcaacgcaaccacagaaacaagtggtacaggcaacagctgaacagatgcgtctcgctcaagtgatctttgataagaatgattcagattttgaagctaaagttaagcagcttatggaagtgacagggaaaaatcaggatgaatgcatagtggccctacatgattgtaatggagatgtgaacaaagctatcaatatattgctggaagggaattcagacacaacttcatgggagactgtagggtgtaagaaaaagaattttgcaaaagaaaattcagaaaacaaagagaatagagagaagaaaagcgagaaagaatcgagtcgtggacgtggaaacaacaaccggaaaggaagaggcggcaatcgtggcagagaatttagaggtgaagaaaatggaattgattgcaatcaagtggacaaaccttcagatcgtggcaagcgagcccggggtagaggatttggacgtggcagagggagaggggcaggaaggttctcaacccaaggcatggggacatttaatcctgcagactattcagattctacatctacagatgtgtgtgggacaaagctagtagtttgggaagctgctcagaatggtgcagatgagggaactgaactggcatcaaatactcacaacatagctcaggatctgtcaaacaaaagttcttatggactcaaaggggcttggaagaattctgtggaagagtggacaacagaagactggactgaagatctttctgaaacaaaggtcttcactgcctcatctgctccagcagagaatcacatcttacctgggcaaagcattgatctggtagccttgctccagaagcctgttcctcacagtcaagcctcagaagccaactcctttgaaacttcccaacagcagggctttggccaagcccttgtcttcacaaattcgcaacacaacaatcagatggcaccagggactggcagctccactgccgtcaactcctgttctcctcagagcctgtcatccgtccttggctcaggatttggagagcttgcaccaccaaaaatggcaaacatcaccagctcccagattttggaccagttgaaagctccgagtttgggccagtttaccaccaccccaagtacacagcagaatagtacaagtcaccctacaactactacttcttgggacctcaagcccccaacatcccagtcctcagtcctcagtcatcttgacttcaaatctcaacctgagccatccccagttcttagccagttgagccagcgacaacagcaccagagccaggcagtcactgttcctcctcctggtttggagtcctttccttcccaggcaaaacttcgagaatcaacacctggagacagtccctccactgtgaacaagcttttgcagcttcccagcacgaccattgaaaatatctctgtgtctgtccaccagccacagcccaaacacatcaaacttgctaagcggcggatacccccagcttctaagatcccagcttctgcagtggaaatgcctggttcagcagatgtcacaggattaaatgtgcagtttggggctctggaatttgggtcagaaccttctctctctgaatttggatcagctccaagcagtgaaaatagtaatcagattcccatcagcttgtattcgaagtctttaagtgagcctttgaatacatctttatcaatgaccagtgcagtacagaactccacatatacaacttccgtcattacctcctgcagtctgacaagctcatcactgaattctgctagtccagtagcaatgtcttcctcttatgaccagagttctgtgcataacaggatcccataccaaagccctgtgagttcatcagagtcagctccaggaaccatcatgaatggacatggtggtggtcgaagtcagcagacactagacactccaaagacaacaggccctccctctgccctcccgtctgtgagctccctgcccagcaccacctcctgcactgcacttctgccgtccacatcccagcacactggcgacctgactagcagccctctctctcagcttagcagttcgctctccagccaccagagcagcctctctgcacatgcagccctctcctcgagcacgtcacacacacatgccagtgtggagagcgcctcttcccaccagtcctcagccaccttctccacggcagcgacctccgtctcaagttccgcatcctcaggcgtcagcctgtccagtagcatgaacaccgcgaacagcctctgtctgggtgggacccccgcgagtgcatccagcagcagtagcagggccgcgcccttggtgacctcaggcaaagcacccccaaacttacctcagggggtgcctcccctgctgcacaaccagtacctcgtaggtcccggaggactgcttcctgcctacccgatctatggctatgacgagctccagatgctgcagtcacggctgccagtggactactatggaattccctttgctgcacccacagcgcttgccagccgagatgggagcctagctaataatccatatccaggtgatgtcacaaagtttggccgtggggactctgcatcccctgcacccgctaccacaccagctcagccacagcagagccaatcacagacccaccacacagcccagcagcccttcgtgaatcctgcactgccacctggctatagctacactggtcttccctactacacaggcatgcccagtgccttccagtatggccccaccatgtttgtccctccagcctcagccaagcaacatggggtgaacctcagcactcccacacctcccttccagcaggccagtggttatggccagcacggctacagtacaggttatgacgacctgacccaggggacagcagcaggagactactccaaaggtggctatgctggatcatcgcaggcaccaaacaagtctgcaggttctgggcctggcaaaggagtatcagtgtcttcaagcaccactggtctacctgatatgactggttctgtctacaataagacacagacttttgacaagcagggatttcatgcagggacgcctccacctttcagcctgccctcggtcttgggctccactgggcccctggcctcgggagcggcccctggctatgcacccccaccattcctacacatcttgccagcccaccagcagccccactcacagctgctgcaccaccaccttccgcaggatgcacagagtggctcgggtcagcgcagccagcccagctccctgcagcccaagtctcaagcctccaaacctgcctacggcaactctccatactggacaaactaaacccagaagagaggggtgggctggggcaaggcttatcctgggcaggagagaacacacgagcacgtatttgggagcccagtgccctttcctagaattcccgacatgtgtcagccatgcctctgtggggagtctgcctcccagactggctactgtatgtaatgtatttatgtatgtatttgtaaatgtgatagaagtctgggggggagttgggggatggcggcagatgttagccaggtctgccctccccattcaagccccttctccactgtttcttgataagcatttattccctacctgaatacatgtgtactatatagtctgctttgtctagtgttgacacttagagctgtatcttttatg

SEQ ID NO: 343828 - DNA, 3472 bp, Homo sapiens
cggcggcggcagcgggtcttgggtcctccgagagcagcagcgattttctattttgtacatacattattttgtatatactgtatatgatgacttcagtgagcagtgaccattgtcgaggtgctcgggaaaaaccacagatttcagcagcacaatcaacgcaaccacagaaacaagtggtacaggcaacagctgaacagatgcgtctcgctcaagtgatctttgataagaatgattcagattttgaagctaaagttaagcagcttatggaagtgacagggaaaaatcaggatgaatgcatagtggccctacatgattgtaatggagatgtgaacaaagctatcaatatattgctggaagggaattcagacacaacttcatgggagactgtagggtgtaagaaaaagaattttgcaaaagaaaattcagaaaacaaagagaatagagagaagaaaagcgagaaagaatcgagtcgtggacgtggaaacaacaaccggaaaggaagaggcggcaatcgtggcagagaatttagaggtgaagaaaatggaattgattgcaatcaagtggacaaaccttcagatcgtggcaagcgagcccggggtagaggatttggacgtggcagagggagaggggcaggaaggttctcaacccaaggcatggggacatttaatcctgcagactattcagattctacatctacagatgtgtgtgggacaaagctagtagtttgggaagctgctcagaatggtgcagatgagggaactgaactggcatcaaatactcacaacatagctcaggatctgtcaaacaaaagttcttatggactcaaaggggcttggaagaattctgtggaagagtggacaacagaagactggactgaagatctttctgaaacaaaggtcttcactgcctcatctgctccagcagagaatcacatcttacctgggcaaagcattgatctggtagccttgctccagaagcctgttcctcacagtcaagcctcagaagccaactcctttgaaacttcccaacagcagggctttggccaagcccttgtcttcacaaattcgcaacacaacaatcagatggcaccagggactggcagctccactgccgtcaactcctgttctcctcagagcctgtcatccgtccttggctcaggatttggagagcttgcaccaccaaaaatggcaaacatcaccagctcccagattttggaccagttgaaagctccgagtttgggccagtttaccaccaccccaagtacacagcagaatagtacaagtcaccctacaactactacttcttgggacctcaagcccccaacatcccagtcctcagtcctcagtcatcttgacttcaaatctcaacctgagccatccccagttcttagccagttgagccagcgacaacagcaccagagccaggcagtcactgttcctcctcctggtttggagtcctttccttcccaggcaaaacttcgagaatcaacacctggagacagtccctccactgtgaacaagcttttgcagcttcccagcacgaccattgaaaatatctctgtgtctgtccaccagccacagcccaaacacatcaaacttgctaagcggcggatacccccagcttctaagatcccagcttctgcagtggaaatgcctggttcagcagatgtcacaggattaaatgtgcagtttggggctctggaatttgggtcagaaccttctctctctgaatttggatcagctccaagcagtgaaaatagtaatcagattcccatcagcttgtattcgaagtctttaagtgagcctttgaatacatctttatcaatgaccagtgcagtacagaactccacatatacaacttccgtcattacctcctgcagtctgacaagctcatcactgaattctgctagtccagtagcaatgtcttcctcttatgaccagagttctgtgcataacaggatcccataccaaagccctgtgagttcatcagagtcagctccaggaaccatcatgaatggacatggtggtggtcgaagtcagcagacactagacactccaaagacaacaggccctccctctgccctcccgtctgtgagctccctgcccagcaccacctcctgcactgcacttctgccgtccacatcccagcacactggcgacctgactagcagccctctctctcagcttagcagttcgctctccagccaccagagcagcctctctgcacatgcagccctctcctcgagcacgtcacacacacatgccagtgtggagagcgcctcttcccaccagtcctcagccaccttctccacggcagcgacctccgtctcaagttccgcatcctcaggcgtcagcctgtccagtagcatgaacaccgcgaacagcctctgtctgggtgggacccccgcgagtgcatccagcagcagtagcagggccgcgcccttggtgacctcaggcaaagcacccccaaacttacctcagggggtgcctcccctgctgcacaaccagtacctcgtaggtcccggaggactgcttcctgcctacccgatctatggctatgacgagctccagatgctgcagtcacggctgccagtggactactatggaattccctttgctgcacccacagcgcttgccagccgagatgggagcctagctaataatccatatccaggtgatgtcacaaagtttggccgtggggactctgcatcccctgcacccgctaccacaccagctcagccacagcagagccaatcacagacccaccacacagcccagcagcccttcgtgaatcctgcactgccacctggctatagctacactggtcttccctactacacaggcatgcccagtgccttccagtatggccccaccatgtttgtccctccagcctcagccaagcaacatggggtgaacctcagcactcccacacctcccttccagcaggccagtggttatggccagcacggctacagtacaggttatgacgacctgacccaggggacagcagcaggagactactccaaaggtggctatgctggatcatcgcaggcaccaaacaagtctgcaggttctgggcctggcaaaggagtatcagtgtcttcaagcaccactggtctacctgatatgactggttctgtctacaataagacacagacttttgacaagcagggatttcatgcaggtgggtacatgttctagtatcttccttcttaaaattgttttggataccacagccccacccatgcaggtggggctgtggtatccaaaacaattttaagaaggaagatactagaacatgtttgtatgagaatggacctatagctaggatggaattgacagtggcaatgagagggagtacttacaggattccatttggagaagccccaggaagtgcaactcatgggcacaagtggtaactgccggtcttgcttcagatccagggcaccctattaccgcggcggtttactgcc

SEQ ID NO: 343829 - DNA, 813 bp, Homo sapiens
cggcggcggcagcgggtcttgggtcctccgagagcagcagcgattttctattttgtacatacattattttgtatatactgtatatgatgacttcagtgagcagtgaccattgtcgaggtgctcgggaaaaaccacagatttcagcagcacaatcaacgcaaccacagaaacaagtggtacaggcaacagctgaacagatgcgtctcgctcaagtgatctttgataagaatgattcagattttgaagctaaagttaagcagcttatggaagtgacagggaaaaatcaggatgaatgcatagtggccctacatgattgtaatggagatgtgaacaaagctatcaatatattgctggaagggaattcagacacaacttcatgggagactgtagggtgtaagaaaaagaattttgcaaaagaaaattcagaaaacaaagagaatagagagaagaaaagcgagaaagaatcgagtcgtggacgtggaaacaacaaccggaaaggaagaggcggcaatcgtggcagagaatttagaggtgaagaaaatggaattgattgcaatcaagtggacaaaccttcagatcgtggcaagcgagcccggggtagaggatttggacgtggcagagggagaggggcaggaaggttctcaacccaaggcatggggacatttaatcctgcagactattcagattctacatctacagatgtgtgtgggacaaagctagtagtttgggaagctgctcagaatggtgcagatgagggaactgatttggactgccgagggagacggccggaaggttctcatccccgcataagtg

SEQ ID NO: 343830 - DNA, 345 bp, Homo sapiens
agaccccaccagacttgcgactctgtgtgtttacctgttcctggtagctgcccctccctcagatccctcctcaggacacttgtgagcgctgatttgctggcctggtaaaagccttcatttctcttctccttccaggatgtgttgccaatggccaacaaagacatggagaaacctggacaactgtctaatgtctctgggttcttggaacgaggaagcctgtatatacaggggatgggggcaggtgacagcgtgtggttctgagagcacaagtacaggtggcccatcgcagccctggggagacatgggttggatggggagaaccagagccctgccacagaccccagg

SEQ ID NO: 343831 - DNA, 322 bp, Homo sapiens
tctatttgttgaagaccctgggttgtctgtcctacagaaggccccattctggatgtttgttgattatattcccttggggccgtgagacacattcctggttccctgtatttccaagaggtgtgttaatgttggatcatctctcttttgtgatgttgttagcaattactgcttgttggccaggtccattaattcatgggggactgcaaaattgtgacagtgaccaatgacggttcggcagtttgttgtatttttttagtgtgttgagttcctccccccgtcattatgaacccaaagatttttaatatatctgatatgttccaaa

SEQ ID NO: 343832 - DNA, 319 bp, Homo sapiens
atatggaaaaatagataactagcttcttagggaagtgtgtgtaaagttagtatggaattagggaaggatgttagtaatagagtgattaataccctgttttgcttctggcaggatgtttagatctgtatttcttgcatttctcgctgtattttgtatggttatggctattatgtgaaggagatattttgtatttgtctttacaaggtatcatgtttaccagtacttacccatgagctcatattagatttggggcttctgaagatagattctgtttttctcacctttttcctcctaatgcctggcccattggttagtagaa

SEQ ID NO: 343833 - DNA, 385 bp, Homo sapiens
tcagaaattaagctccaacttgcactggattcattgtataaaggaaaataaatcagaattgattctcaagtgtctttttaaatgtcaccattcattcatttgaaatgtatttccttggacttttcagcagaaggctgtatagcagttataatcgtttattcatccaagctatatagaggcctactatgtggcaggtaaagtgcttggaatatattattcaacaggtagtaaaggtctctgccctcttggactttatagtattcaagctgtgaaagagaatgagcagtacatgaaaaacaagtaaagtagaacatattttaagggtgttaagtatactttggaaagaaagggaaaaaacagagaatgggaataccaacggtaggac

SEQ ID NO: 343834 - DNA, 394 bp, Homo sapiens
atcaagtttaatttgactatatccagctaaacaattgattgaacttcacttgcttttctatgacaggttttttgttcttagtaaaagaccccagttttctcacttgtgaacagaaggggttagacttcatgacagctaaggttccttccgtctctaacaaaagtggcctgaagagaggcttctagactatactcacggtgggttcttgggacctcagagtcagctccatcacttaagtggctgtgtgattgagtggagacacctcaatctctttgtgcctcagtttcctcacctgtcgagtgtcaacatgatggcacctaaagctgttgagacttcagaaaggtaatgtgtgaaaagtgaaaagtgcctggcatccaggaagtactcaataaat

SEQ ID NO: 343835 - DNA, 556 bp, Homo sapiens
tcttgcagtttctgggatggcagaggcagaaggaaatctgtgcatagtggacctgcacagttgaaacccatgttgttcaagcatcaactgtactttaatcttctctagattacttataatccctaatacaatataaacactatgtaaatagttgttatactgtattatttagggaataatgacaaaaaaactacatgttcagtacgacacaatcatccattttttcccaaatattttcagtctatggttggttgaatccacagatgtggaacccatggatatggtgggctggttgtacagtaattttaaagacatggaatcttctgaagagaggaattcttctaattgtactttcctagccagtctcagaaagtagtgttaagactttcaatttaagaacacagtttaactggaaagcttaactggagacaacaaacagagctacttcttttaaaattctgttttgtctctggcagaaattcacatttgttccttactgtcattcttgtctttattactcatgttcccgcctgaaaatttccaaataaattgtgtc

SEQ ID NO: 343836 - DNA, 563 bp, Homo sapiens
cgcgcctgcagcgcgagaaaaggcagcaggcagcttggtacctccagggctgcggagtctctaaggaggctgcaagagcccagagtcgccgctgattggctcctcccgcggccttgggaccacccttctcaccaccgttgcctcccgcctacaccacccacctccttaatcaaagccaatgattgcatccttcccgctctattgtggctagtggaaagcaggggcccctgcgggattgcccaggcagtgcaacagtccctgtctggaactagttaaatccttcctccagattcagacgccagcattcctttcagaaaaacaaaagtgtatgttccctcccctccttcagatccgtaccccagcttttctttcatgaacaatgagttctcttatactcctccttcccatattaaactcttcccctttcccaccttccacacgcatatccctcaatctcaatagctccagggatccctacctttctgcactgctgttctaatgcaaataaatatattttttaaaaaaatttaaaaataaaaacaaagatataaatatgaagctcc

SEQ ID NO: 343837 - DNA, 341 bp, Homo sapiens
gcatctgccgttgtctgctgaactgggtcccaatgtctcatttcttcactgtgctcccctcctcaaactgggtcatgtggagaaatcagggccttgggggctcagccagaaataaagaccgagagatcctccagagagaaggtcctctaggagaggaagggtggcagaacagaagaggcccgggacttgcttcccaaatgtcagaaattaccaaaaagcttcacagttcagagagaacagtgtatttattttaggagccagagtagtctgacaggaagacttgctttcaaacatgtcctgttcacgtatgtacttagcagatggctatttgacacttcctg

SEQ ID NO: 343838 - DNA, 828 bp, Homo sapiens
ggcacccacagagggaccgtggggttggctgctgcccaccaccctagaggaaggcctcacggggagtggctactcttctggctgcccggggtggcctcactctcactccaggcatctgcctgccccatgggagctttcccttttctggggcagagaaggatgctgcccaggtgtgggcagtcaagcagggtgcagaggaacccagatcagagtctggggctgggtcccaagccctgttctctgtttcactcacaatatgagctggggcagtctttttcccctcctgtgtgtcagtttcctcatttgtacaagaggcatttggactggaacagggctgcttacactttgaatgaatcccctaggggtcttgttgaagagcaggctcagattcagtgggtctgggctggggcctaagattctcaatttctatcaggctccccagggagggcgattctgctggtccatggaccacactgagtagaaagggactgctaagctttgccattgtgtgactttggagtctaggagcagggagaggcctgatgccccttcttcaccatctcaagaaggcttcctgctatgaggaagattttagacacagatcagggagcaggggcttttatccctcttgaaaaaccagatgggaaaactcgaacttgcctgaaaaaggctgtgcctttctcagcagctgctgcccctgacgtgcattattttacagcagacatttcctccaaattcttgtgtctcatttcctctacaaggacacaataagtcccctttggtatctccctccagtgggggtccctctgcggccatcagaggaggcct

SEQ ID NO: 343839 - DNA, 381 bp, Homo sapiens
cactccagagataaaggagctattaagagctgagtgtgagtggaagtaatccactgcctgactgaaataacaggaaatgcctatacagctggctctccttatctgtggattcaactgtgtactgaaaattaaaatggccaaacatttttctatgtcattaccccctaaaaaataagtataactattatttacatgcacttacactatattcggtattataagtaatctagaaataaaaaataatgggaggatatacataggctatgcaaatatgccattttgttatcagagacttgagcatcctttgatttaggtatctaggtatgtcctggaagcaatccctgacagatactgatggaagactgaatttttttttttttt

SEQ ID NO: 343840 - DNA, 487 bp, Homo sapiens
atgttgagagaatttcacaaagtagtgctgtaggagaactaatctggaaactgtgaaaaaggatttgggggaaagggagaagaacagaaggaagggaggttaattcttgtaattatctaagcatgtgttggagacaggagcctggtaccagcatcagaaacaatgggacagatgtgggggatgatgagaatacagtcagctggtgggaggaggccatcttccaacaccaatgtctcaaaaagcgttttgttccattggctggtttggttggaaagtgcattatttatagatctaacatgaatttatctcacagtcaacagcaattcagaattgtgcattaatattttttaaagcaaagaaaacagtcaaagaaagcagaataattcagtggagagagcacctggtctcacagtcagaagcccacaaatctatttctggctttttgagcaatgttgctcatcaccttgcacaactgaatcagtctcag

SEQ ID NO: 343841 - DNA, 381 bp, Homo sapiens
tggaatatgagcagaagtgatatatgctacttgcaggccagccttaagacagtgggcaaatgtcctctatttcctcttccctcttcccactggactacacagtgacccatcattaaccaggcaggtgacaacaatgccccaggagatgccagaggagtgacttagaacatggtccctgaatgacccatcaggattagagttgacttgttgaactggacccattcacctcagaattatcatgtaggggaagacatacatctatatttagcctcttgttttgttcctctgtgcatatccaaaatgtattgtctttctaaatattagctctaattttggtatacctctagggagcttatgtttgctatgaatttgtaaagcaga

SEQ ID NO: 343842 - DNA, 494 bp, Homo sapiens
gtgtttttcttggtttaatttttaattaattaaaaaatagatggtaccatgtacattgtaccaattcaaaatgtataaaagagtatttggtgaaaagtaaacttccctcctgctttgtcctccaattttctgatgttcccacccagaaataacctctttttcaggttattttgtatccttctttccaggaattttctatgtaaacatataggtatgtattatatattaaattttgtttccccacccccccgacaaatggtagcatcctaaacatattgttctgtattttacttttttcccttcactaaacaaagaaaaatacattttactttttaaagttaatatatttggatgttttctagtcagtacatattgattggaaaatcaacaagaatgagaaaatatctacattatttttaaaggctacattgtattctgcgatacatacggtccataatttaacagtcctttataagttgttttttgcttcttgg

SEQ ID NO: 343843 - DNA, 365 bp, Homo sapiens
gtgtttttcttggtttaatttttaattaattaaaaaatagatggtaccatgtacattgtaccaattcaaaatgtataaaagagtatttggtgaaaagtaaacttccctcctgctttgtcctccaattttctgatgttcccacccagaaataacctctttttcaggttattttgtatccttctttccaggaattttctatgtaaacatataggtatgtattatatattaaattttgtttccccacccccccgacaaatggtagcatcctaaacatattgttctgtattttaactccgggccaggccctggtcaatgacggacacgtgcaacgccttgcatgcttgacagtatctgagctcttacgt

SEQ ID NO: 343844 - DNA, 307 bp, Homo sapiens
ctaaccttgcccaaagaaggaacagagaatcacctgggaggtgcccacaccctccacacagcatttccctggggtatggggaagcctaggattacaccatggctccagaaacgtgactttcatccagccaagccctgagctgtacaaactcttggacaaggggttaatttcaccttcagcaaaatataagctcctgggggtttctaaaagtgccaacacttccagatctttgcatatctctagaatgagttcctctccctcctccctgctcaccttccctgagccaaccccaatccttctccagcct

SEQ ID NO: 343845 - DNA, 3183 bp, Homo sapiens
gagtgttggggttggcggccacagctaagtccaacaccagcatgtcgctgcagagaatcgtgcgtgtgtccctggagcatcccaccagcgcggtgtgtgtggctggcgtggagaccctcgtggacatttatgggtcagtgcctgagggcacagaaatgtttgaggtctatgggacgcctggcgtggacatctacatctctcccaacatggagaggggccgggagcgtgcagacaccaggcggtggcgctttgacgcgactttggagatcatcgtggtcatgaactcccccagcaatgacctcaacgacagccatgttcagatttcctaccactccagccatgagcctctgcccctagcctatgcggtgctctacctcacctgtgttgacatctctctggattgcgacctgaactgtgagggaaggcaggacaggaactttgtagacaagcggcagtgggtctgggggcccagtgggtatggcggcatcttgctggtgaactgtgaccgtgatgatccgagctgtgatgtccaggacaattgtgaccagcacgtgcactgcctgcaagacctggaagacatgtctgtcatggtcctgcggacgcagggccctgcagccctctttgatgaccacaaacttgtcctccatacctccagctatgatgccaaacgggcacaggtcttccacatctgcggtcctgaggatgtgtgtgaggcctataggcatgtgctgggccaagataaggtgtcctatgaggtaccccgcttgcatggggatgaggagcgcttcttcgtggaaggcctgtccttccctgatgccggcttcacaggactcatctccttccatgtcactctgctggacgactccaacgaggatttctcggcatcccctatcttcactgacactgtggtgttccgagtggcaccctggatcatgacgcccagcactctgccacccctagaggtgtatgtgtgccgtgtgaggaacaacacgtgttttgtggatgcggtggcagagctggccaggaaggccggctgcaagctgaccatctgcccacaggccgagaaccgcaacgaccgctggatccaggatgagatggagctgggctacgttcaggcgccgcacaagaccctcccggtggtctttgactccccaaggaatggggaactgcaggatttcccttacaaaagaatcctgggtccagattttggttacgtgactcgggaaccacgcgacaggtctgtgagtggcctggactcctttgggaacctggaggtcagccctccagtggtggccaatgggaaagagtaccccctggggaggatcctcattgggggcaacctgcctgggtcaagtggccgcagggtcacccaggtggtgcgggacttcctccatgcccagaaggtgcagccccccgtggagctctttgtggactggttggccgtgggccatgtggatgagtttctgagctttgtccctgcccccgatgggaagggcttccggatgctcctggccagccctggggcctgcttcaagctcttccaggaaaagcagaagtgtggccacgggagggccctcctgttccagggggttgttgatgatgagcaggtcaagaccatctccatcaaccaggtgctctccaataaagacctcatcaactacaataagtttgtgcagagctgcatcgactggaaccgtgaggtgctgaagcgggagctgggcctggcagagtgtgacatcattgacatcccacagctcttcaagaccgagaggaaaaaagcaacggccttcttccctgacttggtgaacatgctggtgctggggaagcacctgggcatccccaagccctttgggcccatcatcaatggctgctgctgcctggaggagaaggtgcggtccctgctggagccgctgggcctccactgcaccttcattgatgacttcactccataccacatgctgcatggggaggtgcactgtggcaccaatgtgtgcagaaagcccttctctttcaagtggtggaacatggtgccctgagacagctcccacccaccatcctgtccccctggggcgggcattggccaggtggtggagacagagacaggccctgaacgataagcaccaagagacccaaggctccagatggaacactgagggtgaccgtccctctcagaagcttttccctggagtgtcatgcctcacctgcaacccatgtggttctcagacttgaatcttctcggcccccaaaaatgaaggacctcatttcttatagcctctcctgtgattcaacacaacccatggagatgtccccttctcactctgaaatcatccatttggggacaaatccacattggggtctagaaacatccacgtatctcatcagccatcttgtcctgtgcatcctaacagaggaaggatccatgattctgctttggtccaattgcttcctctctgcagaggaacaaccccaaaaccagaccactccacgcaggacaggcaggagagattcttcctaaagcctcccccataaaaagggagctgtggatccacttagatcagggcggaaccatctttcacccggccaagctcctgcccagatgttgaccctcacccagcgtgagctttcacatagtaggagcttctagatgcatgtggaagcaatgagagttgtcccttagccttataaactccccatgatctgacatgcagaaatccagccttgtccagaatcctcctggaattgcttggaggacgaaagtatgctgggggatgggtgggtactagggagactgggtacaagggtgaaaagtagttcccataatacacatggttgactatggtgatccaccttgtgatggttaatattaggtgtctggagaaggttgcttcattggccctgggacttctctctgcaggaggagagaacgctgcctctcctctggattggtctcaggctctctgttggcctttggtcagcgtttccacatcctgctctgctgcaggagagggggctaaggggctggatccaccaaggcagctcacagcgggaaaactctgggactgaaccactgaattcaggggatgggggtgggggcccggttctcgaggtgtgtgccagctacacgtgtgttctgtatgggtccagctgcgtttccatcactcgctaataaatcaacagaaacac

SEQ ID NO: 343846 - DNA, 535 bp, Homo sapiens
agtagagacagggtttcactatgttagccaggctggtcttgaactcctaacttcaggtgatccaccgccttcggtctcccaaagtgctgtgattacagacatgagccaccgtgcccagcctgtagatgtatttttgtaggaaagatacctagcagtggaattgctgggcttggggtaaacattactttgttggatgctgccaaattgtgctccaaaaaggtatgagcgccagtcttagaaaggaagaccctttcccccagccgtggcccccactgtgtattacctgtcctctcctttgccagtggaggtgaaaggagggagttgttggaggacttggaatttttggtgaggctgcagacctcttcctgtgtccctcatactcatgctccctgggcccacagggagtcacagccaccccgtccctccccttccaggtcctgaggatgtgtgtgaggcctataggcatgtgctgggccaagataaggtgtcctatgaggtaccccgcttgcatggggatgaggagcgcttcttcgtg

SEQ ID NO: 343847 - DNA, 375 bp, Homo sapiens
acgttgacacttcaggtaaattgtgatgctccctcaagttttggttcttgttttttgttgtttgttttttagtttttaagagacatggtctttctctgttgcccatgctgcagtgcagtggtgtgaccaagactcactgtagcctcgaactcctgggctgaaagccatcctcccaccttggcctcccaagtagctgggaccacagggttgcaccatcttgcctggcaataatttttcatagagacagggtcttactatgttgcctatctctacaaaaaatagagacgggcaacaagctggttttgaactcctggcctcaagggattcccccaccttggcctcctaaagtgttgggattacaggcatgagccacca

SEQ ID NO: 343848 - DNA, 412 bp, Homo sapiens
  misc_feature (21)..(21): n is a, c, g, or t
aagaaaaaagaaaaaaaaagnaaaagagaaaaggagaaaaaaaaaaaaaatttttggctttcttagttgagctgtcttcctgaggttgtttggagccgctgcgtcatggataaataactccctaaagccagtcccaacaagcttgcactgaacatcaagaagcctgacaagtccttcaaatgcaagaagcccacccaaaatgtgctggtctttttaatcaacagacaactgggcaggcacagaagcgacatcaacctgtcaaggtggatatggatgctgtcataaagcaactccagggtgaacatggccttggacaaagagtcatgtggcttatgtgctgaggcctgcccagaattctgagatattaattataattagaacaataaactcctcccatgtttgagctattaaa

SEQ ID NO: 343849 - DNA, 653 bp, Homo sapiens
cctaggtgtgtctacagggtgctgccaaaggagattagcatttgaataagtgggctggggaaggcagacccacccttaatctggtgggcgcaatctaatcggctgccagcaaatataaagcaggcagagaaatgtgaactattgagacgggcctggcctcctagtctacatctttctcccctgctggatgcttcctgccctcgaacatcagactccaggttcttcaattttgggactcagactgactctccttgctcctcagcttgcagacagcctattgtgggaccttgtgatcgtgctttcttagttgagctgtcttcctgaggttgtttggagccgctgcgtcatggataaataactccctaaagccagtcccaacaagcttgcactgaacatcaagaagcctgacaagtccttcaaatgcaagaagcccacccaaaatgtgctggtctttttaatcaacagacaactgggcaggcacagaagcgacatcaacctgtcaaggtggatatggatgctgtcataaagcaactccagggtgaacatggccttggacaaagagtcatgtggcttatgtgctgaggcctgcccagaattctgagatattaattataattagaacaataaactcctcccatgtttgagctattaaa

SEQ ID NO: 343850 - DNA, 382 bp, Homo sapiens
aaaaagcaatctgagtggcctgacaggctttcttagttgagctgtcttcctgaggttgtttggagccgctgcgtcatggataaataactccctaaagccagtcccaacaagcttgcactgaacatcaagaagcctgacaagtccttcaaatgcaagaagcccacccaaaatgtgctggtctttttaatcaacagacaactgggcaggcacagaagcgacatcaacctgtcaaggtggatatggatgctgtcataaagcaactccagggtgaacatggccttggacaaagagtcatgtggcttatgtgctgaggcctgcccagaattctgagatattaattataattagaacaataaactcctcccatgtttgagctattaaa

SEQ ID NO: 343851 - DNA, 408 bp, Homo sapiens
tatatgtaattattcaaaacgggaggaaaaaaaaagaaccttgctgtgtacagctttcttagttgagctgtcttcctgaggttgtttggagccgctgcgtcatggataaataactccctaaagccagtcccaacaagcttgcactgaacatcaagaagcctgacaagtccttcaaatgcaagaagcccacccaaaatgtgctggtctttttaatcaacagacaactgggcaggcacagaagcgacatcaacctgtcaaggtggatatggatgctgtcataaagcaactccagggtgaacatggccttggacaaagagtcatgtggcttatgtgctgaggcctgcccagaattctgagatattaattataattagaacaataaactcctcccatgtttgagctattaaa

SEQ ID NO: 343852 - DNA, 401 bp, Homo sapiens
atagatcttcagtaataaataatcacaaaacaaaatagccaacctgctttgttaccagagctgacttttctgagttgtttggagccgctgcgtcatggataaataactccctaaagccagtcccaacaagcttgcactgaacatcaagaagcctgacaagtccttcaaatgcaagaagcccacccaaaatgtgctggtctttttaatcaacagacaactgggcaggcacagaagcgacatcaacctgtcaaggtggatatggatgctgtcataaagcaactccagggtgaacatggccttggacaaagagtcatgtggcttatgtgctgaggcctgcccagaattctgagatattaattataattagaacaataaactcctcccatgtttgagctattaaa

SEQ ID NO: 343853 - DNA, 240 bp, Homo sapiens
tcaggacatgagtgtaattgttaatgtcatcacaagacctttctacaagtgtcatgtgacatacatcttagcccagcatctgagttatttgtcttttcctgggaccagtccacagtgccatatcaccgggcccatacccttggtaatgtgattctattctgctttgataaagcgcacagtggtcattgtgacattgcttggtgttgcacccaggtggtgtgagtcggctcttctgccttg

SEQ ID NO: 343854 - DNA, 358 bp, Homo sapiens
ctgtgagatcaccgcctggcagggacgccagcacgggctcccagccacagggcagctcccaccctgcgaactccagctcttcccaggccgctccagaggccaggctgcacaaacaccttggctagtctccccacctggcacaggccctgttcactccaaccactgccttctctgagcacacaccaagttggagcccacagccaagcagcgggcggccacgggggattcctgcctcctgagtcctcaactctcttggcccggagctcacaccggcatttcagattttctccttccccctgttacccccgccttgccaaccacctccctgtggacctaaagccaccaccttccgggcaca

SEQ ID NO: 343855 - DNA, 272 bp, Homo sapiens
tccagcctgggagttacagcaagactctgtcttaaaaaaaaaagacaagatttgagagttctgagcattacaggcagtacttgaaatcacatgcagatgagacagctaaggagagtgaagatagaaaaggaccaaagatacaaaataaagggaagagaaaagagataacaaagatgactaaggagtggtcagaatataaggaggaaaaccagaagagaaaggtatcacacaaatgaaagaaaaatcaagttaatctcaatttcaaggacagg

SEQ ID NO: 343856 - DNA, 122 bp, Homo sapiens
cttttcacagccacttcacttctgccacagggattggtttagggctgagcacatgacataaattaagtcatcaggaggcagactcaagacatctgttccagcattgtaaagagagacgctct

SEQ ID NO: 343857 - DNA, 262 bp, Homo sapiens
ctttatagtaaaccagtaaacaaaagtgcagtcttgtgccacataatgtgtttttgtcaaagagggactatgtatatgactggtcccctgagattataatactatatttttactgtaccttttctatgtttagatgtgttttgatacgcaaataccattgtgttacagttgcctacagtattcagtacagtaacgtgctatacaggtttgtgctctaggggcagtaggttatgccctgttgtctaagtataccatatagcct

SEQ ID NO: 343858 - DNA, 485 bp, Homo sapiens
actcagagacccagtgccattgttggaatcaacttgctcttgttctcggatttccactttctgtgccacctgggtaccctcatggacaattggcatcattctttcccagtccagttccattatgggaacaagtacttagggaaaacagggcaacccagtagtagaagccctggtttgggaatcagacaatctgaatacaggaccttacattgccgtgaactctgtcactgagcaggcagaacctgattgagtggtatggctttggtaggcgctttgcagaagtttattagtggattgactaggacaaattctctcttatagttccttcagttgaaaatagagatgacttttgtacttcattaccataaagctatgctaaaaataatacattaatgaaagttgtttcttggaaaataagaaatggaaatataatgtattaaatggagctggtttgtaaaatatggtgtggttgagacagtatctca

SEQ ID NO: 343859 - DNA, 622 bp, Homo sapiens
ttaaaattcctttctaccattcacaagcgttttcaaataggaaattaatgaagactaaataaatgtatcccctctgcaaagagttacgagaaaatttctgtaagcgtcacagtggcaaatgttagttttaattaatgaataaattaagttctgtttaggaaaaaaaaaaagaaaaagagataaaagaaagcacactatttgacccctcccgctaaattcattccaactccaattagggcatcctggtattgaccaagatgaagaaagaaatgaccactgctgggaagctgcctctctgaaaagttcagggatttagggtacactgaacatggccaaaaggcaaattcacaagcacgtgagaacatgtgatgaaaatctatcagcacagtaccttagatctctgagactaactcagtgaagacgctaaacatcagacggcactgtaagcaagcaaaaggcaataccaagattatcccaaagatatctctagcaacccacaagttacaagaacacaagttccttaaaaaggggcgtggaaacagctgtgttataaactttctggaaaccaacttggctatacatatcaatagtgttaaaatctggcatattttatctccaacat

SEQ ID NO: 343860 - DNA, 588 bp, Homo sapiens
atcctaaaaaccctattcttttgtaagacaagaataagtttcttagctacctctttgagagaggaatttccttgaagttataattagaaatgatactgttacagtatcatggaccccaatcccttttgatatgggctgtcctggacaaatgccagcacatgtggttatccaatttgtcccataatttcttgtagcaagtaacaacaataaactttttttaaaaaaaattagaagaaattgctaattactaaactctatcctgtctatatcagaaacatactaagaaattcatatgacacttttattttggtattcttaaaatacttaaaaacgtacacaaattcatgttttaatcttcattccttcttctttcactccattgagtttgatgctggcaatattaggaaagggagaatctgctaataatctaggctaataatctggtaatgattttcaatcaattatcaaattctgttcacagtaaatatttgtaagaggataggaatttagacagcagatgtttcttcatattaaaagtaaaatctgggccaggtgtggtggctcacgcctgtaatcccagcactttgg

SEQ ID NO: 343861 - DNA, 514 bp, Homo sapiens
ttctttaatcctcataatagccctctcctgcagagctgcttttatgcccatcttagagattaggaaatcgaggcaccaagaaggctaagtaatgtgtccagtttgtagctactaaatggcccacttgagatttaaaccaaggcaagcctggttccagagtgtgtactcagggtggatgcttactaaataataacatggtagcagtgactgtgtttagtagggggactgtgagctatgtgtttactttgctgttaatttctatttttctatgagaggccgaggtggacaggtcacttgaggtcaggagttcgagaccagcctggccaacatggcaaaaacccatctctactaaaaatacaaaaattagtcttgtgtgatggcaggcacctgtaatcccagctactcaggaggctgaggcaggagaatcgcttgaacccaggaggtgggggtgcagtgagctgagatcacgccactgcactccagcctggacaacagagtgagactctgtctcaaa

SEQ ID NO: 343862 - DNA, 362 bp, Homo sapiens
gagctatttcccctgtcaggattgtgtttttaaagtagtactgttttgagtaatttacttgatgccaaccctgtcccttgacagtgttattcacttcaacacagctgcaactctctaaaagagacatcagtattgcccaagttcctatgataaactgggctctgaaatgttcagtaactcgcccaagttctcacacttcgttaagtagcagaaccaggattaaccactagctataacaccaaagtccatgtacttttcattaagccatgatgcctctgaaaattagccagatctgagtttttgctttcatggaagaatagagaatcagcctggcgtggtggcttacgcctataatcccagca

SEQ ID NO: 343863 - DNA, 603 bp, Homo sapiens
ggttatttttttggttcacataaaaatattttcccaacgaattctactgttggaactattcaggccttacccaaaatatttctctcttcattttctaccaatctcaaacagtaaagaataaaagcgttctacggcctggaagttggcaccaacataagaacatttttaatacttactgtcctttcccacttttggtggggaagtggtaacccttaaacatccatccagaactatttcttttattaatgtagtttgctactctctgaaccctcagctgtaccactgctgtacttaattatcaccttcagcaaacacaaactatcactgatttttaatataaatttctaagcagtaaacaacagatccttataaaattcaaatcccgacaactaagcaaatggtataatatcaccctatactgtaaccaaactttatctccaatgggtaaacccattttacttacatatggattttgaattaaacccagaaagcatatcatctcttgagctctgaaagcagtgtttaaccattacttttccaactcatagtctcttctgataaacataaatatctcctgcttacatttaatattgttacccaaat

SEQ ID NO: 343864 - DNA, 232 bp, Homo sapiens
gacatcactcaatacttttacccagagccaaataaataggtaagtcaggcaatgtattagtccattcttgcatcactataaagaaatacccaagactgtataatttataaagaaaagagttttaattggctcacagttctgcaggctgttcaggaagcataggacttctggggaggccttcggaaactttcagttatgacggaaggtgaaggggaagcaggcatatcttaca

SEQ ID NO: 343865 - DNA, 311 bp, Homo sapiens
gtctttgccaggttttggtatcagaatgttgctagccttatagaatgagctagggtagaatctcttcttaattttttggaataattttatattttattaatatatgtctggtagaacttgactgtgaatcggtctggtccaaggcttttcctgattggtagatttttttttattactgattttatgtcagaactcattattgatctgttcagggtttcagtttcttcttggttcagtcttgggaggttgtgtgtttctgagaatttatccatttcttcttccaggctttccagtttgtatacgtagtggtg

SEQ ID NO: 343866 - DNA, 1453 bp, Homo sapiens
tgacatgggcagagtttctcttgcccttaaagtcttactttccacttctaaataccttccaagatgttttcctccacaaacacaatatcttccttaaaagatagaccctgcatcagttgttaagctaacacatctttctcctcactacaaatgtatcactattgaatttctctccacaagtgtgaagatggctggagtagaaattctggcattgcttctcatcaccagaaggaaaaattcagagaaacagcccgaccacccaccctgacaaatgcctgaggcccacatgcagcctgcaaaactgcaaacatcactgcccaccacagaccacggaagcaagaagcctgtttcctgttacttgccaccactcagcaatgcccaccccatgtgtatagaggtccagaatgctcaaaattgttcttctgctgctgcaacattggagccttccatcatctcagacacatgcttttataaaccaataacaaaggatcaactttcttctaggtctgaattgaatactgtgaggctaaagtgtcttaactcattgagggggtggaaaatattaaaccaactaagccttacctaattacaatgccctgctgctgctcatctccctttattcgtttgtactcatactcaaaagaggttgtgtttttttcccttcattcaataacgattttccttgattcttagataagtccattccataatgtactccttaactgttctgaatttctttcagagaaaaactggaaaagacattaaatcatgttgaaatatttgactgactttcatctaggaaaaaatataaagttaaatctctacactaaaatataaacaaaataaaaagaaatttcagtaagaccaaaacatttacttttaaaaacctatatcatgttatatgtataactgaggaatgtaatcataattttgatttgtagaactgaagacaatatcaagtaaccctcaaaatgtaaattcaagaaacaaggtagttacgttagcctgcattaaaataaaaatatctgtgtgacaatatatgctgtagagcaaattaaaaaacaagtgaaaaggttgggtaaatatttgcaatacatattgatacggtttggatttgtgtccctgcccaaatcttatggcaaattggaggaggggcctggtgggaggtgattggatcataggagcggatttcccccttgctgttctcatgatagtgagtgagttctcacaatatctgatggattaaaagtgtgtgcacctcccctcttgcactttctctccagtcaccatgtgaagttccttgcttccccttctgccatgattgtaagtttcctgaggcctcccagtcatgcttcttattaagcctgtggaattgtgagtcaattaagcctttttattcataaattatccagtctcaggtagatctttatagagtgtgaaaacagactaatgc

SEQ ID NO: 343867 - DNA, 1276 bp, Homo sapiens
cgattatccttcatcatccaaccataacacgcatcaatcgaagagaatatacctaaacagagaacagaaacagcccgaccacccaccctgacaaatgcctgaggcccacatgcagcctgcaaaactgcaaacatcactgcccaccacagaccacggaagcaagaagcctgtttcctgttacttgccaccactcagcaatgcccaccccatgtgtatagaggtccagaatgctcaaaattgttcttctgctgctgcaacattggagccttccatcatctcagacacatgcttttataaaccaataacaaaggatcaactttcttctaggtctgaattgaatactgtgaggctaaagtgtcttaactcattgagggggtggaaaatattaaaccaactaagccttacctaattacaatgccctgctgctgctcatctccctttattcgtttgtactcatactcaaaagaggttgtgtttttttcccttcattcaataacgattttccttgattcttagataagtccattccataatgtactccttaactgttctgaatttctttcagagaaaaactggaaaagacattaaatcatgttgaaatatttgactgactttcatctaggaaaaaatataaagttaaatctctacactaaaatataaacaaaataaaaagaaatttcagtaagaccaaaacatttacttttaaaaacctatatcatgttatatgtataactgaggaatgtaatcataattttgatttgtagaactgaagacaatatcaagtaaccctcaaaatgtaaattcaagaaacaaggtagttacgttagcctgcattaaaataaaaatatctgtgtgacaatatatgctgtagagcaaattaaaaaacaagtgaaaaggttgggtaaatatttgcaatacatattgatacggtttggatttgtgtccctgcccaaatcttatggcaaattggaggaggggcctggtgggaggtgattggatcataggagcggatttcccccttgctgttctcatgatagtgagtgagttctcacaatatctgatggattaaaagtgtgtgcacctcccctcttgcactttctctccagtcaccatgtgaagttccttgcttccccttctgccatgattgtaagtttcctgaggcctcccagtcatgcttcttattaagcctgtggaattgtgagtcaattaagcctttttattcataaattatccagtctcaggtagatctttatagagtgtgaaaacagactaatgc

SEQ ID NO: 343868 - DNA, 1378 bp, Homo sapiens
  misc_feature (48)..(48): n is a, c, g, or t
ctgctttgtcccaaggatgaacacgtggcagccgaaaaaaaagttcanaggatctcaccctgtcgttcggctggagtgaagtggcgcgatctcagctcactgcaacctccgcctcctgggttcaagtaattctcctgcctcagcctcccaagtagttgggattacagagaaacagcccgaccacccaccctgacaaatgcctgaggcccacatgcagcctgcaaaactgcaaacatcactgcccaccacagaccacggaagcaagaagcctgtttcctgttacttgccaccactcagcaatgcccaccccatgtgtatagaggtccagaatgctcaaaattgttcttctgctgctgcaacattggagccttccatcatctcagacacatgcttttataaaccaataacaaaggatcaactttcttctaggtctgaattgaatactgtgaggctaaagtgtcttaactcattgagggggtggaaaatattaaaccaactaagccttacctaattacaatgccctgctgctgctcatctccctttattcgtttgtactcatactcaaaagaggttgtgtttttttcccttcattcaataacgattttccttgattcttagataagtccattccataatgtactccttaactgttctgaatttctttcagagaaaaactggaaaagacattaaatcatgttgaaatatttgactgactttcatctaggaaaaaatataaagttaaatctctacactaaaatataaacaaaataaaaagaaatttcagtaagaccaaaacatttacttttaaaaacctatatcatgttatatgtataactgaggaatgtaatcataattttgatttgtagaactgaagacaatatcaagtaaccctcaaaatgtaaattcaagaaacaaggtagttacgttagcctgcattaaaataaaaatatctgtgtgacaatatatgctgtagagcaaattaaaaaacaagtgaaaaggttgggtaaatatttgcaatacatattgatacggtttggatttgtgtccctgcccaaatcttatggcaaattggaggaggggcctggtgggaggtgattggatcataggagcggatttcccccttgctgttctcatgatagtgagtgagttctcacaatatctgatggattaaaagtgtgtgcacctcccctcttgcactttctctccagtcaccatgtgaagttccttgcttccccttctgccatgattgtaagtttcctgaggcctcccagtcatgcttcttattaagcctgtggaattgtgagtcaattaagcctttttattcataaattatccagtctcaggtagatctttatagagtgtgaaaacagactaatgc

SEQ ID NO: 343869 - DNA, 195 bp, Homo sapiens
cctatctatctatctatccatttctatcatccctatcatctatctctatacactattgattctgtttctctggatcaatcaatcaatcaatcatctatatatccatctatctatacactatttattctgtttctctggatctatctacctatctatctatcatctctatacactattgattctgtttctctgggt

SEQ ID NO: 343870 - DNA, 427 bp, Homo sapiens
cctagccccaaggtagccccttttctattggcacagctgctgacttcccccatgcaagcttccagcttgcttacgtatgtttgcagatcgatttttcgggctgctctttgttagaacaaaacgatattttgggcagctttttgttagaagggaagctctgcagaggagtttttgcccttactgtctgcctaaatagtttatttttacctcctgtataagttggatgtggcaagagtgacccaattgataagatgaacttttatcacggcagaattttaaattcactttacgtgcattctgcaagtaactagaaaagatactttttatttgcaaattataaggtgttttgtttgtttgtttgttgttatttgagacaatctcactgtgtcacccaggctggagtgcagtggtgcgatctcgactcact

SEQ ID NO: 343871 - DNA, 128 bp, Homo sapiens
atccaatttccacacacacacacacgcacgcacgcatcagaaaaccttgctgaaaactcatgtatctagcagaaattttttctttcaggcagcaataaatatgctttttttttttttttttttttttt

SEQ ID NO: 343872 - DNA, 382 bp, Homo sapiens
tgagccaagatcggaccactgcactccagcctgagtgacagagcaagactctgtctcaagaaaaaaaaaaaaattactgtattgcactgaagactatgaagaattcatgagaaccacaagagatcactttttattgccatacacaatttactgagagatgaactgctcctgggcatgtgtcacatggcattttacatagacactcccaacacttgaggcaccacaatagcaacaggaggtggctacaaagttattatagtagtacagaatgtactacagttagttttaaatagttatgatttaataatatgtctttacatgactggagtgtgaacggcaccatgtaaggtctgtatgtgtgtgcatagtattacatagtgtg

SEQ ID NO: 343873 - DNA, 714 bp, Homo sapiens
aggaaaaatgataagaacaaataaaataacattacatctttctttctaatatttataaatccaatttagttttacagcttaatagttggcctttccagattaaatttcagtgacagtaaaataaagatgatagtggtggattttttgtcattcagaggtataatttttatacagtgcaattaacagatctcaagtgtacagttcagtgagtttggcaaacccatactcgacataaaccacgtgtcagtcaagatatagaacatcaagaagagggtatgttctgctgttgcttgttccattcagctggaagacagctgttgcaggttctgttgccataggacatcccccaatcagaggaatatcagagtttcataaaaggcctgcagagccaatggaaccagatgtgacaaccagccctggcctttggcatccaccatacttcttccccctcctgaactcctgacctgatggggtgcttgttctttgggtgggtttatagatgacttcttggacaaagggttgactggcacagaggcggcaaagaggtagtgatcaatggagttctgtgggttcactccttattctccctcttccaaactctgtagtatgatgagaactagcgtgtgtgttttgaccctgcctgtgcatacattacagcatagggcagctgatattcccagggagatttaaagtcataggtctaaagaatagata

SEQ ID NO: 343874 - DNA, 366 bp, Homo sapiens
taatataatcttagcctagttagaattaacctatgtatatacattgtgtacttaataaagttggccctgagaatgttcactaattcagaattggccttttccctcaattaatttgaaatctgttctttatttaagcaagtttttgcaccagtgtgtaaccttaaacacatttaagacatataagttctttagaaaaactatatggccaatatttaattgaaacaaaatatacttggggtaggtgggaattttcatgtggaaacttggacttttcataggaaggttatagggtggttgatccctgatggctggttaagaagacctgaaaatatcttcgcattcccacttcctactcaaaactgcact

SEQ ID NO: 343875 - DNA, 230 bp, Homo sapiens
atttaagctttttgggcacttcccatgggaagctgtccctaccaaagtggccataggctgcagtcctctgataaattggcttcttcagatccagatcccttggaatatacaagttccgtaacttatatatgtacgcattaaattcaaaataatagcaaaacaattcagcaagactcattttcaagtagctctgagcaaactgagttctctgggcatatgctagcgaagga

SEQ ID NO: 343876 - DNA, 313 bp, Homo sapiens
tgctgggattataggcgtgagccaccacgcccagcctctccgctgtttctaagatacagaaatttcaccatattagctttcttgaccactttatataaaataggaaccccttccctagcttgcctaagtatttctatctcccttatactgtttatttttcttcaaagaacttattgccatctgacatattatatacttctttctatatttatttacatgtcctttcccactatcatgtaagatcattgagtgtggggaatttttctatgagaaaatggggcatatagttagtgttttagaagtattgaatgga

SEQ ID NO: 343877 - DNA, 865 bp, Homo sapiens
cccagtagagttataaaatagaaacttcattttttcctcatgactgcttctgtaaacccactagctcagtcttttctccctatcctgaatggactcttgcagggaagtcccataaattgttgtttttttttccagtcactcaggtaataagtcctttggtcactttaagttacagacattaattttagtaattaagatgtctgtgtcattagctatacattttctttaaagctaagctcagacttgtttaagtccacaatgggaaaggggtttgatggcagagactgctaggtgtctaccaaagattcttgctctttgaagatatgttgtcaagatgtggcaatccagccagggacatttccctactcccagcatctctgtgagaacatatgactaagtcgtaggcggtgaaatgtgggcataggaatccaggcttgccccataaacatttcttgcatgatcctccattctcttctcccagctgctggttggacggtcgtatccaggataagtttggaagccaccgaagatggcaaagattgtcagtctggttctttgaatgaccgtgaggactaagtcttcctttcagtaactccactctgcccctagctaattggactttatatgagcactttcttctcttcttcccccgactgtccatctgctcttccaccaaggtgttagtggagagttgaccttgtgtctgaggatctctgcctgccgttttcttaatgtaggcccgtggttcttaaagtgtgtggtcctggaccagcagcattggtatcacttggggacttactagaaataaaagttttagtataatccgtaggttcagaaaaataaaaaataaatgagggttctctgg

SEQ ID NO: 343878 - DNA, 466 bp, Homo sapiens
gtcacacttgcccagtggggccaaagccacctctcaggggctggtggttcagggaggattcaggcatttactcagaggcaccactcagaaaattggcattaagaaaatgactactagaaggtcagcctctggatactcatagaagttctggaaaagctgtgtgtttagaagacagccgagcccagcacggccccaggacgcattaccaatgggtcaggggtgggccttcagaggcgagccgctgacctcccttaggagagggaacagatggcatttcacagctgctgaggtcaggctccaggaggagaagtcagtctcgcagccgtggaaatgctgagactggacaggtgtgatggttcttcccaggcacgagactcattcgttcttaatgggctgcttagtgaatcttatgacttcagtaatttcttcctgggctccacattcactggactgcactgaaatggag

SEQ ID NO: 343879 - DNA, 526 bp, Homo sapiens
ctgagaactgcttgaggtcacggataatgcttctgtctttttatagaaatcacttccccacccagaccttagtaatgtagacagtagacataaaacatatcattacatacatgaatgggcaaatgataacctgtatcatagaatgtacaatacatctgccctggcatgtaacacttttaaagaaaactaaacattgacatccaacatattaaatgcaacttaggaaacaccaatgatgcatttttaaagacttaatcacagtacgatgatttaatgaaaaacaagaagagaatgttatattttatcgtttcgtatctcagcagtttggcactggattcagttgataggaacagcaacatggcaaaagttgaaaggaaactgtttggcctgggtgattttttgtctttcaggcagagtaatgagtaaatacaaaatcacctctggtgagacacagtccactggtgtttatgtcatgtcatttcattaactgacaaacagaattactgcctctcccttccccaaacct

SEQ ID NO: 343880 - DNA, 334 bp, Homo sapiens
gtagagacggggttttaccatgttgcctaggctagtctgaaactcctggactcaagcaattcgctcactttggcctcacagagtgctaggattataggggtaagccacagtgcccggccagtaaaaataatctacatacaaatggcttcaaatcttggtaataagaagagtaaatttgaataatacttcatagataaccaagtactctgacacagatcatttattcacttattgccgtgacaggcccatgtggcagacattatttttagtcccccaatttggactaaaggaaatgatgatcaaatgatttgtccaaggtcacacaacagagtag

SEQ ID NO: 343881 - DNA, 582 bp, Homo sapiens
aatttttctggcacttcctgggttgtcttcctttctcatatttctacaactttacacctgttctttcctcctctgtagggttatttcaaatgtcactaaaagtaacagctcttctgctatcaccagggatgctgcattttctgtaggattaaatccctaatcttaatcaaaaagtgatgacacatttcataatgaaatgtgacctgtctttcctcaattctagcaccaccaccacctcactgcctgctgccttgcacaccctacatatcacactccgtgactgtacttaagagaacacattctggctgggcacggtggctcacgcctgcaatcctagcactttgggaggctgatgcaggtggattgactgagctcaggagttcaagaccatcctgggcaacatggtgaaactctgtctctattaaaatacaaaaaattaactgggcatggctgtttgtccctgcagtcccagctactcagaaggctgagtaggagaactgcctgaacccaggagatggaggttgcagtgagccgagattgcaccactgcactccaccctgggcaacagagggagactccgtc

SEQ ID NO: 343882 - DNA, 528 bp, Homo sapiens
aatttttctggcacttcctgggttgtcttcctttctcatatttctacaactttacacctgttctttcctcctctgtagggttatttcaaatgtcactaaaagtaacagctcttctgctatcaccagggatgctgcattttctgtaggattaaatccctaatcttaatcacaccaccaccacctcactgcctgctgccttgcacaccctacatatcacactccgtgactgtacttaagagaacacattctggctgggcacggtggctcacgcctgcaatcctagcactttgggaggctgatgcaggtggattgactgagctcaggagttcaagaccatcctgggcaacatggtgaaactctgtctctattaaaatacaaaaaattaactgggcatggctgtttgtccctgcagtcccagctactcagaaggctgagtaggagaactgcctgaacccaggagatggaggttgcagtgagccgagattgcaccactgcactccaccctgggcaacagagggagactccgtc

SEQ ID NO: 343883 - DNA, 393 bp, Homo sapiens
ggtgttattacctcccacagaatttttctggcacttcctgggttgtcttcctttctcatatttctacaactttacacctgttctttcctcctctgtagggttatttcaaatgtcactaaaagtaacagctcttctgctatcaccagggatgctgcattttctgtaggattaaatccctaatcttaatcaaaaagtgatgacacatttcataatgaaatgtgacctgtctttcctcaattctagcaccaccaccacctcactgcctgctgccttgcacaccctacatatcacactccgtgactgtacttaagagaacacattctggctgggcacggtggctcacgcctgcaatcctagcactttgggaggctgatgcaggtggattgactgagc

SEQ ID NO: 343884 - DNA, 500 bp, Homo sapiens
atatggggtcccactgtgttgcccaggcttgcctcaaactcctggactcaagcaatccttctgccttggcctcccaaagtgctgtgactataggtgtgagccacttcacccagccttccctttttatcttgaataatattccttgccttaaattctattttgtttcatattggttgcatgttatacattttccattcttttacttttctatattcttctatataaggaaaatctcttgaaagtagcatattttttttttttccaatctggcgatctttagcttttaattagagtacttactttgctgacatttcatgtaattacaaatatatttgggtttaaatctatcatcttactacctttttttaaattatactttaagttctggggtacatgtgcagaatgtgcaggttacataggtatacataggtatacacgtgccatggtgatttgctgcacccatctaccctaatacctatgtcatctacattaggtatttc

SEQ ID NO: 343885 - DNA, 150 bp, Homo sapiens
aaaaaaaaaaaaaaaaaagtgatttagtcttataaaggggatcatttcacgacctcaaagtctgagtcactttacatggtaattaaaatgaacccattgcactgaatcttccatggtagaaaacagtaatatggtatctcccctattgtt

SEQ ID NO: 343886 - DNA, 990 bp, Homo sapiens
cacaatgagacaaagatgtgattgacatgaagaccccacagctgataacaggcaaaaaacctgatagttattttaatataagtaaatgatacaatttactacatatacatggctatctagaacaaagttagagacaaagttaggatgtggtgggtgagtttccccagcctccatctatagtggggtgcccagccactggtggtattgcctaattggagtgaggattctagccagtctttctgaaatgccttgcattcatcctcacagagttctagccctttccactatgcctgcccactagctgtatataattaggaacactccagaacagtggtgctgccttgtagactgagtgaactgggatttggtttcccagtcattttctcagccttttaccgtgtttaggtaccaggcctgtttgtaaagtagtattgcttaggccagcaaaaattaggggcaaaaagagatgccttgagcttggataatttagaatggagttgcttctccttaagtggccacaaattaatactgtttttcactgattaaggtttttgtaggacatatatttagggtgtcatagtctgagggatacgaagaacttaaagatggcactaaattagaaaatgaaagtggttaaattggaaatttgcagttatttgagaatgggtctttcaaaggtgttaagtctgaggtcatttgttttatatgctttagtttatcagtttgtcagagattgattatttcttttatcattcctgggcagaataaggaatatttggaatatagatgttcaaggagaaattttctaataagaagaactattaaaaacactggatttgtttgatggcaaggagttaaccaaatttgttagtttccatacaactttttcttccccccaaagaaacttgtagtatatgtaaaccgaatcttcactgtggtagacagtaatgattatctgtttagtaaagggaaatgatgatgtacacattg

SEQ ID NO: 343887 - DNA, 281 bp, Homo sapiens
acaatcaaactttttaacaatgaatcacagaaagtgttatgatttgggaatggcagaatatcatggcatacaaagctggaatgcttgactcaagatagcatgatagggaagacttcctgaagaaacagcatcaaacctgagactggaaagatacataggcattagtcaggagaagttaagtatccacctggcctaattccccaactagaatagtttctggaacccagcctttaaaatgcttcattctatttgattcagtgttaaaaagttggtttgcttcc

SEQ ID NO: 343888 - DNA, 448 bp, Homo sapiens
acttgtttcttcagaatgtaggattgtttgtcctgctttttcagtgcccaactattattttcatgaatgtctttcactgttattgattggcaaacaagtcaaatcctaaaactacagagtaacaggctaatcccagctctattccccattagcaagagcacgtccttgctctccaaccagagtgagaaggcaaatatgctactcccactcagattgagcacattatttacattctctgttgggggttgaatgagttatatcactaggaaaattaattcctgcacttcccattttacttacagagtttgttggtgcttgtggaaagagtaaaattacaaatcctgataagttaatggcagagaccctgtgtaaatttgtttggaaattttcttcatctaatcatatcacctttagatgtgcatggtcagtgtgtagagctgcacttctt

SEQ ID NO: 343889 - DNA, 207 bp, Homo sapiens
atattcaaaaggcagctaattcattcctctcatttgacaaatgaggaagctaagaacaagagagagggttatgaagctattagtgacaaggaaggattagaatgtaagtctctaaactcccaggctagtgtcctttataataatttataagaagggagttcttttgttttttttttcttttgtggcctttatagccatcttgctgct

SEQ ID NO: 343890 - DNA, 547 bp, Homo sapiens
agtaataaaccagctgtgttagaaatggatcacttatcagtgcgtgcccaagcctcctaatgcctcatgatgtttaataattaaattgtgacaccttgaacccgcagctgacaccatgaatcacagtggaattctccaaatggaatgcagccacacctcagcttctgtgctgcgtgctgccactgaggacattcgataccattgaagccgtcagatagaggccgtatttcaaaaggtctacggtggctccgtttcttctctgagacttcaaaagtccttcaagagtgagttcccgtctcattctatgtccaggatgaagacggatggcctcttggcacccatctctttggcatgaacgatgtggggaaacgtgaatggaaatggggaactgttgctggcacccagaagtcatccggtccggatgaagccaagtcacaaggaagtgcctccaattattcttcataaattcctctgaggtttcacttcttgtccacacaagactttaataaaatgtggcatctaactgaataaagactatcctttcggg

SEQ ID NO: 343891 - DNA, 408 bp, Homo sapiens
tgccgggtctcagctctgctcacccgcgcagctcccagaaacttccccggcttgtctccactggaatcgggatggaagggagccacggctggctcagcccctctcggagcagaaagaggaaacttctgaaaagaagatgggggctgggggaggacatcaatcagcacggacaagatgaagacggatggcctcttggcacccatctctttggcatgaacgatgtggggaaacgtgaatggaaatggggaactgttgctggcacccagaagtcatccggtccggatgaagccaagtcacaaggaagtgcctccaattattcttcataaattcctctgaggtttcacttcttgtccacacaagactttaataaaatgtggcatctaactgaataaagactatcctttcggg

SEQ ID NO: 343892 - DNA, 589 bp, Homo sapiens
cggaatattcttagatagctcagagaatcctgaaagaccatgtttattatgtattactattgtacttttaagtaacttaatcaaaaatcagagtacagagtaggtccatggtttctgcatccatgaattcaaccagacttgggctgaaaatatttttttttaaatgtgtctgcactgaacacgtacagactctttttttcttgtcattactccctaaacagtacaatttacatagcatttgcactgtattaggtatctcagaaaatcatcaacttcatcaaattcatcaacttagaaatgcatgtgctgcttccaccaactgtaaaatcaaattcaacaagaccagttcccataaattagaatctcaatccatgaagaaaacccctcctgagtgatggaagcaccagcagctttgtagcaggacttggggccatagccgagcacagaaagcaactcctccctcgacacccgggcatcaccagctggagcccagaggaacacaaagctccctcccgggcttgcacgtttgctcattccctatcttgccatctggaacaggcagaaagaaggaagtcatcacctgcgacta

SEQ ID NO: 343893 - DNA, 447 bp, Homo sapiens
aatgacacatgagccataccttatatcacacacaaaaatcaattattgatagggtgaactaaatatatctatacagtggaatactgttcaatgacaaaatggaatgaactaatgatacatggtacatatcatgggtgaacaacaaaaacatgctaagtgaaagaacctaaacccaaacactatcagactccataatatatgcaatttctttaaaaaggcagatccaagaagaaagaaagcagatcagtggttgcttgggtagaacaagaattgactgcaaacaagcttggggaaactttttaagtgatggaaatgttctagaactgaaatgtggtgatgggtatacaattctgtaaacttagtaaaaagcacccagctaccagcaggtgagttttatatgtaaattatacctcaataaagttgatccaattgtgaaagacaaactta

SEQ ID NO: 343894 - DNA, 206 bp, Homo sapiens
tgaggacataaagatgtctttagaagaaaagagtagagatgtctgtgccaaatgggagtctcttcatcatgaactgtctttatatgttcaacaactaaaaatagatattgaaaaaggaaagcttagtgacaatattttaaaacttgaaaagcaaataaataaagaaaagaaacttatccgtagaggaaggaccaagggtctcatca

SEQ ID NO: 343895 - DNA, 586 bp, Homo sapiens
tgggcacatattaagtgctagagaaagttgaaggaatgaatgaattatacagttaaaatttcacaattgtggtaagtcctggaaaggacaaataagggttgtttgctctgagaacaaactttaacacaacttgaccaaggctgggattattggagggctggtctggggaagtgatgcttaagttgagacccaatgggctggtatcacacagaaagccttcacaactcaggggagcagtgtgtgcaaaggccctgaggtggaaaggagcacagtatgttctaggatctgaaagggagaactcaaagcaagaaggagaaagattctagaagacgctggtgaggcaggctggaggctgacccggaaagaccttcaggagatgtggaagagtttggagtaatgagaagccattttaagtacaggaatgattccatcgaatttgtgtaagatcagtctggccgctgggtggaggctttctaagatggggttgaagagggatggggaggagtaaggaaggctgtagaatgaccaggagtccacaggaggcaatataggctagggcgctggggtaccgagctgattgtatcag

SEQ ID NO: 343896 - DNA, 279 bp, Homo sapiens
caggcatcagagcttcactgagcccagtttggctaatgagaagttggaagacatcaacaagggtctagagttcagaacactgtcactattcagatggaagcacctagttaaactgacagtcctcctggctgacaccacaagcctttttctgccatttcactaactttctgagagagcaggtgtttttatcattgtcttccagtgtagacaaattggtttcatcacctaataatcatcgcttttataagaggaatgtctggatggagatcagtttcaatg

SEQ ID NO: 343897 - DNA, 252 bp, Homo sapiens
ttccctctgcgttctacttttgacaaagctaaacttggttcctagtactccacacagtcctcttggcccagcctgctttgctctctggcctttctggaagttcctgggcactttttgtctgacacttcattgacagtcactcatacagtggcttcccggcaatgtttcctcaaaaagagcaaatctcttatacagaagcagtacaggtttattaccaacattttagagaataaatagaagaagaaaaaactt

SEQ ID NO: 343898 - DNA, 265 bp, Homo sapiens
gtaacacaagacatagtggaaaacaagtgagatgacagagatcttacctttatggaacttacaaacacatgaatttgccttttcattttgggaggtctgtggaccctatcccttccccaaccatcagggataagtatatgagtctcatctcagctcaaaaccttgctctgtggttcacgcctgtaatcccagcactttgggaggccgaggtgggcacatcacaaggtcaggagatcgagaccatcctggctaacgtggtgaaacc

SEQ ID NO: 343899 - DNA, 110 bp, Homo sapiens
gtccgtgggtccgagctctcggagtgtgattctgtctcccctagaaacacatcatggcgtgtcctcagggcatttgtgcgcgggatttaagcagatgtttcctcaccgtg

SEQ ID NO: 343900 - DNA, 398 bp, Homo sapiens
atagccaacacaatccaatgacattttaaagtcaccaacatttcaaacttatgtattaaaaaatatagacactgggccgggtgcagcagctcacgcctataatcccaccactttgcgaagccgaggggtgtggatcacctgaggttcggagtttgagaccagcctgacaaacacggagaaaccctgtttctattaaaaatacaaaattagccgggcatggtggcacatgcctgcaatcccagctacttgggaggctgaggcgggcagttcacgaggtcaggagattgagaccatcctggctaacacggtgaaaccccgtctctactaaaaatacaaaagaactgggcatggtggtgtgcacctgtagtcccagctattcgggaggctatcagcgcgtt

SEQ ID NO: 343901 - DNA, 384 bp, Homo sapiens
ttcttcctactccttcactcccacatataatcaattagttcttttgactgaacctcctaaacagtcctagaatttttcagcttatctctatctccactgtcacatctccaaattcatgacattaccatcttcgattgtgtaaatcagttgccacacatgtgatgttcctgcctccaatatagtctttttgggtccattctttgcactgtagccagaggatctaatacccaaagctgatctcatcccatcctacttaaaacccttcaatgactccatattgccctcagaatgaagtccaaattcttacatgtacaaagtctgatttacaaagtcttgtattcccaaagcaggctgaaagactgttgcaggttgagtttcccagga

SEQ ID NO: 343902 - DNA, 684 bp, Homo sapiens
taatcaagactatagtactttttctggcattgatgaagctgctattctaggagaccatagtatgccctcaagtttctatttgttcagcatgtgcatagtacacagtatctgcaaaggcattgagatatgtggcgatattgcagtcttgttgggggtgggggtgaggagtagaacaccaaatattgaaatcatgataaaaggtagtacattactgagattctgagaagggggattctgagaaggaggtcacgataaactgcagtgattaggcatccttcatggtggtagcatagctgcgaactgaaccttcaaggcaaattggagaagaaaaacattcaggcctaaagaagaccagaaagagcaagtgctcagtcttctgagagaatatttttgtgtgctgtaattgacagtggttccatgtatacagaacaaaaaattgtcatattagactgaagctggctgtgttgatccaaagaaagcgtaggaaagcatcctgaatatactattgcctgttttcctgactcataaatagcatatcctttattctccaaatgcttaggactcttaaactagcaaagcatatactttgaagtttataaacgtatagatgtgtttgcaagtttttcctttttatctgagaattcataacatgataaactttatttctgtgtaagagaatggaaa

SEQ ID NO: 343903 - DNA, 313 bp, Homo sapiens
gagttgtgtacatatgtaccaataagtaatttaaaaaatggcaatcaacacatataaaattgcttaaccacaccaaaacttaaatctaatcaaaagcattgaggcatcaatgtgaactgattttgataaggatatacatatgtcacattttaaaatataaatgagcccacataaagaaatctggagaatatttacaaatcaattgggtgattatcttgagacaggacacattaaggaggagatacaagataatgcctcttatgattatatatttctccagtgtttttctttcttttaacttttattttaggtt

SEQ ID NO: 343904 - DNA, 3898 bp, Homo sapiens
  misc_feature (1616)..(1616): n is a, c, g, or t
  misc_feature (3700)..(3700): n is a, c, g, or t
tcctaagagggcaagcgggtggtactttctgtattttaatattgtgttagaatctgggacatctgattgctgaaatgagatgttagttggtacagggaggggtttccaggacccgcacgcccttgcggagtgcctgctggagggagccggtgtgtccaggacacccttgcggagtgtctgctggagggagccagtgtgtcagtgagatggctatgcccctgggctgctgtgtcccaggtttcctcagtctctaaccctttgttctcacaggggatggactcttgcttcttttcccaactccaccaagagggaccgtcccaggacgtccttccccgggcatctggccctacagctgcctgaggtctccatcaccgttggcgccatcagtctgctgtgcagccagctgttggtttggagagcctgaagaactgcagttcacgtctcatctaaaggagctgaaatgatattgcagctttttcttttggttgcgtgcagtgagaatctgggagctgaacctgttatctgcatggtcttcagaaatcaggcaaactcggaaaatgccaacgccaaaaatgctgatgggtgacaaagtgtcacaggtgtgatgcattacaaatctcaggacttttgttcactggatttgacaggtcaagcttcacaggaaaatgatgaagtcccaaaagaccagaaatatatttcagaagatgccagttactactttaaatgtcaaaccaacatttcagaaataactttcaatgattatttcctgccaagaaggtgaacgctggagaccttaatggtggaagatggagggcgtctttccttctgttaagctgacaacttggcttccatcttgtgaggacctcaccctacctggtggcagaggacgtctgacgccctcaatcattgccattacacttcccagcctggtggtcagtctcctggggtctgtgtgttaacaaaccatcgactggacaatcgcagttttccttatgaaggcttactttaaaaaggctctggattttcagaagcgaagtcgctttcatccccgattcagacccatcctagtggaggaaaaatcctaccagaagaagggctgaccataggaacttgccatttccttgaccccatcatatctgaggaaaaaacaacagaaaaggtcaaaacccacgtgtacgcccaacgtcctgattgacgactttgcctgcagcttctgctttcctgaaattcgctgctgcctttagaacccttgtctgcagccagtggggagttcaggacttaggcggagctgccccaccctcctgcttggcaccctgcaaatacatgccctcccttccatcgctgcagacctcagagtgggcgtccggtctcctgtgcgggatgagaatacacaccctcccttccatcgctgcagaccttagagtggatgtccggtctcctgtatgggatgagaatacacgccttcccttccatcgctgcagagtggacgtctggtctcctgtgtgggataatacacgccctcctttcaatcgctgcagacctcagagtggacgtccggtctcctgtgtgggataatacacgccctcctttcaatcgctgcggacctcagagtggangtccggtctcctgtatgggatgagatacactccttcccttccactgctgcagacctcagagtggacgtccggtctcctgtgtgggatgagatacactccttcccttccactgctgcagacctcagagtggacgtccggtctcctttgtgggatgagaatacactccttcccttccatcactgcagacctcagagtggacgtccggtctcctgtgcgggacaagaatacactccttcccttccatcactgcagacctcagagtggacgtccagtctcctgtgcgggatgagatacactccttcccttccatcgctgcagacctcagagtggacgtccagtctctctgtgcgggccaagtgtacacagttttgttccgtcacaacttccacgacaggccagtgtgaggtttttgagctggtgctgactgaaaactgtcagctgcccaaggacctgggagctctgctccccactcctggtgtgcggtcttgcgcctggcctccctgcctaggttacatgcagtggtcatcccggtcgctcccacacccgtgtgggctctgggatcccctcttccagccagcccaggggacatctggctgtctcaggacccagccatctgtaaaaattaggcaggtcccttcagtatgctcctggtcaacaaagaaaaacttcaattttgagaatggcatctgtattccgaagtgttctctcagatgtttgagttccactaagtagattttcttagtctgctgtatcaatgacacagagagacgtgcattaaaacctcaaccatgtggatctatttcttttcagttaattttgcttcatgtatcttgaagctctgttatcaggtgcatgcacatttgggattgttatgctttcctgatgaactgaccttctttcattatgcaaggggaagaagatgctgcatacaggatggaatatccaggggaagacgtctaaggagagatgcccagctgggagtcctatgcaaggggaagaagatgctgcatacaggatgggatatccaggggaagatttctaagaagagatgcccagctgggagtcctatgcaaggggaagaagatgctgcatacaggatgggatatccaggggaagatttctaaggagagacacccggctggaagtcaagatatgtcagttgtttccattataataaaaccactcatgttagatgagctgaactttcccttttccccagttcttacgatcaaaaagtggctgtcctaaatttcatcactcaatatccttgctagagtcttcctttgtcagccaggctggagtgcaatgtgcaatggcacaatcttggctcactgcaacctctgtctcctgggctcaagcaattcttctgcctcagcctcctgagtagctgggattacaggtatgcaccaccatgcccaactaatttttgtatttcagtagagacgaggtttcaccatgttggccaggctggtctcgatctcctgacctcaggtaatctgcccaccttggcctctcaaagtgctgggattacagacatgagccatcatgcctggacataagtgagttttatattgtattataagactatgatacagtaaaaccatgaaatccaaatttataatatcacactacataatacaactgtaacctcaccgccctatcctgggatgtgtgtcatttttatagccaattatggcccccagctttagttttcttttgcttattggagagtgtaattctcccttattctttttgctttctacagtcttgtgtacatcagttatctgtttttgtccttttgccagtgttcaaagtgttatttttcgtatttacttaagctcctgcagggagattagaatttcttcccctaagaagaaataagtaatagcggagacctgctgggcactggtggcgccaggcttggctctggggctgcccatccatcctcacagcatggcgactggagggtcttgccctgaggtcccgtgtgcggagcagggcttggcattcactcctaggcactgctgactcagtctgtcctggtggtgctgggaggccgaaacccgtcatgcatgtaaaccgcngggccccgtctggcatggtgcacctgtgctgggagtgcctatagagtaggaaaagtattcctggacctttaaaaaacttaggccaaaaaagtgttttggttgaatctttggccaaattggaactgcaaactctgtattatctccccttttgtgaaattctatggaaaattcgagcaaataaatatgcatttcccagtg

SEQ ID NO: 343905 - DNA, 2814 bp, Homo sapiens
  misc_feature (1616)..(1616): n is a, c, g, or t
tcctaagagggcaagcgggtggtactttctgtattttaatattgtgttagaatctgggacatctgattgctgaaatgagatgttagttggtacagggaggggtttccaggacccgcacgcccttgcggagtgcctgctggagggagccggtgtgtccaggacacccttgcggagtgtctgctggagggagccagtgtgtcagtgagatggctatgcccctgggctgctgtgtcccaggtttcctcagtctctaaccctttgttctcacaggggatggactcttgcttcttttcccaactccaccaagagggaccgtcccaggacgtccttccccgggcatctggccctacagctgcctgaggtctccatcaccgttggcgccatcagtctgctgtgcagccagctgttggtttggagagcctgaagaactgcagttcacgtctcatctaaaggagctgaaatgatattgcagctttttcttttggttgcgtgcagtgagaatctgggagctgaacctgttatctgcatggtcttcagaaatcaggcaaactcggaaaatgccaacgccaaaaatgctgatgggtgacaaagtgtcacaggtgtgatgcattacaaatctcaggacttttgttcactggatttgacaggtcaagcttcacaggaaaatgatgaagtcccaaaagaccagaaatatatttcagaagatgccagttactactttaaatgtcaaaccaacatttcagaaataactttcaatgattatttcctgccaagaaggtgaacgctggagaccttaatggtggaagatggagggcgtctttccttctgttaagctgacaacttggcttccatcttgtgaggacctcaccctacctggtggcagaggacgtctgacgccctcaatcattgccattacacttcccagcctggtggtcagtctcctggggtctgtgtgttaacaaaccatcgactggacaatcgcagttttccttatgaaggcttactttaaaaaggctctggattttcagaagcgaagtcgctttcatccccgattcagacccatcctagtggaggaaaaatcctaccagaagaagggctgaccataggaacttgccatttccttgaccccatcatatctgaggaaaaaacaacagaaaaggtcaaaacccacgtgtacgcccaacgtcctgattgacgactttgcctgcagcttctgctttcctgaaattcgctgctgcctttagaacccttgtctgcagccagtggggagttcaggacttaggcggagctgccccaccctcctgcttggcaccctgcaaatacatgccctcccttccatcgctgcagacctcagagtgggcgtccggtctcctgtgcgggatgagaatacacaccctcccttccatcgctgcagaccttagagtggatgtccggtctcctgtatgggatgagaatacacgccttcccttccatcgctgcagagtggacgtctggtctcctgtgtgggataatacacgccctcctttcaatcgctgcagacctcagagtggacgtccggtctcctgtgtgggataatacacgccctcctttcaatcgctgcggacctcagagtggangtccggtctcctgtatgggatgagatacactccttcccttccactgctgcagacctcagagtggacgtccggtctcctgtgtgggatgagatacactccttcccttccactgctgcagacctcagagtggacgtccggtctcctttgtgggatgagaatacactccttcccttccatcactgcagacctcagagtggacgtccggtctcctgtgcgggacaagaatacactccttcccttccatcactgcagacctcagagtggacgtccagtctcctgtgcgggatgagatacactccttcccttccatcgctgcagacctcagagtggacgtccagtctctctgtgcgggccaagtgtacacagttttgttccgtcacaacttccacgacaggccagtgtgaggtttttgagctggtgctgactgaaaactgtcagctgcccaaggacctgggagctctgctccccactcctggtgtgcggtcttgcgcctggcctccctgcctaggttacatgcagtggtcatcccggtcgctcccacacccgtgtgggctctgggatcccctcttccagccagcccaggggacatctggctgtctcaggacccagccatctgtaaaaattaggcaggtcccttcagtatgctcctggtcaacaaagaaaaacttcaattttgagaatggcatctgtattccgaagtgttctctcagatgtttgagttccactaagtagattttcttagtctgctgtatcaatgacacagagagacgtgcattaaaacctcaaccatgtggatctatttcttttcagttaattttgcttcatgtatcttgaagctctgttatcaggtgcatgcacatttgggattgttatgctttcctgatgaactgaccttctttcattatgcaaggggaagaagatgctgcatacaggatggaatatccaggggaagacgtctaaggagagatgcccagctgggagtcctatgcaaggggaagaagatgctgcatacaggatgggatatccaggggaagatttctaagaagagatgcccagctgggagtcctatgcaaggggaagaagatgctgcatacaggatgggatatccaggggaagatttctaaggagagacacccggctggaagtcaagatatgtcagttgtttccattataataaaaccactcatgttagatgagc

SEQ ID NO: 343906 - DNA, 3279 bp, Homo sapiens
  misc_feature (1175)..(1175): n is a, c, g, or t
  misc_feature (3081)..(3081): n is a, c, g, or t
ccacgcgtcgcggacgcgtgggtcgacccacgcgttcgcccacgcgtccggaagtgagaatctgggagctgaacctgttatctgcatggtcttcagaaatcaggcaaactcggaaaatgccaacgccaaaaatgctgatgggtgacaaagtgtcacaggtgtgatgcattacaaatctcaggacttttgttcactggatttgacaggtcaagcttcacaggaaaatgatgaagtcccaaaagaccagaaatatatttcagaagatgccagttactactttaaatgtcaaaccaacatttcagaaataactttcaatgattatttcctgccaagaaggtgaacgctggagaccttaatggtggaagatggagggcgtctttccttctgttaagctgacaacttggcttccatcttgtgaggacctcaccctacctggtggcagaggacgtctgacgccctcaatcattgccattacacttcccagcctggtggtcagtctcctggggtctgtgtgttaacaaaccatcgactggacaatcgcagttttccttatgaaggcttactttaaaaaggctctggattttcagaagcgaagtcgctttcatccccgattcagacccatcctagtggaggaaaaatcctaccagaagaagggctgaccataggaacttgccatttccttgaccccatcatatctgaggaaaaaacaacagaaaaggtcaaaacccacgtgtacgcccaacgtcctgattgacgactttgcctgcagcttctgctttcctgaaattcgctgctgcctttagaacccttgtctgcagccagtggggagttcaggacttaggcggagctgccccaccctcctgcttggcaccctgcaaatacatgccctcccttccatcgctgcagacctcagagtgggcgtccggtctcctgtgcgggatgagaatacacaccctcccttccatcgctgcagaccttagagtggatgtccggtctcctgtatgggatgagaatacacgccttcccttccatcgctgcagagtggacgtctggtctcctgtgtgggataatacacgccctcctttcaatcgctgcagacctcagagtggacgtccggtctcctgtgtgggataatacacgccctcctttcaatcgctgcggacctcagagtggangtccggtctcctgtatgggatgagatacactccttcccttccactgctgcagacctcagagtggacgtccggtctcctgtgtgggatgagatacactccttcccttccactgctgcagacctcagagtggacgtccggtctcctttgtgggatgagaatacactccttcccttccatcactgcagacctcagagtggacgtccggtctcctgtgcgggacaagaatacactccttcccttccatcactgcagacctcagagtggacgtccagtctcctgtgcgggatgagatacactccttcccttccatcgctgcagacctcagagtggacgtccagtctctctgtgcgggccaagtgtacacagttttgttccgtcacaacttccacgacaggccagtgtgaggtttttgagctggtgctgactgaaaactgtcagctgcccaaggacctgggagctctgctccccactcctggtgtgcggtcttgcgcctggcctccctgcctaggttacatgcagtggtcatcccggtcgctcccacacccgtgtgggctctgggatcccctcttccagccagcccaggggacatctggctgtctcaggacccagccatctgtaaaaattaggcaggtcccttcagtatgctcctggtcaacaaagaaaaacttcaattttgagaatggcatctgtattccgaagtgttctctcagatgtttgagttccactaagtaggggaagaagatgctgcatacaggatggaatatccaggggaagacgtctaaggagagatgcccagctgggagtcctatgcaaggggaagaagatgctgcatacaggatgggatatccaggggaagatttctaagaagagatgcccagctgggagtcctatgcaaggggaagaagatgctgcatacaggatgggatatccaggggaagatttctaaggagagacacccggctggaagtcaagatatgtcagttgtttccattataataaaaccactcatgttagatgagctgaactttcccttttccccagttcttacgatcaaaaagtggctgtcctaaatttcatcactcaatatccttgctagagtcttcctttgtcagccaggctggagtgcaatgtgcaatggcacaatcttggctcactgcaacctctgtctcctgggctcaagcaattcttctgcctcagcctcctgagtagctgggattacaggtatgcaccaccatgcccaactaatttttgtatttcagtagagacgaggtttcaccatgttggccaggctggtctcgatctcctgacctcaggtaatctgcccaccttggcctctcaaagtgctgggattacagacatgagccatcatgcctggacataagtgagttttatattgtattataagactatgatacagtaaaaccatgaaatccaaatttataatatcacactacataatacaactgtaacctcaccgccctatcctgggatgtgtgtcatttttatagccaattatggcccccagctttagttttcttttgcttattggagagtgtaattctcccttattctttttgctttctacagtcttgtgtacatcagttatctgtttttgtccttttgccagtgttcaaagtgttatttttcgtatttacttaagctcctgcagggagattagaatttcttcccctaagaagaaataagtaatagcggagacctgctgggcactggtggcgccaggcttggctctggggctgcccatccatcctcacagcatggcgactggagggtcttgccctgaggtcccgtgtgcggagcagggcttggcattcactcctaggcactgctgactcagtctgtcctggtggtgctgggaggccgaaacccgtcatgcatgtaaaccgcngggccccgtctggcatggtgcacctgtgctgggagtgcctatagagtaggaaaagtattcctggacctttaaaaaacttaggccaaaaaagtgttttggttgaatctttggccaaattggaactgcaaactctgtattatctccccttttgtgaaattctatggaaaattcgagcaaataaatatgcatttcccagtg

SEQ ID NO: 343907 - DNA, 551 bp, Homo sapiens
caggtcccttcagtatgctcctggtcaacaaagaaaaacttcaattttgagaatggcatctgtattccgaagtgttctctcagatgtttgagttccactaagtaggtaggaagtggcagtgttgctgtttaatggattggtaatttttgaatatttcttaaacatttttatttgtgtttttttggattgaaatttatgtaatttgttactatctgttagactcttggtgtttctcttactgactcaaccataagaatactaactccttttcgtatttcttgcatatatttttccatattactgtttcccttttgatttagcttgtggtttctgacatggtttctcagtctcactctcctccacattctgtctactctcaacccctcacccatcatgtctcggcttctgtcccctttatgcttcaatctcatcccctccactgtgtctgtgtcatcactacagtgtgtctcagccttagctcccccactgtgtctgtcccaactccccattttatctcagtctcaccccacattgtgtctcagtctcacccc

SEQ ID NO: 343908 - DNA, 3720 bp, Homo sapiens
  misc_feature (1616)..(1616): n is a, c, g, or t
  misc_feature (3522)..(3522): n is a, c, g, or t
tcctaagagggcaagcgggtggtactttctgtattttaatattgtgttagaatctgggacatctgattgctgaaatgagatgttagttggtacagggaggggtttccaggacccgcacgcccttgcggagtgcctgctggagggagccggtgtgtccaggacacccttgcggagtgtctgctggagggagccagtgtgtcagtgagatggctatgcccctgggctgctgtgtcccaggtttcctcagtctctaaccctttgttctcacaggggatggactcttgcttcttttcccaactccaccaagagggaccgtcccaggacgtccttccccgggcatctggccctacagctgcctgaggtctccatcaccgttggcgccatcagtctgctgtgcagccagctgttggtttggagagcctgaagaactgcagttcacgtctcatctaaaggagctgaaatgatattgcagctttttcttttggttgcgtgcagtgagaatctgggagctgaacctgttatctgcatggtcttcagaaatcaggcaaactcggaaaatgccaacgccaaaaatgctgatgggtgacaaagtgtcacaggtgtgatgcattacaaatctcaggacttttgttcactggatttgacaggtcaagcttcacaggaaaatgatgaagtcccaaaagaccagaaatatatttcagaagatgccagttactactttaaatgtcaaaccaacatttcagaaataactttcaatgattatttcctgccaagaaggtgaacgctggagaccttaatggtggaagatggagggcgtctttccttctgttaagctgacaacttggcttccatcttgtgaggacctcaccctacctggtggcagaggacgtctgacgccctcaatcattgccattacacttcccagcctggtggtcagtctcctggggtctgtgtgttaacaaaccatcgactggacaatcgcagttttccttatgaaggcttactttaaaaaggctctggattttcagaagcgaagtcgctttcatccccgattcagacccatcctagtggaggaaaaatcctaccagaagaagggctgaccataggaacttgccatttccttgaccccatcatatctgaggaaaaaacaacagaaaaggtcaaaacccacgtgtacgcccaacgtcctgattgacgactttgcctgcagcttctgctttcctgaaattcgctgctgcctttagaacccttgtctgcagccagtggggagttcaggacttaggcggagctgccccaccctcctgcttggcaccctgcaaatacatgccctcccttccatcgctgcagacctcagagtgggcgtccggtctcctgtgcgggatgagaatacacaccctcccttccatcgctgcagaccttagagtggatgtccggtctcctgtatgggatgagaatacacgccttcccttccatcgctgcagagtggacgtctggtctcctgtgtgggataatacacgccctcctttcaatcgctgcagacctcagagtggacgtccggtctcctgtgtgggataatacacgccctcctttcaatcgctgcggacctcagagtggangtccggtctcctgtatgggatgagatacactccttcccttccactgctgcagacctcagagtggacgtccggtctcctgtgtgggatgagatacactccttcccttccactgctgcagacctcagagtggacgtccggtctcctttgtgggatgagaatacactccttcccttccatcactgcagacctcagagtggacgtccggtctcctgtgcgggacaagaatacactccttcccttccatcactgcagacctcagagtggacgtccagtctcctgtgcgggatgagatacactccttcccttccatcgctgcagacctcagagtggacgtccagtctctctgtgcgggccaagtgtacacagttttgttccgtcacaacttccacgacaggccagtgtgaggtttttgagctggtgctgactgaaaactgtcagctgcccaaggacctgggagctctgctccccactcctggtgtgcggtcttgcgcctggcctccctgcctaggttacatgcagtggtcatcccggtcgctcccacacccgtgtgggctctgggatcccctcttccagccagcccaggggacatctggctgtctcaggacccagccatctgtaaaaattaggcaggtcccttcagtatgctcctggtcaacaaagaaaaacttcaattttgagaatggcatctgtattccgaagtgttctctcagatgtttgagttccactaagtaggggaagaagatgctgcatacaggatggaatatccaggggaagacgtctaaggagagatgcccagctgggagtcctatgcaaggggaagaagatgctgcatacaggatgggatatccaggggaagatttctaagaagagatgcccagctgggagtcctatgcaaggggaagaagatgctgcatacaggatgggatatccaggggaagatttctaaggagagacacccggctggaagtcaagatatgtcagttgtttccattataataaaaccactcatgttagatgagctgaactttcccttttccccagttcttacgatcaaaaagtggctgtcctaaatttcatcactcaatatccttgctagagtcttcctttgtcagccaggctggagtgcaatgtgcaatggcacaatcttggctcactgcaacctctgtctcctgggctcaagcaattcttctgcctcagcctcctgagtagctgggattacaggtatgcaccaccatgcccaactaatttttgtatttcagtagagacgaggtttcaccatgttggccaggctggtctcgatctcctgacctcaggtaatctgcccaccttggcctctcaaagtgctgggattacagacatgagccatcatgcctggacataagtgagttttatattgtattataagactatgatacagtaaaaccatgaaatccaaatttataatatcacactacataatacaactgtaacctcaccgccctatcctgggatgtgtgtcatttttatagccaattatggcccccagctttagttttcttttgcttattggagagtgtaattctcccttattctttttgctttctacagtcttgtgtacatcagttatctgtttttgtccttttgccagtgttcaaagtgttatttttcgtatttacttaagctcctgcagggagattagaatttcttcccctaagaagaaataagtaatagcggagacctgctgggcactggtggcgccaggcttggctctggggctgcccatccatcctcacagcatggcgactggagggtcttgccctgaggtcccgtgtgcggagcagggcttggcattcactcctaggcactgctgactcagtctgtcctggtggtgctgggaggccgaaacccgtcatgcatgtaaaccgcngggccccgtctggcatggtgcacctgtgctgggagtgcctatagagtaggaaaagtattcctggacctttaaaaaacttaggccaaaaaagtgttttggttgaatctttggccaaattggaactgcaaactctgtattatctccccttttgtgaaattctatggaaaattcgagcaaataaatatgcatttcccagtg

SEQ ID NO: 343909 - DNA, 3603 bp, Homo sapiens
  misc_feature (1499)..(1499): n is a, c, g, or t
  misc_feature (3405)..(3405): n is a, c, g, or t
tcctaagagggcaagcgggtggtactttctgtattttaatattgtgttagaatctgggacatctgattgctgaaatgagatgttagttggtacagggaggggtttccaggacccgcacgcccttgcggagtgcctgctggagggagccggtgtgtccaggacacccttgcggagtgtctgctggagggagccagtgtgtcagtgagatggctatgcccctgggctgctgtgtcccaggtttcctcagtctctaaccctttgttctcacaggggatggactcttgcttcttttcccaactccaccaagagggaccgtcccaggacgtccttccccgggcatctggccctacagctgcctgaggtctccatcaccgttggcgccatcagtctgctgtgcagccagctgttggtttggagagcctgaagaactgcagttcacgtctcatctaaaggagctgaaatgatattgcagctttttcttttggttgcgtgcagtgagaatctgggagctgaacctgttatctgcatggtcttcagaaatcaggaaaatgatgaagtcccaaaagaccagaaatatatttcagaagatgccagttactactttaaatgtcaaaccaacatttcagaaataactttcaatgattatttcctgccaagaaggtgaacgctggagaccttaatggtggaagatggagggcgtctttccttctgttaagctgacaacttggcttccatcttgtgaggacctcaccctacctggtggcagaggacgtctgacgccctcaatcattgccattacacttcccagcctggtggtcagtctcctggggtctgtgtgttaacaaaccatcgactggacaatcgcagttttccttatgaaggcttactttaaaaaggctctggattttcagaagcgaagtcgctttcatccccgattcagacccatcctagtggaggaaaaatcctaccagaagaagggctgaccataggaacttgccatttccttgaccccatcatatctgaggaaaaaacaacagaaaaggtcaaaacccacgtgtacgcccaacgtcctgattgacgactttgcctgcagcttctgctttcctgaaattcgctgctgcctttagaacccttgtctgcagccagtggggagttcaggacttaggcggagctgccccaccctcctgcttggcaccctgcaaatacatgccctcccttccatcgctgcagacctcagagtgggcgtccggtctcctgtgcgggatgagaatacacaccctcccttccatcgctgcagaccttagagtggatgtccggtctcctgtatgggatgagaatacacgccttcccttccatcgctgcagagtggacgtctggtctcctgtgtgggataatacacgccctcctttcaatcgctgcagacctcagagtggacgtccggtctcctgtgtgggataatacacgccctcctttcaatcgctgcggacctcagagtggangtccggtctcctgtatgggatgagatacactccttcccttccactgctgcagacctcagagtggacgtccggtctcctgtgtgggatgagatacactccttcccttccactgctgcagacctcagagtggacgtccggtctcctttgtgggatgagaatacactccttcccttccatcactgcagacctcagagtggacgtccggtctcctgtgcgggacaagaatacactccttcccttccatcactgcagacctcagagtggacgtccagtctcctgtgcgggatgagatacactccttcccttccatcgctgcagacctcagagtggacgtccagtctctctgtgcgggccaagtgtacacagttttgttccgtcacaacttccacgacaggccagtgtgaggtttttgagctggtgctgactgaaaactgtcagctgcccaaggacctgggagctctgctccccactcctggtgtgcggtcttgcgcctggcctccctgcctaggttacatgcagtggtcatcccggtcgctcccacacccgtgtgggctctgggatcccctcttccagccagcccaggggacatctggctgtctcaggacccagccatctgtaaaaattaggcaggtcccttcagtatgctcctggtcaacaaagaaaaacttcaattttgagaatggcatctgtattccgaagtgttctctcagatgtttgagttccactaagtaggggaagaagatgctgcatacaggatggaatatccaggggaagacgtctaaggagagatgcccagctgggagtcctatgcaaggggaagaagatgctgcatacaggatgggatatccaggggaagatttctaagaagagatgcccagctgggagtcctatgcaaggggaagaagatgctgcatacaggatgggatatccaggggaagatttctaaggagagacacccggctggaagtcaagatatgtcagttgtttccattataataaaaccactcatgttagatgagctgaactttcccttttccccagttcttacgatcaaaaagtggctgtcctaaatttcatcactcaatatccttgctagagtcttcctttgtcagccaggctggagtgcaatgtgcaatggcacaatcttggctcactgcaacctctgtctcctgggctcaagcaattcttctgcctcagcctcctgagtagctgggattacaggtatgcaccaccatgcccaactaatttttgtatttcagtagagacgaggtttcaccatgttggccaggctggtctcgatctcctgacctcaggtaatctgcccaccttggcctctcaaagtgctgggattacagacatgagccatcatgcctggacataagtgagttttatattgtattataagactatgatacagtaaaaccatgaaatccaaatttataatatcacactacataatacaactgtaacctcaccgccctatcctgggatgtgtgtcatttttatagccaattatggcccccagctttagttttcttttgcttattggagagtgtaattctcccttattctttttgctttctacagtcttgtgtacatcagttatctgtttttgtccttttgccagtgttcaaagtgttatttttcgtatttacttaagctcctgcagggagattagaatttcttcccctaagaagaaataagtaatagcggagacctgctgggcactggtggcgccaggcttggctctggggctgcccatccatcctcacagcatggcgactggagggtcttgccctgaggtcccgtgtgcggagcagggcttggcattcactcctaggcactgctgactcagtctgtcctggtggtgctgggaggccgaaacccgtcatgcatgtaaaccgcngggccccgtctggcatggtgcacctgtgctgggagtgcctatagagtaggaaaagtattcctggacctttaaaaaacttaggccaaaaaagtgttttggttgaatctttggccaaattggaactgcaaactctgtattatctccccttttgtgaaattctatggaaaattcgagcaaataaatatgcatttcccagtg

SEQ ID NO: 343910 - DNA, 235 bp, Homo sapiens
agaattgaaatgaaatagtaagaagttctgtgtgactgaagcacaggatatgtgtatgtttgtgtgtttgggggaaggagggagaaaaaagtagaaggaaatgaaatggtcttatatggaggtggaagaggctgtcatctccagccatgatttgaggggtacatagaaaattatgcttcctcaaaatatctatctccacacacttgcaaattattgaaatttcatcctgtcgacg

SEQ ID NO: 343911 - DNA, 191 bp, Homo sapiens
catacgttaatactggtttctactgaaacagtctgatttatattgtatcttatctctctgagctagacttggtaaacggcattagctgcatggtaaataatatgagattagacagaaaataggaagaaatttacatctgcaacatacaaaactctagttttagtctaatccctgaggatttggacctcaag

SEQ ID NO: 343912 - DNA, 834 bp, Homo sapiens
cggcggcctatacattgtctgatgacagttggtgggctgatttgaattattttctgtcttcattaccctttcttgctgcggttgattctggtgtaatggggatatcatcagaccaagtcaggcttttgcccccacccaagaatgagaggaagttttgttatgatgtttctagctgtcgttcatccttccctgagacaatgaacaagtggaacaccttttaccagtatttgcagtcaccttttagtaagtttgatgatctgttgaagtacttatgggctgcacacacttcaaccttggcagataatatcaaaagttttgaagacagatatgattattattctaaagcagaagcgcattttgagagaagttgggtactggctgtggatcatttagctgcagtcctctttcctacaaccttgattagatcatataagttccagaagggcatgccaccacgaattcttcttaatactgatgtagcccctttcatcagtgactttactgcttttcagaatgtagtcctggttcttctaaatatgcttgacaatgtggataaatctataggttatctttgtacagaaaaatctaatgtatatagagatcattcggaatctagctctagaagttatggaaataactcctgaaacatttaacttcaaacttcaggaaatgattaatgaattaaaaatgaaaaactcgaactgacaatcagtaatttcaaaaaattaatgtcatcatgaccatgtagtttattctttctgatatttttgatttatgcttatttgttaagatcttgtacatgtattaaaaacttaaattaaatgcattcaagtt

SEQ ID NO: 343913 - DNA, 567 bp, Homo sapiens
ttctgagtagagaaatgatccgtaatataggcctcgcccgatgtgtaggaagaggcagatatgattattattctaaagcagaagcgcattttgagagaagttgggtactggctgtggatcatttagctgcagtcctctttcctacaaccttgattagatcatataagttccagaagggcatgccaccacgaattcttcttaatactgatgtagcccctttcatcagtgactttactgcttttcagaatgtagtcctggttcttctaaatatgcttgacaatgtggataaatctataggttatctttgtacagaaaaatctaatgtatatagagatcattcggaatctagctctagaagttatggaaataactcctgaaacatttaacttcaaacttcaggaaatgattaatgaattaaaaatgaaaaactcgaactgacaatcagtaatttcaaaaaattaatgtcatcatgaccatgtagtttattctttctgatatttttgatttatgcttatttgttaagatcttgtacatgtattaaaaacttaaattaaatgcattcaagtt

SEQ ID NO: 343914 - DNA, 1852 bp, Homo sapiens
gcacagtgacagcttcctttctcggaaacgcggcgcggccggctgccggaaaacagggcagacctgtatgattggtttattcctggggttgtcatatcatggctgataatgacacagacagaaaccagactgagaagctcctaaaaagagtacgagaactggagcaagaggtgcaaagacttaaaaaggaacaggccaaaaataaggaggactcaaacattagagaaaattcatcaggagctggaaaaactaagcgtgcatttgatttcagtgctcatggccgaagacacgtagccctaagaatagcctatatgggctggggataccagggctttgctagtcaggaaaacacaaataataccattgaagagaaactgtttgaagctctaaccaagactcgactagtagaaagcagacagacatccaactatcaccgatgtgggagaacagataaaggagttagtgcctttggacaggtgatctcacttgaccttcgctctcagtttccaaggggcagggattccgaggactttaatgtaaaagaggaggctaatgctgctgctgaagagatccgttatacccacattctcaatcgggtactccctccagacatccgtatattggcctgggcccctgtagaaccaagcttcagtgctaggttcagctgccttgagcggacttaccgctattttttccctcgtgctgatttagatattgtaaccatggattatgcagctcagaagtatgttggcacccatgatttcaggaacttgtgtaaaatggatgtagccaacggtgtgattaattttcagaggactattctatctgctcaagtacagctagtgggccagagcccaggtgaggggagatggcaagaacctttccagttatgtcagtttgaagtgactggccaggcattcctttatcatcaagtccgatgtatgatggctatcctctttctgattggccaaggaatggagaagccagagattattgatgagctgctgaatatagagaaaaatccccaaaagcctcaatatagtatggctgtagaatttcctctagtcttatatgactgtaagtttgaaaatgtcaagtggatctatgaccaggaggctcaggagttcaatattacccacctacaacaactgtgggctaatcatgctgtcaaaactcacatgttgtatagtatgctacaaggactggacactgttccagtaccctgtggaataggaccaaagatggatggaatgacagaatggggaaatgttaagccctctgtcataaagcagaccagtgcctttgtagaaggagtgaagatgcgcacatataagcccctcatggaccgtcctaaatgccaaggactggaatcccggatccagcattttgtacgtaggggacgaattgagcacccacatttattccatgaggaagaaacaaaagccaaaagggactgtaatgacacactagaggaagacaatactaatttggagacaccaacgaagagggtctgtgttgacacagaaattaaaagcatcatttaaccatagacaatttgccaggatctaggaaccacctaatggtaggtggacagaaaaggaaaaaaaaaaaaatttacttgcaagtactaggaattcagatgatcagctcttaaaaaaaaaaaaaaagcaaaaagactaaagccctattaaggaagttattgctttaataagaaatttcaaatattctcttatcccggtccaaaaggattaagcgattaaagaacgtaaaatggagatgtatttacatacacctggaaacctgtgccttgtattcaaattcattaaagcctaatcctgcaagtatctgattt

SEQ ID NO: 343915 - DNA, 1214 bp, Homo sapiens
gcacagtgacagcttcctttctcggaaacgcggcgcggccggctgccggaaaacagggcagacctgtatgattggtttattcctggggttgtcatatcatggctgataatgacacagacagaaaccagactgagaagctcctaaaaagagtacgagaactggagcaagaggtgcaaagacttaaaaaggaacaggccaaaaataaggaggactcaaacattagagaaaattcatcaggagctggaaaaactaagcgtgcatttgatttcagtgctcatggccgaagacacgtagccctaagaatagcctatatgggctggggataccagggctttgctagtcaggaaaacacaaataataccattgaagagaaactgtttgaagctctaaccaagactcgactagtagaaagcagacagacatccaactatcaccgatgtgggagaacagataaaggagttagtgcctttggacaggtgatctcacttgaccttcgctctcagtttccaaggggcagggattccgaggactttaatgtaaaagaggaggctaatgctgctgctgaagagatccgttatacccacattctcaatcgggtactccctccagacatccgtatattggcctgggcccctgtagaaccaagcttcagtgctaggttcagctgccttgagcggacttaccgctattttttccctcgtgctgatttagatattgtaaccatggattatgcagctcagaagtatgttggcacccatgatttcaggaacttgtgtaaaatggatgtagccaacggtgtgattaattttcagaggactattctatctgctcaagtacagctagtgggccagagcccaggtgaggggagatggcaagaacctttccagttatgtcagtttgaagtgactggccaggcattcctttatcatcaagtccgatgtatgatggctatcctctttctgattggccaaggaatggagaagccagagattattgatgagctgctgaatatagagaaaaatccccaaaagcctcaatataggtgagttaaaaataaaaaataaatggcacatgcctgtagtcccagctactcgggacgcttgaggcacaagaattgcttgaagccaggaggcggaggttgcactgagctgagattggaccactgcattccagcatgggtgacagagggagactgtcttaaaaaaaaaaaaaaa

SEQ ID NO: 343916 - DNA, 873 bp, Homo sapiens
tttttaaagaactgttagatggatgttatgtattctcaaactttcttttctctttttctctagtatggctgtagaatttcctctagtcttatatgactgtaagtttgaaaatgtcaagtggatctatgaccaggaggctcaggagttcaatattacccacctacaacaactgtgggctaatcatgctgtcaaaactcacatgttgtatagtatgctacaaggactggacactgttccagtaccctgtggaataggaccaaagatggatggaatgacagaatggggaaatgttaagccctctgtcataaagcagaccagtgcctttgtagaaggagtgaagatgcgcacatataagcccctcatggaccgtcctaaatgccaaggactggaatcccggatccagcattttgtacgtaggggacgaattgagcacccacatttattccatgaggaagaaacaaaagccaaaagggactgtaatgacacactagaggaagacaatactaatttggagacaccaacgaagagggtctgtgttgacacagaaattaaaagcatcatttaaccatagacaatttgccaggatctaggaaccacctaatggtaggtggacagaaaaggaaaaaaaaaaaaatttacttgcaagtactaggaattcagatgatcagctcttaaaaaaaaaaaaaaagcaaaaagactaaagccctattaaggaagttattgctttaataagaaatttcaaatattctcttatcccggtccaaaaggattaagcgattaaagaacgtaaaatggagatgtatttacatacacctggaaacctgtgccttgtattcaaattcattaaagcctaatcctgcaagtatctgattt

SEQ ID NO: 343917 - DNA, 1428 bp, Homo sapiens
gcacagtgacagcttcctttctcggaaacgcggcgcggccggctgccggaaagtgatctcacttgaccttcgctctcagtttccaaggggcagggattccgaggactttaatgtaaaagaggaggctaatgctgctgctgaagagatccgttatacccacattctcaatcgggtactccctccagacatccgtatattggcctgggcccctgtagaaccaagcttcagtgctaggttcagctgccttgagcggacttaccgctattttttccctcgtgctgatttagatattgtaaccatggattatgcagctcagaagtatgttggcacccatgatttcaggaacttgtgtaaaatggatgtagccaacggtgtgattaattttcagaggactattctatctgctcaagtacagctagtgggccagagcccaggtgaggggagatggcaagaacctttccagttatgtcagtttgaagtgactggccaggcattcctttatcatcaagtccgatgtatgatggctatcctctttctgattggccaaggaatggagaagccagagattattgatgagctgctgaatatagagaaaaatccccaaaagcctcaatatagtatggctgtagaatttcctctagtcttatatgactgtaagtttgaaaatgtcaagtggatctatgaccaggaggctcaggagttcaatattacccacctacaacaactgtgggctaatcatgctgtcaaaactcacatgttgtatagtatgctacaaggactggacactgttccagtaccctgtggaataggaccaaagatggatggaatgacagaatggggaaatgttaagccctctgtcataaagcagaccagtgcctttgtagaaggagtgaagatgcgcacatataagcccctcatggaccgtcctaaatgccaaggactggaatcccggatccagcattttgtacgtaggggacgaattgagcacccacatttattccatgaggaagaaacaaaagccaaaagggactgtaatgacacactagaggaagacaatactaatttggagacaccaacgaagagggtctgtgttgacacagaaattaaaagcatcatttaaccatagacaatttgccaggatctaggaaccacctaatggtaggtggacagaaaaggaaaaaaaaaaaaatttacttgcaagtactaggaattcagatgatcagctcttaaaaaaaaaaaaaaagcaaaaagactaaagccctattaaggaagttattgctttaataagaaatttcaaatattctcttatcccggtccaaaaggattaagcgattaaagaacgtaaaatggagatgtatttacatacacctggaaacctgtgccttgtattcaaattcattaaagcctaatcctgcaagtatctgattt

SEQ ID NO: 343918 - DNA, 452 bp, Homo sapiens
ggttccataaattatcaattatttcaaatatatttattttggcacagttttagtgcaatcaaaatgtggacagtcacaagaagatttttgattgtaagtgagtaaggaatcaattaaaacagtgttctagaagaactgtagtcttgaattttagactcttagaccacaaacgaacctggaaaagtcacacataaactgtacaaaattagataatatgggcttcaaacaaaaacaacagcaagctctctttcggtatgaaaactctacttttttttttttttttttttttttaaagagccagtccttgttttcttgtctctaaaatgtggatggttatactgtatctgcttgccaaattcatagaattcttgtgaaaattaaatggattaatttatgctagagaaatctataaattataaatctctgtacaataatttttcaaaatatggtat

SEQ ID NO: 343919 - DNA, 1089 bp, Homo sapiens
ctgtctgtgtgcccctgggaatgatcaggaaagactgaaagcgatgatgccagacagagggcagctcctggagtgatgtcaggaagtccgtgtggtggtgctctgtcgctgcataacaaactacccactacttagaggtttaaaaattaaaagcaagttagctcacagtttcagtcgatcaggaatccagcttagcagggtgattctgtccaagttcctcctgagggtacagtcatctaaaagcttgtccggggctagaagaaccctcttccaagcttccacacatggcttttggcaggcggccattgttccttgccacatggcctctccacagggctgcttgaatgtcctcacagcatggctgacttcccccagagcaagccatccaagagagcaagagactaagatgggaaccacagtgtcttttgtgacctagtattagaagttgcatgtcatcccttactctgatttgttagaagggagtcactaagtacaaagtagggtggccagacatccaaataaagataaacaaaggcttattagtataggtgtattccaaatattgcatagggaattcttacactaaataatgactttatctgaaactcaaagttaatgtatgacctgtatttttatttgttagatttggcaacttcagaaggaatttgtggacatacttttaaactacggctagccaaagggaatgggatgtagtgcatatgtagagctcaggcctacagaaacacggcagatcatagggagagggctggcggagtacttggcaaatgtagataggtaggcgggtgggtaggcagaggcagtgaggggagcaggtggacatgctcttctgattgcttctcttttctcaccggagtaagcagcaaggttatgggcaaggtaaccttctcccgccccgccatacaccttgcacagagcttacccttgactcagaccctccatgctgggggaattacctccctgtgaccatcctaggaagacacctcttggctcttgcagagtcagaaaagcacaggacatggagttgagaaacccggtttcttctttttcttctttttcttttttttgaga

SEQ ID NO: 343920 - DNA, 361 bp, Homo sapiens
atcacatttcttaaaaagtgaattgtgcttttcgtattgtgtctaagaattctttgcccaaccaaaggtaaggattttctcctgtgtttcttcttgaaatggtacagtaataattattacatttaggcctatgatttatttagaatttttttttgtgtagtatgaggtaagggctgaagttcaagttttttgtttgtttgtagcatgtggatacacaattattctagtgctaattgttgtgaaggctatctttttttgccttgattcgttttgatcactttgtaaaaaaaaaaaaatcaattgactgtaaatataagaattgattcctggattctcatttatgttcagttgagtcaactga

SEQ ID NO: 343921 - DNA, 896 bp, Homo sapiens
gcctgaggaggggtagggggcggtggccccgggttctagcccgcctgtcctcggcccccacttctggaatgagcctgcccgccccctgactctcaggccacagctccggccacagctctggctcctgctccgcggcggatcccacaaacccggcagccacggcggtggcggtggcggtggcggtggcggtggcggcggcggcggcggcggcagcggcaggcggcatcccagggtgataggctgaagcaatcgagggccgagagcccggccgcgtgtgcactcgagtaacgaagccggggagggactgcgccgcaggcaggaaaagtcggacaccgaattattcatccggcctgtcccgcctactttccaagtaccctcccagggatagccgggtattgagcggtccgggtctctgctgctcaaagatcgaagaagctgctttatcttacagtcacccaagggggagcgccttcttccttcccagagtggagtggcagtgggtccgggattctgggatatgcacagggtctgcgccctgcgccctgtccgcgctgaagctgaacttgtcattggtttgcaacagcatggtgaagaagtgtggtgtggatggacggacgggcctctcaggcacatgaaatactcaaagcccagtattaaccaaacatgtttctctgttttgtctttgatctttgtgcagtgtgttggcttttttcctttaatgatgtcacttgtattttatttttggtttatttgtagactgtctccctccttggccatggctttacttttatgtccacccaaggagagtttcaccagtttaggtttaagaaattactgacaagttaacaataataatttcaaaattgaacagtaataacttaaaccgtgccttggac

SEQ ID NO: 343922 - DNA, 923 bp, Homo sapiens
gcctgaggaggggtagggggcggtggccccgggttctagcccgcctgtcctcggcccccacttctggaatgagcctgcccgccccctgactctcaggccacagctccggccacagctctggctcctgctccgcggcggatcccacaaacccggcagccacggcggtggcggtggcggtggcggtggcggtggcggcggcggcggcggcggcagcggcaggcggcatcccagggtgataggctgaagcaatcgagggccgagagcccggccgcgtgtgcactcgagtaacgaagccggggagggactgcgccgcaggcaggaaaagtcggacaccgaattattcatccggcctgtcccgcctactttccaagtaccctcccagggatagccgggtattgagcggtccgggtctctgctgctcaaagtaaagaccgtttgagaaggcggggaggatcgaagaagctgctttatcttacagtcacccaagggggagcgccttcttccttcccagagtggagtggcagtgggtccgggattctgggatatgcacagggtctgcgccctgcgccctgtccgcgctgaagctgaacttgtcattggtttgcaacagcatggtgaagaagtgtggtgtggatggacggacgggcctctcaggcacatgaaatactcaaagcccagtattaaccaaacatgtttctctgttttgtctttgatctttgtgcagtgtgttggcttttttcctttaatgatgtcacttgtattttatttttggtttatttgtagactgtctccctccttggccatggctttacttttatgtccacccaaggagagtttcaccagtttaggtttaagaaattactgacaagttaacaataataatttcaaaattgaacagtaataacttaaaccgtgccttggac

SEQ ID NO: 343923 - DNA, 314 bp, Homo sapiens
aaatttgtggatgggtttggtggattggtggccagggatgccatcctgcaatgtgagagacagcgaataattatcttgcatcccacaagactttcagatgccccagaaattcatgtaggaggaaaatataattagcccagaacctaactctataatatatattcactttgccaggagttaaatttcttttaattcatttttttcttgcctgcctgcctccctccctccctccctccctccctctctccctctctctttctctctgttttctttctttttccttcctccctccctgcctccctcccttacttcag

SEQ ID NO: 343924 - DNA, 559 bp, Homo sapiens
attctgtaactgggtccttgactcccttgctctgactgttcccaccctgtggaatatactttcattttcagtaaatctctgcttttgttgttttattctttcctcgctttgtttgtgcttttgtcctattctttgttcaaagcgccaagaacctgggcgcctccactggtaacatctcctatcttggatctccaagtttcctggattccattttgtcatctttttagctcacttccttgttgtagaggacatcttttctgagagaggatacaaggggagataaatgtgtattagaccttccaggcctgaaatgtctatcctacccttatacttattgatagatcttattggatacagaattggaaaattgcttgcagaatttcagaagtattgatcagttgtattctaggttccagtattgctttggagaagcagtagcccttgttatttttgtgcttttccttcatactctttttttttttaaagttatttatttatttattttgtagagatggagtctccctctgtactccaggctggagtgcagtggcatgatctc

SEQ ID NO: 343925 - DNA, 979 bp, Homo sapiens
ctttaaatggcagaacatcaggtttccatttccaaaattatttttcttcatgctctgactgaaatagtgactggtgttggagaaacgggtggaagatagcgtaataaaccaaattgttctttctagtggggaaagcatgaatcacccaaaactaataatcacggaatttacttacatggtatggaagaataagcaaccatagaagaaatcagaatagttgtcacagaactaatttacaagcattagtgctgtttcccaggccaggttctatcttgttctcaaggaatagttacatcttcagtgtaaattatgggtaccattgagagaagttttactttctactttatgaaaatgatgatgatgacaataataccgcaacatgagtactgctaatggaaacactttatgcccaggcacagtggctcacgcctgtaatcccagtactttgggaggccgaggtgtgcagatagcttgaggtcaggagttcaagaccagcctggcctacgtggtgaaaccccgtctcttattaaaaatataaaaatcagccgggtgtggtggtacacgcctgtaattccagctactcgggaggctgagacaggagaatcgcctgaacctgggaagcggagattgcagtgagctgagatcatgccaccgcacttcaatctgtgtgacagagtgagaccctgtctcaaacaaaacaaagcaaaacaaaacgcttcagacagaattactgtcaagcacgtcacgatgcaccttctgtgggttatcttactacattttacctgtctactgatgccccagcgtggccacagcctgaactgcagcaccttcctgcagataccccttttttagtgaacaagtaaatgctgcttctagtccccttggtactaggtctgtgcagagcacagagaaagatgaatccagccagagactgccccagagtaactcccagaggtggaatgagtgagataatgctggg

SEQ ID NO: 343926 - DNA, 276 bp, Homo sapiens
tcctatgaaagagttccacaatatactatttaggcaggcatgcaactcggctccatagagttatcaggaatccaggctgatggtggctcttctgcctttgataagtagcttccgaggtcactccagtcatcaccatttcatctggtaagaaagtaggcaaaggtgtgaaggagtgggcaggagtttcacaggtcagtcatgtaagtggcacacacacttcctcttatattcagctggtcacatggccacactggctgcaaaggagaatgggaaatg

SEQ ID NO: 343927 - DNA, 705 bp, Homo sapiens
tcttcctcaccctactttacactatttttgtagtttccatctatttattttgtatatgtagtatcatatttattgttaaagttttaaaaaaatttgtcttttaacttttgtacaatgattaaaagtaatttaccattatattattctatatacagaacctatacatttgtctttactaatgaatattagtaagaaatacgatactcatttaaaaagtaaatatatagaaaatattttatgctaccaccttgccgtatatcatcctttcattttaacatgaaaaaatccctttagtatttcttgtaaggcatgtctagtgataatcaactttcttcacttttgtttgtctggcaaatactttttctctccttcattttcaaaagacagttttgcctgatatagtattattgattagcagttttacgttttctgtcagcacttcaaatacataatctattcctttctagtgtgaaatattctttctgagaaatctgttgatagtcttacagagattacttggtgcatgacaaatcatttctttcttgctgctttaaaattcatcttttgacttttgacaatttgattataatgtatctttatgtgcatttatttgggttcatttgattttgcaatttttaggtctagatgtctattttcttctccagatttgggaagttttcagtcattatttatttaaattatctg

SEQ ID NO: 343928 - DNA, 463 bp, Homo sapiens
ggatcccaggtgtactgaggagggtgagctctctgacacgggttagcgtcattgggatatttgtacaaacgcaacatagtaattgggtttcaccatgtacaagagaaaagcactaaggtttttaaaaacccagctcatttggcctgtgaaatcttaccaggatgcccctcctttttccttcccacctgcccccttccttctcattactgctgtccttgtgcagcatccccccagtcacgtgctaagcctacctgaagatgctgaccattttcaataatgcaacgttagggtcagaggagagcaaggatcatcagctagtaccctggaggcaaattcttaggacagagattttctcagcctgattctagaactatgggcaagccagggattccccccacaaatcaacagggctgctctgttatttcatgtgagaccttactccccttctagtcagggagctcct

SEQ ID NO: 343929 - DNA, 585 bp, Homo sapiens
agacggaatcttgctgtgtcgcccaggctgaagtgcagtggcacgatttcggcccactgcaacctccacctccgggttcaagcgattctcctgcctcggcttcctgagtagctgggattgggattacaggtgaggggcactacgcccggctaagttttgtattttcagtagagacggagtttcaccatgttggtcaggctggtctcaagctcctgaccttgtgatccgcctgactcagcctcccaaagtgaaggcaaagatatttaaaacgacatacctgctaagtggtagaaccaggtttgtaacccagactgtctggccccaaaccagagttcctcaacactgcagtgacaaatctcagctgagaagctgtattccagcacagcttcacgtagtcctcttgaaatacacatgtccattgcatggtttacacacaagtctatttgcttgtctgcccacacactggactataatctccttgaatgtaggagactcatttctcaatgtctgggatatagatggcattcatgcagatggtaatgagggcagttgtagctatgcgtatttcttccttgcttgttatgt

SEQ ID NO: 343930 - DNA, 503 bp, Homo sapiens
tcactcgaggtcaggagttcgagaccagcctgggccacagggtgaaaccctctctctactgaaaataccaaaatgagccaggcactgtggcaggcgcccgaatcccggccactcgggaggctgaggcaggaggcgtgagccattgcgcctcttacatttttgtttctcattttctcctgaacctttttttctgttgccatcactgtactctctccagaatcaccggtgacttcagagttgctaaatccaggagacagtttcagtcctctctgcctctgagctgtttcctctgcctgcaattctttttcttcccacctaagcctgtttgtttcttgctcacttagtaaagtcactttcccagggaaaatgtttccgcaccctttgcttttcaactgtggttgaatacttttataattatttgttgaatttctctagggctgcctggtttgtgggggctaggattttctttacttatttatttttggaggcagagtcttgctctg

SEQ ID NO: 343931 - DNA, 558 bp, Homo sapiens
tcactcgaggtcaggagttcgagaccagcctgggccacagggtgaaaccctctctctactgaaaataccaaaatgagccaggcactgtggcaggcgcccgaatcccggccactcgggaggctgaggcaggaggcgtgagccattgcgcctcttacatttttgtttctcattttctcctgaacctttttttctgttgccatcactgtactctctccagaatcaccggtgacttcagagttgctaaatccaggagacagtttcagtcctctctgcctctgagctgtttcctctgcctgcaattctttttcttcccacctaagcctgtttgtttcttgctcacttagtaaagtcactttcccagggaaaatgtttccggtcattctccgggcaccctaggctacatcaggtaacctgttagaacatttcaaagcaccctttgcttttcaactgtggttgaatacttttataattatttgttgaatttctctagggctgcctggtttgtgggggctaggattttctttacttatttatttttggaggcagagtcttgctctg

SEQ ID NO: 343932 - DNA, 169 bp, Homo sapiens
cctgtttcaggtatgtctttaacagcagtgtgaaaatggactaatacacctagttacccagaacttgggtaaaccttggaagtatctctggcttctctataacaatgtttaatgttcaatcagttgataaagtctcaatcagataaatcactaacacctctgacatagt

SEQ ID NO: 343933 - DNA, 366 bp, Homo sapiens
actcaaattacacttttaatcataaaaaatcatcagttttgctaaaaaagtttcactagcccctttttctaaattataatgaaaattacattattctaactttggggtaattgtttaatatttctgctacacagtatcaatcagcataaaggattggagttcctagttctcttctttggtactgattatataatagtcaagttctttcgaattataggattttagttagtattaaatatactaaatagcatgtgtccttcacattctttcaataaactgctgcgcacacaaataaatattatggtaacggcaaataaacttcatattgaacttagaattggaactttttattaaccattccaactc

SEQ ID NO: 343934 - DNA, 490 bp, Homo sapiens
gtggagtcatggactgttcttcattttcagtatgctgaatgatttttctgatcatggataatcagaaaaacagtaatgctgaagactagctgagagtaggcctggcaggaactgtgtgagctaaaggagaagaggaagacatgagacttggactgtggttaaatgggtccctctcctggctaatacatatggaagcaggcaccttttaaagacatcagctaaagcagattcagttttcagttaagggacatatagcaattatgatgttcggtggaagaaccagattctcttgtcttccctgagacccagaggctgaataaccaggaacttccagagatacttggttctcagaaagaaagaaagctgtccaacatgccattgaggatactggcttaaaagaagtctgttcttaccaggctgaagtagagctcttctcttcctcagacagatgcctcattaggcaaaattaaaaatctaggaaaatagagta

SEQ ID NO: 343935 - DNA, 309 bp, Homo sapiens
catgaaaaataaagaacatccaaaatttaaaaattgaatatacagaagaagtaggatgatttataagttacttcatacactacaaaatgcttcagttctgaattccattaaatagctcatcgttacttcatatactacaaaatgcttcagttctcaattccattaaatagctcactttttgatttcaatttattatttgtatttcaacaatcttttttttttttgggatggagttttgctcttgttgcccaggctggagtgcaatggcgcaatcttggctcactgcaacttccgcctcccgggttcaag

SEQ ID NO: 343936 - DNA, 766 bp, Homo sapiens
tgcacatgaagagaaaatcctgtgtgtgtgtcttcatacttgctggctctagtaccagaagagagggatctggcttcagagcaggactgaaaacttctcaccagtctggggataatagtgttgaggcaaattcattctcttgacttgcaaaaacagatttttctcatcttcctccttctctcaccttttttgcagtagcatttttcctcaaagtacaactcatttttttactaacgcctaactaatcctagtgttattttatcatatttttaccaagaatgttctaaaaatcttggagacgttcctccatgatcttgggaaaaaaagttgccaaatgctgtgctgttttttttgtttgtttttaattttctttcatttacagatttcatgaaacttatattctgtggctttgaccctcaccaatcttggaagattgatctctcaaggacaaacccagtgcctatttctcagtcctttttctacttgacatttgcagaattggcactttttgccactgttatgccttaaatcttgagcttctttcaggatccatgattctgtgctgatctacacttttcctacctctcagcatttctttgattgtcaatgatcagctctgtgatttggggcaagggttaggccagaattatctcattttatcaagttataaaacttgaggtagtgcaactagattatacacttcttgaagacagaaatcttggtttgtttgttgttttatttttgagagaaggtcttgctgtgttgc

SEQ ID NO: 343937 - DNA, 602 bp, Homo sapiens
gaggcagaggctgcagtgagccaagatcatgtcactgcactcccgcctgggcgacagagcaagactgccccaaaacaaaacccaaaaacattttctgacctggagtcatctgaaaccaggtgtcaaaaacctataaaagagaagctaagggatattacaagaatgcgcttcctcctgtcctcctttcccccttcattggttatatctccctcacctccccaaatgttcatgtaacatacacaacccctgccaaaaaattcacccacccaaccaaacagacaatgtaatgagctggtttttgccttcggtggttgaagtggatacatttttattccctgagagtggtgaaggaatcaagctaaaaaagaagagttctattaatgtatcctggttgagtttcatctctttgtgaaaatcacattttgggttcagatgttcattcatctacctaggcatatgcagtgttattttaccgtttcattttgattacaggatggaaaaattcgagtcaccattcttgcacggagcacagaataccggaaaatccttaaccaaaatgaggttagtttttggtatgcatttttaatgccttcatattcaat

SEQ ID NO: 343938 - DNA, 533 bp, Homo sapiens
taaattacccagtccaggtatttctttatagcagtgcaagaatgaactaatacatctatcaaaaatggagcaatttcaaaactataaatgtgatcttaatatgtatttatccaatttaaaaagcaagtgtcagagaaaaacttcatcctctcctgctcctaactgttgatctctgaatccactatgctctcttatgcccctatgcctttgaaattgttattttcccctttgcttgtttagaatctcctccttaaacctgtctggcaagtttctactcattatggaagtcttccctggttttcccaaaaaagatgcatgcaatcttcccctatgcacgtttatatacttacataagtacctctcaaactatatcataactgtctcttatggttagagaacagtaagctctctacaggcaatgactgaacacctcttggcagaactaatattgaactggtacacaccaacagagcctgaagggtcatacttaagtacggaaatacttccgtaacatagtctggtacgtgtcactg

SEQ ID NO: 343939 - DNA, 435 bp, Homo sapiens
tgagtaagatatgagaaagagcagagaagaaaaagggacgttccaggcagtggaaatgagcaaaggtataaaagggataatttcttatagtagtgattctcatctttttgtttccctagatttgcctctaaccaagtgatgacacagagaatgccctcaatttctaaagtcccttgcctacccataattttgaatgttaccaaaacccacagatttaatgtgctgatcagttaatcaaaattcaatggagacagtctatttctgcatatgtcttcagataacttttgtgaacataaaaatccaacacatcgagccaggcaatgactgaacacctcttggcagaactaatattgaactggtacacaccaacagagcctgaagggtcatacttaagtacggaaatacttccgtaacatagtctggtacgtgtcactg

SEQ ID NO: 343940 - DNA, 238 bp, Homo sapiens
ttttgtgttaaaataacacttttttacttctcaactcagacaagcaaaattttgtcagcccatggacaagttgcttaaggcatctattcggtatttacataactgctgtctcattatctttatgacccgtggggctagtagcttttatagaattgaagatgacattttgtgacaataagaggctagaactatgatccttttgtacagttaaattctgtagtcttaaccattggtccag

SEQ ID NO: 343941 - DNA, 485 bp, Homo sapiens
gtaactccttttcccactctgggcctgttttcccatccctaaaacaagagagttgacacaatcaaccattcagtttgtcttggcattaaggttgcatgagtgtgaggatctcagggtcagatgggctctgccttccagtttgctagcgtcccacctcctaatgggaattcacacacatgtgggtatgcctacacacacacacacacacacacacacacacacacacacacacacacagcctcgctcaggtctgaaggtttttctcttgtttggttagactgggtatgcctgtacacacacacacacacacacacacacacacagccttgctcaggtctgaaggtttttctcttgtttggttagactgcttctccctgagcatgccagtgcctgcatctggccagaccatttttaatttgagacacacacatctccgtgctgttgatctccttcctccctggccggtagtctgggtagccctgacc

SEQ ID NO: 343942 - DNA, 444 bp, Homo sapiens
tggttgtgcctgtgcctccaaagcatggatttgatagctccaatattgtaatctaaatttcctggcaatgcccccactgctggatagattgctgttgacagcttttgaccagagggagccattagattttgctggctagcaaacaattacagctttgatatgagctacaaggctctacctctcccctgagtattagaagtctgaaaagaagagctgtctccatgaagatgggccaaatgccctccctcctgtggctgattgtgctacatcatcccaacatgataaaccagaaatctttgagtaccacatcctaattcttatgaaaatccagataccattgataatctttgcagtaagcatgcaaaaatatgtaaactgctcttaccaaagcaatctgaaagcataatttttgtgacaagaataataactgtgtgagaaataaaa

SEQ ID NO: 343943 - DNA, 945 bp, Homo sapiens
gaaatcaacaatgttttagatcaaagctgttccattttcctggatcctagtggggagctaacatggcacagagccacagccaatccaaggacatgtgaatcctagaaaagaggagttcctccaaggccctggaatcagaaacttggattgccaggacctgccctcagtgttcttcactccacacaacacagctgacccagacatcatgtgcaggaggtacctcctgacagcaggcttgacaccagctactgtccagctccccagtaaaccagattccctcattgctcctaatggggtctagactgcaggaggaggaagcaggtgggcaatgtccagatttccatgatgaccctctgaggagatatccgtggctaggttactgcacgactacagcatcacagaggagactccagaactcaaactaccaagagcacccctccatcagctttgtttcctaactcctggcctgcctcctttcttgtggcgccatctcacagccaaatgacaacaagccctctctgtccctcacaaaatgcctgtgataaaaagttccctttgcagccagaccagctgagactggtacatagaaccaagacagctgaccaaaggacttcaaaaagacctcagtcttcatgataatcttatttccatgctaaatgatactccctccagcaccacgacagttgacaattgccatgacaatgactggaagaagccgtaaaaggactaaaagggaggcggtactactgattccaggaggttcaccacccacttctggaaaagacatgaatattcttcccttttcttttaatgtcacctccttcattagagaaatcctgtatcttaagcccctcaccctcacttgttgagaagttgattgtgagccatctcctgcttctcaattccacggccattgaataaagcctgcactgcttgacactcact

SEQ ID NO: 343944 - DNA, 888 bp, Homo sapiens
gaaatcaacaatgttttagatcaaagctgttccattttcctggatcctagtggggagctaacatggcacagagccacagccaatccaaggacatgtggacctgccctcagtgttcttcactccacacaacacagctgacccagacatcatgtgcaggaggtacctcctgacagcaggcttgacaccagctactgtccagctccccagtaaaccagattccctcattgctcctaatggggtctagactgcaggaggaggaagcaggtgggcaatgtccagatttccatgatgaccctctgaggagatatccgtggctaggttactgcacgactacagcatcacagaggagactccagaactcaaactaccaagagcacccctccatcagctttgtttcctaactcctggcctgcctcctttcttgtggcgccatctcacagccaaatgacaacaagccctctctgtccctcacaaaatgcctgtgataaaaagttccctttgcagccagaccagctgagactggtacatagaaccaagacagctgaccaaaggacttcaaaaagacctcagtcttcatgataatcttatttccatgctaaatgatactccctccagcaccacgacagttgacaattgccatgacaatgactggaagaagccgtaaaaggactaaaagggaggcggtactactgattccaggaggttcaccacccacttctggaaaagacatgaatattcttcccttttcttttaatgtcacctccttcattagagaaatcctgtatcttaagcccctcaccctcacttgttgagaagttgattgtgagccatctcctgcttctcaattccacggccattgaataaagcctgcactgcttgacactcact

SEQ ID NO: 343945 - DNA, 724 bp, Homo sapiens
gaaatcaacaatgttttagatcaaagctgttccattttcctggatcctagtggggagctaacatggcacagagccacagccaatccaaggacatgtggtacctcctgacagcaggcttgacaccagctactgtccagctccccagtaaaccagattccctcattgctcctaatggggtctagactgcaggaggaggaagcaggtgggcaatgtccagatttccatgatgaccctctgaggagatatccgtggctaggttactgcacgactacagcatcacagaggagactccagaactcaaactaccaagaatgcctgtgataaaaagttccctttgcagccagaccagctgagactggtacatagaaccaagacagctgaccaaaggacttcaaaaagacctcagtcttcatgataatcttatttccatgctaaatgatactccctccagcaccacgacagttgacaattgccatgacaatgactggaagaagccgtaaaaggactaaaagggaggcggtactactgattccaggaggttcaccacccacttctggaaaagacatgaatattcttcccttttcttttaatgtcacctccttcattagagaaatcctgtatcttaagcccctcaccctcacttgttgagaagttgattgtgagccatctcctgcttctcaattccacggccattgaataaagcctgcactgcttgacactcact

SEQ ID NO: 343946 - DNA, 698 bp, Homo sapiens
ttcccagggccctacaatgaatagtgggtcgggactcacttggtgactgctgggttgtgaggccttgagggggaggggcagacttcacccatctggcagagggacatcggtgctggcagtcaggaaacccttatttccaggcctcagtttcccggaagtgacctgttttcaggagtggcctcatcccagaccatcagccccgctgtggtgaggggtggccccttcctggggctgccctagaagggggaggtccctgcacccaccgcagctgccactcggcagcccttggccttaattaaacgcttcttgcgtactaagtgctgcacccatattatctcccttctaccattcgacgccagggagataatgactgtcctgttttctggaggagtaaacggagggttggagcggttaaggctcgctcagggtgccagcgaaccagtgatttcgaacacagagttctggtgtgttgggccaggacttctctgctttgaccctttaacgaagggggcgggagctgagggccagtgaccgccagtaaccccggcagacgctggcaccgagcgggttaaaggcggacgtccgctagtaaccccaaccccattcagcgccgcggggtgaaactcgagcccccgccgccgtggggaggtggggcgggggccggggccgggccctagcgaggcggcagcgcggccgct

SEQ ID NO: 343947 - DNA, 551 bp, Homo sapiens
aaatcctagtggactcagacagcaaagtgggaactatctggtccacccaggagtatgcctggaagcccaagatcatcttttcaaagacagagtctgtcttccaacctcagcaaaatcaacactcaagactacagcctaatctgttttgtcgctggcaaccccctctcgaaagcgtaaacgctcccagggagccaccaggaacagatgtggacgggcagctcccacccagggcacagctgtcattcactcggctcagaactgggaagccggccgggcacagtggctcacgcctgtaatcccagcactttgggaggccgaggcgggcaggtcacctaaggtcaggagttcaagaccagcctgacgaacatggtgaaacctcatctctactaaaaatacaaaaaattagccaggcatggtggtggacacctgtaatcccagctactcaggaggctaaggcaggagaatcacttgaacccaggaggcagaggttgcagcgagccgagattgcgcctttgcgctccagcctggcaacagagggagactccttctca

SEQ ID NO: 343948 - DNA, 560 bp, Homo sapiens
atgttaacccaaagatggataggaaaacaaaaatatgctacaaggaaaattattatgggctattcaggtgttcttgttactgtatgtgcccctaatattaggattttcttcacagaacattatcattcaaaaaagaagtcattacatatattcaggttcttacaaaggctctcatgttactgactaatctttcaattacagtactttattttgaacatcaaaatggctttcatgaatgtttgcttatgatgcttgaagaagttactggtaaaatcagatttataaagaagaaagatttaacacaaatttagtaatttggtcatgacctcacaacgacaagtgttgggcattattgtaaacaaccctttttaagaacagataaagcagcaccacaagtgtcattgctatggagatcacaacccctgcaggatctatgacaaactgtcctgctatttagcaaattggtacttgtggtaactgtgccatacatgaattttaaaaagtgctatacctcaaacaatctggaagggaagacgatttgctcaggaaagtaaaaaaaa

SEQ ID NO: 343949 - DNA, 281 bp, Homo sapiens
acacaaagtctttcagaaaagaaacagggtgatcttgattatgctttggaaaggttgataaaaacagcttgttctctgagaacaccctccagacataggaagagtggcttgaaataggtgaggtcaactaagagaaaatgatctgggatcagccattcacttcagataatccaaaaagcaatggttaaatgggttggtacaaggacagggttacagtatataagaaaagcattagcacagaaaaaggagtcgtgtaagaaagtcgccaaggtgaaagtcac

SEQ ID NO: 343950 - DNA, 202 bp, Homo sapiens
ttctgcttgccaaaagatggaatttaattagagtattagaatgacaaagtcatgatttttaactagatcactttttcagtagtggggaaggatttaaggggagcaaaattgggatagaggacatcagtttaggcaagagttaagcgtcagaaatgtagtggcagtgggtttggagaagacagagtgaacttaagagctattt

SEQ ID NO: 343951 - DNA, 875 bp, Homo sapiens
ccggcctcttggtactgctgaccccagccaggctacagggatcgattggagctgtccttggggctgtaattggccccagctgagcagggcaaacactgaggtcaactacaagccacaggccccttccccagcctcagttcacagctgccctgttgcagggaggcggtggcccttctgttgctagaccgagcctgtgggatataccaaggcagaggagcccatagccatgaggagcctcggggccctgctcttgctgctgagcgcctgcctggcggtgagcgctggccctgtgccaacgccgcccgacaacatccaagtgcaggccacctgcccctggctgaagaagatcatggacaggatgacagtgagcacgctggtgctgggagagggcgctacagaggcggagatcagcatgaccagcactcgttggcggaaaggtgtctgtgaggagacgtctggagcttatgagaaaacagatactgatgggaagtttctctatcacaaatccaaatggaacataaccatggagtcctatgtggtccacaccaactatgatgagtatgccattttcctgaccaagaaattcagccgccatcatggacccaccattactgccaagctctacgggcgggcgccgcagctgagggaaactctcctgcaggacttcagagtggttgcccagggtgtgggcatccctgaggactccatcttcaccatggctgaccgaggggaatgtggtcctggggagcaggaacagagcccatcttaatcccggaaggccggagggctggggtacccctctgccagttggtaattgggcgggccctgatggggccagcaggattttataatgggcccatggcgcggagcctccg

SEQ ID NO: 343952 - DNA, 880 bp, Homo sapiens
  misc_feature (716)..(716): n is a, c, g, or t
  misc_feature (718)..(719): n is a, c, g, or t
  misc_feature (723)..(723): n is a, c, g, or t
  misc_feature (725)..(725): n is a, c, g, or t
  misc_feature (740)..(740): n is a, c, g, or t
  misc_feature (746)..(746): n is a, c, g, or t
  misc_feature (754)..(754): n is a, c, g, or t
  misc_feature (817)..(817): n is a, c, g, or t
  misc_feature (828)..(828): n is a, c, g, or t
  misc_feature (847)..(847): n is a, c, g, or t
  misc_feature (858)..(858): n is a, c, g, or t
  misc_feature (880)..(880): n is a, c, g, or t
ccggcctcttggtactgctgaccccagccaggctacagggatcgattggagctgtccttggggctgtaattggccccagctgagcagggcaaacactgaggtcaactacaagccacaggccccttccccagcctcagttcacagctgccctgttgcagggaggcggtggcccttctgttgctagaccgagcctgtgggatataccaaggcagaggagcccatagccatgaggagcctcggggccctgctcttgctgctgagcgcctgcctggcggtgagcgctggccctgtgccaacgccgcccgacaacatccaagtgcaggccacctgcccctggctgaagaagatcatggacaggatgacagtgagcacgctggtgctgggagagggcgctacagaggcggagatcagcatgaccagcactcgttggcggaaaggtgtctgtgaggagacgtctggagcttatgagaatggaacataaccatggagtcctatgtggtccacaccaactatgatgagtatgccattttcctgaccaagaaattcagccgccatcatggacccaccattactgccaagctctacgggcgggcgccgcagctgagggaaactctcctgcaggacttcagagtggttgcccagggtgtgggcatccctgaggactccatcttcaccatggctgaccgaggtgaatgtgtccttgggagcaggaccanannccantnttccgagagtccganggctgngcttcccnagaaaaggaagatcaggggtgggcaactggtactgaagtaccaggaagaattctgcaattggntacttgccggncctggtgggaaggaccacnggattctttantgggcatccaggccgtgggttn

SEQ ID NO: 343953 - DNA, 417 bp, Homo sapiens
ctcctaataataacgacaacgatacaatggtaacagtaatagcattccagggaagagcaaccattgaagatgtctgtgccttgattttcccactggaaaatggcacctgcggtaaaccagaagaggaaaaaaaaatctgatcatttcatggaataccctttggagataaatgattcagcaagcagaggtttctggccccaggcgacagctgctttcccttccctgagtgtccctgcctacggacccctccctgagtctctctgtgtccacagggtgatgaggagctgctgcgcttctccaactgacaactggccggtctgcaagtcagaggatggccagtgtctgtcccggggtcctgtggcaggcagcgccaagcaacctgggtccaaataaaaactaaattgtaaactcctgaaa

SEQ ID NO: 343954 - DNA, 1357 bp, Homo sapiens
ccggcctcttggtactgctgaccccagccaggctacagggatcgattggagctgtccttggggctgtaattggccccagctgagcagggcaaacactgaggtcaactacaagccacaggccccttccccagcctcagttcacagctgccctgttgcagggaggcggtggcccttctgttgctagaccgagcctgtgggatataccaaggcagaggagcccatagccatgaggagcctcggggccctgctcttgctgctgagcgcctgcctggcggtgagcgctggccctgtgccaacgccgcccgacaacatccaagtgcaggaaaacttcaatatctctcggatctatgggaagtggtacaacctggccatcggttccacctgcccctggctgaagaagatcatggacaggatgacagtgagcacgctggtgctgggagagggcgctacagaggcggagatcagcatgaccagcactcgttggcggaaaggtgtctgtgaggagacgtctggagcttatgagaatggaacataaccatggagtcctatgtggtccacaccaactatgatgagtatgccattttcctgaccaagaaattcagccgccatcatggacccaccattactgccaagctctacgggcgggcgccgcagctgagggaaactctcctgcaggacttcagagtggttgcccagggtgtgggcatccctgaggactccatcttcaccatggctgaccgaggtgaatgtgtccctggggagcaggaaccagagcccatcttaatcccgagagtccggagggctgtgctaccccaagaagaggaaggatcagggggtgggcaactggtaactgaagtcaccaagaaagaagattcctgccagctgggctactcggccggtccctgcatgggaatgaccagcaggtatttctataatggtacatccatggcctgtgagactttccagtacggcggctgcatgggcaacggtaacaacttcgtcacagaaaaggagtgtctgcagacctgccgaactgtggcggcctgcaatctccccatagtccggggcccctgccgagccttcatccagctctgggcatttgatgctgtcaaggggaagtgcgtcctcttcccctacgggggctgccagggcaacgggaacaagttctactcagagaaggagtgcagagagtactgcggtgtccctggtgatggtgatgaggagctgctgcgcttctccaactgacaactggccggtctgcaagtcagaggatggccagtgtctgtcccggggtcctgtggcaggcagcgccaagcaacctgggtccaaataaaaactaaattgtaaactcctgaaa

SEQ ID NO: 343955 - DNA, 1807 bp, Homo sapiens
ccggcctcttggtactgctgaccccagccaggctacagggatcgattggagctgtccttggggctgtaattggccccagctgagcagggcaaacactgaggtcaactacaagccacaggccccttccccagcctcagttcacagctgccctgttgcagggaggcggtggcccttctgttgctagaccgagcctgtgggatataccaaggcagaggagcccatagccatgaggagcctcggggccctgctcttgctgctgagcgcctgcctggcggtgagcgctggccctgtgccaacgccgcccgacaacatccaagtgcaggaaaacttcaatatctctcggatctatgggaagtggtacaacctggccatcggttccacctgcccctggctgaagaagatcatggacaggatgacagtgagcacgctggtgctgggagagggcgctacagaggcggagatcagcatgaccagcactcgttggcggaaaggtgtctgtgaggagacgtctggagcttatgagaaaacagatactgatgggaagtttctctatcacaaatccaaatggaacataaccatggagtcctatgtggtccacaccaactatgatgagtatgccattttcctgaccaagaaattcagccgccatcatggacccaccattactgccaagctctacgggcgggcgccgcagctgagggaaactctcctgcaggacttcagagtggttgcccagggtgtgggcatccctgaggactccatcttcaccatggctgaccgaggtgaatgtgtccctggggagcaggaaccagagcccatcttaatcccgagagtccggagggctgtgctaccccaagaagaggaaggatcagggggtgggcaactggtaactgaagtcaccaagaaagaagattcctgccagctgggctactcggccggtccctgcatgggaatgaccagcaggtatttctataatggtacatccatggcctgtgagactttccagtacggcggctgcatgggcaacggtaacaacttcgtcacagaaaaggagtgtctgcagacctgccgaactgtggcggcctgcaatctccccatagtccggggcccctgccgagccttcatccagctctgggcatttgatgctgtcaaggggaagtgcgtcctcttcccctacgggggctgccagggcaacgggaacaagttctactcagagaaggagtgcagagagtactgcggtgtccctggtgatggtgatgaggagctgctgcgcttctccaactgacaactggccggtctgcaagtcagaggatggccagtgtctgtcccggggtcctgtggcaggcagcgccaagcaacctgggtccaaataaaaactaaattgtaaactcctgaaaaaaaaaaaaaaaaaaaaaaaaaaaaaaaaaaaaaaaaaaaaaaaaaaaaaaaacatgttagaccgactagacccaaaaagcattttaaactggggcaagcttatgcatgacggccgaaaaaaaagtttattgggccatttccccctataatttggactttaaccaatttattgccgggggcttaaaaagggcttaattgggaaaactcccccaatgccgagcttattccatttgaggggcatcctttttacaccggttggcttggaaaaccctgggctctccccaatttaccttctaagcagaaagtcctcttttaacggctaggggaaattgcaagagggcccctcccgttaactttccaaaaaattgccgaacctaaggcaattgggaaccgagggcctaaattttgg

SEQ ID NO: 343956 - DNA, 1486 bp, Homo sapiens
  misc_feature (1430)..(1430): n is a, c, g, or t
ccggcctcttggtactgctgaccccagccaggctacagggatcgattggagctgtccttggggctgtaattggccccagctgagcagggcaaacactgaggtcaactacaagccacaggccccttccccagcctcagttcacagctgccctgttgcagggaggcggtggcccttctgttgctagaccgagcctgtgggatataccaaggcagaggagcccatagccatgaggagcctcggggccctgctcttgctgctgagcgcctgcctggcggtgagcgctggccctgtgccaacgccgcccgacaacatccaagtgcaggaaaacttcaatatctctcggatctatgggaagtggtacaacctggccatcggttccacctgcccctggctgaagaagatcatggacaggatgacagtgagcacgctggtgctgggagagggcgctacagaggcggagatcagcatgaccagcactcgttggcggaaaggtgtctgtgaggagacgtctggagcttatgagaatggaacataaccatggagtcctatgtggtccacaccaactatgatgagtatgccattttcctgaccaagaaattcagccgccatcatggacccaccattactgccaagctctacgggcgggcgccgcagctgagggaaactctcctgcaggacttcagagtggttgcccagggtgtgggcatccctgaggactccatcttcaccatggctgaccgaggtgaatgtgtccctggggagcaggaaccagagcccatcttaatcccgagagtccggagggctgtgctaccccaagaagaggaaggatcagggggtgggcaactggtaactgaagtcaccaagaaagaagattcctgccagctgggctactcggccggtccctgcatgggaatgaccagcaggtatttctataatggtacatccatggcctgtgagactttccagtacggcggctgcatgggcaacggtaacaacttcgtcacagaaaaggagtgtctgcagacctgccgaactgtggcggcctgcaatctccccatagtccggggcccctgccgagccttcatccagctctgggcatttgatgctgtcaaggggaagtgcgtcctcttcccctacgggggctgccagggcaacgggaacaagttctactcagagaaggagtgcagagagtactgcggtgtccctggtgatggtgatgaggagctgctgcgcttctccaactgacaactggccggtctgcaagtcagaggatggccagtgtctgtcccggggtcctgtggcaggcagcgccaagcaacctgggtccaaataaaaactaaattgtaaactcctgaaaacaaaagaaaacaaaaaataaagaagaacttaaacggcagtgggcaaggaacttcctgcttcttctatatggncccttctgggccgggcccctaatcgccaatgttgttagaggtctttggctcatctc

SEQ ID NO: 343957 - DNA, 1228 bp, Homo sapiens
  misc_feature (27)..(27): n is a, c, g, or t
atcccccgggctgcaggattcggcacnagggaggcggtggcccttctgttgctagaccgagcctgtgggatataccaaggcagaggagcccatagccatgaggagcctcggggccctgctcttgctgctgagcgcctgcctggcggtgagcgctggccctgtgccaacgccgcccgacaacatccaagtgcaggaaaacttcaatatctctcggatctatgggaagtggtacaacctggccatcggttccacctgcccctggctgaagaagatcatggacaggatgacagtgagcacgctggtgctgggagagggcgctacagaggcggagatcagcatgaccagcactcgttggcggaaaggtgtctgtgaggagacgtctggagcttatgagaatggaacataaccatggagtcctatgtggtccacaccaactatgatgagtatgccattttcctgaccaagaaattcagccgccatcatggacccaccattactgccaagctctacgggcgggcgccgcagctgagggaaactctcctgcaggacttcagagtggttgcccagggtgtgggcatccctgaggactccatcttcaccatggctgaccgaggtgaatgtgtccctggggagcaggaaccagagcccatcttaatcccgagagtccggagggctgtgctaccccaagaagaggaaggatcagggggtgggcaactggtaactgaagtcaccaagaaagaagattcctgccagctgggctactcggccggtccctgcatgggaatgaccagcaggtatttctataatggtacatccatggcctgtgagactttccagtacggcggctgcatgggcaacggtaacaacttcgtcacagaaaaggagtgtctgcagacctgccgaactgtggcggcctgcaatctccccatagtccggggcccctgccgagccttcatccagctctgggcatttgatgctgtcaaggggaagtgcgtcctcttcccctacgggggctgccagggcaacgggaacaagttctactcagagaaggagtgcagagagtactgcggtgtccctggtgatggtgatgaggagctgctgcgcttctccaactgacaactggccggtctgcaagtcagaggatggccagtgtctgtcccggggtcctgtggcaggcagcgccaagcaacctgggtccaaataaaaactaaattgtaaactcctgaaa

SEQ ID NO: 343958 - DNA, 1343 bp, Homo sapiens
ccggcctcttggtactgctgaccccagccaggctacagggatcgattggagctgtccttggggctgtaattggccccagctgagcagggcaaacactgaggtcaactacaagccacaggccccttccccagcctcagttcacagctgccctgttgcagggaggcggtggcccttctgttgctagaccgagcctgtgggatataccaaggcagaggagcccatagccatgaggagcctcggggccctgctcttgctgctgagcgcctgcctggcggtgagcgctggccctgtgccaacgccgcccgacaacatccaagtgcaggccacctgcccctggctgaagaagatcatggacaggatgacagtgagcacgctggtgctgggagagggcgctacagaggcggagatcagcatgaccagcactcgttggcggaaaggtgtctgtgaggagacgtctggagcttatgagaaaacagatactgatgggaagtttctctatcacaaatccaaatggaacataaccatggagtcctatgtggtccacaccaactatgatgagtatgccattttcctgaccaagaaattcagccgccatcatggacccaccattactgccaagctctacgggcgggcgccgcagctgagggaaactctcctgcaggacttcagagtggttgcccagggtgtgggcatccctgaggactccatcttcaccatggctgaccgaggtgaatgtgtccctggggagcaggaaccagagcccatcttaatcccgagagtccggagggctgtgctaccccaagaagaggaaggatcagggggtgggcaactggtaactgaagtcaccaagaaagaagattcctgccagctgggctactcggccggtccctgcatgggaatgaccagcaggtatttctataatggtacatccatggcctgtgagactttccagtacggcggctgcatgggcaacggtaacaacttcgtcacagaaaaggagtgtctgcagacctgccgaactgtggcggcctgcaatctccccatagtccggggcccctgccgagccttcatccagctctgggcatttgatgctgtcaaggggaagtgcgtcctcttcccctacgggggctgccagggcaacgggaacaagttctactcagagaaggagtgcagagagtactgcggtgtccctggtgatggtgatgaggagctgctgcgcttctccaactgacaactggccggtctgcaagtcagaggatggccagtgtctgtcccggggtcctgtggcaggcagcgccaagcaacctgggtccaaataaaaactaaattgtaaactcctgaaa

SEQ ID NO: 343959 - DNA, 1214 bp, Homo sapiens
  misc_feature (27)..(27): n is a, c, g, or t
atcccccgggctgcaggattcggcacnagggaggcggtggcccttctgttgctagaccgagcctgtgggatataccaaggcagaggagcccatagccatgaggagcctcggggccctgctcttgctgctgagcgcctgcctggcggtgagcgctggccctgtgccaacgccgcccgacaacatccaagtgcaggccacctgcccctggctgaagaagatcatggacaggatgacagtgagcacgctggtgctgggagagggcgctacagaggcggagatcagcatgaccagcactcgttggcggaaaggtgtctgtgaggagacgtctggagcttatgagaaaacagatactgatgggaagtttctctatcacaaatccaaatggaacataaccatggagtcctatgtggtccacaccaactatgatgagtatgccattttcctgaccaagaaattcagccgccatcatggacccaccattactgccaagctctacgggcgggcgccgcagctgagggaaactctcctgcaggacttcagagtggttgcccagggtgtgggcatccctgaggactccatcttcaccatggctgaccgaggtgaatgtgtccctggggagcaggaaccagagcccatcttaatcccgagagtccggagggctgtgctaccccaagaagaggaaggatcagggggtgggcaactggtaactgaagtcaccaagaaagaagattcctgccagctgggctactcggccggtccctgcatgggaatgaccagcaggtatttctataatggtacatccatggcctgtgagactttccagtacggcggctgcatgggcaacggtaacaacttcgtcacagaaaaggagtgtctgcagacctgccgaactgtggcggcctgcaatctccccatagtccggggcccctgccgagccttcatccagctctgggcatttgatgctgtcaaggggaagtgcgtcctcttcccctacgggggctgccagggcaacgggaacaagttctactcagagaaggagtgcagagagtactgcggtgtccctggtgatggtgatgaggagctgctgcgcttctccaactgacaactggccggtctgcaagtcagaggatggccagtgtctgtcccggggtcctgtggcaggcagcgccaagcaacctgggtccaaataaaaactaaattgtaaactcctgaaa

SEQ ID NO: 343960 - DNA, 1246 bp, Homo sapiens
ccggcctcttggtactgctgaccccagccaggctacagggatcgattggagctgtccttggggctgtaattggccccagctgagcagggcaaacactgaggtcaactacaagccacaggccccttccccagcctcagttcacagctgccctgttgcagggaggcggtggcccttctgttgctagaccgagcctgtgggatataccaaggcagaggagcccatagccatgaggagcctcggggccctgctcttgctgctgagcgcctgctgagcacgctggtgctgggagagggcgctacagaggcggagatcagcatgaccagcactcgttggcggaaaggtgtctgtgaggagacgtctggagcttatgagaaaacagatactgatgggaagtttctctatcacaaatccaaatggaacataaccatggagtcctatgtggtccacaccaactatgatgagtatgccattttcctgaccaagaaattcagccgccatcatggacccaccattactgccaagctctacgggcgggcgccgcagctgagggaaactctcctgcaggacttcagagtggttgcccagggtgtgggcatccctgaggactccatcttcaccatggctgaccgaggtgaatgtgtccctggggagcaggaaccagagcccatcttaatcccgagagtccggagggctgtgctaccccaagaagaggaaggatcagggggtgggcaactggtaactgaagtcaccaagaaagaagattcctgccagctgggctactcggccggtccctgcatgggaatgaccagcaggtatttctataatggtacatccatggcctgtgagactttccagtacggcggctgcatgggcaacggtaacaacttcgtcacagaaaaggagtgtctgcagacctgccgaactgtggcggcctgcaatctccccatagtccggggcccctgccgagccttcatccagctctgggcatttgatgctgtcaaggggaagtgcgtcctcttcccctacgggggctgccagggcaacgggaacaagttctactcagagaaggagtgcagagagtactgcggtgtccctggtgatggtgatgaggagctgctgcgcttctccaactgacaactggccggtctgcaagtcagaggatggccagtgtctgtcccggggtcctgtggcaggcagcgccaagcaacctgggtccaaataaaaactaaattgtaaactcctgaaa

SEQ ID NO: 343961 - DNA, 1343 bp, Homo sapiens
ccggcctcttggtactgctgaccccagccaggctacagggatcgattggagctgtccttggggctgtaattggccccagctgagcagggcaaacactgaggtcaactacaagccacaggccccttccccagcctcagttcacagctgccctgttgcagggaggcggtggcccttctgttgctagaccgagcctgtgggatataccaaggcagaggagcccatagccatgaggagcctcggggccctgctcttgctgctgagcgcctgcctggcggtgagcgctggccctgtgccaacgccgcccgacaacatccaagtgcaggaaaacttcaatatctctcggatctatgggaagtggtacaacctggccatcggttccacctgcccctggctgaagaagatcatggacaggatgacagtgagcacgctggtgctgggagagggcgctacagaggcggagatcagcatgaccagcactcgttggcggaaaggtgtctgtgaggagacgtctggagcttatgagaaaacagatactgatgggaagtttctctatcacaaatccaaatggaacataaccatggagtcctatgtggtccacaccaactatgatgagtatgccattttcctgaccaagaaattcagccgccatcatggacccaccattactgccaagctctacgggcgggcgccgcagctgagggaaactctcctgcaggacttcagagtggttgcccagggtgtgggcatccctgaggactccatcttcaccatggctgaccgaggtgaatgtgtccctggggagcaggaaccagagcccatcttaatcccgagagtccggagggctgtgctaccccaagaagaggaaggatcagggggtgggcaactggtaactgaagtcaccaagaaagaagattcctgccagctgggctactcggccggtccctgcatgggaatgaccagcaggtatttctataatggtacatccatggcctgtgagactttccagtacggcggctgcatgggcaacggtaacaacttcgtcacagtccggggcccctgccgagccttcatccagctctgggcatttgatgctgtcaaggggaagtgcgtcctcttcccctacgggggctgccagggcaacgggaacaagttctactcagagaaggagtgcagagagtactgcggtgtccctggtgatggtgatgaggagctgctgcgcttctccaactgacaactggccggtctgcaagtcagaggatggccagtgtctgtcccggggtcctgtggcaggcagcgccaagcaacctgggtccaaataaaaactaaattgtaaactcctgaaa

SEQ ID NO: 343962 - DNA, 965 bp, Homo sapiens
cgctgtaggaatacggcacgaggcggagatcagcatgaccagcactcgctgtcggaaaggtgtctgtgaggagacgtctggagcttatgagaaaacagatactgatgggaagtttctctatcacaaatccaaatggaacataaccatggagtcctatgtggtccacaccaactatgatgagtatgccattttcctgaccaagaaattcagccgccatcatggacccaccattactgccaagctctacgggcgggcgccgcagctgagggaaactctcctgcaggacttcagagtggttgcccagggtgtgggcatccctgaggactccatcttcaccatggctgaccgaggtgaatgtgtccctggggagcaggaaccagagcccatcttaatcccgagagtccggagggctgtgctaccccaagaagaggaaggatcagggggtgggcaactggtaactgaagtcaccaagaaagaagattcctgccagctgggctactcggccggtccctgcatgggaatgaccagcaggtatttctataatggtacatccatggcctgtgagactttccagtacggcggctgcatgggcaacggtaacaacttcgtcacagaaaaggagtgtctgcagacctgccgaactgtggcggcctgcaatctccccatagtccggggcccctgccgagccttcatccagctctgggcatttgatgctgtcaaggggaagtgcgtcctcttcccctacgggggctgccagggcaacgggaacaagttctactcagagaaggagtgcagagagtactgcggtgtccctggtgatggtgatgaggagctgctgcgcttctccaactgacaactggccggtctgcaagtcagaggatggccagtgtctgtcccggggtcctgtggcaggcagcgccaagcaacctgggtccaaataaaaactaaattgtaaactcctgaaa

SEQ ID NO: 343963 - DNA, 890 bp, Homo sapiens
ccggcctcttggtactgctgaccccagccaggctacagggatcgattggagctgtccttggggctgtaattggccccagctgagcagggcaaacactgaggtcaactacaagccacaggccccttccccagcctcagttcacagctgccctgttgcagggaggcggtggcccttctgttgctagaccgagcctgtgggatataccaaggcagaggagcccatagccatgaggagcctcggggccctgctcttgctgctgagcgcctgcctggcggtgagcgctggccctgtgccaacgccgcccgacaacatccaagtgcaggaaaacttcaatatctctcggatctatgggaagtggtacaacctggccatcggttccacctgcccctggctgaagaagatcatggacaggatgacagtgagcacgctggtgctgggagagggcgctacagaggcggagatcagcatgaccagcactcgttggcggaaaggtgtctgtgaggagacgtctggagcttatgagaatggaacataaccatggagtcctatgtggtccacaccaactatgatgagtatgccattttcctgaccaagaaattcagccgccatcatggacccaccattactgccaagctctacgggcgggcgccgcagctgagggaaactctcctgcaggacttcagagtggttgcccagggtgtgggcatccctgaggactccatcttcaccatggctgaccgaggtgaatgtgtccctggggagcaggaaccagagcccatcttaatcccgagagtccggagggctgtgctaccccaagaagaggaaggatcagggggtgggcaactggtaactgaagtcaccaagaaagaaggtaatgaacacctgccttt

SEQ ID NO: 343964 - DNA, 1161 bp, Homo sapiens
ccggcctcttggtactgctgaccccagccaggctacagggatcgattggagctgtccttggggctgtaattggccccagctgagcagggcaaacactgaggtcaactacaagccacaggccccttccccagcctcagttcacagctgccctgttgcagggaggcggtggcccttctgttgctagaccgagcctgtgggatataccaaggcagaggagcccatagccatgaggagcctcggggccctgctcttgctgctgagcgcctgcctggcggtgagcgctggccctgtgccaacgccgcccgacaacatccaagtgcaggaaaacttcaatatctctcggatctatgggaagtggtacaacctggccatcggttccacctgcccctggctgaagaagatcatggacaggatgacagtgagcacgctggtgctgggagagggcgctacagaggcggagatcagcatgaccagcactcgttggcggaaaggtgtctgtgaggagacgtctggagcttatgagtctcctgcaggacttcagagtggttgcccagggtgtgggcatccctgaggactccatcttcaccatggctgaccgaggtgaatgtgtccctggggagcaggaaccagagcccatcttaatcccgagagtccggagggctgtgctaccccaagaagaggaaggatcagggggtgggcaactggtaactgaagtcaccaagaaagaagattcctgccagctgggctactcggccggtccctgcatgggaatgaccagcaggtatttctataatggtacatccatggcctgtgagactttccagtacggcggctgcatgggcaacggtaacaacttcgtcacagtccggggcccctgccgagccttcatccagctctgggcatttgatgctgtcaaggggaagtgcgtcctcttcccctacgggggctgccagggcaacgggaacaagttctactcagagaaggagtgcagagagtactgcggtgtccctggtgatggtgatgaggagctgctgcgcttctccaactgacaactggccggtctgcaagtcagaggatggccagtgtctgtcccggggtcctgtggcaggcagcgccaagcaacctgggtccaaataaaaactaaattgtaaactcctgaaa

SEQ ID NO: 343965 - DNA, 858 bp, Homo sapiens
  misc_feature (681)..(681): n is a, c, g, or t
  misc_feature (685)..(685): n is a, c, g, or t
  misc_feature (788)..(788): n is a, c, g, or t
ccggcctcttggtactgctgaccccagccaggctacagggatcgattggagctgtccttggggctgtaattggccccagctgagcagggcaaacactgaggtcaactacaagccacaggccccttccccagcctcagttcacagctgccctgttgcagggaggcggtggcccttctgttgctagaccgagcctgtgggatataccaaggcagaggagcccatagccatgaggagcctcggggccctgctcttgctgctgagcgcctgcctggcggtgagcgctggccctgtgccaacgccgcccgacaacatccaagtgcaggaaaacttcaatatctctcggatctatgggaagtggtacaacctggccatcggttccacctgcccctggctgaagaagatcatggacaggatgacagtgagcacgctggtgctgggagagggcgctacagaggcggagatcagcatgaccagcactcgttggcggaaaggtgtctgtgaggagacgtctggagcttatgagaaaacagatactgatgggaagtttctctatcacaaatccaaatggaacataaccatggagtcctatgtggtccacaccaactatgatgagtatgccattttcctgaccaagaaattcagccgccatcatggacccaccattactgccaagctctacgncggncgccgcagctgagggcatctcacatgctgacgagtgatgtgcctgggagcagacagagccatctaatccagagtcgagggctgctacccagagagaggtcggngtggcactgtactgagcacaggagatctgcagtggctactgcgtctgatggatgacagagatcatatgct

SEQ ID NO: 343966 - DNA, 824 bp, Homo sapiens
ccggcctcttggtactgctgaccccagccaggctacagggatcgattggagctgtccttggggctgtaattggccccagctgagcagggcaaacactgaggtcaactacaagccacaggccccttccccagcctcagttcacagctgccctgttgcagggaggcggtggcccttctgttgctagaccgagcctgtgggatataccaaggcagaggagcccatagccatgaggagcctcggggccctgctcttgctgctgagcgcctgcctggcggtgagcgctggccctgtgccaacgccgcccgacaacatccaagtgcaggaaaacttcaatatctctcggatctatgggaagtggtacaacctggccatcggttccacctgcccctggctgaagaagatcatggacaggatgacagtgagcacgctggtgctgggagagggcgctacagaggcggagatcagcatgaccagcactcgttggcggaaaggtgtctgtgaggagacgtctggagcttatgagaaaacagatactgatgggaagtttctctatcacaaatccaaatggaacataaccatggagtcctatgtggtccacaccaactatgatgagtatgccattttcctgaccaagaaattcagccgccatcatggacccaccattactgccaagctctacggtgatgaggagctgctgcgcttctccaactgacaactggccggtctgcaagtcagaggatggccagtgtctgtcccggggtcctgtggcaggcagcgccaagcaacctgggtccaaataaaaactaaattgtaaactcctgaaa

SEQ ID NO: 343967 - DNA, 558 bp, Homo sapiens
ccggcctcttggtactgctgaccccagccaggctacagggatcgattggagctgtccttggggctgtaattggccccagctgagcagggcaaacactgaggtcaactacaagccacaggccccttccccagcctcagttcacagctgccctgttgcagggaggcggtggcccttctgttgctagaccgagcctgtgggatataccaaggcagaggagcccatagccatgaggagcctcggggccctgctcttgctgctgagcgcctgcctggcggtgagcgctggccctgtgccaacgccgcccgacaacatccaagtgcaggaaaacttcaatatctctcggatctatgggaagtggtacaacctggccatcggttccacctgcccctggctgaagaagatcatggacaggatgacagtgagcacgctggtgctgggagagggcgctacagaggcggagatcagcatgaccagcactcgttggcggaaaggtgtctgtgagaaagaaaagactcccttttggggggggggggaaaaccccctttttttttttttttt

SEQ ID NO: 343968 - DNA, 1397 bp, Homo sapiens
ccggcctcttggtactgctgaccccagccaggctacagggatcgattggagctgtccttggggctgtaattggccccagctgagcagggcaaacactgaggtcaactacaagccacaggccccttccccagcctcagttcacagctgccctgttgcagggaggcggtggcccttctgttgctagaccgagcctgtgggatataccaaggcagaggagcccatagccatgaggagcctcggggccctgctcttgctgctgagcgcctgcctggcggtgagcgctggccctgtgccaacgccgcccgacaacatccaagtgcaggaaaacttcaatatctctcggatctatgggaagtggtacaacctggccatcggttccacctgcccctggctgaagaagatcatggacaggatgacagtgagcacgctggtgctgggagagggcgctacagaggcggagatcagcatgaccagcactcgttggcggaaaggtgtctgtgaggagacgtctggagcttatgagaaaacagatactgatgggaagtttctctatcacaaatccaaatggaacataaccatggagtcctatgtggtccacaccaactatgatgagtatgccattttcctgaccaagaaattcagccgccatcatggacccaccattactgccaagctctacgggcgggcgccgcagctgagggaaactctcctgcaggacttcagagtggttgcccagggtgtgggcatccctgaggactccatcttcaccatggctgaccgaggtgaatgtgtccctggggagcaggaaccagagcccatcttaatcccgagagtccggagggctgtgctaccccaagaagaggaaggatcagggggtgggcaactggtaactgaagtcaccaagaaagaagattcctgccagctgggctactcggccggtccctgcatgggaatgaccagcaggtatttctataatggtacatccatggcctgtgagactttccagtacggcggctgcatgggcaacggtaacaacttcgtcacagaaaaggagtgtctgcagacctgccgaactgtggcggcctgcaatctccccatagtccggggcccctgccgagccttcatccagctctgggcatttgatgctgtcaaggggaagtgcgtcctcttcccctacgggggctgccagggcaacgggaacaagttctactcagagaaggagtgcagagagtactgcggtgtccctggtgatggtgatgaggagctgctgcgcttctccaactgacaactggccggtctgcaagtcagaggatggccagtgtctgtcccggggtcctgtggcaggcagcgccaagcaacctgggtccaaataaaaactaaattgtaaactcctgaaa

SEQ ID NO: 343969 - DNA, 880 bp, Homo sapiens
  misc_feature (693)..(694): n is a, c, g, or t
  misc_feature (710)..(711): n is a, c, g, or t
  misc_feature (716)..(716): n is a, c, g, or t
  misc_feature (726)..(726): n is a, c, g, or t
  misc_feature (728)..(728): n is a, c, g, or t
  misc_feature (732)..(732): n is a, c, g, or t
  misc_feature (737)..(737): n is a, c, g, or t
  misc_feature (741)..(741): n is a, c, g, or t
  misc_feature (747)..(747): n is a, c, g, or t
  misc_feature (817)..(817): n is a, c, g, or t
  misc_feature (828)..(828): n is a, c, g, or t
  misc_feature (847)..(847): n is a, c, g, or t
  misc_feature (858)..(858): n is a, c, g, or t
  misc_feature (880)..(880): n is a, c, g, or t
ccggcctcttggtactgctgaccccagccaggctacagggatcgattggagctgtccttggggctgtaattggccccagctgagcagggcaaacactgaggtcaactacaagccacaggccccttccccagcctcagttcacagctgccctgttgcagggaggcggtggcccttctgttgctagaccgagcctgtgggatataccaaggcagaggagcccatagccatgaggagcctcggggccctgctcttgctgctgagcgcctgcctggcggtgagcgctggccctgtgccaacgccgcccgacaacatccaagtgcaggccacctgcccctggctgaagaagatcatggacaggatgacagtgagcacgctggtgctgggagagggcgctacagaggcggagatcagcatgaccagcactcgttggcggaaaggtgtctgtgaggagacgtctggagcttatgagaatggaacataaccatggagtcctatgtggtccacaccaactatgatgagtatgccattttcctgaccaagaaattcagccgccatcatggacccaccattactgccaagctctacgggcgggcgccgcagctgagggaaactctcctgcaggacttcagagtggttgcccagggtgtgggcatccctgaggactccatcttcaccatggctgaccgaggtganngtgtccctgggagcannaacanagcccatctnantccnagagnccgnaggtgngctaccccagaaaggaagatcaggggtgggcaactggtactgaagtaccaggaagaattctgcaattggntacttgccggncctggtgggaaggaccacnggattctttantgggcatccaggccgtgggttn

SEQ ID NO: 343970 - DNA, 736 bp, Homo sapiens
  misc_feature (27)..(27): n is a, c, g, or t
  misc_feature (572)..(572): n is a, c, g, or t
  misc_feature (574)..(575): n is a, c, g, or t
  misc_feature (579)..(579): n is a, c, g, or t
  misc_feature (581)..(581): n is a, c, g, or t
  misc_feature (596)..(596): n is a, c, g, or t
  misc_feature (602)..(602): n is a, c, g, or t
  misc_feature (610)..(610): n is a, c, g, or t
  misc_feature (673)..(673): n is a, c, g, or t
  misc_feature (684)..(684): n is a, c, g, or t
  misc_feature (703)..(703): n is a, c, g, or t
  misc_feature (714)..(714): n is a, c, g, or t
  misc_feature (736)..(736): n is a, c, g, or t
atcccccgggctgcaggattcggcacnagggaggcggtggcccttctgttgctagaccgagcctgtgggatataccaaggcagaggagcccatagccatgaggagcctcggggccctgctcttgctgctgagcgcctgcctggcggtgagcgctggccctgtgccaacgccgcccgacaacatccaagtgcaggccacctgcccctggctgaagaagatcatggacaggatgacagtgagcacgctggtgctgggagagggcgctacagaggcggagatcagcatgaccagcactcgttggcggaaaggtgtctgtgaggagacgtctggagcttatgagaaaacagatactgatgggaagtttctctatcacaaatccaaatggaacataaccatggagtcctatgtggtccacaccaactatgatgagtatgccattttcctgaccaagaaattcagccgccatcatggacccaccattactgccaagctctacggcgggcgccggagctgagggacttcatctttaccatggctgaccgaggtgaatgtgtccttgggagcaggaccanannccantnttccgagagtccganggctgngcttcccnagaaaaggaagatcaggggtgggcaactggtactgaagtaccaggaagaattctgcaattggntacttgccggncctggtgggaaggaccacnggattctttantgggcatccaggccgtgggttn

SEQ ID NO: 343971 - DNA, 1622 bp, Homo sapiens
  misc_feature (1408)..(1408): n is a, c, g, or t
  misc_feature (1477)..(1477): n is a, c, g, or t
  misc_feature (1496)..(1496): n is a, c, g, or t
  misc_feature (1498)..(1498): n is a, c, g, or t
  misc_feature (1501)..(1502): n is a, c, g, or t
  misc_feature (1515)..(1515): n is a, c, g, or t
  misc_feature (1558)..(1558): n is a, c, g, or t
  misc_feature (1568)..(1568): n is a, c, g, or t
  misc_feature (1571)..(1571): n is a, c, g, or t
ccggcctcttggtactgctgaccccagccaggctacagggatcgattggagctgtccttggggctgtaattggccccagctgagcagggcaaacactgaggtcaactacaagccacaggccccttccccagcctcagttcacagctgccctgttgcagggaggcggtggcccttctgttgctagaccgagcctgtgggatataccaaggcagaggagcccatagccatgaggagcctcggggccctgctcttgctgctgagcgcctgcctggcggtgagcgctggccctgtgccaacgccgcccgacaacatccaagtgcaggaaaacttcaatatctctcggatctatgggaagtggtacaacctggccatcggttccacctgcccctggctgaagaagatcatggacaggatgacagtgagcacgctggtgctgggagagggcgctacagaggcggagatcagcatgaccagcactcgttggcggaaaggtgtctgtgaggagacgtctggagcttatgagaatggaacataaccatggagtcctatgtggtccacaccaactatgatgagtatgccattttcctgaccaagaaattcagccgccatcatggacccaccattactgccaagctctacgggcgggcgccgcagctgagggaaactctcctgcaggacttcagagtggttgcccagggtgtgggcatccctgaggactccatcttcaccatggctgaccgaggtgaatgtgtccctggggagcaggaaccagagcccatcttaatcccgagagtccggagggctgtgctaccccaagaagaggaaggatcagggggtgggcaactggtaactgaagtcaccaagaaagaagattcctgccagctgggctactcggccggtccctgcatgggaatgaccagcaggtatttctataatggtacatccatggcctgtgagactttccagtacggcggctgcatgggcaacggtaacaacttcgtcacagaaaaggagtgtctgcagacctgccgaactgtggcggcctgcaatctccccatagtccggggcccctgccgagccttcatccagctctgggcatttgatgctgtcaaggggaagtgcgtcctcttcccctacgggggctgccagggcaacgggaacaagttctactcagagaaggagtgcagagagtactgcggtgtccctggtgatggtgatgaggagctgctgcgcttctccaactgacaactggccggtctgcaagtcagaggatggccagtgtctgtcccggggtcctgtggcaggcagcgccaagcaacctgggtccaaataaaaactaaattgtaaactcctgaaaaaaaaaaaaaaaaaaaaaaaaagtgagcaactctgttttcaaagcttttgngtggagctgaagcacactgcttattaaagtacactattcaggcatatcatgtaggtttactttctgtgnttctagagaccaagaagcngnacnntcaccatgggagntcgctgtaccttctgattgtggggatcctcatagcatatatanttatacgccnttnccagataacgttgaggagccatggagtgatgtggatcgcactttgctttcc

SEQ ID NO: 343972 - DNA, 1849 bp, Homo sapiens
ccggcctcttggtactgctgaccccagccaggctacagggatcgattggagctgtccttggggctgtaattggccccagctgagcagggcaaacactgaggtcaactacaagccacaggccccttccccagcctcagttcacagctgccctgttgcagggaggcggtggcccttctgttgctagaccgagcctgtgggatataccaaggcagaggagcccatagccatgaggagcctcggggccctgctcttgctgctgagcgcctgcctggcggtgagcgctggccctgtgccaacgccgcccgacaacatccaagtgcaggaaaacttcaatatctctcggatctatgggaagtggtacaacctggccatcggttccacctgcccctggctgaagaagatcatggacaggatgacagtgagcacgctggtgctgggagagggcgctacagaggcggagatcagcatgaccagcactcgttggcggaaaggtgtctgtgaggagacgtctggagcttatgagaatggaacataaccatggagtcctatgtggtccacaccaactatgatgagtatgccattttcctgaccaagaaattcagccgccatcatggacccaccattactgccaagctctacgggcgggcgccgcagctgagggaaactctcctgcaggacttcagagtggttgcccagggtgtgggcatccctgaggactccatcttcaccatggctgaccgaggtgaatgtgtccctggggagcaggaaccagagcccatcttaatcccgagagtccggagggctgtgctaccccaagaagaggaaggatcagggggtgggcaactggtaactgaagtcaccaagaaagaagattcctgccagctgggctactcggccggtccctgcatgggaatgaccagcaggtatttctataatggtacatccatggcctgtgagactttccagtacggcggctgcatgggcaacggtaacaacttcgtcacagaaaaggagtgtctgcagacctgccgaactgtggcggcctgcaatctccccatagtccggggcccctgccgagccttcatccagctctgggcatttgatgctgtcaaggggaagtgcgtcctcttcccctacgggggctgccagggcaacgggaacaagttctactcagagaaggagtgcagagagtactgcggtgtccctggtgatggtgatgaggagctgctgcgcttctccaactgacaactggccggtctgcaagtcagaggatggccagtgtctgtcccggggtcctgtggcaggcagcgccaagcaacctgggtccaaataaaaactaaattgtaaactcctgaaaaaaaaaaaaaaaaaaaaaaaaaaaaaaaaaaaaaaaaaaaaaaaaaaaaaaaaaaaaaaaaaaaaaaaaaaaaaaaaaaaaaaaaaaaaaaaaaaaaaaaaacaaaaaaaaaaaaaaaaaaaaaaaactttggggcccctttggcccaaggcattttagatctgggcaagttaatttttggggcccaaatttgggtttttttggcaaattcccccttaaggggggggtattaaaaataattggcccggtttttaaaaccgtgggattggaaaaacccggggggtccccaatttaaacgctttgggaaaaattccctttttccgagggtgcaaaatacgaaaagggccccacccggtgggcttttccaaaagtggggcaacctttaatgggcaatgggaaaattgtagggggtaaattttttggaaaaaatcccgagaaaattttggttaaaaaagcggtttattttatacaccaaatggggcccaaatcggg

SEQ ID NO: 343973 - DNA, 1459 bp, Homo sapiens
  misc_feature (1333)..(1333): n is a, c, g, or t
  misc_feature (1374)..(1375): n is a, c, g, or t
  misc_feature (1410)..(1410): n is a, c, g, or t
  misc_feature (1422)..(1422): n is a, c, g, or t
  misc_feature (1439)..(1439): n is a, c, g, or t
ccggcctcttggtactgctgaccccagccaggctacagggatcgattggagctgtccttggggctgtaattggccccagctgagcagggcaaacactgaggtcaactacaagccacaggccccttccccagcctcagttcacagctgccctgttgcagggaggcggtggcccttctgttgctagaccgagcctgtgggatataccaaggcagaggagcccatagccatgaggagcctcggggccctgctcttgctgctgagcgcctgcctggcggtgagcgctggccctgtgccaacgccgcccgacaacatccaagtgcaggaaaacttcaatatctctcggatctatgggaagtggtacaacctggccatcggttccacctgcccctggctgaagaagatcatggacaggatgacagtgagcacgctggtgctgggagagggcgctacagaggcggagatcagcatgaccagcactcgttggcggaaaggtgtctgtgaggagacgtctggagcttatgagaatggaacataaccatggagtcctatgtggtccacaccaactatgatgagtatgccattttcctgaccaagaaattcagccgccatcatggacccaccattactgccaagctctacgggcgggcgccgcagctgagggaaactctcctgcaggacttcagagtggttgcccagggtgtgggcatccctgaggactccatcttcaccatggctgaccgaggtgaatgtgtccctggggagcaggaaccagagcccatcttaatcccgagagtccggagggctgtgctaccccaagaagaggaaggatcagggggtgggcaactggtaactgaagtcaccaagaaagaagattcctgccagctgggctactcggccggtccctgcatgggaatgaccagcaggtatttctataatggtacatccatggcctgtgagactttccagtacggcggctgcatgggcaacggtaacaacttcgtcacagaaaaggagtgtctgcagacctgccgaactgtggcggcctgcaatctccccatagtccggggcccctgccgagccttcatccagctctgggcatttgatgctgtcaaggggaagtgcgtcctcttcccctacgggggctgccagggcaacgggaacaagttctactcagagaaggagtgcagagagtactgcggtgtccctggtgatggtgataagagttgttgcgcttttcaactacaacttggccggtttgaagtaaaaggatggccaatgtttttcccgggttcttttgaaagcaaccgccaacaccttgggccaaaattttatnttacatcttctcccctctcttcatttatcattttttttttnntttccctatcctctcttgtggtttttttttacttnccccttttcttnctttttttaatttttcntttttttattatttttattt

SEQ ID NO: 343974 - DNA, 1303 bp, Homo sapiens
ccggcctcttggtactgctgaccccagccaggctacagggatcgattggagctgtccttggggctgtaattggccccagctgagcagggcaaacactgaggtcaactacaagccacaggccccttccccagcctcagttcacagctgccctgttgcagggaggcggtggcccttctgttgctagaccgagcctgtgggatataccaaggcagaggagcccatagccatgaggagcctcggggccctgctcttgctgctgagcgcctgcctggcggtgagcgctggccctgtgccaacgccgcccgacaacatccaagtgcaggaaaacttcaatatctctcggatctatgggaagtggtacaacctggccatcggttccacctgcccctggctgaagaagatcatggacaggatgacagtgagcacgctggtgctgggagagggcgctacagaggcggagatcagcatgaccagcactcgttggcggaaaggtgtctgtgaggagacgtctggagcttatgagaatggaacataaccatggagtcctatgtggtccacaccaactatgatgagtatgccattttcctgaccaagaaattcagccgccatcatggacccaccattactgccaagctctacgggcgggcgccgcagctgagggaaactctcctgcaggacttcagagtggttgcccagggtgtgggcatccctgaggactccatcttcaccatggctgaccgaggtgaatgtgtccctggggagcaggaaccagagcccatcttaatcccgagagtccggagggctgtgctaccccaagaagaggaaggatcagggggtgggcaactggtaactgaagtcaccaagaaagaagattcctgccagctgggctactcggccggtccctgcatgggaatgaccagcaggtatttctataatggtacatccatggcctgtgagactttccagtacggcggctgcatgggcaacggtaacaacttcgtcacagtccggggcccctgccgagccttcatccagctctgggcatttgatgctgtcaaggggaagtgcgtcctcttcccctacgggggctgccagggcaacgggaacaagttctactcagagaaggagtgcagagagtactgcggtgtccctggtgatggtgatgaggagctgctgcgcttctccaactgacaactggccggtctgcaagtcagaggatggccagtgtctgtcccggggtcctgtggcaggcagcgccaagcaacctgggtccaaataaaaactaaattgtaaactcctgaaa

SEQ ID NO: 343975 - DNA, 1422 bp, Homo sapiens
ccggcctcttggtactgctgaccccagccaggctacagggatcgattggagctgtccttggggctgtaattggccccagctgagcagggcaaacactgaggtcaactacaagccacaggccccttccccagcctcagttcacagctgccctgttgcagggaggcggtggcccttctgttgctagaccgagcctgtgggatataccaaggcagaggagcccatagccatgaggagcctcggggccctgctcttgctgctgagcgcctgcctggcggtgagcgctggccctgtgccaacgccgcccgacaacatccaagtgcaggaaaacttcaatatctctcggatctatgggaagtggtacaacctggccatcggttccacctgcccctggctgaagaagatcatggacaggatgacagtgagcacgctggtgctgggagagggcgctacagaggcggagatcagcatgaccagcactcgttggcggaaaggtgtctgtgaggagacgtctggagcttatgagaatggaacataaccatggagtcctatgtggtccacaccaactatgatgagtatgccattttcctgaccaagaaattcagccgccatcatggacccaccattactgccaagctctacgggcgggcgccgcagctgagggaaactctcctgcaggacttcagagtggttgcccagggtgtgggcatccctgaggactccatcttcaccatggctgaccgaggtgaatgtgtccctggggagcaggaaccagagcccatcttaatcccggggtacaggaaagcaatagcggcaaggagtctgcaactgcttcttctctttctctcccccgcagaagagtccggagggctgtgctaccccaagaagaggaaggatcagggggtgggcaactggtaactgaagtcaccaagaaagaagattcctgccagctgggctactcggccggtccctgcatgggaatgaccagcaggtatttctataatggtacatccatggcctgtgagactttccagtacggcggctgcatgggcaacggtaacaacttcgtcacagaaaaggagtgtctgcagacctgccgaactgtggcggcctgcaatctccccatagtccggggcccctgccgagccttcatccagctctgggcatttgatgctgtcaaggggaagtgcgtcctcttcccctacgggggctgccagggcaacgggaacaagttctactcagagaaggagtgcagagagtactgcggtgtccctggtgatggtgatgaggagctgctgcgcttctccaactgacaactggccggtctgcaagtcagaggatggccagtgtctgtcccggggtcctgtggcaggcagcgccaagcaacctgggtccaaataaaaactaaattgtaaactcctgaaa

SEQ ID NO: 343976 - DNA, 1341 bp, Homo sapiens
ccggcctcttggtactgctgaccccagccaggctacagggatcgattggagctgtccttggggctgtaattggccccagctgagcagggcaaacactgaggtcaactacaagccacaggccccttccccagcctcagttcacagctgccctgttgcagggaggcggtggcccttctgttgctagaccgagcctgtgggatataccaaggcagaggagcccatagccatgaggagcctcggggccctgctcttgctgctgagcgcctgcctggcggtgagcgctggccctgtgccaacgccgcccgacaacatccaagtgcaggaaaacttcaatatctctcggatctatgggaagtggtacaacctggccatcggttccacctgcccctggctgaagaagatcatggacaggatgacagtgagcacgctggtgctgggagagggcgctacagaggcggagatcagcatgaccagcactcgttggcggaaaggtgtctgtgaggagacgtctggagcttatgagaaaacagatactgatgggaagtttctctatcacaaatccaaatggaacataaccatggagtcctatgtggtccacaccaactatgatgagtatgccattttcctgaccaagaaattcagccgccatcatggacccaccattactgccaagctctacgggtgtgggcatccctgaggactccatcttcaccatggctgaccgaggtgaatgtgtccctggggagcaggaaccagagcccatcttaatcccgagagtccggagggctgtgctaccccaagaagaggaaggatcagggggtgggcaactggtaactgaagtcaccaagaaagaagattcctgccagctgggctactcggccggtccctgcatgggaatgaccagcaggtatttctataatggtacatccatggcctgtgagactttccagtacggcggctgcatgggcaacggtaacaacttcgtcacagaaaaggagtgtctgcagacctgccgaactgtggcggcctgcaatctccccatagtccggggcccctgccgagccttcatccagctctgggcatttgatgctgtcaaggggaagtgcgtcctcttcccctacgggggctgccagggcaacgggaacaagttctactcagagaaggagtgcagagagtactgcggtgtccctggtgatggtgatgaggagctgctgcgcttctccaactgacaactggccggtctgcaagtcagaggatggccagtgtctgtcccggggtcctgtggcaggcagcgccaagcaacctgggtccaaataaaaactaaattgtaaactcctgaaa

SEQ ID NO: 343977 - DNA, 1082 bp, Homo sapiens
tgatgggaagtttctctatcacaaatccaaatggaacataaccatggagtcctatgtggtccacaccaactatgatgagtatgccattttcctgaccaagaaattcagccgccatcatggacccaccattactgcctggcggtgagcgctggccctgtgccaacgccgcccgacaacatccaagtgcaggaaaacttcaatatctctcggatctatgggaagtggtacaacctggccatcggttccacctgcccctggctgaagaagatcatggacaggatgacagtgagcacgctggtgctgggagagggcgctacagaggcggagatcagcatgaccagcactcgttggcggaaaggtgtctgtgaggagacgtctggagcttatgagtctcctgcaggacttcagagtggttgcccagggtgtgggcatccctgaggactccatcttcaccatggctgaccgaggtgaatgtgtccctggggagcaggaaccagagcccatcttaatcccgagagtccggagggctgtgctaccccaagaagaggaaggatcagggggtgggcaactggtaactgaagtcaccaagaaagaagattcctgccagctgggctactcggccggtccctgcatgggaatgaccagcaggtatttctataatggtacatccatggcctgtgagactttccagtacggcggctgcatgggcaacggtaacaacttcgtcacagaaaaggagtgtctgcagacctgccgaactgtggcggcctgcaatctccccatagtccggggcccctgccgagccttcatccagctctgggcatttgatgctgtcaaggggaagtgcgtcctcttcccctacgggggctgccagggcaacgggaacaagttctactcagagaaggagtgcagagagtactgcggtgtccctggtgatggtgatgaggagctgctgcgcttctccaactgacaactggccggtctgcaagtcagaggatggccagtgtctgtcccggggtcctgtggcaggcagcgccaagcaacctgggtccaaataaaaactaaattgtaaactcctgaaa

SEQ ID NO: 343978 - DNA, 750 bp, Homo sapiens
  misc_feature (1)..(1): n is a, c, g, or t
ngggcacattgggccccccctttttgcaaatttaggggtgtgcccgaggtgaggaacctttcgggactctaaaagggttaccaaggtgtgggcatcctaagtcctcctcttcaccttgcttgacaaggttattgtgtcctgggagcatgaaccaagggccctcttattccgatatgtcggacagagtccggagggctgtgctaccccaagaagaggaaggatcagggggtgggcaactggtaactgaagtcaccaagaaagaagattcctgccagctgggctactcggccggtccctgcatgggaatgaccagcaggtatttctataatggtacatccatggcctgtgagactttccagtacggcggctgcatgggcaacggtaacaacttcgtcacagaaaaggagtgtctgcagacctgccgaactgtggcggcctgcaatctccccatagtccggggcccctgccgagccttcatccagctctgggcatttgatgctgtcaaggggaagtgcgtcctcttcccctacgggggctgccagggcaacgggaacaagttctactcagagaaggagtgcagagagtactgcggtgtccctggtgatggtgatgaggagctgctgcgcttctccaactgacaactggccggtctgcaagtcagaggatggccagtgtctgtcccggggtcctgtggcaggcagcgccaagcaacctgggtccaaataaaaactaaattgtaaactcctgaaa

SEQ ID NO: 343979 - DNA, 1028 bp, Homo sapiens
tgatgggaagtttctctatcacaaatccaaatggaacataaccatggagtcctatgtggtccacaccaactatgatgagtatgccattttcctgaccaagaaattcagccgccatcatggacccaccattactgcctggcggtgagcgctggccctgtgccaacgccgcccgacaacatccaagtgcaggaaaacttcaatatctctcggatctatgggaagtggtacaacctggccatcggttccacctgcccctggctgaagaagatcatggacaggatgacagtgagcacgctggtgctgggagagggcgctacagaggcggagatcagcatgaccagcactcgttggcggaaaggtgtctgtgaggagacgtctggagcttatgagtctcctgcaggacttcagagtggttgcccagggtgtgggcatccctgaggactccatcttcaccatggctgaccgaggtgaatgtgtccctggggagcaggaaccagagcccatcttaatcccgagagtccggagggctgtgctaccccaagaagaggaaggatcagggggtgggcaactggtaactgaagtcaccaagaaagaagattcctgccagctgggctactcggccggtccctgcatgggaatgaccagcaggtatttctataatggtacatccatggcctgtgagactttccagtacggcggctgcatgggcaacggtaacaacttcgtcacagtccggggcccctgccgagccttcatccagctctgggcatttgatgctgtcaaggggaagtgcgtcctcttcccctacgggggctgccagggcaacgggaacaagttctactcagagaaggagtgcagagagtactgcggtgtccctggtgatggtgatgaggagctgctgcgcttctccaactgacaactggccggtctgcaagtcagaggatggccagtgtctgtcccggggtcctgtggcaggcagcgccaagcaacctgggtccaaataaaaactaaattgtaaactcctgaaa

SEQ ID NO: 343980 - DNA, 393 bp, Homo sapiens
ctgatcagcagtcacaagggtttctcaagttccatgcctctctccactccacagcggcctgcaatctccccatagtccggggcccctgccgagccttcatccagctctgggcatttgatgctgtcaaggggaagtgcgtcctcttcccctacgggggctgccagggcaacgggaacaagttctactcagagaaggagtgcagagagtactgcggtgtccctggtgatggtaggcagccctgcagggtgccaggctgggccgaggggctgttggagtcgaggtgggagagccctgggaggagtaggggtctggagagctgagttctggactctgtacctggtaagcagcccatctactctctgaaatggggctgagcctggggccttaccccag

SEQ ID NO: 343981 - DNA, 274 bp, Homo sapiens
aagttggcccctccatcgtccaccgcaaatgcttctaaacggactcagcagatgcgtagcatttgctgcatgggttaattgagaatagaaatttgcccctggcaaatgcacacacctcatgctagcctcacgaaactggaataagccttcgaaaagaaattgtccttgaagcttgtatctgatatcagcactggattgtagaacttgttgctgattttgaccttgtattgaagttaacttttaccccttggtatttgtagaatgcctatacata

SEQ ID NO: 343982 - DNA, 414 bp, Homo sapiens
agatccacaccaaaaaaaaaaaaaaaaaagctactggtagtagtagcagcaaggttactggaaaatcatcagtattaaaaaatcaattgtattcttataaaacttaatatactctgaacatttgatgtggcagtcatgctccttggtattttctcaaataatttgaaaacatatctattgaaaagaaaaacctgcatatagatgtgtgttttgtttttgtttttgttttcttttgagatggagtctcactctgttgcccaggctggagtgcagtggcgtgatcttggctctctgcattctcctcctcctgggttcaagcaattcttgcacctcagcctcctgagtatctgggactgcaggcatgcgccaccatgcccagctaatttttgtatttttagtagagacggggtttca

SEQ ID NO: 343983 - DNA, 487 bp, Homo sapiens
cccaatttcctggctctggcagattgattcctgatggctttccttctcaacattcctgtcttcaggcctttgattttaggcagaggccacagaacactttctcaggtaggaaccaaataggccacacaattagcatctcccacttgccacggtgctgttggatttatggtacttaggaagatggcagtagtcagctcacttcattggtcaagagacagagccacagtaaggctaggaagaaatataaaggtcacttcctgtgctgagcacttcctagagcagccacaggccagcccaccaactactggctgcaattctggaccactccatcgcacagcctacaaatgttttctaactgtcttccgtttttattaaccagtcaagcatgttttactttacactctgataagaggatcagaaacagctttcccacatctaaggcactcttaatcaattgcaaggaatacaagagcagcaccaccagagg

SEQ ID NO: 343984 - DNA, 736 bp, Homo sapiens
gagcatcacctgtctttaaagaaatgaggtgaattgggaaatgtaaaaaaaggataatggctcccagccatactattaaagccattgcatatgtactttcacacacttagagaaaggacaaaaataaacctatgtcattgtcacttaatatcctttatgaaacagtaacaattactatattacattttgatctttaaagctctgtgtgatgaagtgggaaatgtgcctaaaatgcttctgctgcggacgaaagtggaagaagagtacttgtgcagttttttgagttccaagctgaatttgctttttttcatagaaaactattttacttgaaactatggttttacttaaaaactatggtttttaggcatgggtatttggcagccattttctcagaagtgaatgaattgagcctgtcatttccaggaaaacaactgacatatgttgccagtgataaaaattgagattttaaatgaaaattagaattttggaaaattggtatttgctgccatgagctggtcagtttctcagtatttaaagactttcctgaagagattggtggtgatattaatgaacgtgaatttttttgatattgtgtaatgtcaacatttcaaagatctgcgtagcttattgcaatatattctaaatgagaaatgcatgatgttaagtgcaaaacagagcaataataaatagattgtattttattttattatttttattttttgagatggagtcttgc

SEQ ID NO: 343985 - DNA, 1422 bp, Homo sapiens
ctcgcgaacgtgttatcccaggcatggtggacagagcgagaccctgtgggggttaggatttcaacataagaattttgcggggagtggacacaattcattccataacacatatgttcagctttagtagagtctcccagtgccgccaagtggttgtaccagttaacactccttccaggagtcaaagggagttctaattgttccacatcctccccaaatacttgatattttgtgtgttttaaataaatcttccttaaacaaaaaaaaacaaataaataaatatcttcaaagaattgaagggaaaccatacttaaagaggtaaagaaagatgtgaagatgatgtcttatcaaatagagaatattgataaagagatagaaactagttttaaaagaggcccaaatggaaattctgaagtttaaaagtaggataaccgaaatgcaaaattcattaggctgggtaccgtggcttatgcctgaatctcagtgctttgagagatggaggcaggagaattgcttaagcccaggagttcaagaccagcctgagcacgtagtgagaccctatctctacaaaaaattttaaaaacttaggccaggcacagtggctcatgcctgtaatcccagcactttgggaggctgaggcaggcagatcacttgggatcaggagtttgagatcagcctggccaacatggtgaaatctcgtctctactaaaaatataaaaattagctgggtgtggcggcacacgcctgtaatcctggctatttggaaggctaaggcaggagaatcgcttgaacccagtaggcggaggttgcagtgagccgagatcgcaccactgtactccagcctggacgagggagtaagactccatctcaaaaaaaataataataattaaatttagctgggcatggtggcacacacctgtgatcccagctactcaggaggctgaggtgggaagattgcttgagtccaagaggttgaggttgcagcaagccatgatcatgccactgcgcttcaggtgggcaagaaagcaagaccctttctcaaaggacgacagaaaacttcattaaaggggctcaatagtagatttgagctggcagaagaaacgatcagtgaacatgaaaatagattgaaagagatttggtcaggcacagtggctcatgcctgtaatcccagcattttgggaggctgaggcaggcgaatcacgaggtcaggagatcgagaccatcctggctaacatggtgaaaccccgtctctactatatacaaaaaaaaaattagccaggtgtggtggcgggcacctgtagtcccagctactcgggaggctgaggcaggagaatggtgtgaacctgggaggcggaggttgcagtgagctgagattgtgccactgcactccagcctgggcaacagagtgagattccatctcaaaaa

SEQ ID NO: 343986 - DNA, 1282 bp, Homo sapiens
ggacagaaggaatttaaacccaatctttgcctgcgaaccgactgggtttgctctgtggatttccaagcgtcttttgcccggggctttgttaaggattggttgagtttcaagccccagggctcaggtagaaagcagagtgctacctccagcccccaccctgctgcactcagagccctggactctgccgggagaagcctgttgcggaggaacggggcccgggaaggaggtctgtcgctgactcttggctgtttgtcaggtggacgacatccttggagaaggcagcgacgacagcgacagcgagaagaggaggcctgaggagcaggaggaggagccccagccccggaagccagggacccgcagggagcggacgctcggggcacctgcgtccagcgagaggagcgcggcagggggccgggggcccagaggccacaagaggaagctgaatgaagaggacgccgccagcgagtccagcagggagtccagcaacgaggacgagggcagcagctccgaggccgacgagatggccaaggcgctggaggcggagctcaacgacctcatgtgagcgcgggcagcgggcagggactgaagcctgaccgacctccagcagcactcggacgtccccggaccagccctcagtctcggtccacgctgctttcttcccaaaggacatgtatatttgcagagctccacatacagaaacacattattttgcagaaataggtgtttttaagaagttttactacaggaatgtctacttttgtaagtgacaggtgttaaaggcccaggtgtgctgtgccaaagagctcagcagaggctcacgtggcccaggctggtgcgcccgctgtctcggtaaggggcgggttggtgtgttttccccttgtgtaccagagcacattccttaggggacggctttgggggtcccacgagacatggactaggagtttaagcaggacagtgtgcgtgcacgagctccgagcccagcacagacatgcctggaacccccgccgcctgctgctccctcctagggaacccatttccggggaacgccgtgactgtcgggcagcctggagcttcctgcagcctcctacgcagggtccacgccacgtggcctgggctgccatcctgccgtcctcccactggcatcctggcaagggggcgttgcttttcctgggcggccttttatgtcttggagacacctgatgtaaagtttctgtaaatctatttcatatctgacccaccaaacagatttctctttaataaaaatcctttttgtaagttctct

SEQ ID NO: 343987 - DNA, 3527 bp, Homo sapiens
  misc_feature (264)..(264): n is a, c, g, or t
  misc_feature (400)..(400): n is a, c, g, or t
ctgggttgtgtcgccgcggtaggcgctgcgctctgagcgcagcgcaggccccgtaccgaccgcccgcccgccctctgtccgcgatggaggtgccggccgcgggtcgcgttcctgccgagggcgccccgacggcggctgtggccgaggtgcgctgcccggggcccgcgccgctgcgcctgctggagtggagggtggcggcgggcgcggccgtgcgcatcggctcggtgctggccgtgttcgaggccgccgcctccgcgcagtccnccggggcctctcagtcccgtgtagcctccgggggctgcgtgcgccccgcgcggccggaacgcaggctgaggtcggagcgcgcgggcgtggtgcgggagctgtgcgcgcagccgggccaggtggtcgccccaggagnggttctggtgaggttggaaggatgcagccacccggttgtcatgaaaggcctgtgtgctgaatgtggccaagacctcacccagttgcagagtaagaacgggaagcagcaggtgccgctgtccacggcgaccgtgtccatggtgcacagcgtcgccggagttgatggtgagctccgagcaagctgaacagctgggaagagaagaccagcagcgactgcaccgaaaccggaagctggtgctcatggtggacttggaccagacgttgattcacacaaccgagcagcactgtcagcagatgtcgaataaaggcatctttcacttccagctgggccggggtgagcccatgctgcacacgcgcctgcgtccacactgcaaggacttcctggagaagatcgccaagctgtacgagctgcacgtcttcaccttcggcagccggctgtacgcacacaccatcgcaggctttttagaccccgagaagaagcttttttctcaccgaatattatcaagggatgaatgtattgacccattttctaaaacgggaaaccttagaaatctctttccttgtggagactcaatggtttgcattattgatgatcgagaagatgtctggaagtttgcccccaatctgataactgtgaagaaatatgtatacttccagggcacaggtgatatgaatgcgccccctgggtcccgagaatctcagacgagaaagaaagtaaatcattctcgaggcactgaggtctcagagccatctccgcccgtgagagaccctgagggggtaacgcaggcccctggagtggagcccagcaatggcctggagaagcctgcacgggagctgaacggcagcgaggccgccaccccgcgggactcaccccgccccgggaagccagacgagagggacatctggccccctgcccaggcccccaccagcagccaagagctggcaggcgctcctgagccccagggatcctgtgcgcagggtggccgggtggcaccgggacagcggcctgcccagggtgccacgggcactgacctggactttgacttatccagcgacagcgagagcagcagtgagtccgagggcacgaagtcctcctcctccgcctctgatggcgaaagcgaggggaaaagaggccggcagaagccgaaggctgccccagagggagccggggcgctggcacagggcagttccctggagccggggcggcctgcagcaccgagtctccccggagaggccgagcctggcgcgcatgccccggacaaggagcctgagctgggtgggcaggaggagggcgagcgggatggcctctgcggcctgggcaacggctgtgccgacaggaaggaggcggagaccgagtcacagaacagcgagctgtcgggggtcactgcgggtgagtccctggaccagagcatggaggaggaggaggaggaggacacggatgaggatgaccacctcatctacctggaggagatcctggtccgtgtacacactgactactatgccaagtatgaccgctacctcaacaaggagatcgaggaggcgccggacatccgcaagatcgtgccggagctcaagagcaaggtgctggcagacgtggccataattttcagtgggctacacccgacaaacttcccgatagagaagacgcgggagcattaccacgccacggcgctgggagcgaagatcctcactcggctggtgctgagccccgacgcccctgacagggccacgcacctgatcgccgcgcgagctggcacagagaaggtgctgcaggcacaggagtgcggacacctgcacgtggtcaaccctgactggctgtggagctgcctggagcgctgggacaaggtggaggagcagctcttcccgctcagggacgatcacaccaaggcacagagggagaacagccctgcggcctttcccgaccgggagggtgtgccccccaccgccttgttccacccgatgccggttcttcccaaggcccagcctggccccgaggttcggatctacgactccaacacggggaagctcatcaggacgggcgcccgggggcccccagcaccctccagctccctacccatccgccaggagccctcttccttcaggtggacgacatccttggagaaggcagcgacgacagcgacagcgagaagaggaggcctgaggagcaggaggaggagccccagccccggaagccagggacccgcagggagcggacgctcggggcacctgcgtccagcgagaggagcgcggcagggggccgggggcccagaggccacaagaggaagctgaatgaagaggacgccgccagcgagtccagcagggagtccagcaacgaggacgagggcagcagctccgaggccgacgagatggccaaggcgctggaggcggagctcaacgacctcatgtgagcgcgggcagcgggcagggactgaagcctgaccgacctccagcagcactcggacgtccccggaccagccctcagtctcggtccacgctgctttcttcccaaaggacatgtatatttgcagagctccacatacagaaacacattattttgcagaaataggtgtttttaagaagttttactacaggaatgtctacttttgtaagtgacaggtgttaaaggcccaggtgtgctgtgccaaagagctcagcagaggctcacgtggcccaggctggtgcgcccgctgtctcggtaaggggcgggttggtgtgttttccccttgtgtaccagagcacattccttaggggacggctttgggggtcccacgagacatggactaggagtttaagcaggacagtgtgcgtgcacgagctccgagcccagcacagacatgcctggaacccccgccgcctgctgctccctcctagggaacccatttccggggaacgccgtgactgtcgggcagcctggagcttcctgcagcctcctacgcagggtccacgccacgtggcctgggctgccatcctgccgtcctcccactggcatcctggcaagggggcgttgcttttcctgggcggccttttatgtcttggagacacctgatgtaaagtttctgtaaatctatttcatatctgacccaccaaacagatttctctttaataaaaatcctttttgtaagttctct

SEQ ID NO: 343988 - DNA, 1555 bp, Homo sapiens
ccccccgtccccactacccccaccatacctagtagctggtttgatcggacgaggactgcacgtggtcaaccctgactggctgtggagctgcctggagcgctgggacaaggtggaggagcagctcttcccgctcagggacgatcacaccaaggcacagagggagaacagccctgcggcctttcccgaccgggagggtgtgccccccaccgccttgttccacccgatgccggttcttcccaaggcccagcctggccccgaggttcggatctacgactccaacacggggaagctcatcaggacgggcgcccgggggcccccagcaccctccagctccctacccatccgccaggagccctcttccttcagagcggttccgccaccccagccgcagatgtttggtgaagagctgcctgacgctcaggacggagagcagcctggcccttctagaagaaagcgacagcccagtatgtctgagacaatgccgctgtacactctttgtaaggaggatttagagagtatggacaaagaggtggacgacatccttggagaaggcagcgacgacagcgacagcgagaagaggaggcctgaggagcaggaggaggagccccagccccggaagccagggacccgcagggagcggacgctcggggcacctgcgtccagcgagaggagcgcggcagggggccgggggcccagaggccacaagaggaagctgaatgaagaggacgccgccagcgagtccagcagggagtccagcaacgaggacgagggcagcagctccgaggccgacgagatggccaaggcgctggaggcggagctcaacgacctcatgtgagcgcgggcagcgggcagggactgaagcctgaccgacctccagcagcactcggacgtccccggaccagccctcagtctcggtccacgctgctttcttcccaaaggacatgtatatttgcagagctccacatacagaaacacattattttgcagaaataggtgtttttaagaagttttactacaggaatgtctacttttgtaagtgacaggtgttaaaggcccaggtgtgctgtgccaaagagctcagcagaggctcacgtggcccaggctggtgcgcccgctgtctcggtaaggggcgggttggtgtgttttccccttgtgtaccagagcacattccttaggggacggctttgggggtcccacgagacatggactaggagtttaagcaggacagtgtgcgtgcacgagctccgagcccagcacagacatgcctggaacccccgccgcctgctgctccctcctagggaacccatttccggggaacgccgtgactgtcgggcagcctggagcttcctgcagcctcctacgcagggtccacgccacgtggcctgggctgccatcctgccgtcctcccactggcatcctggcaagggggcgttgcttttcctgggcggccttttatgtcttggagacacctgatgtaaagtttctgtaaatctatttcatatctgacccaccaaacagatttctctttaataaaaatcctttttgtaagttctct

SEQ ID NO: 343989 - DNA, 1404 bp, Homo sapiens
gaaagcctagtggtactggctggttatgcagaggctcgtaaggaaagcctagtggcaccggctggttatgcagagggctggtgttctctttgtttattaagagtcattttagcagtggcctgaggaaatgagaatttccagaccgtggcccacttgatgagctgggaggtgcttgttcacataacactaatagttactctgacagatgatcttaacttccctgtcctgttttcctgttctgatgtcttctggcatcacaggtgttcatgagcggccggaacgtgcatttgcagcaggtgaacacctgctttgtcagtggtgtcctggtgtgtaacagggctggggcctcttctcctgcgctggggctctgctgtccacacgtgtgtgacgtggccctgggtcggtggcctgtgtgtgtccttgaccagagaattgtgccgtcttgtgttaaaaccacggaagccacttcccaaatgcagaccaggcggtgacccggcgttgtgcgtttgccacaagcatctcacaccatgtttgcttctctgcagaggccacaagaggaagctgaatgaagaggacgccgccagcgagtccagcagggagtccagcaacgaggacgagggcagcagctccgaggccgacgagatggccaaggcgctggaggcggagctcaacgacctcatgtgagcgcgggcagcgggcagggactgaagcctgaccgacctccagcagcactcggacgtccccggaccagccctcagtctcggtccacgctgctttcttcccaaaggacatgtatatttgcagagctccacatacagaaacacattattttgcagaaataggtgtttttaagaagttttactacaggaatgtctacttttgtaagtgacaggtgttaaaggcccaggtgtgctgtgccaaagagctcagcagaggctcacgtggcccaggctggtgcgcccgctgtctcggtaaggggcgggttggtgtgttttccccttgtgtaccagagcacattccttaggggacggctttgggggtcccacgagacatggactaggagtttaagcaggacagtgtgcgtgcacgagctccgagcccagcacagacatgcctggaacccccgccgcctgctgctccctcctagggaacccatttccggggaacgccgtgactgtcgggcagcctggagcttcctgcagcctcctacgcagggtccacgccacgtggcctgggctgccatcctgccgtcctcccactggcatcctggcaagggggcgttgcttttcctgggcggccttttatgtcttggagacacctgatgtaaagtttctgtaaatctatttcatatctgacccaccaaacagatttctctttaataaaaatcctttttgtaagttctct

SEQ ID NO: 343990 - DNA, 219 bp, Homo sapiens
cacttatcaacatggtttgtgtttgagaaataagttcaccataagagaaaagaagccccacacgagccacgtcttacctcaaaagggatgaagtgtttggtgccagttcatcatgttgtgtgtctgccactttaaaaaaaacattcaaggcttcaccatgtgccgtgtgaccgaaacgtgtctcaggtatgtaatctttgtcctgttttcttttccaag

SEQ ID NO: 343991 - DNA, 390 bp, Homo sapiens
gaggtgcagccgagtgagggccttggtggggtgcagccgggtgagggccctggtggggtacagctgggtgagggccctgagccctgcaggggtgcagtcaggtgaaggccctggtgggatgcagccgagtgagggccctgagccctggtggggtacagccaggtgagggccctggtgggtgcagccggatgtgggccctgagcctccagtgctggccggaacagcctgacgcagccgggtctcctgcaggcacagagaaggtgctgcaggcacaggagtgcggacacctgcacgtggtcaaccctgactggctgtggagctgcctggagcgctgggacaaggtggaggagcagctcttcccgctcagggacgatcacaccaaggcacaga

SEQ ID NO: 343992 - DNA, 3690 bp, Homo sapiens
  misc_feature (264)..(264): n is a, c, g, or t
  misc_feature (400)..(400): n is a, c, g, or t
ctgggttgtgtcgccgcggtaggcgctgcgctctgagcgcagcgcaggccccgtaccgaccgcccgcccgccctctgtccgcgatggaggtgccggccgcgggtcgcgttcctgccgagggcgccccgacggcggctgtggccgaggtgcgctgcccggggcccgcgccgctgcgcctgctggagtggagggtggcggcgggcgcggccgtgcgcatcggctcggtgctggccgtgttcgaggccgccgcctccgcgcagtccnccggggcctctcagtcccgtgtagcctccgggggctgcgtgcgccccgcgcggccggaacgcaggctgaggtcggagcgcgcgggcgtggtgcgggagctgtgcgcgcagccgggccaggtggtcgccccaggagnggttctggtgaggttggaaggatgcagccacccggttgtcatgaaaggcctgtgtgctgaatgtggccaagacctcacccagttgcagagtaagaacgggaagcagcaggtgccgctgtccacggcgaccgtgtccatggtgcacagcgtcgccggagttgatggtgagctccgagcaagctgaacagctgggaagagaagaccagcagcgactgcaccgaaaccggaagctggtgctcatggtggacttggaccagacgttgattcacacaaccgagcagcactgtcagcagatgtcgaataaaggcatctttcacttccagctgggccggggtgagcccatgctgcacacgcgcctgcgtccacactgcaaggacttcctggagaagatcgccaagctgtacgagctgcacgtcttcaccttcggcagccggctgtacgcacacaccatcgcaggctttttagaccccgagaagaagcttttttctcaccgaatattatcaagggatgaatgtattgacccattttctaaaacgggaaaccttagaaatctctttccttgtggagactcaatggtttgcattattgatgatcgagaagatgtctggaagtttgcccccaatctgataactgtgaagaaatatgtatacttccagggcacaggtgatatgaatgcgccccctgggtcccgagaatctcagacgagaaagaaagtaaatcattctcgaggcactgaggtctcagagccatctccgcccgtgagagaccctgagggggtaacgcaggcccctggagtggagcccagcaatggcctggagaagcctgcacgggagctgaacggcagcgaggccgccaccccgcgggactcaccccgccccgggaagccagacgagagggacatctggccccctgcccaggcccccaccagcagccaagagctggcaggcgctcctgagccccagggatcctgtgcgcagggtggccgggtggcaccgggacagcggcctgcccagggtgccacgggcactgacctggactttgacttatccagcgacagcgagagcagcagtgagtccgagggcacgaagtcctcctcctccgcctctgatggcgaaagcgaggggaaaagaggccggcagaagccgaaggctgccccagagggagccggggcgctggcacagggcagttccctggagccggggcggcctgcagcaccgagtctccccggagaggccgagcctggcgcgcatgccccggacaaggagcctgagctgggtgggcaggaggagggcgagcgggatggcctctgcggcctgggcaacggctgtgccgacaggaaggaggcggagaccgagtcacagaacagcgagctgtcgggggtcactgcgggtgagtccctggaccagagcatggaggaggaggaggaggaggacacggatgaggatgaccacctcatctacctggaggagatcctggtccgtgtacacactgactactatgccaagtatgaccgctacctcaacaaggagatcgaggaggcgccggacatccgcaagatcgtgccggagctcaagagcaaggtgctggcagacgtggccataattttcagtgggctacacccgacaaacttcccgatagagaagacgcgggagcattaccacgccacggcgctgggagcgaagatcctcactcggctggtgctgagccccgacgcccctgacagggccacgcacctgatcgccgcgcgagctggcacagagaaggtgctgcaggcacaggagtgcggacacctgcacgtggtcaaccctgactggctgtggagctgcctggagcgctgggacaaggtggaggagcagctcttcccgctcagggacgatcacaccaaggcacagagggagaacagccctgcggcctttcccgaccgggagggtgtgccccccaccgccttgttccacccgatgccggttcttcccaaggcccagcctggccccgaggttcggatctacgactccaacacggggaagctcatcaggacgggcgcccgggggcccccagcaccctccagctccctacccatccgccaggagccctcttccttcagagcggttccgccaccccagccgcagatgtttggtgaagagctgcctgacgctcaggacggagagcagcctggcccttctagaagaaagcgacagcccagtatgtctgagacaatgccgctgtacactctttgtaaggaggatttagagagtatggacaaagaggtggacgacatccttggagaaggcagcgacgacagcgacagcgagaagaggaggcctgaggagcaggaggaggagccccagccccggaagccagggacccgcagggagcggacgctcggggcacctgcgtccagcgagaggagcgcggcagggggccgggggcccagaggccacaagaggaagctgaatgaagaggacgccgccagcgagtccagcagggagtccagcaacgaggacgagggcagcagctccgaggccgacgagatggccaaggcgctggaggcggagctcaacgacctcatgtgagcgcgggcagcgggcagggactgaagcctgaccgacctccagcagcactcggacgtccccggaccagccctcagtctcggtccacgctgctttcttcccaaaggacatgtatatttgcagagctccacatacagaaacacattattttgcagaaataggtgtttttaagaagttttactacaggaatgtctacttttgtaagtgacaggtgttaaaggcccaggtgtgctgtgccaaagagctcagcagaggctcacgtggcccaggctggtgcgcccgctgtctcggtaaggggcgggttggtgtgttttccccttgtgtaccagagcacattccttaggggacggctttgggggtcccacgagacatggactaggagtttaagcaggacagtgtgcgtgcacgagctccgagcccagcacagacatgcctggaacccccgccgcctgctgctccctcctagggaacccatttccggggaacgccgtgactgtcgggcagcctggagcttcctgcagcctcctacgcagggtccacgccacgtggcctgggctgccatcctgccgtcctcccactggcatcctggcaagggggcgttgcttttcctgggcggccttttatgtcttggagacacctgatgtaaagtttctgtaaatctatttcatatctgacccaccaaacagatttctctttaataaaaatcctttttgtaagttctct

SEQ ID NO: 343993 - DNA, 3620 bp, Homo sapiens
  misc_feature (264)..(264): n is a, c, g, or t
  misc_feature (400)..(400): n is a, c, g, or t
ctgggttgtgtcgccgcggtaggcgctgcgctctgagcgcagcgcaggccccgtaccgaccgcccgcccgccctctgtccgcgatggaggtgccggccgcgggtcgcgttcctgccgagggcgccccgacggcggctgtggccgaggtgcgctgcccggggcccgcgccgctgcgcctgctggagtggagggtggcggcgggcgcggccgtgcgcatcggctcggtgctggccgtgttcgaggccgccgcctccgcgcagtccnccggggcctctcagtcccgtgtagcctccgggggctgcgtgcgccccgcgcggccggaacgcaggctgaggtcggagcgcgcgggcgtggtgcgggagctgtgcgcgcagccgggccaggtggtcgccccaggagnggttctggtgaggttggaaggatgcagccacccggttgtcatgaaaggcctgtgtgctgaatgtggccaagacctcacccagttgcagagtaagaacgggaagcagcaggtgccgctgtccacggcgaccgtgtccatggtgcacagcgtcgccggagttgatggtgagctccgagcaagctgaacagctgggaagagaagaccagcagcgactgcaccgaaaccggaagctggtgctcatggtggacttggaccagacgttgattcacacaaccgagcagcactgtcagcagatgtcgaataaaggcatctttcacttccagctgggccggggtgagcccatgctgcacacgcgcctgcgtccacactgcaaggacttcctggagaagatcgccaagctgtacgagctgcacgtcttcaccttcggcagccggctgtacgcacacaccatcgcaggctttttagaccccgagaagaagcttttttctcaccgaatattatcaagggatgaatgtattgacccattttctaaaacgggaaaccttagaaatctctttccttgtggagactcaatggtttgcattattgatgatcgagaagatgtctggaagtttgcccccaatctgataactgtgaagaaatatgtatacttccagggcacaggtgatatgaatgcgccccctgggtcccgagaatctcagacgagaaagaaagtaaatcattctcgaggcactgaggtctcagagccatctccgcccgtgagagaccctgagggggtaacgcaggcccctggagtggagcccagcaatggcctggagaagcctgcacgggagctgaacggcagcgaggccgccaccccgcgggactcaccccgccccgggaagccagacgagagggacatctggccccctgcccaggcccccaccagcagccaagagctggcaggcgctcctgagccccagggatcctgtgcgcagggtggccgggtggcaccgggacagcggcctgcccagggtgccacgggcactgacctggactttgacttatccagcgacagcgagagcagcagtgagtccgagggcacgaagtcctcctcctccgcctctgatggcgaaagcgaggggaaaagaggccggcagaagccgaaggctgccccagagggagccggggcgctggcacagggcagttccctggacctgagctgggtgggcaggaggagggcgagcgggatggcctctgcggcctgggcaacggctgtgccgacaggaaggaggcggagaccgagtcacagaacagcgagctgtcgggggtcactgcgggtgagtccctggaccagagcatggaggaggaggaggaggaggacacggatgaggatgaccacctcatctacctggaggagatcctggtccgtgtacacactgactactatgccaagtatgaccgctacctcaacaaggagatcgaggaggcgccggacatccgcaagatcgtgccggagctcaagagcaaggtgctggcagacgtggccataattttcagtgggctacacccgacaaacttcccgatagagaagacgcgggagcattaccacgccacggcgctgggagcgaagatcctcactcggctggtgctgagccccgacgcccctgacagggccacgcacctgatcgccgcgcgagctggcacagagaaggtgctgcaggcacaggagtgcggacacctgcacgtggtcaaccctgactggctgtggagctgcctggagcgctgggacaaggtggaggagcagctcttcccgctcagggacgatcacaccaaggcacagagggagaacagccctgcggcctttcccgaccgggagggtgtgccccccaccgccttgttccacccgatgccggttcttcccaaggcccagcctggccccgaggttcggatctacgactccaacacggggaagctcatcaggacgggcgcccgggggcccccagcaccctccagctccctacccatccgccaggagccctcttccttcagagcggttccgccaccccagccgcagatgtttggtgaagagctgcctgacgctcaggacggagagcagcctggcccttctagaagaaagcgacagcccagtatgtctgagacaatgccgctgtacactctttgtaaggaggatttagagagtatggacaaagaggtggacgacatccttggagaaggcagcgacgacagcgacagcgagaagaggaggcctgaggagcaggaggaggagccccagccccggaagccagggacccgcagggagcggacgctcggggcacctgcgtccagcgagaggagcgcggcagggggccgggggcccagaggccacaagaggaagctgaatgaagaggacgccgccagcgagtccagcagggagtccagcaacgaggacgagggcagcagctccgaggccgacgagatggccaaggcgctggaggcggagctcaacgacctcatgtgagcgcgggcagcgggcagggactgaagcctgaccgacctccagcagcactcggacgtccccggaccagccctcagtctcggtccacgctgctttcttcccaaaggacatgtatatttgcagagctccacatacagaaacacattattttgcagaaataggtgtttttaagaagttttactacaggaatgtctacttttgtaagtgacaggtgttaaaggcccaggtgtgctgtgccaaagagctcagcagaggctcacgtggcccaggctggtgcgcccgctgtctcggtaaggggcgggttggtgtgttttccccttgtgtaccagagcacattccttaggggacggctttgggggtcccacgagacatggactaggagtttaagcaggacagtgtgcgtgcacgagctccgagcccagcacagacatgcctggaacccccgccgcctgctgctccctcctagggaacccatttccggggaacgccgtgactgtcgggcagcctggagcttcctgcagcctcctacgcagggtccacgccacgtggcctgggctgccatcctgccgtcctcccactggcatcctggcaagggggcgttgcttttcctgggcggccttttatgtcttggagacacctgatgtaaagtttctgtaaatctatttcatatctgacccaccaaacagatttctctttaataaaaatcctttttgtaagttctct

SEQ ID NO: 343994 - DNA, 3043 bp, Homo sapiens
  misc_feature (264)..(264): n is a, c, g, or t
  misc_feature (400)..(400): n is a, c, g, or t
ctgggttgtgtcgccgcggtaggcgctgcgctctgagcgcagcgcaggccccgtaccgaccgcccgcccgccctctgtccgcgatggaggtgccggccgcgggtcgcgttcctgccgagggcgccccgacggcggctgtggccgaggtgcgctgcccggggcccgcgccgctgcgcctgctggagtggagggtggcggcgggcgcggccgtgcgcatcggctcggtgctggccgtgttcgaggccgccgcctccgcgcagtccnccggggcctctcagtcccgtgtagcctccgggggctgcgtgcgccccgcgcggccggaacgcaggctgaggtcggagcgcgcgggcgtggtgcgggagctgtgcgcgcagccgggccaggtggtcgccccaggagnggttctggtgaggttggaaggatgcagccacccggttgtcatgaaaggcctgtgtgctgaatgtggccaagacctcacccagttgcagagtaagaacgggaagcagcaggtgccgctgtccacggcgaccgtgtccatggtgcacagcgtcgccggagttgatggtgagctccgagcaagctgaacagctgggaagagaagaccagcagcgactgcaccgaaaccggaagctggtgctcatggtggacttggaccagacgttgattcacacaaccgagcagcactgtcagcagatgtcgaataaaggcatctttcacttccagctgggccggggtgagcccatgctgcacacgcgcctgcgtccacactgcaaggacttcctggagaagatcgccaagctgtacgagctgcacgtcttcaccttcggcagccggctgtacgcacacaccatcgcaggctttttagaccccgagaagaagcttttttctcaccgaatattatcaagggatgaatgtattgacccattttctaaaacgggaaaccttagaaatctctttccttgtggagactcaatggtttgcattattgatgatcgagaagatgtctggaagtttgcccccaatctgataactgtgaagaaatatgtatacttccagggcacaggtgatatgaatgcgccccctgggtcccgagaatctcagacgagaaagaaagtaaatcattctcgaggcactgaggtctcagagccatctccgcccgtgagagaccctgagggggtaacgcaggcccctggagtggagcccagcaatggcctggagaagcctgcacgggagctgaacggcagcgaggccgccaccccgcgggactcaccccgccccgggaagccagacgagagggacatctggccccctgcccaggcccccaccagcagccaagagctggcaggcgctcctgagccccagggatcctgtgcgcagggtggccgggtggcaccgggacagcggcctgcccagggtgccacgggcactgacctggactttgacttatccagcgacagcgagagcagcagtgagtccgagggcacgaagtcctcctcctccgcctctgatggcgaaagcgaggggaaaagaggccggcagaagccgaaggctgccccagagggagccggggcgctggcacagggcagttccctggagccggggcggcctgcagcaccgagtctccccggagaggccgagcctggcgcgcatgccccggacaaggagcctgagctgggtgggcaggaggagggcgagcgggatggcctctgcggcctgggcaacggctgtgccgacaggaaggaggcggagaccgagtcacagaacagcgagctgtcgggggtcactgcgggtgagtccctggaccagagcatggaggaggaggaggaggaggacacggatgaggatgaccacctcatctacctggaggagatcctggtccgtgtacacactgactactatgccaagtatgaccgctacctcaacaaggagatcgaggaggcgccggacatccgcaagatcgtgccggagctcaagagcaaggtgctggcagacgtggccataattttcagtgggctacacccgacaaacttcccgatagagaagacgcgggagcattaccacgccacggcgctgggagcgaagatcctcactcggctggtgctgagccccgacgcccctgacagggccacgcacctgatcgccgcgcgagctggcacagagaaggtgctgcaggcacaggagtgcggacacctgcacgtggtcaaccctgactggctgtggagctgcctggagcgctgggacaaggtggaggagcagctcttcccgctcagggacgatcacaccaaggcacagagggagaacagccctgcggcctttcccgaccgggagggtgtgccccccaccgccttgttccacccgatgccggttcttcccaaggcccagcctggccccgaggttcggatctacgactccaacacggggaagctcatcaggacgggcgcccgggggcccccagcaccctccagctccctacccatccgccaggagccctcttccttcagagcggttccgccaccccagccgcagatgtttggtgaagagctgcctgacgctcaggacggagagcagcctggcccttctagaagaaagcgacagcccagtatgtctgagacaatgccgctgtacactctttgtaaggaggatttagagagtatggacaaagaggtggacgacatccttggagaaggcagcgacgacagcgacagcgagaagaggaggcctgaggagcaggaggaggagccccagccccggaagccagggacccgcagggagcggacgctcggggcacctgcgtccagcgagaggagcgcggcagggggccgggggcccagttctcaaaacggagtgaggtggaggaagcctaatgggaggatgggagccgggttttcccggaacagccgtcagcgtgtatgcggaggaaaagagatgactgatgaatttgttaattgccaaaagcttgttgctgtagcaaccggaggccagactcgtggccctgacagcgtcgttagtgtcagcagagactggaaataaaggaaactcgtgt

SEQ ID NO: 343995 - DNA, 1793 bp, Homo sapiens
aggggtgttgcccaggatggtggagaggagaggagaggagaccaggtcatagcagaaactagctagggagcatttgccttcaaagaacacttttgaagttggtttgacattagaattccaaatccatagtatcacaaagcagatgtcttacattatgatgtatatgcttgttggttgcctctctgcatcaggcactgtgctgcgtgcttcatgggcatgatcccattccatgtttgcagccactctgcagagggctgctttggtggttgagggctctacccctgacatcacactgctagttttcatatcttagctctgccacttgtaggttgtgacctttaaacctctctaagcctcagttttctcatctgtaaagtgggaataatcatgcatctgtcctatcttacaaggttggtatgacttgtaaactatgaacgtctatgtaagtgtactagttgttattttggttcatacctcatgtcccatttgagtacacagtaagcagttttcaactgggggcagtttgcttccccacaagacatttggcaacatatggagacatttttggtcatcacagctggggcggagagtgcaattgacatgcagtggattgaggccactgagcatcctacagcgctgctaggacaatgctgctcaacaccccacaatgcacagggcagtctccacaacacagactgtggtgtgtgtgtttggagggcgtgtctcaaggaagagaagtaaaatacaatacaaaacaaaacctcgttgttgagtattaagcaatgcaaacaaaagcagggaagaggcgaggcacagaaaacaagagaagtctgacgtgcaaaccatgattcatgtaggtcacagaaatcatttaccttcaattgtgtttggcataatgttgaactaaagttgaaatcagtgcattctgtacacattagactgtcttctgctccctagcacagtgtctaccatccatgtgcatcctctctgctccaagaatagacagagaacaaattcacacagactcatttgcacagaatcccatgtatagcttgagtctttctgtttctttcttaaggccctcatcaaagcctgtgtggagtcagtcttttttctctactggactataagctttcaccagagtccaccccaaactgtacatggttctatgggttttatcaacaatgtaagactggaaacctcttgaaggtagatgtttctttgcaggtcactgctgtctgcccacgtcattttttcaggcacagggcagatgactgacactttgatgaattagcgaatggagcagaactcctggagcccatggtggaagcttcattgctcatgaatcacaaaaccattggttttgatagagagaaatctaaagggatggacagaacagcaagaacagtttctgccaattccatgctttggggacagattatgtcagtagaatcaaggcagtttaaggttgtgcttgaagcccatcttactaattttactaataggaatgcttacctgcttataagtgtggtgtggcaaagttgtgtgagaagctgggaaagacatccctaggacaagtaaacaccttgccaaatcccaaataaagggaagtggtaggactggaaaggaaatggatattctgtggaagaaacactttgtcatcccagacagggatttgtcataatgaagcctttcctggaaagaagtgttaaaactagggcatgtagaggtatgtcatggacctgagaatctcaaaatttgaagaataaagaaccaagcaggtacacgtggca

SEQ ID NO: 343996 - DNA, 426 bp, Homo sapiens
ctttttttttctttctgagacaaggtctctctctgccatccagactggagtgcagtggtgcaatcatggctcattgcagccttgaccttccaggctcaagcaatcctcccacatcagcctcccaagtagctggaaccacaggcatgcaccacgatggccagctaatatttctgtagagatggggtctccctatgttgcccaggctggtctcaaactcctaggctcaagtcatcctccttcctcggcctcccaaaatgctgggattacaggtgtgatcagcctgtaccaccatgccttgtctaaaatattacttttgtcctgctgaggaataaaagtaaggaaaagaaatcaatttatgtaactaattatttacctaactattagaaaccaacataccctacttcctctcagactccaagtcgactt

SEQ ID NO: 343997 - DNA, 1483 bp, Homo sapiens
gccgtttagggccgggtcttggcccgtcgcccacggtgcggagggctggtgggctttccttggccgtcgggcccgccacggcgcgggtcttggctgcggggcggaggtggggcgggagagccgaggataagagtttgaggcttttcgaggcgcgtgccgcggcgtccgcctctgcgggactctgcgccgggcgccctcggccggcgcgcccggctcccgctttgtcgccgagggaagcacgcgcgacgcccctcccgtcgccgccgtggcttctttcggtgttcgtgatttgctgagaggctggaaagcagcacggcggagaggagccttgcactcgccaggcgggaagcctgcgcggacacgcgtgcgcacccacggggcggcgggcgggcgtggggggtccgggccacgcgggcgacgcgcctctagggaagcgatcttgttgcaccttcccgttattctgaaagcaaatcgtagccagacccgagcgcagcggcttagcaaataataaggggagcgtcagtcgtgctcgaaatgcttccttcgcgatggcgtcagtgttccgtgagggaatgaagccgcagtaggaaataaagaggctgtgcgcgtagtctgaaaagcagaagtcaacatttttacagatgaagaaagaatacggaggcaagaggtctttctctgcagtttggtggatttccaacatttagacttgtttggaagaatttcctcagctgcaccaatgaagtccttgatctatagaagtcggcagtccctaaatctacgtctgcattttgttgcaaatcctttataacattccattaaaataatgcagagttatttaatatccagttggccatcgtgagagtaattcgcggctgagattttgttaatcattctgtcttctgacttaacagtgaacgtaggtgattttttttgtaaaatgttgcttcacatgaattgtgagaatcacctctaagtttgaattgtactgaaggcactataagaatttcaaatgaacgctgagtagccagtagccttctggccttttcgtttaacaagcacagagttcgtttttaaaattaagttactttgacagaggaaatgtaatagccttggtagacaacattaaaaatgtaactgtcagatgttttaaagtctccaacagccgtatctgttttagagccatagaatatttacttactgaattgcctgtttaaagatgaactttctaaatgcagggaatagtaacttgcaaaaaagctatggtctctaagtaatgaaggctgtttcagtacctagaaaaatcaaaatcaaggttttgatgctgctagtgtaaaagatgcaatccccttcttaatggcctgcttatttattaagctcctaggcactatgctgaatgccctacatgcatatctcgtttaatcatcagtacaacttgggcttaggttagactgttatccccattttacaaataaggggaaaccca

SEQ ID NO: 343998 - DNA, 841 bp, Homo sapiens
gccgtttagggccgggtcttggcccgtcgcccacggtgcggagggctggtgggctttccttggccgtcgggcccgccacggcgcgggtcttggctgcggggcggaggtggggcgggagagccgaggataagagtttgaggcttttcgaggcgcgtgccgcggcgtccgcctctgcgggactctgcgccgggcgccctcggccggcgcgcccggctcccgctttgtcgccgagggaagcacgcgcgacgcccctcccgtcgccgccgtggcttctttcggtgttcgtgatttgctgagaggctggaaagcagcacggcggagaggagccttgcactcgccaggcgggaagcctgcgcggacacgcgtgcgcacccacggggcggcgggcgggcgtggggggtccgggccacgcgggcgacgcgcctctagggaagcgatcttgttgcaccttcccgttattctgaaagcaaatcgtagccagacccgagcgcagcggcttagcaaataataaggggagcgtcagtcgtgctcgaaatgcttccttcgcgatggcgtcagtgttccgtgagggaatgaagccgcagtaggaaataaagaggctgtgcgcgtagtctgaaaagcagaagtcaacatttttacagatgaagaaagaatacggaggcaagaggtctttctctgcagtttggtggatttccaacatttagacttgtttggaagaatttcctcagctgcaccaatgaagtccttgatctatagaagtcggcagtccctaaatctacgtctgcattttgttgcaaatcctttataacattccattaaaataatgcagagttatttaata

SEQ ID NO: 343999 - DNA, 312 bp, Homo sapiens
acagttttattaggcatgctggaaccagacctcccatcctcacactgtggtgtcagggacttctgcctcatgtgtcttttcaaataataacaatatgctgtacccaaagtatatggtaccagtttagagtcttgaattttaaaaacctgaatatggaaagaacctgcccatccactttggaatgcccctgttaagctcaccttacagcatcagaagtggactcagcagccacctattagatccaatatgaaatgccctaaatactccccttacgtggtgcctggaggacctcagtcttaagcttctcctttg

SEQ ID NO: 344000 - DNA, 554 bp, Homo sapiens
tcccgaggatagaaaaacactaggaagcctcttctgtaacactgatataaggcagattttgtttcagttgttttgatctccaacagtaagttgtgcccatggcagaagtgggtataatctatctagattaaaataatgccatgtttttcaaaataactaaaattataataaagcttcaaaagattataacagaagagttggtccatgggcatgggccaggttcaaggatactttgtggactggccacttatgcagcacatccttaaagccagagaacattaagactcacttagacaaggaaaaacggctccccattacactgcctgaagttgcagaaaagatgaaagtttgttagctttctcttctatatcctactcccttcctttctcatggatctttcgtttccagattccatttttacttctctgtgtgacttagttccacatctctcaatacagctagaaattttcactcggggtttgtcacctcaaacctgtcatctctaaacctgtactcatgtttccaacaaaactgtcttcccccctggaagtaca

SEQ ID NO: 344001 - DNA, 4722 bp, Homo sapiens
tgcgcagacgccgtcgccgccgctgctgccgccgccgctgccacagcctttgccgccacggtctccgccgccgctgtcctcgcgctgcctctgggagcctccattgttccagcagcgcccggtcccgagaccgggcatcttgggggctcgcgaaacgggcggcggccgacggagttgagaccccagggcgccggcgggaccaggagcggcaggggtcagctcaggaatcccggggagccgggaccaaagcgtggggcggcagggggccggggtggcgaggtctacggtctccggagttggggctcccccttcccggcccgactttccccgccgacctccccaagtggggtcggagccccggcgggcgcccccggcgatgagcccggactcgaggtggccgatgtgacagcatgggggtggactttgatgtgaagactttctgccacaacttgcgggcgactaagccaccatacgagtgcccggtggagacctgccgaaaggtctacaagagttacagtggtattgagtaccacctgtaccactatgaccacgacaacccaccacccccacaacaaactccactccgcaagcacaagaaaaaggggcgccagtcacgcccagccaacaagcagtcacccagcccctcagaggtctcacagtcaccaggccgtgaggtgatgagctatgcacaggcccagcgcatggtggaggtggacttgcatggccgcgtccaccgcatcagcatctttgacaacctggatgtggtgtcagaggatgaggaagcccccgaggaggcccctgagaatggcagcaacaaggagaacactgagacaccagctgctactcccaagtcaggcaaacataagaacaaggagaagcgcaaggactccaaccatcaccaccaccacaatgtttctgcgagcaccactcccaagctgccagaggtggtctatcgggagctggaacaggacacccctgatgccccaccccggccaacttcctattaccggtacatcgagaagtctgcagaggagctggacgaggaagtagagtatgacatggacgaggaggactacatctggctggatatcatgaatgagcgtcggaagacagagggtgtaagtcccatcccgcaggagatctttgagtacctaatggaccgactggagaaggagtcgtactttgagagtcataataaaggcgaccctaatgcgctagtggacgaggatgctgtttgctgtatctgcaatgatggtgagtgccagaacagcaatgtcatcctcttctgtgacatgtgcaacctggaagtgcaccaggagtgctacggtgtcccctatatccctgagggccagtggctgtgccgccgttgcctgcagtcaccctctcgtgctgtggattgtgccctgtgccccaacaagggcggtgccttcaagcagacagatgacgggcgctgggcccatgtggtgtgtgccttgtggatccctgaggtctgcttcgccaacacggtcttcctagagcctattgacagcattgagcacatcccaccagctcgctggaagctcacctgctacatttgcaaacaacggggctcaggggcctgcatccagtgccacaaggccaactgttacacagctttccatgtgacatgcgcccagcaggctggcctttacatgaagatggagcctgtgcgggagacaggcgccaacggcacctctttcagtgtccgcaagacagcctactgcgacatccacacgcctccaggttcagcacgccgactgcctgccctgtcccacagcgagggtgaggaggatgaagatgaggaggaggatgagggtaagggctggagctcagagaaagtcaagaaggccaaggccaagtcccggatcaaaatgaagaaggcacggaagatcctggcagagaagcgggcagcagcacctgtggtgtcagtgccctgcatcccaccacacaggcttagtaaaatcaccaaccgcctgaccatccaaaggaagagccagttcatgcagaggctgcacagctactggacactgaagcggcagtcacggaatggggtcccattgctacgtcgcctgcagacacacctgcaatctcagaggaactgtgaccaagttgggagagattctgaggataagaactgggcccttaaagaacagctcaagtcctggcagcggctccggcatgacttggagcgagctcggctgctcgtggaattgatccgcaagcgggaaaaactcaaaagggagacgatcaaggttcagcagattgccatggagatgcagctgactcctttcctcatcctccttcgcaaaaccttggagcagctccaagagaaggacacaggcaacatcttcagcgagccggtccctctgtctgaggtacctgactacctagaccacatcaaaaagcccatggactttttcaccatgaagcagaacttggaggcttaccgctacctgaattttgatgattttgaggaggacttcaacctcatcgtcagcaactgcctcaagtataacgccaaggacaccatcttctaccgggcagcagtgcggcttcgtgagcagggtggtgctgtgctccgccaggcccggcgccaggcagaaaaaatgggcattgactttgagacgggcatgcatatcccccacagcctggctggagatgaggccacacaccacactgaagatgcagccgaggaagagcggctggtcttgctggagaaccagaagcacctgccagtggaagaacagctaaagctgcttctggagcggctggacgaagtgaatgccagcaagcagagtgtgggccgctcacggcgtgcaaagatgatcaagaaagagatgacggcactgcggcggaagcttgcccatcagcgagagacgggacgtgatggccctgagcggcatggcccctcgagccggggtagtctgacaccccacccggcagcctgtgacaaggatgggcagacagatagtgcggcagaggagagcagcagccaggagacaagcaaaggcctgggtcccaacatgtcctcaacccccgcacatgaggtgggcaggagaacctcagttctgttctccaaaaagaacccgaagacagctggaccgcccaagaggccgggccggccccccaaaaaccgggagagccagatgacccccagccacggaggcagtcctgtggggcccccccagctccccatcatgagttccctgcgtcagcgcaagcggggtaggagcccccggcccagttcgagctcagacagcgacagtgataagtccacagaagaccccccaatggacttaccagccaatggcttcagcggtggaaaccaaccagtgaagaagagtttcttggtataccgtaatgactgcagccttccccggagcagctcagactctgagtccagcagcagtagcagtagcagcgctgcttcagaccggaccagcacaacgccctcaaaacaaggccggggcaaaccctccttctctcggggcactttcccagaggacagcagtgaggatacctcaggcactgagaatgaggcctactccgtgggcactggccgcggcgtgggccacagcatggtaaggaagagtctgggccggggagctggctggctgtcagaggatgaggactccccgctggatgctctggacctcgtgtgggccaaatgccgaggctatccatcatacccagctctgatcattgatccaaagatgccccgagaaggtatgttccaccatggggttcccatccctgtgcccccactggaggtgctgaaacttggggagcagatgacccaggaagcccgagagcatctctacctcgtcctcttctttgacaacaaacgaacctggcagtggctgcccaggaccaagctggttcctctgggtgtgaaccaggacctagacaaggagaagatgctggagggccgcaagtccaacatccgcaagtcagtacagatcgcctaccacagggctctgcagcaccgcagcaaggtgcaaggcgagcagagcagtgagaccagcgatagtgattgatactgctcaacacagcccaacctatagtgccctgtgacttctctcctcccctttgctcactgtcctggagtggcaccggcctctgcactgactcatttctggtcttggggccagtctcaggggaagctgggtgggggaggtccctcctgccctaagtgcagctggactgtacagaacactccaagggccaatggcagttcagcgcaaggagagggagggcccacaggtcagaaaaagctccagagacctcacagcattgtagggcggggtggtgggccaaagttaggacactgcgtaaaacaggccatcccaccacctctacctgctcatgccaggagaatccataactgcctagaggcctggggcccctaccggtcgtgaggtgagtgggcatctgtccagcctggaagaggggcactaggtgactccctcccctgctgttgtaaatactgtaattatcggagaatttaaattattctcatttgtaactgcgtttccgggtcgcgccagagtcatttggtactaaaaaaaaaaaaaaaaaagactgggggctgtccccatttcccttctctttcccatagattcccccacctttcaaactggtttgtatttatttcaaaggaagaaaatatattgattcttagaaaataaactgtcaatttagaat

SEQ ID NO: 344002 - DNA, 4824 bp, Homo sapiens
tgcgcagacgccgtcgccgccgctgctgccgccgccgctgccacagcctttgccgccacggtctccgccgccgctgtcctcgcgctgcctctgggagcctccattgttccagcagcgcccggtcccgagaccgggcatcttgggggctcgcgaaacgggcggcggccgacggagttgagaccccagggcgccggcgggaccaggagcggcaggggtcagctcaggaatcccggggagccgggaccaaagcgtggggcggcagggggccggggtggcgaggtctacggtctccggagttggggctcccccttcccggcccgactttccccgccgacctccccaagtggggtcggagccccggcgggcgcccccggcgatgagcccggactcgaggtggccgatgtgacagcatgggggtggactttgatgtgaagactttctgccacaacttgcgggcgactaagccaccatacgagtgcccggtggagacctgccgaaaggtctacaagagttacagtggtattgagtaccacctgtaccactatgaccacgacaacccaccacccccacaacaaactccactccgcaagcacaagaaaaaggggcgccagtcacgcccagccaacaagcagtcacccagcccctcagaggtctcacagtcaccaggccgtgaggtgatgagctatgcacaggcccagcgcatggtggaggtggacttgcatggccgcgtccaccgcatcagcatctttgacaacctggatgtggtgtcagaggatgaggaagcccccgaggaggcccctgagaatggcagcaacaaggagaacactgagacaccagctgctactcccaagtcaggcaaacataagaacaaggagaagcgcaaggactccaaccatcaccaccaccacaatgtttctgcgagcaccactcccaagctgccagaggtggtctatcgggagctggaacaggacacccctgatgccccaccccggccaacttcctattaccggtacatcgagaagtctgcagaggagctggacgaggaagtagagtatgacatggacgaggaggactacatctggctggatatcatgaatgagcgtcggaagacagagggtgtaagtcccatcccgcaggagatctttgagtacctaatggaccgactggagaaggagtcgtactttgagagtcataataaaggcgaccctaatgcgctagtggacgaggatgctgtttgctgtatctgcaatgatggtgagtgccagaacagcaatgtcatcctcttctgtgacatgtgcaacctggaagtgcaccaggagtgctacggtgtcccctatatccctgagggccagtggctgtgccgccgttgcctgcagtcaccctctcgtgctgtggattgtgccctgtgccccaacaagggcggtgccttcaagcagacagatgacgggcgctgggcccatgtggtgtgtgccttgtggatccctgaggtctgcttcgccaacacggtcttcctagagcctattgacagcattgagcacatcccaccagctcgctggaagctcacctgctacatttgcaaacaacggggctcaggggcctgcatccagtgccacaaggccaactgttacacagctttccatgtgacatgcgcccagcaggctggcctttacatgaagatggagcctgtgcgggagacaggcgccaacggcacctctttcagtgtccgcaagacagcctactgcgacatccacacgcctccaggttcagcacgccgactgcctgccctgtcccacagcgagggtgaggaggatgaagatgaggaggaggatgagggtaagggctggagctcagagaaagtcaagaaggccaaggccaagtcccggatcaaaatgaagaaggcacggaagatcctggcagagaagcgggcagcagcacctgtggtgtcagtgccctgcatcccaccacacaggcttagtaaaatcaccaaccgcctgaccatccaaaggaagagccagttcatgcagaggctgcacagctactggacactgaagcggcagtcacggaatggggtcccattgctacgtcgcctgcagacacacctgcaatctcagaggaactgtgaccaagttgggagagattctgaggataagaactgggcccttaaagaacagctcaagtcctggcagcggctccggcatgacttggagcgagctcggctgctcgtggaattgatccgcaagcgggaaaaactcaaaagggagacgatcaaggttcagcagattgccatggagatgcagctgactcctttcctcatcctccttcgcaaaaccttggagcagctccaagagaaggacacaggcaacatcttcagcgagccggtccctctgtctgaggtacctgactacctagaccacatcaaaaagcccatggactttttcaccatgaagcagaacttggaggcttaccgctacctgaattttgatgattttgaggaggacttcaacctcatcgtcagcaactgcctcaagtataacgccaaggacaccatcttctaccgggcagcagtgcggcttcgtgagcagggtggtgctgtgctccgccaggcccggcgccaggcagaaaaaatgggcattgactttgagacgggcatgcatatcccccacagcctggctggagatgaggccacacaccacactgaagatgcagccgaggaagagcggctggtcttgctggagaaccagaagcacctgccagtggaagaacagctaaagctgcttctggagcggctggacgaagtgaatgccagcaagcagagtgtgggccgctcacggcgtgcaaagatgatcaagaaagagatgacggcactgcggcggaagcttgcccatcagcgagagacgggacgtgatggccctgagcggcatggcccctcgagccggggtagtctgacaccccacccggcagcctgtgacaaggatgggcagacagatagtgcggcagaggagagcagcagccaggagacaagcaaaggcctgggtcccaacatgtcctcaacccccgcacatgaggtgggcaggagaacctcagttctgttctccaaaaagaacccgaagacagctggaccgcccaagaggccgggccggccccccaaaaaccgggagagccagatgacccccagccacggaggcagtcctgtggggcccccccagctccccatcatgagttccctgcgtcagcgcaagcggggtaggagcccccggcccagttcgagctcagacagcgacagtgataagtccacagaagaccccccaatggacttaccagccaatggcttcagcggtggaaaccaaccagtgaagaagagtttcttggtataccgtaatgactgcagccttccccggagcagctcagactctgagtccagcagcagtagcagtagcagcgctgcttcagaccggaccagcacaacgccctcaaaacaaggccggggcaaaccctccttctctcggggcactttcccagaggacagcagtgaggatacctcaggcactgagaatgaggcctactccgtgggcactggccgcggcgtgggccacagcagtaagttcccttgcccaaggccagggatgctggggacccagtgtcagggtctcgccagccccccagctgctgatccaccccctctcccccattcctgtgaagtggtaaggaagagtctgggccggggagctggctggctgtcagaggatgaggactccccgctggatgctctggacctcgtgtgggccaaatgccgaggctatccatcatacccagctctgatcattgatccaaagatgccccgagaaggtatgttccaccatggggttcccatccctgtgcccccactggaggtgctgaaacttggggagcagatgacccaggaagcccgagagcatctctacctcgtcctcttctttgacaacaaacgaacctggcagtggctgcccaggaccaagctggttcctctgggtgtgaaccaggacctagacaaggagaagatgctggagggccgcaagtccaacatccgcaagtcagtacagatcgcctaccacagggctctgcagcaccgcagcaaggtgcaaggcgagcagagcagtgagaccagcgatagtgattgatactgctcaacacagcccaacctatagtgccctgtgacttctctcctcccctttgctcactgtcctggagtggcaccggcctctgcactgactcatttctggtcttggggccagtctcaggggaagctgggtgggggaggtccctcctgccctaagtgcagctggactgtacagaacactccaagggccaatggcagttcagcgcaaggagagggagggcccacaggtcagaaaaagctccagagacctcacagcattgtagggcggggtggtgggccaaagttaggacactgcgtaaaacaggccatcccaccacctctacctgctcatgccaggagaatccataactgcctagaggcctggggcccctaccggtcgtgaggtgagtgggcatctgtccagcctggaagaggggcactaggtgactccctcccctgctgttgtaaatactgtaattatcggagaatttaaattattctcatttgtaactgcgtttccgggtcgcgccagagtcatttggtactaaaaaaaaaaaaaaaaaagactgggggctgtccccatttcccttctctttcccatagattcccccacctttcaaactggtttgtatttatttcaaaggaagaaaatatattgattcttagaaaataaactgtcaatttagaat

SEQ ID NO: 344003 - DNA, 4940 bp, Homo sapiens
tgcgcagacgccgtcgccgccgctgctgccgccgccgctgccacagcctttgccgccacggtctccgccgccgctgtcctcgcgctgcctctgggagcctccattgttccagcagcgcccggtcccgagaccgggcatcttgggggctcgcgaaacgggcggcggccgacggagttgagaccccagggcgccggcgggaccaggagcggcaggggtcagctcaggaatcccggggagccgggaccaaagcgtggggcggcagggggccggggtggcgaggtctacggtctccggagttggggctcccccttcccggcccgactttccccgccgacctccccaagtggggtcggagccccggcgggcgcccccggcgatgagcccggactcgaggtggccgatgtgacagcatgggggtggactttgatgtgaagactttctgccacaacttgcgggcgactaagccaccatacgagtgcccggtggagacctgccgaaaggtctacaagagttacagtggtattgagtaccacctgtaccactatgaccacgacaacccaccacccccacaacaaactccactccgcaagcacaagaaaaaggggcgccagtcacgcccagccaacaagcagtcacccagcccctcagaggtctcacagtcaccaggccgtgaggtgatgagctatgcacaggcccagcgcatggtggaggtggacttgcatggccgcgtccaccgcatcagcatctttgacaacctggatgtggtgtcagaggatgaggaagcccccgaggaggcccctgagaatggcagcaacaaggagaacactgagacaccagctgctactcccaagtcaggcaaacataagaacaaggagaagcgcaaggactccaaccatcaccaccaccacaatgtttctgcgagcaccactcccaagctgccagaggtggtctatcgggagctggaacaggacacccctgatgccccaccccggccaacttcctattaccggtacatcgagaagtctgcagaggagctggacgaggaagtagagtatgacatggacgaggaggactacatctggctggatatcatgaatgagcgtcggaagacagagggtgtaagtcccatcccgcaggagatctttgagtacctaatggaccgactggagaaggagtcgtactttgagagtcataataaaggcgaccctaatgcgctagtggacgaggatgctgtttgctgtatctgcaatgatggtgagtgccagaacagcaatgtcatcctcttctgtgacatgtgcaacctggaagtgcaccaggagtgctacggtgtcccctatatccctgagggccagtggctgtgccgccgttgcctgcagtcaccctctcgtgctgtggattgtgccctgtgccccaacaagggcggtgccttcaagcagacagatgacgggcgctgggcccatgtggtgtgtgccttgtggatccctgaggtctgcttcgccaacacggtcttcctagagcctattgacagcattgagcacatcccaccagctcgctggaagctcacctgctacatttgcaaacaacggggctcaggggcctgcatccagtgccacaaggccaactgttacacagctttccatgtgacatgcgcccagcaggctggcctttacatgaagatggagcctgtgcgggagacaggcgccaacggcacctctttcagtgtccgcaagacagcctactgcgacatccacacgcctccaggttcagcacgccgactgcctgccctgtcccacagcgagggtgaggaggatgaagatgaggaggaggatgagggtaagggctggagctcagagaaagtcaagaaggccaaggccaagtcccggatcaaaatgaagaaggcacggaagatcctggcagagaagcgggcagcagcacctgtggtgtcagtgccctgcatcccaccacacaggcttagtaaaatcaccaaccgcctgaccatccaaaggaagagccagttcatgcagaggctgcacagctactggacactgaagcggcagtcacggaatggggtcccattgctacgtcgcctgcagacacacctgcaatctcagaggaactgtgaccaagttgggagagattctgaggataagaactgggcccttaaagaacagctcaagtcctggcagcggctccggcatgacttggagcgagctcggctgctcgtggaattgatccgcaagcgggaaaaactcaaaagggagacgatcaaggttcagcagattgccatggagatgcagctgactcctttcctcatcctccttcgcaaaaccttggagcagctccaagagaaggacacaggcaacatcttcagcgagccggtccctctgtctgaggtacctgactacctagaccacatcaaaaagcccatggactttttcaccatgaagcagaacttggaggcttaccgctacctgaattttgatgattttgaggaggacttcaacctcatcgtcagcaactgcctcaagtataacgccaaggacaccatcttctaccgggcagcagtgcggcttcgtgagcagggtggtgctgtgctccgccaggcccggcgccaggcagaaaaaatgggcattgactttgagacgggcatgcatatcccccacagcctggctggagatgaggccacacaccacactgaagatggtgggtgatatatcacacacacatataagaggccaatgccggggatggacagctttccaaaagtcccctcctgggagcaggcagtgtaggcagaaagcagctaggctgagcagtggcaagctatccccaggaatgctccccaagaagccagactgggtgaatggatagcagtgcccgccattccacatcttggtgctgctattttacagctgttcctgcagccgaggaagagcggctggtcttgctggagaaccagaagcacctgccagtggaagaacagctaaagctgcttctggagcggctggacgaagtgaatgccagcaagcagagtgtgggccgctcacggcgtgcaaagatgatcaagaaagagatgacggcactgcggcggaagcttgcccatcagcgagagacgggacgtgatggccctgagcggcatggcccctcgagccggggtagtctgacaccccacccggcagcctgtgacaaggatgggcagacagatagtgcggcagaggagagcagcagccaggagacaagcaaaggcctgggtcccaacatgtcctcaacccccgcacatgaggtgggcaggagaacctcagttctgttctccaaaaagaacccgaagacagctggaccgcccaagaggccgggccggccccccaaaaaccgggagagccagatgacccccagccacggaggcagtcctgtggggcccccccagctccccatcatgagttccctgcgtcagcgcaagcggggtaggagcccccggcccagttcgagctcagacagcgacagtgataagtccacagaagaccccccaatggacttaccagccaatggcttcagcggtggaaaccaaccagtgaagaagagtttcttggtataccgtaatgactgcagccttccccggagcagctcagactctgagtccagcagcagtagcagtagcagcgctgcttcagaccggaccagcacaacgccctcaaaacaaggccggggcaaaccctccttctctcggggcactttcccagaggacagcagtgaggatacctcaggcactgagaatgaggcctactccgtgggcactggccgcggcgtgggccacagcatggtaaggaagagtctgggccggggagctggctggctgtcagaggatgaggactccccgctggatgctctggacctcgtgtgggccaaatgccgaggctatccatcatacccagctctgatcattgatccaaagatgccccgagaaggtatgttccaccatggggttcccatccctgtgcccccactggaggtgctgaaacttggggagcagatgacccaggaagcccgagagcatctctacctcgtcctcttctttgacaacaaacgaacctggcagtggctgcccaggaccaagctggttcctctgggtgtgaaccaggacctagacaaggagaagatgctggagggccgcaagtccaacatccgcaagtcagtacagatcgcctaccacagggctctgcagcaccgcagcaaggtgcaaggcgagcagagcagtgagaccagcgatagtgattgatactgctcaacacagcccaacctatagtgccctgtgacttctctcctcccctttgctcactgtcctggagtggcaccggcctctgcactgactcatttctggtcttggggccagtctcaggggaagctgggtgggggaggtccctcctgccctaagtgcagctggactgtacagaacactccaagggccaatggcagttcagcgcaaggagagggagggcccacaggtcagaaaaagctccagagacctcacagcattgtagggcggggtggtgggccaaagttaggacactgcgtaaaacaggccatcccaccacctctacctgctcatgccaggagaatccataactgcctagaggcctggggcccctaccggtcgtgaggtgagtgggcatctgtccagcctggaagaggggcactaggtgactccctcccctgctgttgtaaatactgtaattatcggagaatttaaattattctcatttgtaactgcgtttccgggtcgcgccagagtcatttggtactaaaaaaaaaaaaaaaaaagactgggggctgtccccatttcccttctctttcccatagattcccccacctttcaaactggtttgtatttatttcaaaggaagaaaatatattgattcttagaaaataaactgtcaatttagaat

SEQ ID NO: 344004 - DNA, 3746 bp, Homo sapiens
tgcgcagacgccgtcgccgccgctgctgccgccgccgctgccacagcctttgccgccacggtctccgccgccgctgtcctcgcgctgcctctgggagcctccattgttccagcagcgcccggtcccgagaccgggcatcttgggggctcgcgaaacgggcggcggccgacggagttgagaccccagggcgccggcgggaccaggagcggcaggggtcagctcaggaatcccggggagccgggaccaaagcgtggggcggcagggggccggggtggcgaggtctacggtctccggagttggggctcccccttcccggcccgactttccccgccgacctccccaagtggggtcggagccccggcgggcgcccccggcgatgagcccggactcgaggtggccgatgtgacagcatgggggtggactttgatgtgaagactttctgccacaacttgcgggcgactaagccaccatacgagtgcccggtggagacctgccgaaaggtctacaagagttacagtggtattgagtaccacctgtaccactatgaccacgacaacccaccacccccacaacaaactccactccgcaagcacaagaaaaaggggcgccagtcacgcccagccaacaagcagtcacccagcccctcagaggtctcacagtcaccaggccgtgaggtgatgagctatgcacaggcccagcgcatggtggaggtggacttgcatggccgcgtccaccgcatcagcatctttgacaacctggatgtggtgtcagaggatgaggaagcccccgaggaggcccctgagaatggcagcaacaaggagaacactgagacaccagctgctactcccaagtcaggcaaacataagaacaaggagaagcgcaaggactccaaccatcaccaccaccacaatgtttctgcgagcaccactcccaagctgccagaggtggtctatcgggagctggaacaggacacccctgatgccccaccccggccaacttcctattaccggtacatcgagaagtctgcagaggagctggacgaggaagtagagtatgacatggacgaggaggactacatctggctggatatcatgaatgagcgtcggaagacagagggtgtaagtcccatcccgcaggagatctttgagtacctaatggaccgactggagaaggagtcgtactttgagagtcataataaaggcgaccctaatgcgctagtggacgaggatgctgtttgctgtatctgcaatgatggtgagtgccagaacagcaatgtcatcctcttctgtgacatgtgcaacctggaagtgcaccaggagtgctacggtgtcccctatatccctgagggccagtggctgtgccgccgttgcctgcagtcaccctctcgtgctgtggattgtgccctgtgccccaacaagggcggtgccttcaagcagacagatgacgggcgctgggcccatgtggtgtgtgccttgtggatccctgaggtctgcttcgccaacacggtcttcctagagcctattgacagcattgagcacatcccaccagctcgctggaagctcacctgctacatttgcaaacaacggggctcaggggcctgcatccagtgccacaaggccaactgttacacagctttccatgtgacatgcgcccagcaggctggcctttacatgaagatggagcctgtgcgggagacaggcgccaacggcacctctttcagtgtccgcaagacagcctactgcgacatccacacgcctccaggttcagcacgccgactgcctgccctgtcccacagcgagggtgaggaggatgaagatgaggaggaggatgagggtaagggctggagctcagagaaagtcaagaaggccaaggccaagtcccggatcaaaatgaagaaggcacggaagatcctggcagagaagcgggcagcagcacctgtggtgtcagtgccctgcatcccaccacacaggcttagtaaaatcaccaaccgcctgaccatccaaaggaagagccagttcatgcagaggctgcacagctactggacactgaagcggcagtcacggaatggggtcccattgctacgtcgcctgcagacacacctgcaatctcagaggaactgtgaccaagttgggagagattctgaggataagaactgggcccttaaagaacagctcaagtcctggcagcggctccggcatgacttggagcgagctcggctgctcgtggaattgatccgcaagcgggaaaaactcaaaagggagacgatcaaggttcagcagattgccatggagatgcagctgactcctttcctcatcctccttcgcaaaaccttggagcagctccaagagaaggacacaggcaacatcttcagcgagccggtccctctgtctgaggtacctgactacctagaccacatcaaaaagcccatggactttttcaccatgaagcagaacttggaggcttaccgctacctgaattttgatgattttgaggaggacttcaacctcatcgtcagcaactgcctcaagtataacgccaaggacaccatcttctaccgggcagcagtgcggcttcgtgagcagggtggtgctgtgctccgccaggcccggcgccaggcagaaaaaatgggcattgactttgagacgggcatgcatatcccccacagcctggctggagatgaggccacacaccacactgaagatgcagccgaggaagagcggctggtcttgctggagaaccagaagcacctgccagtggaagaacagctaaagctgcttctggagcggctggacgaagtgaatgccagcaagcagagtgtgggccgctcacggcgtgcaaagatgatcaagaaagagatgacggcactgcggcggaagcttgcccatcagcgagagacgggacgtgatggccctgagcggcatggcccctcgagccggggtagtctgacaccccacccggcagcctgtgacaaggatgggcagacagatagtgcggcagaggagagcagcagccaggagacaagcaaaggcctgggtcccaacatgtcctcaacccccgcacatgaggtgggcaggagaacctcagttctgttctccaaaaagaacccgaagacagctggaccgcccaagaggccgggccggccccccaaaaaccgggagagccagatgacccccagccacggaggcagtcctgtggggcccccccagctccccatcatgagttccctggccctaagtgcagctggactgtacagaacactccaagggccaatggcagttcagcgcaaggagagggagggcccacaggtcagaaaaagctccagagacctcacagcattgtagggcggggtggtgggccaaagttaggacactgcgtaaaacaggccatcccaccacctctacctgctcatgccaggagaatccataactgcctagaggcctggggcccctaccggtcgtgaggtgagtgggcatctgtccagcctggaagaggggcactaggtgactccctcccctgctgttgtaaatactgtaattatcggagaatttaaattattctcatttgtaactgcgtttccgggtcgcgccagagtcatttggtactaaaaaaaaaaaaaaaaaagactgggggctgtccccatttcccttctctttcccatagattcccccacctttcaaactggtttgtatttatttcaaaggaagaaaatatattgattcttagaaaataaactgtcaatttagaat

SEQ ID NO: 344005 - DNA, 323 bp, Homo sapiens
ctttaagccatttgtgtcctaaagccagtaactgccgagggaagcaaggggtggagcagggctgtggccaactgtggtagacactgcccagagctagctctgctggccaaggttggaggaattttccagcacagaaggggaacccaagctccaagtccctcttacctccatgtcatctctgatctacatcttcctgaccggttccttccctcctccccttcccttcaaccaagacttaccagccaatggcttcagcggtggaaaccaaccagtgaagaagagtttcttggtataccgtaatgactgcagccttccccggagca

SEQ ID NO: 344006 - DNA, 417 bp, Homo sapiens
ttcaaaggctcagtctcagtggggctcccagggtcaaatagtactctgggctgcagtgactagagcagtcttaggggcagaagtccctgattgctggtgtacagggttagggatctggtttagtgctgggagcttggtttcctgtctgccacggtaccactgatggcaccactctttcttccttgccttaagtccagagtcccaggccttttggacaagagatcctctcccttcatccccattcaggaactttcactggccagagacccttgctctgcttaagagaatcagggcccaacaagttttactctttgtttcctgcctcccaggcttagtaaaatcaccaaccgcctgaccatccaaaggaagagccagttcatgcagaggctgcacagctactggacactgaagcggcag

SEQ ID NO: 344007 - DNA, 341 bp, Homo sapiens
aacaaacacataccaagcatttattctgccaggccttggggacacacagattgaggcactaccaataaattactgtgctccctcttttggcttgacctgagtttcctgggctctcttctccctgttgacctttcctctggctttctaatcatcctctgatcttcgttttgcctctacagagagattctgaggataagaactgggcccttaaagaacagctcaagtcctggcagcggctccggcatgacttggagcgagctcggctgctcgtggaattgatccgcaagcgggaaaaactcaaaagggagacggtgagtgctcctgggccagccctattttat

SEQ ID NO: 344008 - DNA, 289 bp, Homo sapiens
atcattgatccaaagatgccccgagaaggtatgttccaccatggggttcccatccctgtgcccccactggaggtgctgaaacttggggagcagatgacccaggaagcccgagagcatctctacctcgtcctcttctttgacaacaaacgaacctggtaaggaggggagcatttggtgtgactcacagccacagatgcagccctgtgtggtatgggggcagactgccaggaaactccagcaacaggcagactgggctatcacaagtcagtgggggagggacttagaacag

SEQ ID NO: 344009 - DNA, 4740 bp, Homo sapiens
tgcgcagacgccgtcgccgccgctgctgccgccgccgctgccacagcctttgccgccacggtctccgccgccgctgtcctcgcgctgcctctgggagcctccattgttccagcagcgcccggtcccgagaccgggcatcttgggggctcgcgaaacgggcggcggccgacggagttgagaccccagggcgccggcgggaccaggagcggcaggggtcagctcaggaatcccggggagccgggaccaaagcgtggggcggcagggggccggggtggcgaggtctacggtctccggagttggggctcccccttcccggcccgactttccccgccgacctccccaagtggggtcggagccccggcgggcgcccccggcgatgagcccggactcgaggtggccgatgtgacagcatgggggtggactttgatgtgaagactttctgccacaacttgcgggcgactaagccaccatacgagtgcccggtggagacctgccgaaaggtctacaagagttacagtggtattgagtaccacctgtaccactatgaccacgacaacccaccacccccacaacaaactccactccgcaagcacaagaaaaaggggcgccagtcacgcccagccaacaagcagtcacccagcccctcagaggtctcacagtcaccaggccgtgaggtgatgagctatgcacaggcccagcgcatggtggaggtggacttgcatggccgcgtccaccgcatcagcatctttgacaacctggatgtggtgtcagaggatgaggaagcccccgaggaggcccctgagaatggcagcaacaaggagaacactgagacaccagctgctactcccaagtcaggcaaacataagaacaaggagaagcgcaaggactccaaccatcaccaccaccacaatgtttctgcgagcaccactcccaagctgccagaggtggtctatcgggagctggaacaggacacccctgatgccccaccccggccaacttcctattaccggtacatcgagaagtctgcagaggagctggacgaggaagtagagtatgacatggacgaggaggactacatctggctggatatcatgaatgagcgtcggaagacagagggtgtaagtcccatcccgcaggagatctttgagtacctaatggaccgactggagaaggagtcgtactttgagagtcataataaaggcgaccctaatgcgctagtggacgaggatgctgtttgctgtatctgcaatgatggtgagtgccagaacagcaatgtcatcctcttctgtgacatgtgcaacctggaagtgcaccaggagtgctacggtgtcccctatatccctgagggccagtggctgtgccgccgttgcctgcagtcaccctctcgtgctgtggattgtgccctgtgccccaacaagggcggtgccttcaagcagacagatgacgggcgctgggcccatgtggtgtgtgccttgtggatccctgaggtctgcttcgccaacacggtcttcctagagcctattgacagcattgagcacatcccaccagctcgctggaagctcacctgctacatttgcaaacaacggggctcaggggcctgcatccagtgccacaaggccaactgttacacagctttccatgtgacatgcgcccagcaggctggcctttacatgaagatggagcctgtgcgggagacaggcgccaacggcacctctttcagtgtccgcaagacagcctactgcgacatccacacgcctccaggttcagcacgccgactgcctgccctgtcccacagcgagggtgaggaggatgaagatgaggaggaggatgagggtaagggctggagctcagagaaagtcaagaaggccaaggccaagtcccggatcaaaatgaagaaggcacggaagatcctggcagagaagcgggcagcagcacctgtggtgtcagtgccctgcatcccaccacacaggcttagtaaaatcaccaaccgcctgaccatccaaaggaagagccagttcatgcagaggctgcacagctactggacactgaagcggcagtcacggaatggggtcccattgctacgtcgcctgcagacacacctgcaatctcagaggaactgtgaccaagttgggagagattctgaggataagaactgggcccttaaagaacagctcaagtcctggcagcggctccggcatgacttggagcgagctcggctgctcgtggaattgatccgcaagcgggaaaaactcaaaagggagacgatcaaggttcagcagattgccatggagatgcagctgactcctttcctcatcctccttcgcaaaaccttggagcagctccaagagaaggacacaggcaacatcttcagcgagccggtccctctgtctgaggtaaccgaattggacgaagtacctgactacctagaccacatcaaaaagcccatggactttttcaccatgaagcagaacttggaggcttaccgctacctgaattttgatgattttgaggaggacttcaacctcatcgtcagcaactgcctcaagtataacgccaaggacaccatcttctaccgggcagcagtgcggcttcgtgagcagggtggtgctgtgctccgccaggcccggcgccaggcagaaaaaatgggcattgactttgagacgggcatgcatatcccccacagcctggctggagatgaggccacacaccacactgaagatgcagccgaggaagagcggctggtcttgctggagaaccagaagcacctgccagtggaagaacagctaaagctgcttctggagcggctggacgaagtgaatgccagcaagcagagtgtgggccgctcacggcgtgcaaagatgatcaagaaagagatgacggcactgcggcggaagcttgcccatcagcgagagacgggacgtgatggccctgagcggcatggcccctcgagccggggtagtctgacaccccacccggcagcctgtgacaaggatgggcagacagatagtgcggcagaggagagcagcagccaggagacaagcaaaggcctgggtcccaacatgtcctcaacccccgcacatgaggtgggcaggagaacctcagttctgttctccaaaaagaacccgaagacagctggaccgcccaagaggccgggccggccccccaaaaaccgggagagccagatgacccccagccacggaggcagtcctgtggggcccccccagctccccatcatgagttccctgcgtcagcgcaagcggggtaggagcccccggcccagttcgagctcagacagcgacagtgataagtccacagaagaccccccaatggacttaccagccaatggcttcagcggtggaaaccaaccagtgaagaagagtttcttggtataccgtaatgactgcagccttccccggagcagctcagactctgagtccagcagcagtagcagtagcagcgctgcttcagaccggaccagcacaacgccctcaaaacaaggccggggcaaaccctccttctctcggggcactttcccagaggacagcagtgaggatacctcaggcactgagaatgaggcctactccgtgggcactggccgcggcgtgggccacagcatggtaaggaagagtctgggccggggagctggctggctgtcagaggatgaggactccccgctggatgctctggacctcgtgtgggccaaatgccgaggctatccatcatacccagctctgatcattgatccaaagatgccccgagaaggtatgttccaccatggggttcccatccctgtgcccccactggaggtgctgaaacttggggagcagatgacccaggaagcccgagagcatctctacctcgtcctcttctttgacaacaaacgaacctggcagtggctgcccaggaccaagctggttcctctgggtgtgaaccaggacctagacaaggagaagatgctggagggccgcaagtccaacatccgcaagtcagtacagatcgcctaccacagggctctgcagcaccgcagcaaggtgcaaggcgagcagagcagtgagaccagcgatagtgattgatactgctcaacacagcccaacctatagtgccctgtgacttctctcctcccctttgctcactgtcctggagtggcaccggcctctgcactgactcatttctggtcttggggccagtctcaggggaagctgggtgggggaggtccctcctgccctaagtgcagctggactgtacagaacactccaagggccaatggcagttcagcgcaaggagagggagggcccacaggtcagaaaaagctccagagacctcacagcattgtagggcggggtggtgggccaaagttaggacactgcgtaaaacaggccatcccaccacctctacctgctcatgccaggagaatccataactgcctagaggcctggggcccctaccggtcgtgaggtgagtgggcatctgtccagcctggaagaggggcactaggtgactccctcccctgctgttgtaaatactgtaattatcggagaatttaaattattctcatttgtaactgcgtttccgggtcgcgccagagtcatttggtactaaaaaaaaaaaaaaaaaagactgggggctgtccccatttcccttctctttcccatagattcccccacctttcaaactggtttgtatttatttcaaaggaagaaaatatattgattcttagaaaataaactgtcaatttagaat

SEQ ID NO: 344010 - DNA, 4437 bp, Homo sapiens
tgcgcagacgccgtcgccgccgctgctgccgccgccgctgccacagcctttgccgccacggtctccgccgccgctgtcctcgcgctgcctctgggagcctccattgttccagcagcgcccggtcccgagaccgggcatcttgggggctcgcgaaacgggcggcggccgacggagttgagaccccagggcgccggcgggaccaggagcggcaggggtcagctcaggaatcccggggagccgggaccaaagcgtggggcggcagggggccggggtggcgaggtctacggtctccggagttggggctcccccttcccggcccgactttccccgccgacctccccaagtggggtcggagccccggcgggcgcccccggcgatgagcccggactcgaggtggccgatgtgacagcatgggggtggactttgatgtgaagactttctgccacaacttgcgggcgactaagccaccatacgagtgcccggtggagacctgccgaaaggtctacaagagttacagtggtattgagtaccacctgtaccactatgaccacgacaacccaccacccccacaacaaactccactccgcaagcacaagaaaaaggggcgccagtcacgcccagccaacaagcagtcacccagcccctcagaggtctcacagtcaccaggccgtgaggtgatgagctatgcacaggcccagcgcatggtggaggtggacttgcatggccgcgtccaccgcatcagcatctttgacaacctggatgtggtgtcagaggatgaggaagcccccgaggaggcccctgagaatggcagcaacaaggagaacactgagacaccagctgctactcccaagtcaggcaaacataagaacaaggagaagcgcaaggactccaaccatcaccaccaccacaatgtttctgcgagcaccactcccaagctgccagaggtggtctatcgggagctggaacaggacacccctgatgccccaccccggccaacttcctattaccggtacatcgagaagtctgcagaggagctggacgaggaagtagagtatgacatggacgaggaggactacatctggctggatatcatgaatgagcgtcggaagacagagggtgtaagtcccatcccgcaggagatctttgagtacctaatggaccgactggagaaggagtcgtactttgagagtcataataaaggcgaccctaatgcgctagtggacgaggatgctgtttgctgtatctgcaatgatggtgagtgccagaacagcaatgtcatcctcttctgtgacatgtgcaacctggaagtgcaccaggagtgctacggtgtcccctatatccctgagggccagtggctgtgccgccgttgcctgcagtcaccctctcgtgctgtggattgtgccctgtgccccaacaagggcggtgccttcaagcagacagatgacgggcgctgggcccatgtggtgtgtgccttgtggatccctgaggtctgcttcgccaacacggtcttcctagagcctattgacagcattgagcacatcccaccagctcgctggaagctcacctgctacatttgcaaacaacggggctcaggggcctgcatccagtgccacaaggccaactgttacacagctttccatgtgacatgcgcccagcaggctggcctttacatgaagatggagcctgtgcgggagacaggcgccaacggcacctctttcagtgtccgcaagacagcctactgcgacatccacacgcctccaggttcagcacgccgactgcctgccctgtcccacagcgagggtgaggaggatgaagatgaggaggaggatgagggtaagggctggagctcagagaaagtcaagaaggccaaggccaagtcccggatcaaaatgaagaaggcacggaagatcctggcagagaagcgggcagcagcacctgtggtgtcagtgccctgcatcccaccacacaggcttagtaaaatcaccaaccgcctgaccatccaaaggaagagccagttcatgcagaggctgcacagctactggacactgaagcggcagtcacggaatggggtcccattgctacgtcgcctgcagacacacctgcaatctcagaggaactgtgaccaagttgggagagattctgaggataagaactgggcccttaaagaacagctcaagtcctggcagcggctccggcatgacttggagcgagctcggctgctcgtggaattgatccgcaagcgggaaaaactcaaaagggagacgatcaaggttcagcagattgccatggagatgcagctgactcctttcctcatcctccttcgcaaaaccttggagcagctccaagagaaggacacaggcaacatcttcagcgagccggtccctctgtctgaggtacctgactacctagaccacatcaaaaagcccatggactttttcaccatgaagcagaacttggaggcttaccgctacctgaattttgatgattttgaggaggacttcaacctcatcgtcagcaactgcctcaagtataacgccaaggacaccatcttctaccgggcagcagtgcggcttcgtgagcagggtggtgctgtgctccgccaggcccggcgccaggcagaaaaaatgggcattgactttgagacgggcatgcatatcccccacagcctggctggagatgaggccacacaccacactgaagatgcagccgaggaagagcggctggtcttgctggagaaccagaagcacctgccagtggaagaacagctaaagctgcttctggagcggctggacgaagtgaatgccagcaagcagagtgtgggccgctcacggcgtgcaaagatgatcaagaaagagatgacggcactgcggcggaagcttgcccatcagcgagagacgggacgtgatggccctgagcggcatggcccctcgagccggggtagtctgacaccccacccggcagcctgtgacaaggatgggcagacagatagtgcggcagaggagagcagcagccaggagacaagcaaagacttaccagccaatggcttcagcggtggaaaccaaccagtgaagaagagtttcttggtataccgtaatgactgcagccttccccggagcagctcagactctgagtccagcagcagtagcagtagcagcgctgcttcagaccggaccagcacaacgccctcaaaacaaggccggggcaaaccctccttctctcggggcactttcccagaggacagcagtgaggatacctcaggcactgagaatgaggcctactccgtgggcactggccgcggcgtgggccacagcatggtaaggaagagtctgggccggggagctggctggctgtcagaggatgaggactccccgctggatgctctggacctcgtgtgggccaaatgccgaggctatccatcatacccagctctgatcattgatccaaagatgccccgagaaggtatgttccaccatggggttcccatccctgtgcccccactggaggtgctgaaacttggggagcagatgacccaggaagcccgagagcatctctacctcgtcctcttctttgacaacaaacgaacctggcagtggctgcccaggaccaagctggttcctctgggtgtgaaccaggacctagacaaggagaagatgctggagggccgcaagtccaacatccgcaagtcagtacagatcgcctaccacagggctctgcagcaccgcagcaaggtgcaaggcgagcagagcagtgagaccagcgatagtgattgatactgctcaacacagcccaacctatagtgccctgtgacttctctcctcccctttgctcactgtcctggagtggcaccggcctctgcactgactcatttctggtcttggggccagtctcaggggaagctgggtgggggaggtccctcctgccctaagtgcagctggactgtacagaacactccaagggccaatggcagttcagcgcaaggagagggagggcccacaggtcagaaaaagctccagagacctcacagcattgtagggcggggtggtgggccaaagttaggacactgcgtaaaacaggccatcccaccacctctacctgctcatgccaggagaatccataactgcctagaggcctggggcccctaccggtcgtgaggtgagtgggcatctgtccagcctggaagaggggcactaggtgactccctcccctgctgttgtaaatactgtaattatcggagaatttaaattattctcatttgtaactgcgtttccgggtcgcgccagagtcatttggtactaaaaaaaaaaaaaaaaaagactgggggctgtccccatttcccttctctttcccatagattcccccacctttcaaactggtttgtatttatttcaaaggaagaaaatatattgattcttagaaaataaactgtcaatttagaat

SEQ ID NO: 344011 - DNA, 285 bp, Homo sapiens
gccactggaggtttggagcaggggagtggtgaaatgggattttaagagttgtaacagaaacaccagctgctgtgatgagaacggaatttaggggaacaagagtaggagctggaagaccagggaatccaggcagggatagtgagggaggtgttgagaagggatcgcattccacatgtattctgaaggtggccccgatgggatttactgatggagtggatgtggggtgtgagggaaagagagtcaaagatgactcctggctgggcgcagtggctcacatctgtaatc

SEQ ID NO: 344012 - DNA, 435 bp, Homo sapiens
agagtaggagctggaagaccagggaatccaggcagggatagtgagggaggtgttgagaagggatcgcattccacatgtattctgaaggtggccccgatgggatttactgatggagtggatgtggggtgtgagggaaagagagtcaaagatgactcctggctgggcgcagtggctcacatctgtaatcccagcactttgggaggccagggcaggtggatcacgaggtcaggagttcaagaccagcctggccaacttggtgaaaccccatctctattaaaaataaaaaattagccaggcatggtggcatgtgcctgtagtcccagcctctcgggaggctgaggcaggagaatcacttgaacccaggaggcagaggttgcagtgagccaagattgcgccactgcaccccagcctgggcaacagagcaagactctatct

SEQ ID NO: 344013 - DNA, 202 bp, Homo sapiens
tatatagagagagagagcacggatttttaaatcccaggggattctaatgtgcagccagggtttaggtaaaggaaagacccataatgcctatgtcccgcatcagtgagttttgataagtgaatcctagacatcataaagaagcaaaatgtccaagcattatgtcaacatcaagaagactaggatggtgggagaagtctaacaa

SEQ ID NO: 344014 - DNA, 395 bp, Homo sapiens
aggccaagaaattttgaccgagattacaaactagtggcaagaccaagtttcaaactcaagttgtctgactccaaaagtccctcttctttccactgtctgtcatcaatccttttaacctgggttagtgcagaaggacctgatgataaagaacaaattctcacctgatgcaaaacctctcaacatctgctcattttttcagttcatttttcacttccttccctgtcctgaacctggccctaaattacttataattcaccaataacacattgctgtgaacttttgcaagcactgtttgccttttctggaacattattctattgtctgtctgggcaatccagacttatctttcagcgcaagcatcattttctccagaaagcctttgctgtaccatcccc

SEQ ID NO: 344015 - DNA, 97 bp, Homo sapiens
ttggcttttccccccacctcctgtgcatgaaccggagaatgatggaacaattggttgtgtttggggcctttatttgcttttttccctcctctcttta

SEQ ID NO: 344016 - DNA, 572 bp, Homo sapiens
aaattttttcaacttgataaagaataaccaccaaagacaataaatatcattccttgtgttgaaacatcagatgcatcacctttaaaatcacaaatagtataaccaccactatttaaccacttctatttaactttctggaggacctagacaaagcacaaatataagaaatacaaataaaaatttttagaattgaaaaatgaaagtcacaactattatttttcacagatgatactacttacaaagaaaattcccaaaaagcctatagacaaattatagaaacagggggtttagcagaaacactctatttctgatcaacttgtagtaatcaatgcatatctatacaatagcaactaacaaaacacattttttaatttatgcattccttcaaatttacatatttatgggataattactatttgccaggcatttttctggcactgagaatatagcagtgaatacaattaataaatattcctgctttcatgggacttacattctagtgggaagtgatacaatgagttaataagtacaacatagcatatgagagatatgtaagataggcaaaaagaaaa

SEQ ID NO: 344017 - DNA, 496 bp, Homo sapiens
ataacacatgatgaatacattagttttattccaggaatgaaagagaatgtttacattttaaaatccatggcaacatttaccacattaaaatattaatggagaaaacagtctcagaagcagaaaatacaatacttattcatgataaaataaaatcttaaaacttaaacatgataaaattaccaatcacttatggtcaaaaaaattaatatactcatggtaaaacacaaactttaaatatcaaaggaaaacaaattttttcaacttgataaagaataaccaccaaagacaataaatatcattccttgtgttgaaacatcagatgcatcacctttaaaatcacaaatagtataaccaccactatttaaccacttctatttaactttctggaggacctagacaaagcacaaatataagaaatacaaataaaaatttttagaattgaaaaatgaaagtcacaactattatttttcacagatgatactacttacaaagaaaa

SEQ ID NO: 344018 - DNA, 270 bp, Homo sapiens
aggcataagccactgcacccagcctttctttgctcattcttacatctgtgtcagttcttggtcagtttgatttattgattattgtcctcattatagtttgtgtttttgccacctctatgcatgcttgataatccctgatgattgaatgccatatgtgaattttactttgtcaggtgtttaatatgtttgtatttttataaatatgtgctctggaatccaatttacttggaaatagtttgatctttctggggtcttgcttttattatttgt

SEQ ID NO: 344019 - DNA, 120 bp, Homo sapiens
catcatcaacatcaccaccagcagcaacagctgcagccgccaccaccgccaatacctgcaaatgggcaacaggccagcagccaaaatgaaggctttgactatttggcctgaagaatttta

SEQ ID NO: 344020 - DNA, 716 bp, Homo sapiens
ggtgggtggaagagagagagaaaaaaaacagtagtagtaaaaaaggaatcattacaggtaccacagacatcaaaagatattacgaacaacatttccaataaatctgacaacttaaataaaagtcacgtattctttattaaagaaatataatcttggctcacgcctgtaatcccagcactttgggaggccaaggcgggcagatcacaagatcaggagttcgaaaccagcctggccaataaggtgaaaccccgtctctactaaaaatacaaaaattagctgggtgtggtggcgcgtgcctatattcccagatactagggaggctgaggcagaagaatcgcttgaacccaggaggtggaggctgcagtgagccaagatcgtgccgctgcactccagcctgggcgagagagcaagactcagtctcaaaaaaagaaatataatctataaattacaaaccttctcacaaaggaaacttcagtcccagatggctttactaataaaatttgtatcttaaatttatataaacttttccagagaacagggaaaacaggaaacctttcctactttgttgtatgagtctagcataaccttattactaaaacttgacatgacaattacaagaaaaattatagaccaatctctcataaacataatgcaaaaatcctaaacatactagcaaatcaaatccaacaatatgtaaaacacgtatcacgaaaaaa

SEQ ID NO: 344021 - DNA, 1930 bp, Homo sapiens
agcggaacactggggactacatttcaacatgagatttggaggggacaaacatccaaaccatatctgatggcgacacaagatgtacagagagcagatgaaccttacctccctggaccccccactgcagctccgactcgaggccagctgggtccagttccacctgggtattaaccgccatgggctctactcccggtccagccctgttgtcagcaaacttctgcaagacatgaggcactttcccaccatcagtgctgattacagtcaagatgagaaagccttgctgggggcatgtgactgcacccagattgtgaaacccagtggggtccacctcaagctggtgctgaggttctcggatttcgggaaggccatgttcaaacccatgagcagcgagatgaggagacaccagtggacttcttctacttcattgactttcagagacacaatgctgagatcgcagctttccatctggacaggattctggacttccgacgggtgccgccaacagtggggaggatagtaaatgtcaccaaggaaatcctagaggtcaccaagaatgaaatcctgcagagtgttttctttgtctctccagcgagcaacgtgtgcttcttcgccaagtgtccatacatgtgcaagacggagtatgctgtctgtggcaacccacacctgctggagggttccctctctgccttcctgccgtccctcaacctggcccccaggctgtctgtgcccaacccctggatccgctcctacacactggcaggaaaagaggagtgggaggtcaatcccctttactgtgacacagtgaaacagatctacccgtacaacaacagccagcggctcctcaatgtcatcgacatggccatcttcgacttcttgatagggaatatggaccggcaccattatgagatgttcaccaagttcggggatgatgggttccttattcaccttgacaacgccagagggttcggacgacactcccatgatgaaatctccatcctctcgcctctctcccagtgctgcatgataaaaaagaaaacacttttgcacctgcagctgctggcccaagctgactacagactcagcgatgtgatgcgagaatcactgctggaagaccagctcagccctgtcctcactgaaccccacctccttgccctggatcgaaggctccaaaccatcctaaggacagtggaggggtgcatagtggcccatggacagcagagtgtcatagtcgacggcccagtggaacagtcggccccagactctggccaggctaacttgacaagctaagggctggcagagtccagtttcagaaaatacgcctggagccagagcagtcgactcgagtgccgaccctgcgtcctcactcccacctgttactgctgggagtcaagtcagctaggaaggaagcaggacattttctcaaacagcaagtggggcccatggaactgaatctttactccttggtgcaccgcttctgtcgtgcgttgccttgctccgtttttcccaaaaagcactggcttcatcaaggccaccgacgatctcctgagtgcactgggaaatctgggtataggtcaggcttggcagccttgatcccaggagagtactaatggtaacaagtcaaataaaaggacatcaagtggatacctgacttctcaggatccttatttctagcctgggtgacagagtgagaccatcttagatagacagatcgataaatagacaaatagacagataaaaacgtacctttggggacaaattaaatggttatctagccattgcttcttgatgttgtcttagcccatctaaacatatactgccagggcctaacataagtacaaaaggttcagctattatttgtggttagagataaagtagtatgaagaaaactgacatgctacttcaatttttaaatgtcaatatttaaatcatt

SEQ ID NO: 344022 - DNA, 2016 bp, Homo sapiens
agcggaacactggggactacatttcaacatgagatttggaggggacaaacatccaaaccatatctgatggcgacacaagatgtacagagagcagatgaaccttacctccctggaccccccactgcagctccgactcgaggccagctgggtccagttccacctgggtattaaccgccatgggctctactcccggtccagccctgttgtcagcaaacttctgcaagacatgaggcactttcccaccatcagtgctgattacagtcaagatgagaaagccttgctgggggcatgtgactgcacccagattgtgaaacccagtggggtccacctcaagctggtgctgaggttctcggatttcgggaaggccatgttcaaacccatgagcagcgagatgaggagacaccagtggacttcttctacttcattgactttcagagacacaatgctgagatcgcagctttccatctggacaggattctggacttccgacgggtgccgccaacagtggggaggatagtaaatgtcaccaaggaaatcctagaggtcaccaagaatgaaatcctgcagagtgttttctttgtctctccagcgagcaacgtgtgcttcttcgccaagtgtccatacatgtgcaagacggagtatgctgtctgtggcaacccacacctgctggagggttccctctctgccttcctgccgtccctcaacctggcccccaggctgtctgtgcccaacccctggatccgctcctacacactggcaggaaaagaggagtgggaggtcaatcccctttactgtgacacagtgaaacagatctacccgtacaacaacagccagcggctcctcaatgtcatcgacatggccatcttcgacttcttgatagggaatatggaccggcaccattatgagatgttcaccaagttcggggatgatgggttccttattcaccttgacaacgccagagggttcggacgacactcccatgatgaaatctccatcctctcgcctctctcccagtgctgcatgataaaaaagaaaacacttttgcacctgcagctgctggcccaagctgactacagactcagcgatgtgatgcgagaatcactgctggaagaccagctcagccctgtcctcactgaaccccacctccttgccctggatcgaaggctccaaaccatcctaaggacagtggaggggtgcatagtggcccatggacagcagagtgtcatagtcgacggcccagtggaacagtcggccccagactctggccaggctaacttgacaagctaagggctggcagagtccagtttcagaaaatacgcctggagccagagcagtcgactcgagtgccgaccctgcgtcctcactcccacctgttactgctgggagtcaagtcagctaggaaggaagcaggacattttctcaaacagcaagtggggcccatggaactgaatctttactccttggtgcaccgcttctgtcgtgcgttgccttgctccgtttttcccaaaaagcactggcttcatcaaggccaccgacgatctcctgagtgcactgggaaatctgggtataggtcaggcttggcagccttgatcccaggagagtactaatggtaacaagtcaaataaaaggacatcaagtggatacctgacttctcaggatccttattctagctacaagtcaaagataactcctggtccagacaaaacacctggcctatcacaagctgactaaaaatctgcactttgggccagcgcaggcaacagtaactctgacaggttcaaattagacctcacactttctactcatattctagtcactggacccatctgaatcagtaatccctactgcccggtcctggagtaacttcttagagatattataacaagtggcaaaaataaaagagggatttgctaagaatatcagaaaaggagtgttccaatttgaagagtattacaattgaaataacatcaaatatgtcacactaagcagccagtaacagaataaataattacaacg

SEQ ID NO: 344023 - DNA, 1676 bp, Homo sapiens
agcggaacactggggactacatttcaacatgagatttggaggggacaaacatccaaaccatatctgatggcgacacaagatgtacagagagcagatgaaccttacctccctggaccccccactgcagctccgactcgaggccagctgggtccagttccacctgggtattaaccgccatgggctctactcccggtccagccctgttgtcagcaaacttctgcaagacatgaggcactttcccaccatcagtgctgattacagtcaagatgagaaagccttgctgggggcatgtgactgcacccagattgtgaaacccagtggggtccacctcaagctggtgctgaggttctcggatttcgggaaggccatgttcaaacccatgagcagcgagatgaggagacaccagtggacttcttctacttcattgactttcagagacacaatgctgagatcgcagctttccatctggacaggattctggacttccgacgggtgccgccaacagtggggaggatagtaaatgtcaccaaggaaatcctagaggtcaccaagaatgaaatcctgcagagtgttttctttgtctctccagcgagcaacgtgtgcttcttcgccaagtgtccatacatgtgcaagacggagtatgctgtctgtggcaacccacacctgctggagggttccctctctgccttcctgccgtccctcaacctggcccccaggctgtctgtgcccaacccctggatccgctcctacacactggcaggaaaagaggagtgggaggtcaatcccctttactgtgacacagtgaaacagatctacccgtacaacaacagccagcggctcctcaatgtcatcgacatggccatcttcgacttcttgatagggaatatggaccggcaccattatgagatgttcaccaagttcggggatgatgggttccttattcaccttgacaacgccagagggttcggacgacactcccatgatgaaatctccatcctctcgcctctctcccagtgctgcatgataaaaaagaaaacacttttgcacctgcagctgctggcccaagctgactacagactcagcgatgtgatgcgagaatcactgctggaagaccagctcagccctgtcctcactgaaccccacctccttgccctggatcgaaggctccaaaccatcctaaggacagtggaggggtgcatagtggcccatggacagcagagtgtcatagtcgacggcccagtggaacagtcggccccagactctggccaggctaacttgacaagctaagggctggcagagtccagtttcagaaaatacgcctggagccagagcagtcgactcgagtgccgaccctgcgtcctcactcccacctgttactgctgggagtcaagtcagctaggaaggaagcaggacattttctcaaacagcaagtggggcccatggaactgaatctttactccttggtgcaccgcttctgtcgtgcgttgccttgctccgtttttcccaaaaagcactggcttcatcaaggccaccgacgatctcctgagtgcactgggaaatctgggtataggtcaggcttggcagccttgatcccaggagagtactaatggtaacaagtcaaatcgcagcggccgatccaaattgtaggaacaaagggggccgacaaagtatatagg

SEQ ID NO: 344024 - DNA, 313 bp, Homo sapiens
atcctgttaactagtctcctcactgtaacaagccatactcttctaagttttaataataatagtaataacagcccatactgcttatggtcaggcaatgttctaagtgctttagtacaaaaacatttgttctcacaataattctggaggagtaataattgtaatatctatttttcaggttactgaggctaagagagcttaggtaacttgcctagagtcacacagctaggaggttaccccagagcctcccatttgagatggggaggggcctccagatttgctttcatttgaggttttcttttttcttattctgatt

SEQ ID NO: 344025 - DNA, 723 bp, Homo sapiens
  misc_feature (680)..(680): n is a, c, g, or t
  misc_feature (687)..(688): n is a, c, g, or t
  misc_feature (696)..(696): n is a, c, g, or t
  misc_feature (701)..(701): n is a, c, g, or t
tcagttgaattcactggcgatggaatatgacctcttacctgactggctgctgctcctcggttctctttggtggctctcctcctcatctccacctctagatatcggggtaccccagagattagctccaggcctcctctgctctatacacattctctctctgggtgattctagctacacctctggcaaaatttagctaatctccagtcctgacctctcccctgctccagattcaaatatccaagtagctgcttgacagattcatttggagaccaggtaggcacctcaaaacttaacgtgtccaaaacatgaatttattttctctcctccctcacccccatcctgaccctttccctgtcttccctcatgtctacaaatggccaccccatgcaaccagttgctctggcaaaacttagtcatcaacctcaatttatctcttctttttatcacaccatgcccaactcacctacaaatcctgcaatatccctacacagccccttctcgccagctccactgccaccaccctaatcccagctgccatcacctctcaaggggattactgtaatagtcagctacctggtctctttgttcctactcttgcccctctacattctatttttcacacagccaccacagtgatcttttaaaaatgtgaatcatggtcaatccatcgcaaggtacgngctcatnntatctgcnaggtncccaaataaaaaaagaaatgtt

SEQ ID NO: 344026 - DNA, 410 bp, Homo sapiens
tactcataattatcttcccattctggcatttgattatatcattgtcatcatcaaaaaatgatcaatttaaaacatttttcaaaaattttaaagattgatacataagagatgtacatattttcagtgtacatgtgataatttaatacattcacataatttgtaaagatcaattcaatgtaattgggatatctattaccttaaatatttgtcttttctttatgtcagaaacatttgaattattctcttttagataatttgagatataaaatagattactgtaaactataatcaattgtaaactatgatcaatttttaaaagaaaaattatttattttggaaactccaagctcaactattaattttcccccaaatctagcaattattaactataatccttcattagtcttcgt

SEQ ID NO: 344027 - DNA, 905 bp, Homo sapiens
agcatgctgccttcaagcatctgtttaacaaagcacatcctgcaccgcccttaatccatttaaccctgagttgacccagcacatgtctcagggagcacggggtaaggttacagattaacagcatctcaaggcagaagaatttttcttagtacagaataaaatggagtctcctgtgtctacttctttctacacagacacagtaacaatctgatctttcttttccccacacattactgataagaacgttgttgataggtaagattaccagtgtaggctgggagtggtggctcacccctgtaatcccaacgctttgagaggccagcgtgggcggatcacttgagcccaggagtttgagatcagcctgggcaatatagtgagacctcgtctatgtaacaacagcagcaacaaaatcttagcactttggggggctgaggcaggaagatcacttgagcccagaaattcaagaccagcctgggcaacgtagtgagaccccatctctataaataaataaaaataaaagcaaataatttaaaagaataaacattgtgaacatcaattcccatcacagcaagccctggatgaaaacatggacctcttggaaggtataactggctttgaagactctgtccgaaagtttatctgccatgttgtgggtatcacttaccagcacattgaccgctggctgctggccgagatgctcggggatctgtcggacagccagctaaaggtgtggatgagcaaatacggctggagtgccgacgagtcggggcagatcttcatctgtagccaagaagagagcattaaacccaagaacattgtggagaagattgactttgacagtgtgtccagcatcatggcctcctcccagtaacttcaggtgtttaataaagatgtgttgactcagc

SEQ ID NO: 344028 - DNA, 896 bp, Homo sapiens
  misc_feature (1)..(1): n is a, c, g, or t
  misc_feature (24)..(24): n is a, c, g, or t
naacttacggctaggtacgaggcngggtggtccggaaagcgtggcggctgctgctagagcctttccctttaccgcacccaaggagctggagcgacaacaacgacgtcgtttccgtttccaccacctcttcctgttcccgtccttgaggacgccgtgccgggtcagtgttagcctccagccctggttgtggaaggcgacagaagtcatggcgatgtttgagcagatgagagccaacgtgggcaagttgctcaagggtatcgacaggtacaatcctgagaacctggccaccctggagcgctatgtagagacgcaggccaaggaaaatgcctatgatctggaagccaacctggctgtcctgaagctgtaccagttcaacccagccttctttcagaccacggtcaccgcccagatcctgctgaaggccctcaccaacttgccgcacacagacttcaccctgtgcaagtgcatgatcgaccaggcacatcaagaagaacggccaatccgacagattttgtacctcggggacctgctggagacctgccatttccaggccttctggcaagccctggatgaaaacatggacctcttggaaggtataactggctttgaagactctgtccgaaagtttatctgccatgttgtgggtatcacttaccagcacattgaccgctggctgctggccgagatgctcggggatctgtcggacagccagctaaaggtgtggatgagcaaatacggctggagtgccgacgagtcggggcagatcttcatctgtagccaagaagagagcattaaacccaagaacattgtggagaagattgactttgacagtgtgtccagcatcatggcctcctcccagtaacttcaggtgtttaataaagatgtgttgactcagc

SEQ ID NO: 344029 - DNA, 214 bp, Homo sapiens
gtggtgtacatgacttgagcccctctagacgtgaggcttcctacatgtatacggctgcgagaagacgacgagtcggggcagatcttcatctgtagccaagaagagagcattaaacccaagaacattgtggagaagattgactttgacagtgtgtccagcatcatggcctcctcccagtaacttcaggtgtttaataaagatgtgttgactcagc

SEQ ID NO: 344030 - DNA, 800 bp, Homo sapiens
  misc_feature (98)..(98): n is a, c, g, or t
  misc_feature (103)..(103): n is a, c, g, or t
  misc_feature (106)..(106): n is a, c, g, or t
aatcctgagaacctggccaccctggagcgctatgtagagacgcaggccaaggaaaatgcctatgatctggattgtacctgtcgatacccttgagcaanttgcncangggtatcgacaggtacaatcctgagaacctggccaccctggagcgctatgtagagacgcaggccaaggaaaatgcctatgatctggaagccaacctggctgtcctgaagctgtaccagttcaacccagccttctttcagaccacggtcaccgcccagatcctgctgaaggccctcaccaacttgccgcacacagacttcaccctgtgcaagtgcatgatcgaccaggcacatcaagaagaacggccaatccgacagattttgtacctcggggacctgctggagacctgccatttccaggccttctggcaagccctggatgaaaacatggacctcttggaaggtataactggctttgaagactctgtccgaaagtttatctgccatgttgtgggtatcacttaccagcacattgaccgctggctgctggccgagatgctcggggatctgtcggacagccagctaaaggtgtggatgagcaaatacggctggagtgccgacgagtcggggcagatcttcatctgtagccaagaagagagcattaaacccaagaacattgtggagaagattgactttgacagtgagtggtgacccacggcctcgggctttggggctaagggggtgcccctcaagggaggccgaggcaggggcccagaggacctgggtagatctgctcgtgttctgggctgggaagtc

SEQ ID NO: 344031 - DNA, 400 bp, Homo sapiens
ttccttggcactttgttctaagcacctcgtttggtcctacaatcctataaggtaggtgcttcttaaagataggaaggtaggtgatgctcagagatgttcagtaacttgtccaagtgacccagctgttaattggcagagctgggatttgaacctagccctccttgctccagagtccatctttttaaaatactgcaccaaactgcctttgtgatggtaactggggcctggaaggagtttatgatctccccctaaagaattgtgggtgctgtagcaggtggctggaggtttgtctcccgcccttctcaccttcagtctggtctctccttccccacaggtgtgtccagcatcatggcctcctcccagtaacttcaggtgtttaataaagatgtgttgactcagc

SEQ ID NO: 344032 - DNA, 750 bp, Homo sapiens
  misc_feature (98)..(98): n is a, c, g, or t
  misc_feature (103)..(103): n is a, c, g, or t
  misc_feature (106)..(106): n is a, c, g, or t
aatcctgagaacctggccaccctggagcgctatgtagagacgcaggccaaggaaaatgcctatgatctggattgtacctgtcgatacccttgagcaanttgcncangggtatcgacaggtacaatcctgagaacctggccaccctggagcgctatgtagagacgcaggccaaggaaaatgcctatgatctggaagccaacctggctgtcctgaagctgtaccagttcaacccagccttctttcagaccacggtcaccgcccagatcctgctgaaggccctcaccaacttgccgcacacagacttcaccctgtgcaagtgcatgatcgaccaggcacatcaagaagaacggccaatccgacagattttgtacctcggggacctgctggagacctgccatttccaggccttctggcaagccctggatgaaaacatggacctcttggaaggtataactggctttgaagactctgtccgaaagtttatctgccatgttgtgggtatcacttaccagcacattgaccgctggctgctggccgagatgctcggggatctgtcggacagccagctaaaggtgtggatgagcaaatacggctggagtgccgacgagtcggggcagatcttcatctgtagccaagaagagagcattaaacccaagaacattgtggagaagattgactttgacagtgtgtccagcatcatggcctcctcccagtaacttcaggtgtttaataaagatgtgttgactcagc

SEQ ID NO: 344033 - DNA, 797 bp, Homo sapiens
  misc_feature (1)..(1): n is a, c, g, or t
  misc_feature (24)..(24): n is a, c, g, or t
naacttacggctaggtacgaggcngggtggtccggaaagcgtggcggctgctgctagagcctttccctttaccgcacccaaggagctggagcgacaacaacgacgtcgtttccgtttccaccacctcttcctgttcccgtccttgaggacgccgtgccgggtcagtgttagcctccagccctggttgtggaaggcgacagaagtcatggcgatgtttgagcagatgagagccaacgtgggcaagttgctcaagggtatcgacaggtaccagttcaacccagccttctttcagaccacggtcaccgcccagatcctgctgaaggccctcaccaacttgccgcacacagacttcaccctgtgcaagtgcatgatcgaccaggcacatcaagaagaacggccaatccgacagattttgtacctcggggacctgctggagacctgccatttccaggccttctggcaagccctggatgaaaacatggacctcttggaaggtataactggctttgaagactctgtccgaaagtttatctgccatgttgtgggtatcacttaccagcacattgaccgctggctgctggccgagatgctcggggatctgtcggacagccagctaaaggtgtggatgagcaaatacggctggagtgccgacgagtcggggcagatcttcatctgtagccaagaagagagcattaaacccaagaacattgtggagaagattgactttgacagtgtgtccagcatcatggcctcctcccagtaacttcaggtgtttaataaagatgtgttgactcagc

SEQ ID NO: 344034 - DNA, 1110 bp, Homo sapiens
gcgaggaagaagtcacgtggcagccggaaagcgtggcggctgctgctagagcctttccctttaccgcacccaaggagctggagcgacaacaacgacgtcgtttccgtttccaccacctcttcctgttcccgtccttgaggacgccgtgccgggtcagtgttagcctccagccctggttgtggaaggcgacagaagtcatggcgatgtttgagcagatgagagccaacgtgggcaagttgctcaagggtatcgacaggtacaatcctgagaacctggccaccctggagcgctatgtagagacgcaggccaaggaaaatgcctatgatctggaagccaacctggctgtcctgaagctgtaccagttcaacccagccttctttcagaccacggtcaccgcccagatcctgctgaaggccctcaccaacttgccgcacacagacttcaccctgtgcaagtgcatgatcgaccaggcacatcaagaagaacggccaatccgacagattttgtacctcggggacctgctggagacctgccatttccaggccttctggcaagccctggatgaaaacatggacctcttggaaggtataactggctttgaagactctgtccgaaagtttatctgccatgttgtgggtatcacttaccagcacattgaccgctggctgctggccgagatgctcggggatctgtcggacagccagctaaaggtgtggatgagcaaatacggctggagtgccgacgagtcggggcagatcttcatctgtagccaagaagagagcattaaacccaagaacattgtggagaagattgactttgacagtgtgtccagcatcatggcctcctcccagtaacttcaggtgtttaataaagatgtgttgactcagcaaaaaaaaaaaaaaaaaaaaaaaaaaaaaaaaaaaaaaggggggggaaaagggggggggggggaaaaaggggaaagagagaagggcgcagggggcaaaaggggggcccgggccccaagattcgggggaaacagggggggaacacggggggggccccataagggggagggacaaaaattggcgaaaaaccggggtacccgcgaaaggggtgcgacaaacgcgc

SEQ ID NO: 344035 - DNA, 1183 bp, Homo sapiens
gcgaggaagaagtcacgtggcagccggaaagcgtggcggctgctgctagagcctttccctttaccgcacccaaggagctggagcgacaacaacgacgtcgtttccgtttccaccacctcttcctgttcccgtccttgaggacgccgtgccgggtcagtgttagcctccagccctggttgtggaaggcgacagaagtcatggcgatgtttgagcagatgagagccaacgtgggcaagttgctcaagggtatcgacaggtacaatcctgagaacctggccaccctggagcgctatgtagagacgcaggccaaggaaaatgcctatgatctggaagccaacctggctgtcctgaagctgtaccagttcaacccagccttctttcagaccacggtcaccgcccagatcctgctgaaggccctcaccaacttgccgcacacagacttcaccctgtgcaagtgcatgatcgaccaggcacatcaagaagaacggccaatccgacagattttgtacctcggggacctgctggagacctgccatttccaggccttctggcaagccctggatgaaaacatggacctcttggaaggtataactggctttgaagactctgtccgaaagtttatctgccatgttgtgggtatcacttaccagcacattgaccgctggctgctggccgagatgctcggggatctgtcggacagccagctaaaggtgtggatgagcaaatacggctggagtgccgacgagtcggggcagatcttcatctgtagccaagaagagagcattaaacccaagaacattgtggagaagattgactttgacagtgtgtccagcatcatggcctcctcccagtaacttcaggtgtttaataaagatgtgttgactcagcaaaaaaaaaaaaaaaaaaaaaaaaaaaaaaaaaaaaaaaaaaaaaatcgggggctttattcgggggggggaaaaaaggtgtataatagaaagagggcgacaaggaggctacgaaaagtagttatcacgaggaccccaatttttttgtgaacaaggggtgaaactacgggggggcccccaaaataggggaggagccggaataattttgggaaaaacgcggggtcaccgttgtttatgttgtttctgtgtaacgggagtaggagaaaaaactagaagaaaaagagaaagataaagag

SEQ ID NO: 344036 - DNA, 810 bp, Homo sapiens
gcgaggaagaagtcacgtggcagccggaaagcgtggcggctgctgctagagcctttccctttaccgcacccaaggagctggagcgacaacaacgacgtcgtttccgtttccaccacctcttcctgttcccgtccttgaggacgccgtgccgggtcagtgttagcctccagccctggttgtggaaggcgacagaagtcatggcgatgtttgagcagatgagagccaacgtgggcaagttgctcaagggtatcgacaggtacaatcctgagaacctggccaccctggagcgctatgtagagacgcaggccaaggaaaatgcctatgatctggaagccaacctggctgtcctgaagctgtaccagttcaacccagccttctttcagaccacggtcaccgcccagatcctgctgaaggccctcaccaacttgccgcacacagacttcaccctgtgcaagtgcatgatcgaccaggcacatcaagaagaacggccaatccgacagattttgtacctcggggacctgctggagacctgccatttccaggccttctggcaagccctggatgaaaacatggacctcttggaaggtataactggctttgaagactctgtccgaaagtacagccagctaaaggtgtggatgagcaaatacggctggagtgccgacgagtcggggcagatcttcatctgtagccaagaagagagcattaaacccaagaacattgtggagaagattgactttgacagtgtgtccagcatcatggcctcctcccagtaacttcaggtgtttaataaagatgtgttgactcagc

SEQ ID NO: 344037 - DNA, 840 bp, Homo sapiens
gcgaggaagaagtcacgtggcagccggaaagcgtggcggctgctgctagagcctttccctttaccgcacccaaggagctggagcgacaacaacgacgtcgtttccgtttccaccacctcttcctgttcccgtccttgaggacgccgtgccgggtcagtgttagcctccagccctggttgtggaaggcgacagaagtcatggcgatgtttgagcagatgagagccaacgtgggcaagttgctcaagggtatcgacaggtacaatcctgagaacctggccaccctggagcgctatgtagagacgcaggccaaggaaaatgcctatgatctggaagccaacctggctgtcctgaagctgtaccagttcaacccagccttctttcagaccacggtcaccgcccagatcctgctgaaggccctcaccaacttgccgcacacagacttcaccctgtgcaagtgcatgatcgaccaggcacatcaagaagaacggccaatccgacagattttgtacctcggggacctgctggagacctgccatttccaggccttctggcaagccctggatgaaaacatggacctcttggaaggtataactggctttgaagactctgtccgaaagtttatctgccatgttgtgggtatcacttaccacagccagctaaaggtgtggatgagcaaatacggctggagtgccgacgagtcggggcagatcttcatctgtagccaagaagagagcattaaacccaagaacattgtggagaagattgactttgacagtgtgtccagcatcatggcctcctcccagtaacttcaggtgtttaataaagatgtgttgactcagc

SEQ ID NO: 344038 - DNA, 726 bp, Homo sapiens
acaatcgagctcgcggtaccggcatgtgctgtaggccagcgtgggcggatcacttgagcccaggagtttgagatcagcctgggcaatatagtgagacctcgtctatgtaacaacagcagcaacaaaatcttagcactttggggggctgaggcaggaagatcacttgagcccagaaattcaagaccagcctgggcaacgtagtgagaccccatctctataaataaataaaaataaaagcaaataatttaaaagaataaacattgtgaacatcaattcccatcacagcaagccctggatgaaaacatggacctcttggaaggtataactggctttgaagactctgtccgaaagtgtaagtccctctctgaggctgggctccccaaggggaaggggtagggagtggcagccaggtccggggggacagctgctcaccggttttgtctctgacctccacagttatctgccatgttgtgggtatcacttaccagcacattgaccgctggctgctggccgagatgctcggggatctgtcggacagccagctaaaggtgtggatgagcaaatacggctggagtgccgacgagtcggggcagatcttcatctgtagccaagaagagagcattaaacccaagaacattgtggagaagattgactttgacagtgtgtccagcatcatggcctcctcccagtaacttcaggtgtttaataaagatgtgttgactcagc

SEQ ID NO: 344039 - DNA, 1363 bp, Homo sapiens
gcgaggaagaagtcacgtggcagccggaaagcgtggcggctgctgctagagcctttccctttaccgcacccaaggagctggagcgacaacaacgacgtcgtttccgtttccaccacctcttcctgttcccgtccttgaggacgccgtgccgggtcagtgttagcctccagccctggttgtggaaggcgacagaagtcatggcgatgtttgagcagatgagagccaacgtgggcaagttgctcaagggtatcgacaggtacaatcctgagaacctggccaccctggagcgctatgtagagacgcaggccaaggaaaatgcctatgatctggaagccaacctggctgtcctgaagctgtaccagttcaacccagccttctttcagaccacggtcaccgcccagatcctgctgaaggccctcaccaacttgccgcacacagacttcaccctgtgcaagtgcatgatcgaccaggcacatcaagaagaacggccaatccgacagattttgtacctcggggacctgctggagacctgccatttccaggccttctggcaagccctggatgaaaacatggacctcttggaaggtataactggctttgaagactctgtccgaaagtttatctgccatgttgtgggtatcacttaccagcacattgaccgctggctgctggccgagatgctcggggatctgtcggggtaacgccctctgggtcctggtgcacatctgggaggttgggggtggctagggcagtggacctcagtcagctcctccaacaggcctgtctgggtctcatcaggtcagcatggaaggcccagcccaaggaggaaataagaacttggtataagacagtctctgccttgagggagatcctatgccatttgctcatttattttgcattaattgagtgcctaccgtgtgtcagtgtgctaaactgggcgtgcagcagtaaacaaagtgggatggctccaattcattctcatggaggtagcaaagcacatggcgacatggaggtgtccagtggtgattcctgtcatgaaggaaagcaagacagctcacagaccagcggcatctgagcccttacctccgtagagagaggcccgtggcctgaggtagtgcagaggaggatagtagagcagggccctgacttgtaacgttcatgggtagccagggtgtatgtggccagagcagagtaagcatgggcgaaagtagagagctgggggttggaggggcatttccaggtcatgtggggcctcgggaggaccttgtcctttcccctgactgagaaggagccaccggagggctctgagcagggtagggctctgatcagatggatattttttaaagatccccccaagaacaaa

SEQ ID NO: 344040 - DNA, 1130 bp, Homo sapiens
gcgaggaagaagtcacgtggcagccggaaagcgtggcggctgctgctagagcctttccctttaccgcacccaaggagctggagcgacaacaacgacgtcgtttccgtttccaccacctcttcctgttcccgtccttgaggacgccgtgccgggtcagtgttagcctccagccctggttgtggaaggcgacagaagtcatggcgatgtttgagcagatgagagccaacgtgggcaagttgctcaagggtatcgacaggtacaatcctgagaacctggccaccctggagcgctatgtagagacgcaggccaaggaaaatgcctatgatctggaagccaacctggctgtcctgaagctgtaccagttcaacccagccttctttcagaccacggtcaccgcccagatcctgctgaaggccctcaccaacttgccgcacacagacttcaccctgtgcaagtgcatgatcgaccaggcacatcaagaagaacggccaatccgacagattttgtacctcggggacctgctggagacctgccatttccaggccttctggcaagccctggatgaaaacatggacctcttggaaggtataactggctttgaagactctgtccgaaagtacagccagctaaaggtgtggatgagcaaatacggctggagtgccgacgagtcggggcagatcttcatctgtagccaagaagagagcattaaacccaagaacattgtggagaagattgactttgacagtgtgtccagcatcatggcctcctcccagtaacttcaggtgtttaataaagatgtgttgactcagcaaaaaaaaaaaaaaaaaaaaaaaaaaaaaaacccgggggctcattccgtgggcggcagacagatgtcagggtaagggcccagggtcaataattggtccgcaacccttttctggacaagggggaacgcgcgggcctcaaagagtagtaaaccgaatcgctgggcgtcgactctctcagccacaacagtgacacgacacatcaatacatatgcttacacactatagacgacatcatcgactcactactatctcactaggcgaccatgtcgcctacttctacacacacatgcgcataacccactcaaaacgcgaacaatacaa

SEQ ID NO: 344041 - DNA, 995 bp, Homo sapiens
gcgaggaagaagtcacgtggcagccggaaagcgtggcggctgctgctagagcctttccctttaccgcacccaaggagctggagcgacaacaacgacgtcgtttccgtttccaccacctcttcctgttcccgtccttgaggacgccgtgccgggtcagtgttagcctccagccctggttgtggaaggcgacagaagtcatggcgatgtttgagcagatgagagccaacgtgggcaagttgctcaagggtatcgacaggtacaatcctgagaacctggccaccctggagcgctatgtagagacgcaggccaaggaaaatgcctatgatctggaagccaacctggctgtcctgaagctgtaccagttcaacccagccttctttcagaccacggtcaccgcccagatcctgctgaaggccctcaccaacttgccgcacacagacttcaccctgtgcaagtgcatgatcgaccaggcacatcaagaagaacggccaatccgacagattttgtacctcggggacctgctggagacctgccatttccaggccttctggagcctccctctgtcgcccagtctggaatgcaatggtgtgatctcggctcaccacaacctccatctcctgggttcaagcgattctcctgcttcagcctcctcagtagttgggattacaggaatgtgccaccacgccctgctaattttgtaattttagtagagtcagggtttctccatgttggtcaggctggtctcgaactcccgacctcaggtgatccgcccgcctcagcctcccaaagtgctgggattacaggcatgagccactgtgcctggctgatttctttatttttagtagagacagggtttcaccctgttggccagggtagtctcgaactcctgacctcaagtgatccacccacctcagcctcccaaagtgctgggattataggtgtgagccaccacacatggcctggtagctgctattcttgttaacattactgaaggg

SEQ ID NO: 344042 - DNA, 783 bp, Homo sapiens
  misc_feature (1)..(1): n is a, c, g, or t
  misc_feature (24)..(24): n is a, c, g, or t
  misc_feature (759)..(759): n is a, c, g, or t
naacttacggctaggtacgaggcngggtggtccggaaagcgtggcggctgctgctagagcctttccctttaccgcacccaaggagctggagcgacaacaacgacgtcgtttccgtttccaccacctcttcctgttcccgtccttgaggacgccgtgccgggtcagtggtacaatcctgagaacctggccaccctggagcgctatgtagagacgcaggccaaggaaaatgcctatgatctggaagccaacctggctgtcctgaagctgtaccagttcaacccagccttctttcagaccacggtcaccgcccagatcctgctgaaggccctcaccaacttgccgcacacagacttcaccctgtgcaagtgcatgatcgaccaggcacatcaagaagaacggccaatccgacagattttgtacctcggggacctgctggagacctgccatttccaggccttctggcaagccctggatgaaaacatggacctcttggaaggtataactggctttgaagactctgtccgaaagtttatctgccatgttgtgggtatcacttaccagcacattgaccgctggctgctggccgagatgctcggggatctgtcggacagccagctaaaggtgtggatgagcaaatacggctggagtgccgacgagtcggggcagatcttcatctgtagccaagaagagagcattaaacccaagaacattgtggagaagattgactttgacagtgtgtccagatatggtctccagtanttcggttgataaggttgttgctcg

SEQ ID NO: 344043 - DNA, 1062 bp, Homo sapiens
  misc_feature (994)..(994): n is a, c, g, or t
  misc_feature (1029)..(1029): n is a, c, g, or t
  misc_feature (1031)..(1032): n is a, c, g, or t
  misc_feature (1042)..(1042): n is a, c, g, or t
agcatgctgccttcaagcatctgtttaacaaagcacatcctgcaccgcccttaatccatttaaccctgagttgacccagcacatgtctcagggagcacggggtaaggttacagattaacagcatctcaaggcagaagaatttttcttagtacagaataaaatggagtctcctgtgtctacttctttctacacagacacagtaacaatctgatctttcttttccccacacattactgataagaacgttgttgataggtaagattaccagtgtaggctgggagtggtggctcacccctgtaatcccaacgctttgagaggccagcgtgggcggatcacttgagcccaggagtttgagatcagcctgggcaatatagtgagacctcgtctatgtaacaacagcagcaacaaaatcttagcactttggggggctgaggcaggaagatcacttgagcccagaaattcaagaccagcctgggcaacgtagtgagaccccatctctataaataaataaaaataaaagcaaataatttaaaagaataaacattgtgaacatcaattcccatcacagcaagccctggatgaaaacatggacctcttggaaggtataactggctttgaagactctgtccgaaagtttatctgccatgttgtgggtatcacttaccagcacattgaccgctggctgctggccgagatgctcggggatctgtcggacagccagctaaaggtgtggatgagcaaatacggctggagtgccgacgagtcggggcagatcttcatctgtagccaagaagagagcattaaacccaagaacattgtggagaagattgactttgacagtgtgtccagcatcatggcctcctcccagtaacttcaggtgtttaataaagatgtgttgactcagcaaaaaaaaaaaaaaaaaaaaaaaaaaaaaaaaaaaaaaaaaaaaaatcgggggctttattcgggggggggaaaggggtttgaatgggcntggtctatggttccggccccgttttgtcaaggggnanntgcggcccanagggggtatcaaccgtacta

SEQ ID NO: 344044 - DNA, 1793 bp, Homo sapiens
ggttcactctctgtccgttgctagggtgagcttgaacaaatgctgatataccagatccagacaaaggtcttcctacatctgtctgtgagttgggactctcagaatgataggccacactttctcctagtggcgggccatgcctctgaggaactaaggattctttagaacctttccagctctgtttgcggttaactgattgctgcacattccctggtttcatgctggcattaataggtctggcagctgctgcagccatctgctctcgtcgaggatcttggtaactcattttactaatgaattcaattgctgcttctatacttctgttgttagttttctgaagagcttgtataaccatatcctcatcaaatccagcagcttgcaagtcttgaagcatttgtggattaacttctgaagtactccgagaagaatttgtttcatttgcaaatggaagcagagagtttcgaatttcctgcaaggctttatgatgcgtcccaaatttgggtggatttctgacttgtcgaggatcttcggttgacattttactcatgttatgctcagccttagcagcatcagatggtttagataaattcctaagggattcccgaatttcttgtaacatttgccggctactgacagtatagttactggcaggaaaggtcttaggcctcatttgtctatatccttctggcttttcactcctcttcatgaaaacatctatatatgtagcccacacgaaggacttctttatttgatagatccagagctttcttctgagcaaaagtgaaaatgatgcttcaaggaagtccccaggactgttaaaattctttacaatataaataattaactctggaggggagagcagagctcctggacagcggccacgggcctgagggcggacgctgaggcggccagagtccgtcccagcaaccccaagtatccctggtggggcagagcggggagacgaacgggggggctgccgcgggccagcgcggcccgtcccaggggtcgtaaggacctggctctccccttaacaccaggccaccgccgccgccgccgccattttgttagcctccagccctggttgtggaaggcgacagaagtcatggcgatgtttgagcagatgagagccaacgtgggcaagttgctcaagggtatcgacaggtacaatcctgagaacctggccaccctggagcgctatgtagagacgcaggccaaggaaaatgcctatgatctggaagccaacctggctgtcctgaagctgtaccagttcaacccagccttctttcagaccacggtcaccgcccagatcctgctgaaggccctcaccaacttgccgcacacagacttcaccctgtgcaagtgcatgatcgaccaggcacatcaagaagaacggccaatccgacagattttgtacctcggggacctgctggagacctgccatttccaggccttctggcaagccctggatgaaaacatggacctcttggaaggtataactggctttgaagactctgtccgaaagtttatctgccatgttgtgggtatcacttaccagcacattgaccgctggctgctggccgagatgctcggggatctgtcggacagccagctaaaggtgtggatgagcaaatacggctggagtgccgacgagtcggggcagatcttcatctgtagccaagaagagagcattaaacccaagaacattgtggagaagattgactttgacagtgtgtccagcatcatggcctcctcccagtaacttcaggtgtttaataaagatgtgttgactcagc

SEQ ID NO: 344045 - DNA, 377 bp, Homo sapiens
ttccaagacgtccatgttttcatccagggcttccagaaggcctggaaatggcaggtctccagcaggtccccgaggtacaactggctttgaagactctgtccgaaagtttatctgccatgttgtgggtatcacttaccagcacattgaccgctggctgctggccgagatgctcggggatctgtcggacagccagctaaaggtgtggatgagcaaatacggctggagtgccgacgagtcggggcagatcttcatctgtagccaagaagagagcattaaacccaagaacattgtggagaagattgactttgacagtgtgtccagcatcatggcctcctcccagtaacttcaggtgtttaataaagatgtgttgactcagc

SEQ ID NO: 344046 - DNA, 888 bp, Homo sapiens
gcgaggaagaagtcacgtggcagccggaaagcgtggcggctgctgctagagcctttccctttaccgcacccaaggagctggagcgacaacaacgacgtcgtttccgtttccaccacctcttcctgttcccgtccttgaggacgccgtgccgggtcagtgttagcctccagccctggttgtggaaggcgacagaagtcatggcgatgtttgagcagatgagagccaacgtgggcaagttgctcaagggtatcgacaggtacaatcctgagaacctggccaccctggagcgctatgtagagacgcaggccaaggaaaatgcctatgatctggaagccaacctggctgtcctgaagctgtaccagttcaacccagccttctttcagaccacggtcaccgcccagatcctgctgaaggccctcaccaacttgccgcacacagacttcaccctgtgcaagtgcatgatcgaccaggcacatcaagaagaacggccaatccgacagattttgtacctcggggacctgctggagacctgccatttccaggccttctggcaagccctggatgaaaacatggacctcttggaaggtataactggctttgaagactctgtccgaaagtttatctgccatgttgtgggtatcacttaccagcacattgaccgctggctgctggccgagatgctcggggatctgtcggacagccagctaaaggtgtggatgagcaaatacggctggagtgccgacgagtcggggcagatcttcatctgtagccaagaagagagcattaaacccaagaacattgtggagaagattgactttgacagtgtgtccagcatcatggcctcctcccagtaacttcaggtgtttaataaagatgtgttgactcagc

SEQ ID NO: 344047 - DNA, 799 bp, Homo sapiens
  misc_feature (1)..(1): n is a, c, g, or t
  misc_feature (24)..(24): n is a, c, g, or t
naacttacggctaggtacgaggcngggtggtccggaaagcgtggcggctgctgctagagcctttccctttaccgcacccaaggagctggagcgacaacaacgacgtcgtttccgtttccaccacctcttcctgttcccgtccttgaggacgccgtgccgggtcagtggtacaatcctgagaacctggccaccctggagcgctatgtagagacgcaggccaaggaaaatgcctatgatctggaagccaacctggctgtcctgaagctgtaccagttcaacccagccttctttcagaccacggtcaccgcccagatcctgctgaaggccctcaccaacttgccgcacacagacttcaccctgtgcaagtgcatgatcgaccaggcacatcaagaagaacggccaatccgacagattttgtacctcggggacctgctggagacctgccatttccaggccttctggcaagccctggatgaaaacatggacctcttggaaggtataactggctttgaagactctgtccgaaagtttatctgccatgttgtgggtatcacttaccagcacattgaccgctggctgctggccgagatgctcggggatctgtcggacagccagctaaaggtgtggatgagcaaatacggctggagtgccgacgagtcggggcagatcttcatctgtagccaagaagagagcattaaacccaagaacattgtggagaagattgactttgacagtgtgtccagcatcatggcctcctcccagtaacttcaggtgtttaataaagatgtgttgactcagc

SEQ ID NO: 344048 - DNA, 1458 bp, Homo sapiens
gcgaggaagaagtcacgtggcagccggaaagcgtggcggctgctgctagagcctttccctttaccgcacccaaggagctggagcgacaacaacgacgtcgtttccgtttccaccacctcttcctgttcccgtccttgaggacgccgtgccgggtcagtgttagcctccagccctggttgtggaaggcgacagaagtcatggcgatgtttgagcagatgagagccaacgtgggcaagttgctcaagggtatcgacaggtacaatcctgagaacctggccaccctggagcgctatgtagagacgcaggccaaggaaaatgcctatgatctggaagccaacctggctgtcctgaagctgtaccagttcaacccagccttctttcagaccacggtcaccgcccagatcctgctgaaggccctcaccaacttgccgcacacagacttcaccctgtgcaagtgcatgatcgaccaggcacatcaagaagaacggccaatccgacagattttgtacctcggggacctgctggagacctgccatttccaggccttctggcaagccctggatgaaaacatggacctcttggaaggtataactggctttgaagactctgtccgaaagtttatctgccatgttgtgggtatcacttaccagcacattgaccgctggctgctggccgagatgctcggggatctgtcggacagccagctaaaggtgtggatgagcaaatacggctggagtgccgacgagtcggggcagatcttcatctgtagccaagaagagagcattaaacccaagaacattgtggagaagattgactttgacagtgtgtccagcatcatggcctcctcccagtaacttcaggtgtttaataaagatgtgttgactcagcaaaaaaaaaaaaaaaaaaaaaaaaaaaaaaaaaaaaaagggggggggggatctataaaaggttatctccctctgggggggccaaagttatacggggttccccaggtttctggtggtgaaaaggggggctccctatatatgggagagctggaattatatataaggcatgggcccggggcgcggggttttaaaaaggttggggaagggggaaaaagtgggaaacgtgtggggaatcttgtggggaagaggaacacctttaatttgtgggggggtgggaacaaatattgcggacacaaaaccatccccatacaagagagaatttaaaggcgcctctagaggggaaccacttaatacaaagtttacagagcgggtgtcgtatataccggtgcttgtgtccacaaccctacagcgcgcgccacaaatatgtgacatgcggaacgagcatatagagagacaacattgttgcgggcaaaaaacgcgaaggcgctatatgatgaaattctttcgtgcaaacacattttctttattataccacggggggaggcccgatgagcgatacaccaaacaaggg

SEQ ID NO: 344049 - DNA, 1022 bp, Homo sapiens
  misc_feature (1)..(1): n is a, c, g, or t
  misc_feature (24)..(24): n is a, c, g, or t
  misc_feature (954)..(954): n is a, c, g, or t
  misc_feature (989)..(989): n is a, c, g, or t
  misc_feature (991)..(992): n is a, c, g, or t
  misc_feature (1002)..(1002): n is a, c, g, or t
naacttacggctaggtacgaggcngggtggtccggaaagcgtggcggctgctgctagagcctttccctttaccgcacccaaggagctggagcgacaacaacgacgtcgtttccgtttccaccacctcttcctgttcccgtccttgaggacgccgtgccgggtcagtgttagcctccagccctggttgtggaaggcgacagaagtcatggcgatgtttgagcagatgagagccaacgtgggcaagttgctcaagggtatcgacaggtacaatcctgagaacctggccaccctggagcgctatgtagagacgcaggccaaggaaaatgcctatgatctggaagccaacctggctgtcctgaagctgtaccagttcaacccagccttctttcagaccacggtcaccgcccagatcctgctgaaggccctcaccaacttgccgcacacagacttcaccctgtgcaagtgcatgatcgaccaggcacatcaagaagaacggccaatccgacagattttgtacctcggggacctgctggagacctgccatttccaggccttctggcaagccctggatgaaaacatggacctcttggaaggtataactggctttgaagactctgtccgaaagtttatctgccatgttgtgggtatcacttaccagcacattgaccgctggctgctggccgagatgctcggggatctgtcggacagccagctaaaggtgtggatgagcaaatacggctggagtgccgacgagtcggggcagatcttcatctgtagccaagaagagagcattaaacccaagaacattgtggagaagattgactttgacagtgtgtccagcatcatggcctcctcccagtaacttcaggtgtttaataaagatgtgttgactcagcaaaaaaaaaaaaaaatcgggggctttattcgggggggggaaaggggtttgaatgggcntggtctatggttccggccccgttttgtcaaggggnanntgcggcccanagggggtatcaaccgtacta

SEQ ID NO: 344050 - DNA, 1025 bp, Homo sapiens
gcgaggaagaagtcacgtggcagccggaaagcgtggcggctgctgctagagcctttccctttaccgcacccaaggagctggagcgacaacaacgacgtcgtttccgtttccaccacctcttcctgttcccgtccttgaggacgccgtgccgggtcagtgttagcctccagccctggttgtggaaggcgacagaagtcatggcgatgtttgagcagatgagagccaacgtgggcaagttgctcaagggtatcgacaggtacaatcctgagaacctggccaccctggagcgctatgtagagacgcaggccaaggaaaatgcctatgatctggaagccaacctggctgtcctgaagctgtaccagttcaacccagccttctttcagaccacggtcaccgcccagatcctgctgaaggccctcaccaacttgccgcacacagacttcaccctgtgcaagtgcatgatcgaccaggcacatcaagaagaacggccaatccgacagattttgtacctcggggacctgctggagacctgccatttccaggccttctggcaagccctggatgaaaacatggacctcttggaaggtataactggctttgaagactctgtccgaaagtttatctgccatgttgtgggtatcacttaccagcacattgaccgctggctgctggccgagatgctcggggatctgtcggacagccagctaaaggtgtggatgagcaaatacggctggagtgccgacgagtcggggcagatcttcatctgtagccaagaagagagcattaaacccaagaacattgtggagaagattgactttgacagtgtgtccagcatcatggcctcctcccagtaacttcaggtgtttaataaagatgtgttgactcagcaaaaaaaaaaaaaccgggcttttttggcggaaaaggttagaaaggcaggcttatgtccgcccgttttgtaagggaatccggccaaggcgtatctacgccttctgaaacagaggaaggaaaaaaaacccacaactagc

SEQ ID NO: 344051 - DNA, 916 bp, Homo sapiens
  misc_feature (916)..(916): n is a, c, g, or t
gcgaggaagaagtcacgtggcagccggaaagcgtggcggctgctgctagagcctttccctttaccgcacccaaggagctggagcgacaacaacgacgtcgtttccgtttccaccacctcttcctgttcccgtccttgaggacgccgtgccgggtcagtgttagcctccagccctggttgtggaaggcgacagaagtcatggcgatgtttgagcagatgagagccaacgtgggcaagttgctcaagggtatcgacaggtacaatcctgagaacctggccaccctggagcgctatgtagagacgcaggccaaggaaaatgcctatgatctggaagccaacctggctgtcctgaagctgtaccagttcaacccagccttctttcagaccacggtcaccgcccagatcctgctgaaggccctcaccaacttgccgcacacagacttcaccctgtgcaagtgcatgatcgaccaggcacatcaagaagaacggccaatccgacagattttgtacctcggggacctgctggagacctgccatttccaggccttctggcaagccctggatgaaaacatggacctcttggaaggtataactggctttgaagactctgtccgaaagtttatctgccatgttgtgggtatcacttaccagcacattgaccgctggctgctggccgagatgctcggggatctgtcggtgcggacacgcggctagggggagagcacatcgcgggtgccaaagtaggggaatcttctcgtcgccaagacactacccacctcgggaagatcagagcgcgaccacagcccccactgttcatttcggtgacacaaacggccgctgccggcgtcgtctgtcgccacgagagtcgcgtgatatcggcatcacaaaaaacaccaaaagacgaaccacacagctgn

SEQ ID NO: 344052 - DNA, 1467 bp, Homo sapiens
gcgaggaagaagtcacgtggcagccggaaagcgtggcggctgctgctagagcctttccctttaccgcacccaaggagctggagcgacaacaacgacgtcgtttccgtttccaccacctcttcctgttcccgtccttgaggacgccgtgccgggtcagtgttagcctccagccctggttgtggaaggcgacagaagtcatggcgatgtttgagcagatgagagccaacgtgggcaagttgctcaagggtatcgacaggtacaatcctgagaacctggccaccctggagcgctatgtagagacgcaggccaaggaaaatgcctatgatctggaagccaacctggctgtcctgaagctgtaccagttcaacccagccttctttcagaccacggtcaccgcccagatcctgctgaaggccctcaccaacttgccgcacacagacttcaccctgtgcaagtgcatgatcgaccaggcacatcaagaagaacggccaatccgacagattttgtacctcggggacctgctggagacctgccatttccaggccttctggcaagccctggatgaaaacatggacctcttggaaggtataactggctttgaagactctgtccgaaagtgtaagtccctctctgaggctgggctccccaaggggaaggggtagggagtggcagccaggtccggggggacagctgctcaccggttttgtctctgacctccacagttatctgccatgttgtgggtatcacttaccagcacattgaccgctggctgctggccgagatgctcggggatctgtcggggtaacgccctctgggtcctggtgcacatctgggaggttgggggtggctagggcagtggacctcagtcagctcctccaacaggcctgtctgggtctcatcaggtcagcatggaaggcccagcccaaggaggaaataagaacttggtataagacagtctctgccttgagggagatcctatgccatttgctcatttattttgcattaattgagtgcctaccgtgtgtcagtgtgctaaactgggcgtgcagcagtaaacaaagtgggatggctccaattcattctcatggaggtagcaaagcacatggcgacatggaggtgtccagtggtgattcctgtcatgaaggaaagcaagacagctcacagaccagcggcatctgagcccttacctccgtagagagaggcccgtggcctgaggtagtgcagaggaggatagtagagcagggccctgacttgtaacgttcatgggtagccagggtgtatgtggccagagcagagtaagcatgggcgaaagtagagagctgggggttggaggggcatttccaggtcatgtggggcctcgggaggaccttgtcctttcccctgactgagaaggagccaccggagggctctgagcagggtagggctctgatcagatggatattttttaaagatccccccaagaacaaa

SEQ ID NO: 344053 - DNA, 709 bp, Homo sapiens
gcgaggaagaagtcacgtggcagccggaaagcgtggcggctgctgctagagcctttccctttaccgcacccaaggagctggagcgacaacaacgacgtcgtttccgtttccaccacctcttcctgttcccgtccttgaggacgccgtgccgggtcagtgttagcctccagccctggttgtggaaggcgacagaagtcatggcgatgtttgagcagatgagagccaacgtgggcaagttgctcaagggtatcgacaggtacaatcctgagaacctggccaccctggagcgctatgtagagacgcaggccaaggaaaatgcctatgatctggaagccaacctggctgtcctgaagctgtaccagttcaacccagccttctttcagaccacggtcaccgcccagatcctgctgaaggccctcaccaacttgccgcacacagacttcaccctgtgcaagtgcatgatcgaccaggcacatcaagaagaacggccaatccgacagattttgtacctcggggacctgctggagacctgccatttccaggccttctgggtaacttccctggggtccaggggcaggggagatggcagggccatgtggagctgagtgctaaaagtaacaacggtgcacactgactggcttcctgctttggcggtgggcccagtgctctgcatgtgtgtgtttgtggaattatcatcctctcgcggagc

SEQ ID NO: 344054 - DNA, 354 bp, Homo sapiens
aggagaagacagtaaatagttaggagcgttacgataggcgaagtacacagggtggtagggatagacaacagagggacatacagaagtccaggggattagggaaaagactcctggcagaaatgttgtttaggttgaggcccaaaaaggtgagtaggaaccagcaaggtaaaaggggtttgggaggagagtagtctaggctgagagagtagcttggtcaaaggctgggaagtaaaagaacattgtggatgatgtgttgaggatggatcacatcccagaaaacaaaactggaaggtaggagaccacttgctgttgaagtagaagctggtggtgacttgttcataaaaagagacagga

SEQ ID NO: 344055 - DNA, 236 bp, Homo sapiens
actcactcctgtgggaaagtcattcaatctcagggctttactatctgtgctgacgctccagattttataggtctcagtcagacctctgaactcccgtctccttcatcacaactgcctatttgatagcccatctcagatgtcaaacaggtatatgcatatttaaaaccaaatgcctgatcttccgaatgaccagttctagtagtacatctcattaagtgggactgcaggaaagcagt

SEQ ID NO: 344056 - DNA, 436 bp, Homo sapiens
cttttaatggctagaaggagaatcatggggttggaagtccaccagtttgggtattctgttccctaactcaaaataaagagatgttattttcaagtcttctgcttgttaacttaattagagatacatgagtttgcagctgtgctgggcatgccgcagcttggcatgtttagtccagaaggcatattataatgtacatggaagattgtcagaaattcaaaaggactttttgagtatcacatgtgtattttcaagttccaatatagattcacattcagtttgacaggtatctttggatgcctatcagttaagaactatttattagttgtggaataaaatagggtaaaataaggaacaactgaggaaaaaacataaaatttgctttgtgaataaaagttgtcttcaaaattatgactttttccatcccacaaaagttttg

SEQ ID NO: 344057 - DNA, 623 bp, Homo sapiens
aggacttgaaggaagccctctgggttgtctgctgagtacaggggctcagtgaacactggcgctgcctctgagtcggggctgggctgcagaggcgactcagaggagactctgctgcttgctcccagccccttccccggcgatgcccatcacactgtgacctcccatccctgaagggcacctgcctgagggcctggcctccttccagcttcatggacctggagatgtgccctttcatccttcctgcttcccaggccagtagatccgtttacacttttgggtcgacagtcagcttttccttttggttttggcgggtcccagaggcatgggtgtccagtccaatgtggggagccacgtgacaacgtgggggactgggacatgggactgggaagtcagcagacgctgggatagagagggccctgaacaccaggctcaggggcttgcttggtccttatcctgtaggaggtgggaccacctttccctgaactttctctacaacccttgggagcgtggggaggaggcggctggttccagggtcagtttactaagttagagatttggaaaacctgtgtcagctgtaactcctaggatattttatgtggaacctaacatgcagatgaaagctg

SEQ ID NO: 344058 - DNA, 349 bp, Homo sapiens
ctggctgcctctacacagactcggcgagaggacttgaaggaagccctctgggttgtctgctgagtacaggggctcagtgaacactggcgctgcctctgagtcggggctgggctgcagaggcgactcagaggagactctgctgcttgctcccagccccttccccggcgatgcccatcacactgtgacctcccatccctgaagggcacctgcctgagggcctggcctccttccagcttcatggacctggagatgtgccctttcatccttcctgcttcccaggccagtagatccgtttacacttttgggtcgacagtcagcttttccttttggttttggcgggtcccagagg

SEQ ID NO: 344059 - DNA, 444 bp, Homo sapiens
agtgagattatcatgtacaagagtgagattatcatgtacaagagtgagattatcatgtacaagagatcccaggaatactgacttgatgaaaaagtcacatcagagcactcagtttggcagagcttttctgctgaatgtttactcacattcactgtccaagattctgtactgggggtacatacgtcctctgccctaaggcaattttgagtccaagagacattttgaggcctaaaaatcataggaaactgcccctgagctcacacatatttccaatggtgtccccaatttcagggaatccatggattacctaagccagcccctccagttcggctaagaaactctagtctatatatcaagttttgtatcatatgtattgctctgaactcagaaatttcccttccatttatggattctatgaataaaatatcacatgtacaaaaagac

SEQ ID NO: 344060 - DNA, 466 bp, Homo sapiens
agtgagattatcatgtacaagagtgagattatcatgtacaagagtgagattatcatgtacaagagatcccaggaatactgacttgatgaaaaagtcacatcagagcactcagtttggcagagcttttctgctgaatgtttactcacattcactgtccaagattctgtactgggggtacatacgtcctctgccctaaggcaattttgagtccaagagacattttgaggcctaaaaatcataggaaactgcccctgagctcacacatatttccaatggagctcacacatatttccaatggtgtccccaatttcagggaatccatggattacctaagccagcccctccagttcggctaagaaactctagtctatatatcaagttttgtatcatatgtattgctctgaactcagaaatttcccttccatttatggattctatgaataaaatatcacatgtacaaaaagac

SEQ ID NO: 344061 - DNA, 674 bp, Homo sapiens
tcttccaggggaatcagaaagcaaagaccattttttaatagcatgtgacctgttacaaagagagaattctgaattagaaacaaaggtgagactgagttaggtatttaaatgttcaatatttaatgtagcttttatgaggataggttaaaaggaaattaattttaagcaacagatgatttgggaattggagtttcttctattattatagcataaattgccatatactgccatatactgtggattatgagtcaagctatatgtcaagataaatattcagacttcaaccagcacttggcaattaggattaatctgcaaatttttttactttaaatcagcttcccaccaacttaatttttggagtacatattataatgtaaaatatttatttaaatgtcttcaatttaaaaatttaggatcaaagcatctttctataatgtaaaagatttatttaaatgtcttcaatttaaaaatttaggaccaaagcgtctttctcagttacactgaaaattgggcttagaattaggaaaatgttcaaatgtcctgattcaagcttgttccttaagtttaaaaatggcttccagggagcctaagtttaaaaatgtgcccaggagttagaggctgtagtgtgctgtgattgtgcctgtgaatagccactgcatttcagcctgggcagc

SEQ ID NO: 344062 - DNA, 404 bp, Homo sapiens
gccctagaaacaagaaccaatccagcagcaacaagcatctctggcagtctatcatttcccttcaactgaaatcagatcttcttaaagaaatgcttggctctcagactgggaacggaaatgtacaagatgtgcttcgatatctggtcaaatcagaaactcaaaaagctatcaaagtctctttggactgtgtcagaaagaggtgaaaagactcccacttgccaaagacgggacaatttgagcattcataagactaatcactataatggactatagtgaactgaagtacatcaaatatgtttcaatccatgatttcataatggtatcttaaataattggtcacttgtggaggactctacgtaaccaactcaacaacttgaaaactggtaataaagagaaatccttta

SEQ ID NO: 344063 - DNA, 389 bp, Homo sapiens
aaaaacaatttaagtctgaaaggaatctagcactaataaaggaatatcagattttaggactgatatttccaacctctttgcattcatctatcaccccttgattgatgaacttaccatatatttcaccaagcaattagaagcaatcagaagggcaagcccctactgtctccatccaactccattaaaaaagatgcatttattaatatatttaccatctcttcctactactgtgaaatgtcactactgccttctgaaagccaacctccttacacccttaatggcttcacccctgtttctctttcacatcatcaatatttccctctgtactatgtcatttccatccagcttacaaccatttcctggtgtctcccatctttttctgccatttt

SEQ ID NO: 344064 - DNA, 381 bp, Homo sapiens
tgtggtttatgaaagaggcaaaattgtcaatgactacttgttgaattttgcttcctaaccatgtaatggggacaagtgtttccgaaaacatgttttatatggttagttttcctgcagatgggaattgttcgctgaattatactttgtccacttaggcttaggtagatatggattctgtgaaactggaaatcattgaatggtttaaatactggattaaaagaaaaggaactatggtaattgcagatctgttagatggaatctgtcgtgccctaataagagtgataaggaagaccattaactgttggaagcaagttgttgggttcgaggttgggaattgggcatgatttgtttcctgtgtcactacttaggttaatttactca

SEQ ID NO: 344065 - DNA, 541 bp, Homo sapiens
tttactgcacaaagggtcaaaattttatgtaaacaattttaatcatttaagaagtcagggaatcacaggaatgcagactgtgacaagagaacataactattagtacaaatgtaggaaacaaactcaaaagagtaggggtgaaaggtgctgatctaagtaactttggaaattactgaagtttgtaagactaaaggcaaaaggaactgcaagtaagcagttcctagttgatacaagttgtttcccatgggggttatagggaagcttaaacattccctctggaggtttgataattaagtctgctgaaatgaactgacaataaacagattaagaagagaaagaccattttaattacatacatgcaaatggaagcctcagaaaaatatgagactcaaaggaggaggcagatggttgaaggtttcatagcataaaatgaataggggcttgaaggggaggtgatgacagttatgagaggaaaaggagaggaactgcatggtgaacaaagattgtcttatgtaaataaagtctctcaggtcataaaagt

SEQ ID NO: 344066 - DNA, 655 bp, Homo sapiens
accgggttatttacccccatccggaaaaaaataagaaagtgttatttgtggacgccgcagatatacgatccaaggtcgcagattctttggtccatataaaatcactgggcacctgtttttaaggacaggccatttctgctataccccagttataaaaaggtgactgtttatataaataggaatagtagcctgggttttggtgaacctgttgtagcgtgtgtaggttataaaaaatttcagaattccaatttcttcataaaataaagataatgtaactttacttacaggcttttttctctgccaagcactaagtcgatacatacaaatcagtgatcacagtacctggcacatagcaggtcttcagtatctgctttacttctttcccttcgcctgaggtaggatatgaacatttgaaatagacctagccttgtcaggcataataagaaagatataacatcagagtttaaaaaaaaatagctgaacttttggttggcacacttttgcttatattgatgactaaacagataaactggtagagggtagagaaacttgaagttcaaatgagtatttgttgaagagaaatcaaaatcataagcatagtatctaagatatgatgtcagttaggaaacaatttaatcttgtggcatctgcagga

SEQ ID NO: 344067 - DNA, 4127 bp, Homo sapiens
  misc_feature (2944)..(2944): n is a, c, g, or t
  misc_feature (3542)..(3542): n is a, c, g, or t
cggtttgctataatttcttaaaattcaatcaatttcacatccattaaacttacaagtaccgtaatccagttttcctaggaaaactaagcccagccgaaccttgggaaaaatacctctgtgttaaacatatatacatgatcgattttaaatgttttcaccacaaaaaatggtaagtacgtgaggtgatggatttgttaactcagaagcaggcacaccaaatcacaatgggtctgattcgatcctccctgatggcaatggagacccatctaactaatcccacttctaattacctttctttttctccttacagacctaaaaaatctcaccatttctattagcctgaaaatccctctgttcttctcttcctccttcagcactgaatctcgcttacactaggttttacttaatgattctcctccttatactttctgtctcaccagtttcctctcacacttatttacctgctacacaaaattattcttattgggcttatgtgccctttcctccacttattcgacctctcacctggattgatgctcctgcggaaatctacattaacgatagtttgtggatgcctggagctacagatgaccgttgccctgctcaaccaggagaagaaggcactacatttaatgttatcatgggttataaataacaccctctgtgcctcagaaatgcacctggttatatccatctagaaactcaagtctgggctgcttatcttcccgagggatcagctacagaggaaccgggacatttggtctctggcctctccctttctcctttaaaacaaatgaaagggggagtaatgggacataccccatactttcaataagtagcctccaggcattcccttccaccagaggagcaattgttttttaaatagccctttggcgcccagtctattactaaaccatatgagtcattttttaatattactgcatgtgagttaacatagtcttcccaaattaaagttttagatgggccctcaaaatttttagggcatggttttcctgcaggtttatatggaaagtatggggtccctgacttctcgcaacagtggcctacactgcctttcagttctgtacctaggcctccaaagcactttagcctgtggggcttgccagaactcgggttccagctcctggaatggacagttcccctctggctagggttgatctaatgttccctctgggttactggctgagttctgccctgtgtggctttctgctgtgccagggctgcactgagttcaaatgcagagtctcacaatcattgtattcttcctcccccaggagcacccattctctctttacaccaattggccactgccaggggatgaagagggatgatgttgacaattcaagactatttcttaccctcttcagtgcctgtttccttaatatgataataaaccaggtactgcgatcactcacctgattattggttcttatgaaggtgcttttttaatgtagttgttcagtttgatatttctgtcggagggatgactgctggaggattctattaagccatcttgctctgccttcttgcaacacataaaattcaacagttttgtgcaactgtaagttcaagtgtttgtaattttatttatttcatttttttctttgagatgaagtctccctcttgttacccaggctggagtgcagtggcgcgatcttggctcactgcaacctctacctcctgggttcaagcaatcctcctgccttatcctcccaagtagctgggattacagatgcctgccaccatgtcttgctaacttttgtacatttagtagacatgaggttttgccatgttgtccgggctggtcttgaactcctgacttcaagtgatccacctgtcttagcctcccaaagtactgggattacaggtgagagtcactgctccctgctgcaaatttcttattaaatctgtttgacagattttagaatttctataagtaatgtttaaaattacaaccatttgggctgggtgtggtggctcatgcctgtaatcccagcacttattttatttcttatcaggagaacgagaatcatcatactactttgcatcggaggttaagctcattcttttccttaaaatgggaagataaaggcattaccccctctccgaggcctcatatgatactccccattctgacccagaacacccagaactttggaaattggctattgccatgtctggactgcaagtatgggaagcagaaactattctgtctgttgtccccactaccatctccctctctcagtatcaacgtagatccagacattctgctttacctacctccaacctgtttccatacagagttctgttaagcctccttgcatgctgttagtgagatatatcaaaatttggatgaacaatcaaactgtccaatgcattaattgtcatttatacacttgtattaactcccattttgattccaggaaaagtgtaatgttggttcgagctcaagaaggaatctggattccggtaactttgcccagaccttgggaatcctccccttcaatacatttaattaatgaagtgttacagtgaattctaaaaagatctaagagatttattttcactttaattgctgttatcatgggcctaattacagtcactgcagtggccaccactgccggaatggcattacaccagtccattcaagcggctcattttgttaatggttggcaagccaattccatccaaatgtggaattctcaacaaggcatcgatcgaaaattggcaaatcaaattagtgatttaagacagtctgttatttggcttggagatcaggtagtgagtctcgagcatcacatgcaaatgcagtacgattggaacacttgagatttctgcatcaccccgtattcctataacgagactgatcattcatgggaaatggtcaaaagacatcttctgggtagggaagataatttatcantggacataactaaattaaagagacaaatttttgaagcctctcaagctcacttatccattgtgcctggagctgaggcgttagatcaggtggcagaaaatctttctggattaaaccccaggacttggattaagtctattgggggctccactgtagtaaattttggaattatgtttctctgtttaatcggcttgtttttagtttgccagactagtcaaagaatcctgcgtcaaaatcaagagaacgaacaagccttcattgccatggcacatttattataaaaagaaagggagagatgttgcgggaagtcagggaccccggagggaccagctgaagccatggcagaagaacataaattgtgaagatttcatggacatttattagttccccaatcaatacccttgtgatttcctatgcctgtctttactttaatctcttaatcccgtcatcttcgtaaactgaggaggatgtatgtcgcctcaggaccctgtgatgattgtgttaactgcacaaattgtagagcatttgtgtttgaacaatatgaaatctgggcaccttgaaaaaagaacaggataacagtgatgttcacggaacaagaganataaccttaaactctgactgccggtgagctggacggaacagagccatatttctcttctttcaaaagcaaatgggagaaatatcactgaattctttctcagcaaggaacatccctgagaaagagaatgcatccctgagggtaggcctctgaaatggctgcttcagggcagctgtcttttatggtcgcagctgtggggatgaaataagccccagtttctcagagtgctcccaggcttattaggacgaggaaattcctgcctaataaattttggtcagaccagttgtctgctctcaaaccctgtctcctgataagatgttatcaatgacaatgcatgcccgaaacttcattagcaattttaatttcaccccagtcctgtggtcctgtgatctcgccctgcctccatttaccttgtgatatcttattaccttgtgaagcatgggatctctgtgacccataccctatttgtacactccctccccttttgaaaatcactaataaaaaatttgctggttttatggctcagggggcatcacagaacctgccaacatgtgatgtctgccctggacacccagctttaaaatttct

SEQ ID NO: 344068 - DNA, 525 bp, Homo sapiens
gcctttccagtttctcagaagcctagcagtacttactcctcctgctcttgggttcttttttactttttttttttttttttaaaaaaaaccttgaactcttaaggattaatgctcttgagttatgagatatccctacattccaataactctaccttctatttttattgattaaactagtttgagtagtttctgttcctttcttccaaaacaacccactgagaacttggaaataaggcaaactagatttccctctaatagttaaattggcattctctgagaatatttataaatgtgttaattgaaaaattttggagtgtggtggctcacacttgtaatcctagtgcattgagaggctgaggtgagaggaccatttgaggccaggagttagagactagtctgggcaatgtagtgagaccccccaactctacaaaaaaaaatgttgttttgttttttttgtgtttttgttttgagatagagtctcgaactccagcctggatgacagagcaagactctgtctcactgcaa

SEQ ID NO: 344069 - DNA, 682 bp, Homo sapiens
gcctttccagtttctcagaagcctagcagtacttactcctcctgctcttgggttcttttttactttttttttttttttttaaaaaaaaccttgaactcttaaggattaatgctcttgagttatgagatatccctacattccaataactctaccttctatttttattgattaaactagtttgagtagtttctgttcctttcttccaaaacaacccactgagaacttggaaataaggcaaactagatttccctctaatagttaaattggcattctctgagaatatttataaatgtgttaattgaaaaattttggagtgtggtggctcacacttgtaatcctagtgcattgagaggctgaggtgagaggaccatttgaggccaggagttagagactagtctgggcaatgtagtgagaccccccaactctacaaaaaaaaatgttgttttgttttttttgtgtttttgttttgagatagagtctcgaactcgccctgcctccatttaccttgtgatatcttattaccttgtgaagcatgggatctctgtgacccataccctatttgtacactccctccccttttgaaaatcactaataaaaaatttgctggttttatggctcagggggcatcacagaacctgccaacatgtgatgtctgccctggacacccagctttaaaatttct

SEQ ID NO: 344070 - DNA, 2790 bp, Homo sapiens
caggggagaagacatgtaaacgtgcctccagaggaagggctgggggagctgggagtggcgggggcggcggaaggtgagcctgggaaggtggccgagcaccccttcttcttgggcccttcccagtgctcccttggggtgtcagccccagccccgtttgcccccactccgcctcccttttggaagggattgccttttttttcctctgcggcggcggaaatgacagtgtggtgctgccgtggtgtcatggtgctgcccctggactgaggggcgaaaactcttaagtttagctcgggaggcccagctgcggtagcatcgcggccgccgtgctgtcccctgcggggcgcgcgggctggcggatcccggctgctgcgcggcgtcggcgacggtagcggcagcggcggcgaaggcgggcggcggcctacagtggtagcggcggcggcggcgaccggggcccgggagctcgcgccggagcccgagccaacccgctgcggaggcagacgagagcccagcgccctcgagcgagcggaggagatggctggcacctgggaacgctatgggtgaaagcccagcctccgtggttcttaatgcctcaggaggactattttcactaaagatggaaacactggagtctgaattgacctgtccaatctgcctagagttgtttgaagacccccttctgctcccttgtgctcacagcctctgcttcagctgtgcccatcgcattttggtatcaagctgcagctctggtgaatccattgaacccattactgctttccagtgtcctacctgcaggtatgttatctcgctgaaccaccggggcctggatggcctcaagaggaatgtgactctgcagaacattattgatcgcttccagaaggcttcagtcagtgggcccaattcccctagtgagagccgccgggaaaggacttacaggcccaccactgccatgtctagcgagcgaattgcttgccaattctgtgagcaggacccgccaagggatgcagtaaaaacatgcatcacctgtgaggtctcctactgtgaccgttgcctgcgggccacgcaccccaacaagaaacctttcaccagccaccgcctggtggaaccagtgccagacacacatcttcgagggatcacctgcctggaccatgagaatgagaaagtgaacatgtactgtgtatctgatgaccaattgatctgtgccttatgcaaactggtgggtcgtcaccgagaccatcaggtcgcatccctgaatgatcgatttgagaaactcaagcaaactctggagatgaacctcaccaacctggttaagcgcaacagcgaactagaaaatcaaatggccaaactaatacagatctgccagcaggttgaggtgaatactgctatgcatgaggcaaaacttatggaagaatgtgacgagttggtagagatcatccagcagaggaagcaaatgatcgctgtcaaaatcaaagagacaaaggttatgaaactgagaaagttggcacagcaggttgctaattgccgccagtgtcttgaacggtcaacagtcctcatcaaccaagctgagcatatcctgaaagaaaatgaccaggcacggtttctacagtctgcaaaaaatattgctgagagggtcgctatggcaactgcatcttctcaagttctgattccagacatcaattttaatgatgcctttgaaaactttgctttagatttttccagagaaaagaaactgctagaggggttagattatttaacagccccaaacccaccatctatccgagaagaactctgtactgcctcccatgacaccattacagtccactggatctcggatgatgagttcagcatcagctcctatgagcttcagtacaccatattcactggccaggctaacttcatcagcctgtataattcagtagacagctggatgattgttcccaacattaaacagaaccattacacagtgcatggactccagagcgggactcgctacatcttcatcgttaaagccataaaccaagccggcagccggaacagtgaacctacccgactaaaaacaaacagccaaccctttaaattggatcccaaaatgactcacaagaagttgaagatctccaatgatggattgcagatggagaaggatgaaagctctctaaagaagagccacaccccagagaggtttagtggcacagggtgctatggggcagcaggaaatatattcattgacagtggctgccactattgggaggtggtcatgggttcctcaacatggtatgcaattggcattgcctacaaatcagctccaaagaatgaatggattggcaagaatgcctcctcatgggtcttctctcgctgcaatagtaacttcgtggtgagacacaacaacaaggaaatgctggtggatgtgcccccacacctgaagcgtctgggtgtcctcctggattatgacaacaatatgctgtctttctatgacccagctaactctctccatcttcatacttttgatgtgaccttcattcttccagtttgtccaacatttacaatctggaacaaatccctaatgatcctgtctggcttgcctgccccagattttattgattaccctgagcggcaggaatgcaactgcaggcctcaagaatccccttatgtttctgggatgaaaacctgtcattaagtttcaggagagtatataattcactggctctctagttcagcagttcttcccctcctacacctaagttagcgttcaatatacgagacacaaaataaagtttgtttgaagcatccaaaatc

SEQ ID NO: 344071 - DNA, 1216 bp, Homo sapiens
  misc_feature (44)..(45): n is a, c, g, or t
gaacacagaaaaccagtcaatagaaacgaccactgcacgggaannttttcagggtcgctatggcaactgcatcttctcaagttctgattccagacatcaattttaatgatgcctttgaaaactttgctttagatttttccagagaaaagaaactgctagaggggttagattatttaacagccccaaacccaccatctatccgagaagaactctgtactgcctcccatgacaccattacagtccactggatctcggatgatgagttcagcatcagctcctatgagcttcagtacaccatattcactggccaggctaacttcatcagcctgtataattcagtagacagctggatgattgttcccaacattaaacagaaccattacacagtgcatggactccagagcgggactcgctacatcttcatcgttaaagccataaaccaagccggcagccggaacagtgaacctacccgactaaaaacaaacagccaaccctttaaattggatcccaaaatgactcacaagaagttgaagatctccaatgatggattgcagatggagaaggatgaaagctctctaaagaagagccacaccccagagaggtttagtggcacagggtgctatggggcagcaggaaatatattcattgacagtggctgccactattgggaggtggtcatgggttcctcaacatggtatgcaattggcattgcctacaaatcagctccaaagaatgaatggattggcaagaatgcctcctcatgggtcttctctcgctgcaatagtaacttcgtggtgagacacaacaacaaggaaatgctggtggatgtgcccccacacctgaagcgtctgggtgtcctcctggattatgacaacaatatgctgtctttctatgacccagctaactctctccatcttcatacttttgatgtgaccttcattcttccagtttgtccaacatttacaatctggaacaaatccctaatgatcctgtctggcttgcctgccccagattttattgattaccctgagcggcaggaatgcaactgcaggcctcaagaatccccttatgtttctgggatgaaaacctgtcattaagtttcaggagagtatataattcactggctctctagttcagcagttcttcccctcctacacctaagttagcgttcaatatacgagacacaaaataaagtttgtttgaagcatccaaaatc

SEQ ID NO: 344072 - DNA, 2880 bp, Homo sapiens
caggggagaagacatgtaaacgtgcctccagaggaagggctgggggagctgggagtggcgggggcggcggaaggtgagcctgggaaggtggccgagcaccccttcttcttgggcccttcccagtgctcccttggggtgtcagccccagccccgtttgcccccactccgcctcccttttggaagggattgccttttttttcctctgcggcggcggaaatgacagtgtggtgctgccgtggtgtcatggtgctgcccctggactgaggggcgaaaactcttaagtttagctcgggaggcccagctgcggtagcatcgcggccgccgtgctgtcccctgcggggcgcgcgggctggcggatcccggctgctgcgcggcgtcggcgacggtagcggcagcggcggcgaaggcgggcggcggcctacagtggtagcggcggcggcggcgaccggggcccgggagctcgcgccggagcccgagccaacccgctgcggaggcagacgagagcccagcgccctcgagcgagcggaggagatggctggcacctgggaacgctatgggtgaaagcccagcctccgtggttcttaatgcctcaggaggactattttcactaaagatggaaacactggagtctgaattgacctgtccaatctgcctagagttgtttgaagacccccttctgctcccttgtgctcacagcctctgcttcagctgtgcccatcgcattttggtatcaagctgcagctctggtgaatccattgaacccattactgctttccagtgtcctacctgcaggtatgttatctcgctgaaccaccggggcctggatggcctcaagaggaatgtgactctgcagaacattattgatcgcttccagaaggcttcagtcagtgggcccaattcccctagtgagagccgccgggaaaggacttacaggcccaccactgccatgtctagcgagcgaattgcttgccaattctgtgagcaggacccgccaagggatgcagtaaaaacatgcatcacctgtgaggtctcctactgtgaccgttgcctgcgggccacgcaccccaacaagaaacctttcaccagccaccgcctggtggaaccagtgccagacacacatcttcgagggatcacctgcctggaccatgagaatgagaaagtgaacatgtactgtgtatctgatgaccaattgatctgtgccttatgcaaactggtgggtcgtcaccgagaccatcaggtcgcatccctgaatgatcgatttgagaaactcaagcaaactctggagatgaacctcaccaacctggttaagcgcaacagcgaactagaaaatcaaatggccaaactaatacagatctgccagcaggttgaggtgaatactgctatgcatgaggcaaaacttatggaagaatgtgacgagttggtagagatcatccagcagaggaagcaaatgatcgctgtcaaaatcaaagagacaaaggttatgaaactgagaaagttggcacagcaggttgctaattgccgccagtgtcttgaacggtcaacagtcctcatcaaccaagctgagcatatcctgaaagaaaatgaccaggcacggtttctacagtctgcaaaaaatattgctgagagggtcgctatggcaactgcatcttctcaagttctgattccagacatcaattttaatgatgcctttgaaaactttgctttagatttttccagagaaaagaaactgctagaggggttagattatttaacagccccaaacccaccatctatccgagaagaactctgtactgcctcccatgacaccattacagtccactggatctcggatgatgagttcagcatcagctcctatgagcttcagtacaccatattcactggccaggctaacttcatcagtaagtcatggtgtagttggggcctgtggccagagataaggaaatgtaaggaagcagtaagctgctcaagattggccggggcgccacgaggcctgtataattcagtagacagctggatgattgttcccaacattaaacagaaccattacacagtgcatggactccagagcgggactcgctacatcttcatcgttaaagccataaaccaagccggcagccggaacagtgaacctacccgactaaaaacaaacagccaaccctttaaattggatcccaaaatgactcacaagaagttgaagatctccaatgatggattgcagatggagaaggatgaaagctctctaaagaagagccacaccccagagaggtttagtggcacagggtgctatggggcagcaggaaatatattcattgacagtggctgccactattgggaggtggtcatgggttcctcaacatggtatgcaattggcattgcctacaaatcagctccaaagaatgaatggattggcaagaatgcctcctcatgggtcttctctcgctgcaatagtaacttcgtggtgagacacaacaacaaggaaatgctggtggatgtgcccccacacctgaagcgtctgggtgtcctcctggattatgacaacaatatgctgtctttctatgacccagctaactctctccatcttcatacttttgatgtgaccttcattcttccagtttgtccaacatttacaatctggaacaaatccctaatgatcctgtctggcttgcctgccccagattttattgattaccctgagcggcaggaatgcaactgcaggcctcaagaatccccttatgtttctgggatgaaaacctgtcattaagtttcaggagagtatataattcactggctctctagttcagcagttcttcccctcctacacctaagttagcgttcaatatacgagacacaaaataaagtttgtttgaagcatccaaaatc

SEQ ID NO: 344073 - DNA, 2282 bp, Homo sapiens
ttccttcaagatgacagggcgctggagaaaaggctgctggaatcagctggtgaaagcccagcctccgtggttcttaatgcctcaggaggactattttcactaaagatggaaacactggagtctgaattgacctgtccaatctgcctagagttgtttgaagacccccttctgctcccttgtgctcacagcctctgcttcagctgtgcccatcgcattttggtatcaagctgcagctctggtgaatccattgaacccattactgctttccagtgtcctacctgcaggtatgttatctcgctgaaccaccggggcctggatggcctcaagaggaatgtgactctgcagaacattattgatcgcttccagaaggcttcagtcagtgggcccaattcccctagtgagagccgccgggaaaggacttacaggcccaccactgccatgtctagcgagcgaattgcttgccaattctgtgagcaggacccgccaagggatgcagtaaaaacatgcatcacctgtgaggtctcctactgtgaccgttgcctgcgggccacgcaccccaacaagaaacctttcaccagccaccgcctggtggaaccagtgccagacacacatcttcgagggatcacctgcctggaccatgagaatgagaaagtgaacatgtactgtgtatctgatgaccaattgatctgtgccttatgcaaactggtgggtcgtcaccgagaccatcaggtcgcatccctgaatgatcgatttgagaaactcaagcaaactctggagatgaacctcaccaacctggttaagcgcaacagcgaactagaaaatcaaatggccaaactaatacagatctgccagcaggttgaggtgaatactgctatgcatgaggcaaaacttatggaagaatgtgacgagttggtagagatcatccagcagaggaagcaaatgatcgctgtcaaaatcaaagagacaaaggttatgaaactgagaaagttggcacagcaggttgctaattgccgccagtgtcttgaacggtcaacagtcctcatcaaccaagctgagcatatcctgaaagaaaatgaccaggcacggtttctacagtctgcaaaaaatattgctgagagggtcgctatggcaactgcatcttctcaagttctgattccagacatcaattttaatgatgcctttgaaaactttgctttagatttttccagagaaaagaaactgctagaggggttagattatttaacagccccaaacccaccatctatccgagaagaactctgtactgcctcccatgacaccattacagtccactggatctcggatgatgagttcagcatcagctcctatgagcttcagtacaccatattcactggccaggctaacttcatcagcctgtataattcagtagacagctggatgattgttcccaacattaaacagaaccattacacagtgcatggactccagagcgggactcgctacatcttcatcgttaaagccataaaccaagccggcagccggaacagtgaacctacccgactaaaaacaaacagccaaccctttaaattggatcccaaaatgactcacaagaagttgaagatctccaatgatggattgcagatggagaaggatgaaagctctctaaagaagagccacaccccagagaggtttagtggcacagggtgctatggggcagcaggaaatatattcattgacagtggctgccactattgggaggtggtcatgggttcctcaacatggtatgcaattggcattgcctacaaatcagctccaaagaatgaatggattggcaagaatgcctcctcatgggtcttctctcgctgcaatagtaacttcgtggtgagacacaacaacaaggaaatgctggtggatgtgcccccacacctgaagcgtctgggtgtcctcctggattatgacaacaatatgctgtctttctatgacccagctaactctctccatcttcatacttttgatgtgaccttcattcttccagtttgtccaacatttacaatctggaacaaatccctaatgatcctgtctggcttgcctgccccagattttattgattaccctgagcggcaggaatgcaactgcaggcctcaagaatccccttatgtttctgggatgaaaacctgtcattaagtttcaggagagtatataattcactggctctctagttcagcagttcttcccctcctacacctaagttagcgttcaatatacgagacacaaaataaagtttgtttgaagcatccaaaatc

SEQ ID NO: 344074 - DNA, 4212 bp, Homo sapiens
  misc_feature (3274)..(3274): n is a, c, g, or t
ggcggggcggcagtggcggttgcggggcatgcgcggctccgcgcgcggcttctcaaacatggcggcggcggtgtgaagctcggtgccggctcgcgcgatcggtgggacagaatttcgttgttttcaccgacgagactggaggaaacaacaccaaatagggataccatgggacaaacagtgaatgaagattccatggatgtcaagaaggagaatcaagagaaaactcctcagtcaagtacatcttctgtacaaagggatgatttccactgggaggagtatttgaaagagactgggtctataagtgctccttcagagtgcttccgtcagtctcagattccacctgtgaatgatttcaaagttggtatgaaattggaagcccgtgaccctcgcaatgccacttcagtatgtattgctacggttattggaattactggggccaggttacggttacgactggatggtagtgacaacagaaatgatttttggaggcttgtcgattccccagacatacaacctgttgggacatgtgaaaaggaaggagacttacttcaacctccactagggtaccagatgaatacatcctcctggccgatgttcctcttaaagacactaaatgggtctgaaatggcatctgccacattatttaagaaggaaccaccaaagcccccactaaataattttaaagtggggatgaaactggaagctattgacaaaaagaacccgtatctcatctgtcctgcgaccattggagatgttaaaggggatgaagttcatatcacatttgatggctggagtggagcttttgattactggtgcaagtatgattctcgagatattttcccagctgggtggtgtcgcctgacaggagatgtattacaacccccaggaactagtgttcctattgtaaagaatatagcaaaaacagagtcttctccttccgaagcaagccagcattcaatgcagtctccacagaaaactactctaatattaccaacacagcaggtcaggagatcaagtcgaattaaaccacctggacctactgcagtccccaaaaggagcagttctgttaaaaatatcacaccaaggaaaaaaggtccaaactcaggaaaaaaggaaaaacctttgcccgtgatatgttctacatctgcagcttctctaaaatcgctgaccagagaccgtggcatgttatataaagatgtcgcttctgggccatgtaaaatagtgatgtctacagtctgtgtctatgtaaacaaacatggaaactttggccctcatctggatcccaagagaatccagcagctgcctgaccacttcggcccgggcccggtgaatgtggtgcttcgccggattgtgcaggcctgtgtggattgtgcccttgaaactaaaactgtttttggatacctgaagccagataatcgtggaggagaagtgataactgcctcctttgatggggaaactcattccatccagctccctccagtgaacagtgcatcatttgctcttcgctttcttgagaacttctgccacagtctgcagtgtgataaccttttgagtagccagccttttagttcttccaggggtcatactcacagctctgcagagcatgataaaaatcagtcagcaaaagaagatgtaacagaaaggcaaagcaccaaacgatctcctcagcaaactgtaccatatgttgttcctctctctcctaagctccccaaaacaaaggagtatgcgtctgaaggagaaccattgtttgctgggggaagtgccattcccaaagaggagaatctttcagaagattctaagagctcatcactaaattcaggaaattatttgaatcctgcctgtagaaatcctatgtatattcatacttcagtctcccaggatttttctcgaagtgtgccaggcaccacaagttcaccactagttggggacatatcccccaagagcagtccccatgaagttaaattccaaatgcagaggaaaagtgaagctccaagttatatagctgtacctgatcccagtgtcctgaaacaaggcttctctaaggacccttcaacctggtctgtggatgaagtgatacagtttatgaaacatacagatcctcagatatcaggccccctcgccgacctcttcaggcaacatgaaattgatgggaaggctctgttcctactcaagagtgatgtgatgatgaagtatatggggctgaagctggggccagcattaaagctgtgttactacattgaaaagcttaaagaaggaaaatacagttaaaaaaatgtgtaagtttagattggacataattctcaggtgtactgttaacattttaatttaaaagtatttctcttagcagtttttgttttgtagacagttcccataaaaatattttatcagaattgcagaactgtagtaacagttcagtcaactttgtttttttcctggagtcaccaaccagctttgggagacacagccgccactcccccagtctacttctttaaaaagcatttaacaggttagtattggcatattcaaattggcagttctttatgtctttttaaattttcattgtacagtttacaaatatacttaatgtagttaacagagaaaaacctttgattttggttaacctttatatctagaaccaaaacagctaaatcccaaaggggaaaatatcagggattgacaacttctataattaaatccatgagaatttttcctcactagagaatttaaaggtgcacctgtagatatcatcttttctcagatattttgtgtgatactctgtggtgttctgttcatgttctatcagtatatctagaaagggaatagccatataaattattttccttttattatttctctgtatgttgtatttgatcatatttaaaggaaaaaagcaagcttataagctttcatgaagtgttcttaccagtttttgataaattttttaaattataggatagaattgtcattttatgcaggagatatttatactacgagggttgtttggatggagtcagattaaattttttcagtgaaattcctattattttaaaactttccatattttcactacgcttggacatttaactaggcattcttttcttacatctctatatgaagatacctgtgtccaaaatttttgaagatatatattgtatgtgtttattcttcatatggtactttaccatatttatatattgttttatacctgtaggtttacacacaagtaaatcttttttttcttgaatttaatctgggcactttgcactgccacagnggtgacgatggaactatgtatatagttaggatgttttgatttcggtaaaaaatatatgtccatcgtttgctatcaccagtacctctcagcttactcttcaggggatatgaaacaatctgtagattggtttccatacagggaagttctctgtcctatgcaatgtttctaattaatttgcttagttctgagccatttattctgctacactttgaaagatatattagttctgacttattgtttggggctttattttatttttatttttttgagatggagtttcactcttgttgcccaggctggagtgcaatagctcgatctcggctcactgcaacctcgcctccctggttcaagcaattctcctgcctcagcgattacaggaatgcaccaccacgcccagctaattttgtagagatggggtttctccatgttggtcaggctggtctcaaactcctgacctcaggtgatccgcccacctcggccttgcaaaatgctgggattacaggcatgagccaccatgcccagccatgtttggggctttattttataagttagaactttgaagaggaaatggtgctatatgtttattgttattactttgtgtaactttgatgtaatgtttataagctatgagaatcagttataaaagtattagccatttgttgtaaatgccaataaaatattcaccaggggcaagaatgtacattttctttttagaaaaccaaatgtactttagacatgaatgcaactatttaaagaatagcttcatttatgttattccttacatgtcataagattcttacttaaacttggtcttctttcaagttgtttgtatgaagatgctgtacccacttgaacagtcctcaggtgtttacataaatactatgttttacagttttcatattttaaaatattaataaagttaatcgcaacgattcaat

SEQ ID NO: 344075 - DNA, 454 bp, Homo sapiens
atttaagcaattagaaaactaaatttagccatgcccagccatgtttggggctttattttataagttagaactttgaagaggaaatggtgctatatgtttattgttattactttgtgtaactttgatgtaatgtttataagctatgagaatcagttataaaagtattagccatttgttgtaaatgccaataaaatattcaccaggggcaagaatgtacattttctttttagaaaaccaaatgtactttagacatgaatgcaactatttaaagaatagcttcatttatgttattccttacatgtcataagattcttacttaaacttggtcttctttcaagttgtttgtatgaagatgctgtacccacttgaacagtcctcaggtgtttacataaatactatgttttacagttttcatattttaaaatattaataaagttaatcgcaacgattcaat

SEQ ID NO: 344076 - DNA, 4060 bp, Homo sapiens
  misc_feature (3122)..(3122): n is a, c, g, or t
ggcggggcggcagtggcggttgcggggcatgcgcggctccgcgcgcggcttctcaaacatggcggcggcggtgtgaagctcggtgccggctcgcgcgatcggtgggacagaatttcgttgttttcaccgacgagactggaggaaacaacaccaaatagggataccatgggacaaacagtgaatgaagattccatggatgtcaagaaggagaatcaagagaaaactcctcagtcaagtacatcttctgtacaaagggatgatttccactgggaggagtatttgaaagagactgggtctataagtgctccttcagagtgcttccgtcagtctcagattccacctgtgaatgatttcaaagttggtatgaaattggaagcccgtgaccctcgcaatgccacttcagtatgtattgctacggttattggaattactggggccaggttacggttacgactggatggtagtgacaacagaaatgatttttggaggcttgtcgattccccagacatacaacctgttgggacatgtgaaaaggaaggagacttacttcaacctccactagggtaccagatgaatacatcctcctggccgatgttcctcttaaagacactaaatgggtctgaaatggcatctgccacattatttaagaaggaaccaccaaagcccccactaaataattttaaagtggggatgaaactggaagctattgacaaaaagaacccgtatctcatctgtcctgcgaccattggagatgttaaaggggatgaagttcatatcacatttgatggctggagtggagcttttgattactggtgcaagtatgattctcgagatattttcccagctgggtggtgtcgcctgacaggagatgtattacaacccccaggaactagtgttcctattgtaaagaatatagcaaaaacagagtcttctccttccgaagcaagccagcattcaatgcagtctccacagaaaactactctaatattaccaacacagcaggtcaggagatcaagtcgaattaaaccacctggacctactgcagtccccaaaaggagcagttctgttaaaaatatcacaccaaggaaaaaaggtccaaactcaggaaaaaaggaaaaacctttgcccgtgatatgttctacatctgcagcttctctaaaatcgctgaccagagaccgtggcatgttatataaagatgtcgcttctgggccatgtaaaatagtgatgtctacagtctgtgtctatgtaaacaaacatggaaactttggccctcatctggatcccaagagaatccagcagctgcctgaccacttcggcccgggcccggtgaatgtggtgcttcgccggattgtgcaggcctgtgtggattgtgcccttgaaactaaaactgtttttggatacctgaagccagataatcgtggaggagaagtgataactgcctcctttgatggggaaactcattccatccagctccctccagtgaacagtgcatcatttgctcttcgctttcttgagaacttctgccacagtctgcagtgtgataaccttttgagtagccagccttttagttcttccaggggtcatactcacagctctgcagagcatgataaaaatcagtcagcaaaagaagatgtaacagaaaggcaaagcaccaaacgatctcctcagcaaactgtaccatatgttgttcctctctctcctaagctccccaaaacaaaggagtatgcgtctgaaggagaaccattgtttgctgggggaagtgccattcccaaagaggagaatctttcagaagattctaagagctcatcactaaattcaggaaattatttgaatcctgcctgtagaaatcctatgtatattcatacttcagtctcccaggatttttctcgaagtgtgccaggcaccacaagttcaccactagttggggacatatcccccaagagcagtccccatgaagttaaattccaaatgcagaggaaaagtgaaggaaattgatgggaaggctctgttcctactcaagagtgatgtgatgatgaagtatatggggctgaagctggggccagcattaaagctgtgttactacattgaaaagcttaaagaaggaaaatacagttaaaaaaatgtgtaagtttagattggacataattctcaggtgtactgttaacattttaatttaaaagtatttctcttagcagtttttgttttgtagacagttcccataaaaatattttatcagaattgcagaactgtagtaacagttcagtcaactttgtttttttcctggagtcaccaaccagctttgggagacacagccgccactcccccagtctacttctttaaaaagcatttaacaggttagtattggcatattcaaattggcagttctttatgtctttttaaattttcattgtacagtttacaaatatacttaatgtagttaacagagaaaaacctttgattttggttaacctttatatctagaaccaaaacagctaaatcccaaaggggaaaatatcagggattgacaacttctataattaaatccatgagaatttttcctcactagagaatttaaaggtgcacctgtagatatcatcttttctcagatattttgtgtgatactctgtggtgttctgttcatgttctatcagtatatctagaaagggaatagccatataaattattttccttttattatttctctgtatgttgtatttgatcatatttaaaggaaaaaagcaagcttataagctttcatgaagtgttcttaccagtttttgataaattttttaaattataggatagaattgtcattttatgcaggagatatttatactacgagggttgtttggatggagtcagattaaattttttcagtgaaattcctattattttaaaactttccatattttcactacgcttggacatttaactaggcattcttttcttacatctctatatgaagatacctgtgtccaaaatttttgaagatatatattgtatgtgtttattcttcatatggtactttaccatatttatatattgttttatacctgtaggtttacacacaagtaaatcttttttttcttgaatttaatctgggcactttgcactgccacagnggtgacgatggaactatgtatatagttaggatgttttgatttcggtaaaaaatatatgtccatcgtttgctatcaccagtacctctcagcttactcttcaggggatatgaaacaatctgtagattggtttccatacagggaagttctctgtcctatgcaatgtttctaattaatttgcttagttctgagccatttattctgctacactttgaaagatatattagttctgacttattgtttggggctttattttatttttatttttttgagatggagtttcactcttgttgcccaggctggagtgcaatagctcgatctcggctcactgcaacctcgcctccctggttcaagcaattctcctgcctcagcgattacaggaatgcaccaccacgcccagctaattttgtagagatggggtttctccatgttggtcaggctggtctcaaactcctgacctcaggtgatccgcccacctcggccttgcaaaatgctgggattacaggcatgagccaccatgcccagccatgtttggggctttattttataagttagaactttgaagaggaaatggtgctatatgtttattgttattactttgtgtaactttgatgtaatgtttataagctatgagaatcagttataaaagtattagccatttgttgtaaatgccaataaaatattcaccaggggcaagaatgtacattttctttttagaaaaccaaatgtactttagacatgaatgcaactatttaaagaatagcttcatttatgttattccttacatgtcataagattcttacttaaacttggtcttctttcaagttgtttgtatgaagatgctgtacccacttgaacagtcctcaggtgtttacataaatactatgttttacagttttcatattttaaaatattaataaagttaatcgcaacgattcaat

SEQ ID NO: 344077 - DNA, 409 bp, Homo sapiens
tggtgtcgcctgacaggagatgtattacaacccccaggaactagtggtaagataataattaactactttttcttctactttattgaagttagatgtaactgtcattggtggcattgtgattagcgttggtggtaccaggtggtacatgccccaactggtggcagacagaacaaagcgctgtccaggctagagaactggaggtaaaggaaagctatgattagaattcttgaggtcactgcagcatcatagtctgagttccagtccacactggagattatggacaaagctaaaagtcatatttggaccattgaggtcttgttgctataagcaaggggggtggtatgtactcagctccttttatagttgatattcaattaaaaattatacatggtattccattgttcatatc

SEQ ID NO: 344078 - DNA, 349 bp, Homo sapiens
tcttaaattcctggtacatagtagataatacatatttcttgaatgaatgaacccggctggttttgtttctttccaggttcttgactctgctccagagaaaatatgagatgttggagagcagagtttcagatctgtgagaactgttgtcttcctgtattaattgataattaaacatggagcttaatttttggttgctaagggttgtgagagaatacgcaacttttcacttcgagcacatgagtcttaatacatcttaacaatgaaatcttttttttttttaatgttttgataggaaccaccaaagcccccactaaataattttaaagtggggatgaaactggaagctatt

SEQ ID NO: 344079 - DNA, 4416 bp, Homo sapiens
cttgcttgaagatgcagagcgatgcagacacaagatgcagacagcttccacgctcatcagtggcttggcaggtgaaaaagaaagatggacagagcaaagccaagagtttgctgcacaaactaaaagacttgtaggggatgtactgttggctacagcttttctatcttattctggtccatttaaccaagagtttcgtgatcttctgttaaatgactggcggaaggaaatgaaagcccggaaaattccatttggaaagaacctaaatctcagtgagatgttgattgatgctcctactattagtgaatggaacctccaaggtctgccaaatgatgacttgtccattcaaaatggaattattgtcacgaaggcatctcgttaccctttgttaattgatccacagactcaaggcaagatctggattaaaaataaagaaagccgaaatgaactccagatcacgtctttaaatcacaagtacttcagaaaccacctggaagacagcctttctcttggaaggcctttgcttattgaagatgttggagaggaactagatccagcactagataatgttttggaaagaaacttcattaaaactgggtctacctttaaggtgaaagttggtgacaaggaagtagatgtgttggatggctttagactctacattaccaccaaattgcctaacccagcctacacccctgagataagtgcccgtacctccatcattgacttcactgtcaccatgaaaggtctagaagatcagttactggggagggtcattctcacagagaagcaggaattggagaaagaaagaactcatctgatggaagatgtaactgcaaacaaaagaaggatgaaggaactagaagataacttgctttaccgcctgacaagtacccaggggtccctggtagaagatgaaagtctcattgtcgtgctgagtaacacaaaaaggacagccgaggaggtgacacagaagctagaaatttctgctgagacagaagttcaaattaactcagcccgggaggaatacagacctgtggctacgcggggcagcatcctctacttcctcattactgagatgcgcttggttaatgagatgtatcagacttcgcttcgccagtttctgggcttatttgacctttccttagccaggtctgtcaagagcccgattacaagcaagaggattgctaatatcatcgagcacatgacctacgaggtttataagtatgctgcccgagggctgtacgaggagcacaaattcctgttcaccttgttgcttaccctaaagattgacatccagaggaaccgagtcaagcatgaagagtttctcactcttattaaaggaggtgcctcattagaccttaaagcttgtcctccaaaaccatcaaaatggatcctggacataacatggctgaatttggtggaacttagcaaactcagacagttttcagatgtccttgaccagatatcgagaaatgagaaaatgtggaaaatttggtttgataaggaaaacccggaggaggaacctcttccaaatgcctatgataaatctcttgactgcttcagacgtcttctccttattagatcctggtgtcctgacagaaccatcgcccaggcccgcaagtacatcgtggactccatgggagaaaaatatgccgaaggtgttattttagacttggagaagacgtgggaggaatctgatccacggacgccactcatctgtctcctgtctatgggctcagaccccacagattccatcattgccttggggaagagattaaaaatagaaacccgttatgtgtccatgggccagggccaggaagtccatgctcggaagctcttgcagcagaccatggcgaacggaggatgggcacttctgcagaactgccatctgggacttgatttcatggatgagctgatggacataatcatagaaactgagcttgtacatgatgcgttccgcctctggatgaccaccgaggttcataagcagtttcccattacactccttcagatgtccattaaatttgccaacgatcctccacaaggcctccgggcaggactgaaaagaacatatagtggtgtcagccaagacctgctggacgtgagctctgggtcccagtggaagcccatgctgtacgcagtggctttcctgcactccactgtccaggagaggcgcaagttcggtgccctggggtggaatatcccctacgaatttaaccaagcggactttaatgccactgtgcagttcatccaaaaccacttggatgacatggatgtcaaaaagggtgtctcctggaccaccatccgctacatgataggagagattcaatatggaggcagagtcactgacgactatgataagagattgttgaacacatttgctaaggtttggttcagtgaaaatatgtttggaccagatttcagtttttaccaaggatacaatattccaaaatgcagcacagtggataactatcttcagtatatccagagtttgcctgcctatgacagccctgaggtgtttgggctgcaccccaatgctgacatcacctaccagagcaagctggccaaggacgtgctggacaccatcctaggcatccaacccaaggacacctctggtggaggggatgagacccgggaggcggtggtggcccggctggctgatgatatgctggagaagctgcccccagactatgtcccctttgaagtaaaagagaggctgcagaagatggggccattccagcctatgaacattttcctcaggcaggaaatagacagaatgcaaagggtactcagccttgtccgcagcaccctcactgagctgaaacttgctattgatggcaccatcatcatgagcgaaaatctgcgagatgcattggattgcatgtttgatgctagaatccctgcttggtggaaaaaagcttcttgggtttctagtacactgggtttctggtttactgaacttatagaaagaaacagccagtttacctcgtgggttttcaatggccgacctcactgcttttggatgacgggtttttttaacccccagggatttttaactgcaatgcgacaggaaataactcgggccaacaaaggctgggctctggacaatatggtgctttgcaatgaagtcaccaaatggatgaaggacgacatttctgcccctcccacagagggtgtctatgtctatggcttatatcttgaaggtgctggctgggacaagaggaacatgaaactcattgaatcaaagccaaaagtgctctttgagttgatgcctgtcataaggatttatgcagaaaacaatactttacgagatcctcggttttactcctgtcccatctataagaagccagttcgaacggacttgaactacattgccgctgtggatctcaggacagcccagacccctgaacactgggtgctccgtggggttgcccttctgtgtgatgtcaagtaacatgtggggagtgtccccacccaatgctttggaaaatgcaagatctaaattattgtaacctttatttctgtatgactgctggacagtgtatgttaggtcgtttatgcaattaatgagctgcataggttttccccactccttaattggatgcttatattttacttgtttcatcattagtgaccaatgtctgagtttgttgaaaatgttatttagtgatataaaagtaaatttacagcatcctaatgaagtgtggccctcaaatccacagtagtatattttcttcttacttcgctccgaagactgaactgtgattataacagcaaatatatttgcatgtggacaaagattagatggcaagatagaaaaataagaacagatgtgatagcaagaattatagttggcttgaaaaaatgtgatgatcaggagaaaaaataaaaaaagggtagaaatattagacggtgcgtagggactttctatggacttttattaattaggaaacattatcaaaggaacttttcacgtatttttctttaaattctggttagatgttattaataattcttcatctaacctactgactagaaaatatagtcagtactaaattagaattgtggtttataaacttttggttagctctggatctgtataactgcatttttttggataaacagtttttggtaggtggataccgggagacaagtgtgggtccctctcactgggcttcattctgtggaccaggatcattatttcatgctcatgatcatgagagttaggactgagtggctcctgtgactcccaccatcttagatgatactgttttcttgtgagttctttcttttggtgtggattagtatatcagttgatttgtgtgaattgtggtgaaacaatcatttcattttgaaaagcaagtaatgaaaatgtcaacatcataggaattaataaaatgtttttactaaatgcct

SEQ ID NO: 344080 - DNA, 5115 bp, Homo sapiens
cttgcttgaagatgcagagcgatgcagacacaagatgcagacagcttccacgctcatcagtggcttggcaggtgaaaaagaaagatggacagagcaaagccaagagtttgctgcacaaactaaaagacttgtaggggatgtactgttggctacagcttttctatcttattctggtccatttaaccaagagtttcgtgatcttctgttaaatgactggcggaaggaaatgaaagcccggaaaattccatttggaaagaacctaaatctcagtgagatgttgattgatgctcctactattagtgaatggaacctccaaggtctgccaaatgatgacttgtccattcaaaatggaattattgtcacgaaggcatctcgttaccctttgttaattgatccacagactcaaggcaagatctggattaaaaataaagaaagccgaaatgaactccagatcacgtctttaaatcacaagtacttcagaaaccacctggaagacagcctttctcttggaaggcctttgcttattgaagatgttggagaggaactagatccagcactagataatgttttggaaagaaacttcattaaaactgggtctacctttaaggtgaaagttggtgacaaggaagtagatgtgttggatggctttagactctacattaccaccaaattgcctaacccagcctacacccctgagataagtgcccgtacctccatcattgacttcactgtcaccatgaaaggtctagaagatcagttactggggagggtcattctcacagagaagcaggaattggagaaagaaagaactcatctgatggaagatgtaactgcaaacaaaagaaggatgaaggaactagaagataacttgctttaccgcctgacaagtacccaggggtccctggtagaagatgaaagtctcattgtcgtgctgagtaacacaaaaaggacagccgaggaggtgacacagaagctagaaatttctgctgagacagaagttcaaattaactcagcccgggaggaatacagacctgtggctacgcggggcagcatcctctacttcctcattactgagatgcgcttggttaatgagatgtatcagacttcgcttcgccagtttctgggcttatttgacctttccttagccaggtctgtcaagagcccgattacaagcaagaggattgctaatatcatcgagcacatgacctacgaggtttataagtatgctgcccgagggctgtacgaggagcacaaattcctgttcaccttgttgcttaccctaaagattgacatccagaggaaccgagtcaagcatgaagagtttctcactcttattaaaggaggtgcctcattagaccttaaagcttgtcctccaaaaccatcaaaatggatcctggacataacatggctgaatttggtggaacttagcaaactcagacagttttcagatgtccttgaccagatatcgagaaatgagaaaatgtggaaaatttggtttgataaggaaaacccggaggaggaacctcttccaaatgcctatgataaatctcttgactgcttcagacgtcttctccttattagatcctggtgtcctgacagaaccatcgcccaggcccgcaagtacatcgtggactccatgggagaaaaatatgccgaaggtgttattttagacttggagaagacgtgggaggaatctgatccacggacgccactcatctgtctcctgtctatgggctcagaccccacagattccatcattgccttggggaagagattaaaaatagaaacccgttatgtgtccatgggccagggccaggaagtccatgctcggaagctcttgcagcagaccatggcgaacggaggatgggcacttctgcagaactgccatctgggacttgatttcatggatgagctgatggacataatcatagaaactgagcttgtacatgatgcgttccgcctctggatgaccaccgaggttcataagcagtttcccattacactccttcagatgtccattaaatttgccaacgatcctccacaaggcctccgggcaggactgaaaagaacatatagtggtgtcagccaagacctgctggacgtgagctctgggtcccagtggaagcccatgctgtacgcagtggctttcctgcactccactgtccaggagaggcgcaagttcggtgccctggggtggaatatcccctacgaatttaaccaagcggactttaatgccactgtgcagttcatccaaaaccacttggatgacatggatgtcaaaaagggtgtctcctggaccaccatccgctacatgataggagagattcaatatggaggcagagtcactgacgactatgataagagattgttgaacacatttgctaaggtttggttcagtgaaaatatgtttggaccagatttcagtttttaccaaggatacaatattccaaaatgcagcacagtggataactatcttcagtatatccagagtttgcctgcctatgacagccctgaggtgtttgggctgcaccccaatgctgacatcacctaccagagcaagctggccaaggacgtgctggacaccatcctaggcatccaacccaaggacacctctggtggaggggatgagacccgggaggcggtggtggcccggctggctgatgatatgctggagaagctgcccccagactatgtcccctttgaagtaaaagagaggctgcagaagatggggccattccagcctatgaacattttcctcaggcaggaaatagacagaatgcaaagggtactcagccttgtccgcagcaccctcactgagctgaaacttgctattgatggcaccatcatcatgagcgaaaatctgcgagatgcattggattgcatgtttgatgctagaatccctgcttggtggaaaaaagcttcttgggtttctagtacactgggtttctggtttactgaacttatagaaagaaacagccagtttacctcgtgggttttcaatggccgacctcactgcttttggatgacgggtttttttaacccccagggatttttaactgcaatgcgacaggaaataactcgggccaacaaaggctgggctctggacaatatggtgctttgcaatgaagtcaccaaatggatgaaggacgacatttctgcccctcccacagagggtgtctatgtctatggcttatatcttgaaggtgctggctgggacaagaggaacatgaaactcattgaatcaaagccaaaagtgctctttgagttgatgcctgtcataaggatttatgcagaaaacaatactttacgagatcctcggttttactcctgtcccatctataagaagccagttcgaacggacttgaactacattgccgctgtggatctcaggacagcccagacccctgaacactgggtgctccgtggggttgcccttctgtgtgatgtcaagtaacatgtggggagtgtccccacccaatgctttggaaaatgcaagatctaaattattgtaacctttatttctgtatgactgctggacagtgtatgttaggtcgtttatgcaattaatgagctgcataggttttccccactccttaattggatgcttatattttacttgtttcatcattagtgaccaatgtctgagtttgttgaaaatgttatttagtgatataaaagtaaatttacagcatcctaatgaagtgtggccctcaaatccacagtagtatattttcttcttacttcgctccgaagactgactagggtaagcagacagtatttctctgggaggaattattcttctgttaacgtggcctggtaacagccaagttcttgaaggtaacagggcaagtctgtgctgattttgcttctattgcctttcgtatttaggtcaagttaagagacttattttcagggtttcaagcagccaattaaaaataccttttaaaaaatagaaggaaatagaagaatggattaagaatgtaaatagaaaatttatgtaaacatagagaataaacgtagaacaatgcttaagcctacttataattaataatgaaatactaattgataattcttataataaaaattaaagctaaaagtaaatgatagcatgctctcagtaaaactgatccactcacaaattgctggagcaatgtaaatcaacccaacctttttgtaaaatgattaaatacagaaagagccataaaaatattcacacccttggatctttgttttctctacatcaaggaaacaatttaaaagactgaaaacagtctatataaaattgcatttaataacagaaaaaaatggaaaaatcataaatattcaatagtcaggctatggttaaggaaattaagagatatttggcaaccataaaaaacaattttgaagattccataatatgaaatggtagacccagactgttaagtgaaagatttagtttacaaaatattgagcacactgtgattataacagcaaatatatttgcatgtggacaaagattagatggcaagatagaaaaataagaacagatgtgatagcaagaattatagttggcttgaaaaaatgtgatgatcaggagaaaaaataaaaaaagggtagaaatattagacggtgcgtagggactttctatggacttttattaattaggaaacattatcaaaggaacttttcacgtatttttctttaaattctggttagatgttattaataattcttcatctaacctactgactagaaaatatagtcagtactaaattagaattgtggtttataaacttttggttagctctggatctgtataactgcatttttttggataaacagtttttggtaggtggataccgggagacaagtgtgggtccctctcactgggcttcattctgtggaccaggatcattatttcatgctcatgatcatgagagttaggactgagtggctcctgtgactcccaccatcttagatgatactgttttcttgtgagttctttcttttggtgtggattagtatatcagttgatttgtgtgaattgtggtgaaacaatcatttcattttgaaaagcaagtaatgaaaatgtcaacatcataggaattaataaaatgtttttactaaatgcct

SEQ ID NO: 344081 - DNA, 266 bp, Homo sapiens
atgacttaaatgttcatttttttctgtatagatactttatcatgttttcatgattttaggaattactgctttgttgatattcaaagtgtaaaactaaaactttatggttgtactttaattcttggcatgttgcctctatgtcccatttaaaataaaatacattctcattaactttagatgggaaataaggttgtatgttgatggatgaattttggcatgatgactgtactctcaataaaggctgaaaatgttgtataaaaacaaaa

SEQ ID NO: 344082 - DNA, 142 bp, Homo sapiens
ctggagcatgccagcaagtaaaaataaacctggaagagcactgggttcaagcccacgttccgtccatcccagagggccctcgagcaaggcctcctgcccaatcacatgtttttatcataatagattcttccaggtggtaaga

SEQ ID NO: 344083 - DNA, 543 bp, Homo sapiens
agaatcattcttatgctcttgattttttattttaatgacacacagtctccggagtagagatgaagagagaatttctaaacctggggctgtctcaactcctgtaaagcatgctgatgatcacacacctaaaacagtggaagaagttacagttgaaagaaatgagaaacaaacaccttctcttccagaaccaaagcctgtgtatgcccaagttgggcaaccagatgtggatttacctgtcagtccatctgatggtgtcctacctaattcaactcatgaagatgggattcttcggtaatacaattttaaagttgtattgttttctttgttcattattaacattattcagagtaggaatttaattgtaaaccatattgcatatattttttaaaatagtacataccacctaatactatgattatttttatatttaacattctgctacttatatatgatagtgagttagaaattagacaacaaaggaactttttggatgctttctttctcaccgctgtctcctgcctagcttttaaattaggaattaga

SEQ ID NO: 344084 - DNA, 567 bp, Homo sapiens
  misc_feature (455)..(455): n is a, c, g, or t
  misc_feature (499)..(499): n is a, c, g, or t
ccgtcgtaactccgtaccatttatcttcaatacacatcaccttcttgaatatagccatctctccgagcctgcaaagccagctcattctcagaatcaatcaaatttttctagttattcttcaaagggaaagcctcctgaagctgatggtgtggatagatcatttggcgagaaacgctatgaacccatccaggccactccccctcctcctccattgccctcgcagtatgcccagccatctcagcctgtcaccagcgcgtctctccacatacattctaagggagcacatggtgaaggtaattcagtgtcatttggaattgcaatatctggtggacgagataatcctcattttcagagtggggaaacgtcaatagtgatttcagatgtgctgaaaggaggaccagctgaaggacagctacaggaaaatgaccgagttgcaatggttaacggagtttcantggataatgttgaacatgcttttgctgttcagcaactaaggaanagtgggaaaaatgcaaaaattacaattagaaggaagaagaaggttcaaataccagtaagtcgtcctga

SEQ ID NO: 344085 - DNA, 291 bp, Homo sapiens
atgcctcggtactgggcaggcaatgataccacccactttgctacagtgataacagaccctgtgacaagataatgggaagtgtctctaatattaactgtgaattttggtatttcagtgtgctgaattgttggatgttcttgctcaccttattaaggacattttcttaaaaggtaaatgatttgtttttcttttcctttatcagagcacagcaatggaggaaacagctatatgggaacaacatacagtgacgcttcacagggtaagtttgtgttgcagtaagtaatctgtgta

SEQ ID NO: 344086 - DNA, 8501 bp, Homo sapiens
cagtcggcgccggtgaacgagagcaacgcttctgaccctgccggagctcctcggagatgaaagccatgacgcgccttgcagaaaatgcattccgccttccgtgggaacaacgccgaggcacgcggtgacagccgtgaccatgctgtttgcccagtgaaggaaacaactgtcgggtatcggctctgccggcctttccagccgcactcatgcatggggctcaccccatgatgtgcgtggcttgtcgaggagcaagtggacaagtctcttaaggaaagctttggtgcacaggcgctttctccttgggggcgaattctgccagaccttggataaaaacaaacaggaagactcgcacggcagcggaaactgtcttccaagttacttgggttacccggcttttccttccgcgcttggggtcgggaccccggccgctcgtcccgccccctccccgcctcgcctcgcctcgcctcgtccagccccgcccccgccgggccgggcatgctcagtgggccgggccggcaggtttgcgtggccgctgagttgccggcgccggctgagccagcggacgccgcgttccttggcggccgccggttcccgggaagttacgtggcgaagccggcttccgaggagacgccgggaggccacgggtgctgctgacgggcgggcgaccgggcgaggccgacgtggccgggctgcgaaagctgcgggaggccgagtgggtggccgcgctcggagggaggtgccggtcgggcgcgccccgtggagaagacccgggcggggcgggcgcttcccggacttttgtccgagttgaattccctccccctgggccgggcccttccggccgcccccgcccgtgccccgctcgctctcgggagatgtttatttgggctgtggcgtgaggagcgggcgggccagcgccgcggagtttcgggtccgaggagcctcgcgcggcgctggagagagacaagatgtccgccagagctgcggccgccaagagcacagcaatggaggaaacagctatatgggaacaacatacagtgacgcttcacagggctcctggatttggatttggaattgcaatatctggtggacgagataatcctcattttcagagtggggaaacgtcaatagtgatttcagatgtgctgaaaggaggaccagctgaaggacagctacaggaaaatgaccgagttgcaatggttaacggagtttcaatggataatgttgaacatgcttttgctgttcagcaactaaggaaaagtgggaaaaatgcaaaaattacaattagaaggaagaagaaagttcaaataccagtaagtcgtcctgatcctgaaccagtatctgataatgaagaagatagttatgatgaggaaatacatgatccaagaagtggccggagtggtgtggttaacagaaggagtgagaagatttggccgagggatagaagtgcaagtagagagaggagcttgtccccgcggtcagacaggcggtcagtggcttccagccagcctgctaaacctactaaagtcacactggtgaaatcccggaaaaatgaagaatatggtcttcgattggcaagccatatatttgttaaggaaatttcacaagatagtttggcagcaagagatggcaatattcaagaaggtgatgttgtattgaagataaatggtactgtgacagaaaatatgtcattgacagatgcaaagacattgatagaaaggtctaaaggcaaattaaaaatggtagttcaaagagatgaacgggctacgctattgaatgtccctgatctttctgacagcatccactctgctaatgcctctgagagagacgacatttcagaaattcagtcactggcatcagatcattctggtcgatcacacgataggcctccccgccgcagccggtcacgatctcctgaccagcggtcagagccttctgatcattccaggcactcgccgcagcagccaagcaatggcagtctccggagtagagatgaagagagaatttctaaacctggggctgtctcaactcctgtaaagcatgctgatgatcacacacctaaaacagtggaagaagttacagttgaaagaaatgagaaacaaacaccttctcttccagaaccaaagcctgtgtatgcccaagttgggcaaccagatgtggatttacctgtcagtccatctgatggtgtcctacctaattcaactcatgaagatgggattcttcggcccagcatgaaattggtaaaattcagaaaaggagatagtgtgggtttgcggctggctggtggaaatgatgttggaatatttgtagctggcgttctagaagatagccctgcagccaaggaaggcttagaggaaggtgatcaaattctcagggtaaacaacgtagattttacaaatatcataagagaagaagccgtccttttcctgcttgacctccctaaaggagaagaagtgaccatattggctcagaagaagaaggatgtttatcgtcgcattgtagaatcagatgtaggagattctttctatattagaacccattttgaatatgaaaaggaatctccctatggacttagttttaacaaaggagaggtgttccgtgctgtggataccttgtacaatggaaaactgggctcttggcttgctattcgaattggtaaaaatcataaggaggtagaacgaggcatcatccctaataagaacagagctgagcagctagccagtgtacagtatacacttccaaaaacagcaggcggagaccgtgctgacttctggagattcagaggtcttcgcagctccaagagaaatcttcgaaaaagcagagaggatttgtccgctcagcctgttcaaacaaagtttccagcttatgaaagagtggttcttcgagaagctggatttctgaggcctgtaaccatttttggaccaatagctgatgttgccagagaaaagctggcaagagaagaaccagatatttatcaaattgcaaagagtgaaccacgagacgctggaactgaccaacgtagctctggcattattcgcctgcatacaataaagcaaatcatagatcaagacaaacatgctttattagatgtaacaccaaatgcagttgatcgtcttaactatgcccagtggtatccaattgttgtatttcttaaccctgattctaagcaaggagtaaaaacaatgagaatgaggttatgtccagaatctcggaaaagtgccaggaagttatacgagcgatctcataaacttcgtaaaaataatcaccatctttttacaactacaattaacttaaattcaatgaatgatggttggtatggtgcgctgaaagaagcaattcaacaacagcaaaaccagctggtatgggtttccgagggaaaggcggatggtgctacaagtgatgaccttgatttgcatgatgatcgtctgtcctacctgtcagctccaggtagtgaatactcaatgtatagcacggacagtagacacacttctgactatgaagacacagacacagaaggcggggcctacactgatcaagaactagatgaaactcttaatgatgaggttgggactccaccggagtctgccattacacggtcctctgagcctgtaagagaggactcctctggaatgcatcatgaaaaccaaacatatcctccttactcaccacaagcgcagccacaaccaattcatagaatagactcccctggatttaagccagcctctcaacagaaagcagaagcttcatctccagtcccttacctttcgcctgaaacaaacccagcatcatcaacctctgctgttaatcataatgtaaatttaactaatgtcagactggaggagcccaccccagctccttccacctcttactcaccacaagctgattctttaagaacaccaagtactgaggcagctcacataatgctaagagatcaagaaccatcattgtcgtcgcatgtagatccaacaaaggtgtatagaaaggatccatatcccgaggaaatgatgaggcagaaccatgttttgaaacagccagccgttagtcacccagggcacaggccagacaaagagcctaatctgacctatgaaccccaactcccatacgtagagaaacaagccagcagagacctcgagcagcccacatacagatacgagtcctcaagctatacggaccagttttctcgaaactatgaacatcgtctgcgatacgaagatcgcgtccccatgtatgaagaacagtggtcatattatgatgacaaacagccctacccatctcggccaccttttgataatcagcactctcaagaccttgactccagacagcatcccgaagagtcctcagaacgagggtactttccacgttttgaagagccagcccctctgtcttacgacagcagaccacgttacgaacaggcacctagagcatccgccctgcggcacgaagagcagccagctcctgggtatgacacacatggtagactcagaccggaagcccagccccacccttcagcagggcccaagcctgcagagtccaagcagtattttgagcaatattcacgcagttacgagcaagtaccaccccaaggatttacctctagagcaggtcattttgagcctctccatggtgctgcagctgtccctccgctgataccttcatctcagcataagccagaagctctgccttcaaacaccaaaccactgcctccacccccaactcaaaccgaagaagaggaagatccagcaatgaagccacagtctgtactcaccagagttaagatgtttgaaaacaaaagatctgcatccttagagaccaagaaggatgtaaatgacactggcagttttaagcctccagaagtagcatctaaaccttcaggtgctcccatcattggtcccaaacccacttctcagaatcaattcagtgaacatgacaaaactctgtacaggatcccagaacctcaaaaacctcaactgaagccacctgaagatattgttcggtccaatcattatgaccctgaagaagatgaagaatattatcgaaaacagctgtcatactttgaccgaagaagttttgagaataagcctcctgcacacattgctgccagccatctctccgagcctgcaaagccagctcattctcagaatcaatcaaatttttctagttattcttcaaagggaaagcctcctgaagctgatggtgtggatagatcatttggcgagaaacgctatgaacccatccaggccactccccctcctcctccattgccctcgcagtatgcccagccatctcagcctgtcaccagcgcgtctctccacatacattctaagggagcacatggtgaaggtaattcagtgtcattggattttcagaattccttagtgtccaaaccagacccacctccatctcagaataagccagcaactttcagaccaccaaaccgagaagatactgctcaggcagctttctatccccagaaaagttttccagataaagccccagttaatggaactgaacagactcagaaaacagtcactccagcatacaatcgattcacaccaaaaccatatacaagttctgcccgaccatttgaacgcaagtttgaaagtcctaaattcaatcacaatcttctgccaagtgaaactgcacataaacctgacttgtcttcaaaaactcccacttctccaaaaactcttgtgaaatcgcacagtttggcacagcctcctgagtttgacagtggagttgaaactttctctatccatgcagagaagcctaaatatcaaataaataatatcagcacagtgcctaaagctattcctgtgagtccttcagctgtggaagaggatgaagatgaagatggtcatactgtggtggccacagcccgaggcatatttaacagcaatgggggcgtgctgagttccatagaaactggtgttagtataattatccctcaaggagccattcccgaaggagttgagcaggaaatctatttcaaggtctgccgggacaacagcatccttccacctttagataaagagaaaggtgaaacactgctgagtcctttggtgatgtgtggtccccatggcctcaagttcctgaagcctgtggagctgcgcttaccacactgtgcgtccatgactcctgacggttggtcttttgctctaaaatcatccgactcctcgtcgggtgatcctaaaacctggcaaaacaagtgtcttcccggagatccaaattatctcgttggagcaaactgtgtttctgtccttattgaccacttttaactcttgaaatataggaacttaaataatgtgaaactggattaaacttaatctaaatggaaccactctatcaagtattataccttttttagagttgatactacagtttgttagtatgaggcatttgtttgaactgataaagatgagtgagcatgcccctgaaccatggtcggaaaacatgctacacactgcatgtttgtgattgacgggactgttggtattggctagaggttcaaagatattttgctttgtgatttttgtaatttttttatcgtcactgcttaacttcacatattgatttccgttaaaataccagccagtaaatgggggtgcatttgaggtctgttctttccaaagtacactgtttcaaactttactatggccctggcctagcatacgtacacattttattttattatgcatgaagtaatatgcacacattttttaaatgcacctggaatatataaccagtgttgtggatttaacagaaatgtacagcaaggagatttacaactgggggagggtgaagtgaagacaatgacttactgtacatgaaaacacatttttcttagggaaggatacaaaagcatgtgagactggttccatggcctcttcagatctctaacttcaccatattaccacagacatactaaccagcagaaatgccttaccctcatgttcttaattcttagctcattctccttgtgttactaagtttttatggcttttgtgcattatctagatactgtatcatgacaaagactgagtacgttgtgcatttggtggtttcagaaatgtgttatcacccagaagaaaatagtggtgtgatttggggatatttttttcttttcttttcttttcttttttttttttttttgacaaggggcagtggtggttttctgttctttctggctatgcatttgaaaattttgatgttttaaggatgcttgtacataatgcgtgcataccacttttgttcttggtttgtaaattaacttttataaactttaccttttttatacataaacaagaccacgtttctaaaggctacctttgtattctctcctgtacctcttgagccttgaactttgacctctgcagcaataaagcagcgtttctatgacacatgcaaggtcattttttttaagaaaaaggatgcacagagttgttacatttttaagtgctgcatttaaaagatacagttactcagaattctctagtttgattaaattcttgcaaagtatccctactgtaatttgtgatacaatgctgtgccctaaagtgtatttttttactaatagacaatttattatggcacatcagcacgatttctgtttagataatacaccactacattctgttaatcattaggtgtgactgaatttcttttgccgttattaaaaatctcaaatttctaaatctccaaaataaaactttttaaaataaagtgctggcttggtctgtttgcccactgttttctagtttcatgcagctttataatcctgttttaaaatcctgcacacaaatccctatcacccagcgtcacctaccacctcgtcgtctggtgttgcatgcagaatttctccccttggccagcatgtacagatgggtgggcagtgctcatctgaagggctcagactgaagtggggcagaaggacctggagacagagtgggagaaggcagcaggccgacttccccctgtgggtaaacacacacccctgcgtggagaaacacccctgcatggggacacacgtgcgtttgtgtgtgtgcgtgtaaccatttgtatatggttttattccccagataaatagcacgggcattgtttaatgtcacccacatttgggggaagaaaatgggtttagtgagcataaatattccattgtggacatcctacttacttaactgccacccctgttgacatttggattattgctatagtgtttcagtaaacacctttgtggactgaatccatctatgtggattttatttttttcatctttgttaaggtataatttacatagagtaagttactgtttttaaaatgtatagttcaaattttgacaaacacatactgtttatttaccacggttaatacatacaacagtttctttatcttctctaatcatttgtacccctttatactcaacccttcttccagcccctggcaggatgatctcttctgtttctatagttgcctttttgacagtgtcatataaatggaatcatacaata

SEQ ID NO: 344087 - DNA, 8261 bp, Homo sapiens
cagtcggcgccggtgaacgagagcaacgcttctgaccctgccggagctcctcggagatgaaagccatgacgcgccttgcagaaaatgcattccgccttccgtgggaacaacgccgaggcacgcggtgacagccgtgaccatgctgtttgcccagtgaaggaaacaactgtcgggtatcggctctgccggcctttccagccgcactcatgcatggggctcaccccatgatgtgcgtggcttgtcgaggagcaagtggacaagtctcttaaggaaagctttggtgcacaggcgctttctccttgggggcgaattctgccagaccttggataaaaacaaacaggaagactcgcacggcagcggaaactgtcttccaagttacttgggttacccggcttttccttccgcgcttggggtcgggaccccggccgctcgtcccgccccctccccgcctcgcctcgcctcgcctcgtccagccccgcccccgccgggccgggcatgctcagtgggccgggccggcaggtttgcgtggccgctgagttgccggcgccggctgagccagcggacgccgcgttccttggcggccgccggttcccgggaagttacgtggcgaagccggcttccgaggagacgccgggaggccacgggtgctgctgacgggcgggcgaccgggcgaggccgacgtggccgggctgcgaaagctgcgggaggccgagtgggtggccgcgctcggagggaggtgccggtcgggcgcgccccgtggagaagacccgggcggggcgggcgcttcccggacttttgtccgagttgaattccctccccctgggccgggcccttccggccgcccccgcccgtgccccgctcgctctcgggagatgtttatttgggctgtggcgtgaggagcgggcgggccagcgccgcggagtttcgggtccgaggagcctcgcgcggcgctggagagagacaagatgtccgccagagctgcggccgccaagagcacagcaatggaggaaacagctatatgggaacaacatacagtgacgcttcacagggctcctggatttggatttggaattgcaatatctggtggacgagataatcctcattttcagagtggggaaacgtcaatagtgatttcagatgtgctgaaaggaggaccagctgaaggacagctacaggaaaatgaccgagttgcaatggttaacggagtttcaatggataatgttgaacatgcttttgctgttcagcaactaaggaaaagtgggaaaaatgcaaaaattacaattagaaggaagaagaaagttcaaataccagtaagtcgtcctgatcctgaaccagtatctgataatgaagaagatagttatgatgaggaaatacatgatccaagaagtggccggagtggtgtggttaacagaaggagtgagaagatttggccgagggatagaagtgcaagtagagagaggagcttgtccccgcggtcagacaggcggtcagtggcttccagccagcctgctaaacctactaaagtcacactggtgaaatcccggaaaaatgaagaatatggtcttcgattggcaagccatatatttgttaaggaaatttcacaagatagtttggcagcaagagatggcaatattcaagaaggtgatgttgtattgaagataaatggtactgtgacagaaaatatgtcattgacagatgcaaagacattgatagaaaggtctaaaggcaaattaaaaatggtagttcaaagagatgaacgggctacgctattgaatgtccctgatctttctgacagcatccactctgctaatgcctctgagagagacgacatttcagaaattcagtcactggcatcagatcattctggtcgatcacacgataggcctccccgccgcagccggtcacgatctcctgaccagcggtcagagccttctgatcattccaggcactcgccgcagcagccaagcaatggcagtctccggagtagagatgaagagagaatttctaaacctggggctgtctcaactcctgtaaagcatgctgatgatcacacacctaaaacagtggaagaagttacagttgaaagaaatgagaaacaaacaccttctcttccagaaccaaagcctgtgtatgcccaagttgggcaaccagatgtggatttacctgtcagtccatctgatggtgtcctacctaattcaactcatgaagatgggattcttcggcccagcatgaaattggtaaaattcagaaaaggagatagtgtgggtttgcggctggctggtggaaatgatgttggaatatttgtagctggcgttctagaagatagccctgcagccaaggaaggcttagaggaaggtgatcaaattctcagggtaaacaacgtagattttacaaatatcataagagaagaagccgtccttttcctgcttgacctccctaaaggagaagaagtgaccatattggctcagaagaagaaggatgtttatcgtcgcattgtagaatcagatgtaggagattctttctatattagaacccattttgaatatgaaaaggaatctccctatggacttagttttaacaaaggagaggtgttccgtgctgtggataccttgtacaatggaaaactgggctcttggcttgctattcgaattggtaaaaatcataaggaggtagaacgaggcatcatccctaataagaacagagctgagcagctagccagtgtacagtatacacttccaaaaacagcaggcggagaccgtgctgacttctggagattcagaggtcttcgcagctccaagagaaatcttcgaaaaagcagagaggatttgtccgctcagcctgttcaaacaaagtttccagcttatgaaagagtggttcttcgagaagctggatttctgaggcctgtaaccatttttggaccaatagctgatgttgccagagaaaagctggcaagagaagaaccagatatttatcaaattgcaaagagtgaaccacgagacgctggaactgaccaacgtagctctggcattattcgcctgcatacaataaagcaaatcatagatcaagacaaacatgctttattagatgtaacaccaaatgcagttgatcgtcttaactatgcccagtggtatccaattgttgtatttcttaaccctgattctaagcaaggagtaaaaacaatgagaatgaggttatgtccagaatctcggaaaagtgccaggaagttatacgagcgatctcataaacttcgtaaaaataatcaccatctttttacaactacaattaacttaaattcaatgaatgatggttggtatggtgcgctgaaagaagcaattcaacaacagcaaaaccagctggtatgggtttccgagggaaaggcggatggtgctacaagtgatgaccttgatttgcatgatgatcgtctgtcctacctgtcagctccaggtagtgaatactcaatgtatagcacggacagtagacacacttctgactatgaagacacagacacagaaggcggggcctacactgatcaagaactagatgaaactcttaatgatgaggttgggactccaccggagtctgccattacacggtcctctgagcctgtaagagaggactcctctggaatgcatcatgaaaaccaaacatatcctccttactcaccacaagcgcagccacaaccaattcatagaatagactcccctggatttaagccagcctctcaacaggtgtatagaaaggatccatatcccgaggaaatgatgaggcagaaccatgttttgaaacagccagccgttagtcacccagggcacaggccagacaaagagcctaatctgacctatgaaccccaactcccatacgtagagaaacaagccagcagagacctcgagcagcccacatacagatacgagtcctcaagctatacggaccagttttctcgaaactatgaacatcgtctgcgatacgaagatcgcgtccccatgtatgaagaacagtggtcatattatgatgacaaacagccctacccatctcggccaccttttgataatcagcactctcaagaccttgactccagacagcatcccgaagagtcctcagaacgagggtactttccacgttttgaagagccagcccctctgtcttacgacagcagaccacgttacgaacaggcacctagagcatccgccctgcggcacgaagagcagccagctcctgggtatgacacacatggtagactcagaccggaagcccagccccacccttcagcagggcccaagcctgcagagtccaagcagtattttgagcaatattcacgcagttacgagcaagtaccaccccaaggatttacctctagagcaggtcattttgagcctctccatggtgctgcagctgtccctccgctgataccttcatctcagcataagccagaagctctgccttcaaacaccaaaccactgcctccacccccaactcaaaccgaagaagaggaagatccagcaatgaagccacagtctgtactcaccagagttaagatgtttgaaaacaaaagatctgcatccttagagaccaagaaggatgtaaatgacactggcagttttaagcctccagaagtagcatctaaaccttcaggtgctcccatcattggtcccaaacccacttctcagaatcaattcagtgaacatgacaaaactctgtacaggatcccagaacctcaaaaacctcaactgaagccacctgaagatattgttcggtccaatcattatgaccctgaagaagatgaagaatattatcgaaaacagctgtcatactttgaccgaagaagttttgagaataagcctcctgcacacattgctgccagccatctctccgagcctgcaaagccagctcattctcagaatcaatcaaatttttctagttattcttcaaagggaaagcctcctgaagctgatggtgtggatagatcatttggcgagaaacgctatgaacccatccaggccactccccctcctcctccattgccctcgcagtatgcccagccatctcagcctgtcaccagcgcgtctctccacatacattctaagggagcacatggtgaaggtaattcagtgtcattggattttcagaattccttagtgtccaaaccagacccacctccatctcagaataagccagcaactttcagaccaccaaaccgagaagatactgctcaggcagctttctatccccagaaaagttttccagataaagccccagttaatggaactgaacagactcagaaaacagtcactccagcatacaatcgattcacaccaaaaccatatacaagttctgcccgaccatttgaacgcaagtttgaaagtcctaaattcaatcacaatcttctgccaagtgaaactgcacataaacctgacttgtcttcaaaaactcccacttctccaaaaactcttgtgaaatcgcacagtttggcacagcctcctgagtttgacagtggagttgaaactttctctatccatgcagagaagcctaaatatcaaataaataatatcagcacagtgcctaaagctattcctgtgagtccttcagctgtggaagaggatgaagatgaagatggtcatactgtggtggccacagcccgaggcatatttaacagcaatgggggcgtgctgagttccatagaaactggtgttagtataattatccctcaaggagccattcccgaaggagttgagcaggaaatctatttcaaggtctgccgggacaacagcatccttccacctttagataaagagaaaggtgaaacactgctgagtcctttggtgatgtgtggtccccatggcctcaagttcctgaagcctgtggagctgcgcttaccacactgtgcgtccatgactcctgacggttggtcttttgctctaaaatcatccgactcctcgtcgggtgatcctaaaacctggcaaaacaagtgtcttcccggagatccaaattatctcgttggagcaaactgtgtttctgtccttattgaccacttttaactcttgaaatataggaacttaaataatgtgaaactggattaaacttaatctaaatggaaccactctatcaagtattataccttttttagagttgatactacagtttgttagtatgaggcatttgtttgaactgataaagatgagtgagcatgcccctgaaccatggtcggaaaacatgctacacactgcatgtttgtgattgacgggactgttggtattggctagaggttcaaagatattttgctttgtgatttttgtaatttttttatcgtcactgcttaacttcacatattgatttccgttaaaataccagccagtaaatgggggtgcatttgaggtctgttctttccaaagtacactgtttcaaactttactatggccctggcctagcatacgtacacattttattttattatgcatgaagtaatatgcacacattttttaaatgcacctggaatatataaccagtgttgtggatttaacagaaatgtacagcaaggagatttacaactgggggagggtgaagtgaagacaatgacttactgtacatgaaaacacatttttcttagggaaggatacaaaagcatgtgagactggttccatggcctcttcagatctctaacttcaccatattaccacagacatactaaccagcagaaatgccttaccctcatgttcttaattcttagctcattctccttgtgttactaagtttttatggcttttgtgcattatctagatactgtatcatgacaaagactgagtacgttgtgcatttggtggtttcagaaatgtgttatcacccagaagaaaatagtggtgtgatttggggatatttttttcttttcttttcttttcttttttttttttttttgacaaggggcagtggtggttttctgttctttctggctatgcatttgaaaattttgatgttttaaggatgcttgtacataatgcgtgcataccacttttgttcttggtttgtaaattaacttttataaactttaccttttttatacataaacaagaccacgtttctaaaggctacctttgtattctctcctgtacctcttgagccttgaactttgacctctgcagcaataaagcagcgtttctatgacacatgcaaggtcattttttttaagaaaaaggatgcacagagttgttacatttttaagtgctgcatttaaaagatacagttactcagaattctctagtttgattaaattcttgcaaagtatccctactgtaatttgtgatacaatgctgtgccctaaagtgtatttttttactaatagacaatttattatggcacatcagcacgatttctgtttagataatacaccactacattctgttaatcattaggtgtgactgaatttcttttgccgttattaaaaatctcaaatttctaaatctccaaaataaaactttttaaaataaagtgctggcttggtctgtttgcccactgttttctagtttcatgcagctttataatcctgttttaaaatcctgcacacaaatccctatcacccagcgtcacctaccacctcgtcgtctggtgttgcatgcagaatttctccccttggccagcatgtacagatgggtgggcagtgctcatctgaagggctcagactgaagtggggcagaaggacctggagacagagtgggagaaggcagcaggccgacttccccctgtgggtaaacacacacccctgcgtggagaaacacccctgcatggggacacacgtgcgtttgtgtgtgtgcgtgtaaccatttgtatatggttttattccccagataaatagcacgggcattgtttaatgtcacccacatttgggggaagaaaatgggtttagtgagcataaatattccattgtggacatcctacttacttaactgccacccctgttgacatttggattattgctatagtgtttcagtaaacacctttgtggactgaatccatctatgtggattttatttttttcatctttgttaaggtataatttacatagagtaagttactgtttttaaaatgtatagttcaaattttgacaaacacatactgtttatttaccacggttaatacatacaacagtttctttatcttctctaatcatttgtacccctttatactcaacccttcttccagcccctggcaggatgatctcttctgtttctatagttgcctttttgacagtgtcatataaatggaatcatacaata

SEQ ID NO: 344088 - DNA, 6910 bp, Homo sapiens
cgcgctagacggctaacgggcagcatggatgaactctgggagttgatacacaaggaggaacaaacacttccacaggacttctgaatccctcaagcaggtaggagattccatatgaagcagggcttcagcagcttcaatggtcttatctgtacagtgtgcattactgctgtgaactgatgcttccacggcccggatgagcagatccagctggttcgtgggtccctcatgcagagacgacatttcagaaattcagtcactggcatcagatcattctggtcgatcacacgataggcctccccgccgcagccggtcacgatctcctgaccagcggtcagagccttctgatcattccaggcactcgccgcagcagccaagcaatggcagtctccggagtagagatgaagagagaatttctaaacctggggctgtctcaactcctgtaaagcatgctgatgatcacacacctaaaacagtggaagaagttacagttgaaagaaatgagaaacaaacaccttctcttccagaaccaaagcctgtgtatgcccaagttgggcaaccagatgtggatttacctgtcagtccatctgatggtgtcctacctaattcaactcatgaagatgggattcttcggcccagcatgaaattggtaaaattcagaaaaggagatagtgtgggtttgcggctggctggtggaaatgatgttggaatatttgtagctggcgttctagaagatagccctgcagccaaggaaggcttagaggaaggtgatcaaattctcagggtaaacaacgtagattttacaaatatcataagagaagaagccgtccttttcctgcttgacctccctaaaggagaagaagtgaccatattggctcagaagaagaaggatgtttatcgtcgcattgtagaatcagatgtaggagattctttctatattagaacccattttgaatatgaaaaggaatctccctatggacttagttttaacaaaggagaggtgttccgtgctgtggataccttgtacaatggaaaactgggctcttggcttgctattcgaattggtaaaaatcataaggaggtagaacgaggcatcatccctaataagaacagagctgagcagctagccagtgtacagtatacacttccaaaaacagcaggcggagaccgtgctgacttctggagattcagaggtcttcgcagctccaagagaaatcttcgaaaaagcagagaggatttgtccgctcagcctgttcaaacaaagtttccagcttatgaaagagtggttcttcgagaagctggatttctgaggcctgtaaccatttttggaccaatagctgatgttgccagagaaaagctggcaagagaagaaccagatatttatcaaattgcaaagagtgaaccacgagacgctggaactgaccaacgtagctctggcattattcgcctgcatacaataaagcaaatcatagatcaagacaaacatgctttattagatgtaacaccaaatgcagttgatcgtcttaactatgcccagtggtatccaattgttgtatttcttaaccctgattctaagcaaggagtaaaaacaatgagaatgaggttatgtccagaatctcggaaaagtgccaggaagttatacgagcgatctcataaacttcgtaaaaataatcaccatctttttacaactacaattaacttaaattcaatgaatgatggttggtatggtgcgctgaaagaagcaattcaacaacagcaaaaccagctggtatgggtttccgagggaaaggcggatggtgctacaagtgatgaccttgatttgcatgatgatcgtctgtcctacctgtcagctccaggtagtgaatactcaatgtatagcacggacagtagacacacttctgactatgaagacacagacacagaaggcggggcctacactgatcaagaactagatgaaactcttaatgatgaggttgggactccaccggagtctgccattacacggtcctctgagcctgtaagagaggactcctctggaatgcatcatgaaaaccaaacatatcctccttactcaccacaagcgcagccacaaccaattcatagaatagactcccctggatttaagccagcctctcaacagaaagcagaagcttcatctccagtcccttacctttcgcctgaaacaaacccagcatcatcaacctctgctgttaatcataatgtaaatttaactaatgtcagactggaggagcccaccccagctccttccacctcttactcaccacaagctgattctttaagaacaccaagtactgaggcagctcacataatgctaagagatcaagaaccatcattgtcgtcgcatgtagatccaacaaaggtgtatagaaaggatccatatcccgaggaaatgatgaggcagaaccatgttttgaaacagccagccgttagtcacccagggcacaggccagacaaagagcctaatctgacctatgaaccccaactcccatacgtagagaaacaagccagcagagacctcgagcagcccacatacagatacgagtcctcaagctatacggaccagttttctcgaaactatgaacatcgtctgcgatacgaagatcgcgtccccatgtatgaagaacagtggtcatattatgatgacaaacagccctacccatctcggccaccttttgataatcagcactctcaagaccttgactccagacagcatcccgaagagtcctcagaacgagggtactttccacgttttgaagagccagcccctctgtcttacgacagcagaccacgttacgaacaggcacctagagcatccgccctgcggcacgaagagcagccagctcctgggtatgacacacatggtagactcagaccggaagcccagccccacccttcagcagggcccaagcctgcagagtccaagcagtattttgagcaatattcacgcagttacgagcaagtaccaccccaaggatttacctctagagcaggtcattttgagcctctccatggtgctgcagctgtccctccgctgataccttcatctcagcataagccagaagctctgccttcaaacaccaaaccactgcctccacccccaactcaaaccgaagaagaggaagatccagcaatgaagccacagtctgtactcaccagagttaagatgtttgaaaacaaaagatctgcatccttagagaccaagaaggatgtaaatgacactggcagttttaagcctccagaagtagcatctaaaccttcaggtgctcccatcattggtcccaaacccacttctcagaatcaattcagtgaacatgacaaaactctgtacaggatcccagaacctcaaaaacctcaactgaagccacctgaagatattgttcggtccaatcattatgaccctgaagaagatgaagaatattatcgaaaacagctgtcatactttgaccgaagaagttttgagaataagcctcctgcacacattgctgccagccatctctccgagcctgcaaagccagctcattctcagaatcaatcaaatttttctagttattcttcaaagggaaagcctcctgaagctgatggtgtggatagatcatttggcgagaaacgctatgaacccatccaggccactccccctcctcctccattgccctcgcagtatgcccagccatctcagcctgtcaccagcgcgtctctccacatacattctaagggagcacatggtgaaggtaattcagtgtcattggattttcagaattccttagtgtccaaaccagacccacctccatctcagaataagccagcaactttcagaccaccaaaccgagaagatactgctcaggcagctttctatccccagaaaagttttccagataaagccccagttaatggaactgaacagactcagaaaacagtcactccagcatacaatcgattcacaccaaaaccatatacaagttctgcccgaccatttgaacgcaagtttgaaagtcctaaattcaatcacaatcttctgccaagtgaaactgcacataaacctgacttgtcttcaaaaactcccacttctccaaaaactcttgtgaaatcgcacagtttggcacagcctcctgagtttgacagtggagttgaaactttctctatccatgcagagaagcctaaatatcaaataaataatatcagcacagtgcctaaagctattcctgtgagtccttcagctgtggaagaggatgaagatgaagatggtcatactgtggtggccacagcccgaggcatatttaacagcaatgggggcgtgctgagttccatagaaactggtgttagtataattatccctcaaggagccattcccgaaggagttgagcaggaaatctatttcaaggtctgccgggacaacagcatccttccacctttagataaagagaaaggtgaaacactgctgagtcctttggtgatgtgtggtccccatggcctcaagttcctgaagcctgtggagctgcgcttaccacactgtgcgtccatgactcctgacggttggtcttttgctctaaaatcatccgactcctcgtcgggtgatcctaaaacctggcaaaacaagtgtcttcccggagatccaaattatctcgttggagcaaactgtgtttctgtccttattgaccacttttaactcttgaaatataggaacttaaataatgtgaaactggattaaacttaatctaaatggaaccactctatcaagtattataccttttttagagttgatactacagtttgttagtatgaggcatttgtttgaactgataaagatgagtgagcatgcccctgaaccatggtcggaaaacatgctacacactgcatgtttgtgattgacgggactgttggtattggctagaggttcaaagatattttgctttgtgatttttgtaatttttttatcgtcactgcttaacttcacatattgatttccgttaaaataccagccagtaaatgggggtgcatttgaggtctgttctttccaaagtacactgtttcaaactttactatggccctggcctagcatacgtacacattttattttattatgcatgaagtaatatgcacacattttttaaatgcacctggaatatataaccagtgttgtggatttaacagaaatgtacagcaaggagatttacaactgggggagggtgaagtgaagacaatgacttactgtacatgaaaacacatttttcttagggaaggatacaaaagcatgtgagactggttccatggcctcttcagatctctaacttcaccatattaccacagacatactaaccagcagaaatgccttaccctcatgttcttaattcttagctcattctccttgtgttactaagtttttatggcttttgtgcattatctagatactgtatcatgacaaagactgagtacgttgtgcatttggtggtttcagaaatgtgttatcacccagaagaaaatagtggtgtgatttggggatatttttttcttttcttttcttttcttttttttttttttttgacaaggggcagtggtggttttctgttctttctggctatgcatttgaaaattttgatgttttaaggatgcttgtacataatgcgtgcataccacttttgttcttggtttgtaaattaacttttataaactttaccttttttatacataaacaagaccacgtttctaaaggctacctttgtattctctcctgtacctcttgagccttgaactttgacctctgcagcaataaagcagcgtttctatgacacatgcaaggtcattttttttaagaaaaaggatgcacagagttgttacatttttaagtgctgcatttaaaagatacagttactcagaattctctagtttgattaaattcttgcaaagtatccctactgtaatttgtgatacaatgctgtgccctaaagtgtatttttttactaatagacaatttattatggcacatcagcacgatttctgtttagataatacaccactacattctgttaatcattaggtgtgactgaatttcttttgccgttattaaaaatctcaaatttctaaatctccaaaataaaactttttaaaataaagtgctggcttggtctgtttgcccactgttttctagtttcatgcagctttataatcctgttttaaaatcctgcacacaaatccctatcacccagcgtcacctaccacctcgtcgtctggtgttgcatgcagaatttctccccttggccagcatgtacagatgggtgggcagtgctcatctgaagggctcagactgaagtggggcagaaggacctggagacagagtgggagaaggcagcaggccgacttccccctgtgggtaaacacacacccctgcgtggagaaacacccctgcatggggacacacgtgcgtttgtgtgtgtgcgtgtaaccatttgtatatggttttattccccagataaatagcacgggcattgtttaatgtcacccacatttgggggaagaaaatgggtttagtgagcataaatattccattgtggacatcctacttacttaactgccacccctgttgacatttggattattgctatagtgtttcagtaaacacctttgtggactgaatccatctatgtggattttatttttttcatctttgttaaggtataatttacatagagtaagttactgtttttaaaatgtatagttcaaattttgacaaacacatactgtttatttaccacggttaatacatacaacagtttctttatcttctctaatcatttgtacccctttatactcaacccttcttccagcccctggcaggatgatctcttctgtttctatagttgcctttttgacagtgtcatataaatggaatcatacaata

SEQ ID NO: 344089 - DNA, 5667 bp, Homo sapiens
gctacacaaactaagttacctatgacgtctatgaaagagtggacttcgagaagctcgcattctgcggctgtaagcgatagtggaaccagttatgctcaggttgccagagaaaagctgacaggcacagaccagatattttcacatgcaaagagtgaaccacgagacgctggaactgaccaacgtagctctggcattattcgcctgcatacaataaagcaaatcatagatcaagacaaacatgctttattagatgtaacaccaaatgcagttgatcgtcttaactatgcccagtggtatccaattgttgtatttcttaaccctgattctaagcaaggagtaaaaacaatgagaatgaggttatgtccagaatctcggaaaagtgccaggaagttatacgagcgatctcataaacttcgtaaaaataatcaccatctttttacaactacaattaacttaaattcaatgaatgatggttggtatggtgcgctgaaagaagcaattcaacaacagcaaaaccagctggtatgggtttccgagggaaaggcggatggtgctacaagtgatgaccttgatttgcatgatgatcgtctgtcctacctgtcagctccaggtagtgaatactcaatgtatagcacggacagtagacacacttctgactatgaagacacagacacagaaggcggggcctacactgatcaagaactagatgaaactcttaatgatgaggttgggactccaccggagtctgccattacacggtcctctgagcctgtaagagaggactcctctggaatgcatcatgaaaaccaaacatatcctccttactcaccacaagcgcagccacaaccaattcatagaatagactcccctggatttaagccagcctctcaacagaaagcagaagcttcatctccagtcccttacctttcgcctgaaacaaacccagcatcatcaacctctgctgttaatcataatgtaaatttaactaatgtcagactggaggagcccaccccagctccttccacctcttactcaccacaagctgattctttaagaacaccaagtactgaggcagctcacataatgctaagagatcaagaaccatcattgtcgtcgcatgtagatccaacaaaggtgtatagaaaggatccatatcccgaggaaatgatgaggcagaaccatgttttgaaacagccagccgttagtcacccagggcacaggccagacaaagagcctaatctgacctatgaaccccaactcccatacgtagagaaacaagccagcagagacctcgagcagcccacatacagatacgagtcctcaagctatacggaccagttttctcgaaactatgaacatcgtctgcgatacgaagatcgcgtccccatgtatgaagaacagtggtcatattatgatgacaaacagccctacccatctcggccaccttttgataatcagcactctcaagaccttgactccagacagcatcccgaagagtcctcagaacgagggtactttccacgttttgaagagccagcccctctgtcttacgacagcagaccacgttacgaacaggcacctagagcatccgccctgcggcacgaagagcagccagctcctgggtatgacacacatggtagactcagaccggaagcccagccccacccttcagcagggcccaagcctgcagagtccaagcagtattttgagcaatattcacgcagttacgagcaagtaccaccccaaggatttacctctagagcaggtcattttgagcctctccatggtgctgcagctgtccctccgctgataccttcatctcagcataagccagaagctctgccttcaaacaccaaaccactgcctccacccccaactcaaaccgaagaagaggaagatccagcaatgaagccacagtctgtactcaccagagttaagatgtttgaaaacaaaagatctgcatccttagagaccaagaaggatgtaaatgacactggcagttttaagcctccagaagtagcatctaaaccttcaggtgctcccatcattggtcccaaacccacttctcagaatcaattcagtgaacatgacaaaactctgtacaggatcccagaacctcaaaaacctcaactgaagccacctgaagatattgttcggtccaatcattatgaccctgaagaagatgaagaatattatcgaaaacagctgtcatactttgaccgaagaagttttgagaataagcctcctgcacacattgctgccagccatctctccgagcctgcaaagccagctcattctcagaatcaatcaaatttttctagttattcttcaaagggaaagcctcctgaagctgatggtgtggatagatcatttggcgagaaacgctatgaacccatccaggccactccccctcctcctccattgccctcgcagtatgcccagccatctcagcctgtcaccagcgcgtctctccacatacattctaagggagcacatggtgaaggtaattcagtgtcattggattttcagaattccttagtgtccaaaccagacccacctccatctcagaataagccagcaactttcagaccaccaaaccgagaagatactgctcaggcagctttctatccccagaaaagttttccagataaagccccagttaatggaactgaacagactcagaaaacagtcactccagcatacaatcgattcacaccaaaaccatatacaagttctgcccgaccatttgaacgcaagtttgaaagtcctaaattcaatcacaatcttctgccaagtgaaactgcacataaacctgacttgtcttcaaaaactcccacttctccaaaaactcttgtgaaatcgcacagtttggcacagcctcctgagtttgacagtggagttgaaactttctctatccatgcagagaagcctaaatatcaaataaataatatcagcacagtgcctaaagctattcctgtgagtccttcagctgtggaagaggatgaagatgaagatggtcatactgtggtggccacagcccgaggcatatttaacagcaatgggggcgtgctgagttccatagaaactggtgttagtataattatccctcaaggagccattcccgaaggagttgagcaggaaatctatttcaaggtctgccgggacaacagcatccttccacctttagataaagagaaaggtgaaacactgctgagtcctttggtgatgtgtggtccccatggcctcaagttcctgaagcctgtggagctgcgcttaccacactgtgcgtccatgactcctgacggttggtcttttgctctaaaatcatccgactcctcgtcgggtgatcctaaaacctggcaaaacaagtgtcttcccggagatccaaattatctcgttggagcaaactgtgtttctgtccttattgaccacttttaactcttgaaatataggaacttaaataatgtgaaactggattaaacttaatctaaatggaaccactctatcaagtattataccttttttagagttgatactacagtttgttagtatgaggcatttgtttgaactgataaagatgagtgagcatgcccctgaaccatggtcggaaaacatgctacacactgcatgtttgtgattgacgggactgttggtattggctagaggttcaaagatattttgctttgtgatttttgtaatttttttatcgtcactgcttaacttcacatattgatttccgttaaaataccagccagtaaatgggggtgcatttgaggtctgttctttccaaagtacactgtttcaaactttactatggccctggcctagcatacgtacacattttattttattatgcatgaagtaatatgcacacattttttaaatgcacctggaatatataaccagtgttgtggatttaacagaaatgtacagcaaggagatttacaactgggggagggtgaagtgaagacaatgacttactgtacatgaaaacacatttttcttagggaaggatacaaaagcatgtgagactggttccatggcctcttcagatctctaacttcaccatattaccacagacatactaaccagcagaaatgccttaccctcatgttcttaattcttagctcattctccttgtgttactaagtttttatggcttttgtgcattatctagatactgtatcatgacaaagactgagtacgttgtgcatttggtggtttcagaaatgtgttatcacccagaagaaaatagtggtgtgatttggggatatttttttcttttcttttcttttcttttttttttttttttgacaaggggcagtggtggttttctgttctttctggctatgcatttgaaaattttgatgttttaaggatgcttgtacataatgcgtgcataccacttttgttcttggtttgtaaattaacttttataaactttaccttttttatacataaacaagaccacgtttctaaaggctacctttgtattctctcctgtacctcttgagccttgaactttgacctctgcagcaataaagcagcgtttctatgacacatgcaaggtcattttttttaagaaaaaggatgcacagagttgttacatttttaagtgctgcatttaaaagatacagttactcagaattctctagtttgattaaattcttgcaaagtatccctactgtaatttgtgatacaatgctgtgccctaaagtgtatttttttactaatagacaatttattatggcacatcagcacgatttctgtttagataatacaccactacattctgttaatcattaggtgtgactgaatttcttttgccgttattaaaaatctcaaatttctaaatctccaaaataaaactttttaaaataaagtgctggcttggtctgtttgcccactgttttctagtttcatgcagctttataatcctgttttaaaatcctgcacacaaatccctatcacccagcgtcacctaccacctcgtcgtctggtgttgcatgcagaatttctccccttggccagcatgtacagatgggtgggcagtgctcatctgaagggctcagactgaagtggggcagaaggacctggagacagagtgggagaaggcagcaggccgacttccccctgtgggtaaacacacacccctgcgtggagaaacacccctgcatggggacacacgtgcgtttgtgtgtgtgcgtgtaaccatttgtatatggttttattccccagataaatagcacgggcattgtttaatgtcacccacatttgggggaagaaaatgggtttagtgagcataaatattccattgtggacatcctacttacttaactgccacccctgttgacatttggattattgctatagtgtttcagtaaacacctttgtggactgaatccatctatgtggattttatttttttcatctttgttaaggtataatttacatagagtaagttactgtttttaaaatgtatagttcaaattttgacaaacacatactgtttatttaccacggttaatacatacaacagtttctttatcttctctaatcatttgtacccctttatactcaacccttcttccagcccctggcaggatgatctcttctgtttctatagttgcctttttgacagtgtcatataaatggaatcatacaata

SEQ ID NO: 344090 - DNA, 5578 bp, Homo sapiens
tgattacgaatttcggagccccggaaccccttggcaaccagatatttatcaaattgcaaagagtgaaccacgagacgctggaactgaccaacgtagctctggcattattcgcctgcatacaataaagcaaatcatagatcaagacaaacatgctttattagatgtaacaccaaatgcagttgatcgtcttaactatgcccagtggtatccaattgttgtatttcttaaccctgattctaagcaaggagtaaaaacaatgagaatgaggttatgtccagaatctcggaaaagtgccaggaagttatacgagcgatctcataaacttcgtaaaaataatcaccatctttttacaactacaattaacttaaattcaatgaatgatggttggtatggtgcgctgaaagaagcaattcaacaacagcaaaaccagctggtatgggtttccgagggaaaggcggatggtgctacaagtgatgaccttgatttgcatgatgatcgtctgtcctacctgtcagctccaggtagtgaatactcaatgtatagcacggacagtagacacacttctgactatgaagacacagacacagaaggcggggcctacactgatcaagaactagatgaaactcttaatgatgaggttgggactccaccggagtctgccattacacggtcctctgagcctgtaagagaggactcctctggaatgcatcatgaaaaccaaacatatcctccttactcaccacaagcgcagccacaaccaattcatagaatagactcccctggatttaagccagcctctcaacagaaagcagaagcttcatctccagtcccttacctttcgcctgaaacaaacccagcatcatcaacctctgctgttaatcataatgtaaatttaactaatgtcagactggaggagcccaccccagctccttccacctcttactcaccacaagctgattctttaagaacaccaagtactgaggcagctcacataatgctaagagatcaagaaccatcattgtcgtcgcatgtagatccaacaaaggtgtatagaaaggatccatatcccgaggaaatgatgaggcagaaccatgttttgaaacagccagccgttagtcacccagggcacaggccagacaaagagcctaatctgacctatgaaccccaactcccatacgtagagaaacaagccagcagagacctcgagcagcccacatacagatacgagtcctcaagctatacggaccagttttctcgaaactatgaacatcgtctgcgatacgaagatcgcgtccccatgtatgaagaacagtggtcatattatgatgacaaacagccctacccatctcggccaccttttgataatcagcactctcaagaccttgactccagacagcatcccgaagagtcctcagaacgagggtactttccacgttttgaagagccagcccctctgtcttacgacagcagaccacgttacgaacaggcacctagagcatccgccctgcggcacgaagagcagccagctcctgggtatgacacacatggtagactcagaccggaagcccagccccacccttcagcagggcccaagcctgcagagtccaagcagtattttgagcaatattcacgcagttacgagcaagtaccaccccaaggatttacctctagagcaggtcattttgagcctctccatggtgctgcagctgtccctccgctgataccttcatctcagcataagccagaagctctgccttcaaacaccaaaccactgcctccacccccaactcaaaccgaagaagaggaagatccagcaatgaagccacagtctgtactcaccagagttaagatgtttgaaaacaaaagatctgcatccttagagaccaagaaggatgtaaatgacactggcagttttaagcctccagaagtagcatctaaaccttcaggtgctcccatcattggtcccaaacccacttctcagaatcaattcagtgaacatgacaaaactctgtacaggatcccagaacctcaaaaacctcaactgaagccacctgaagatattgttcggtccaatcattatgaccctgaagaagatgaagaatattatcgaaaacagctgtcatactttgaccgaagaagttttgagaataagcctcctgcacacattgctgccagccatctctccgagcctgcaaagccagctcattctcagaatcaatcaaatttttctagttattcttcaaagggaaagcctcctgaagctgatggtgtggatagatcatttggcgagaaacgctatgaacccatccaggccactccccctcctcctccattgccctcgcagtatgcccagccatctcagcctgtcaccagcgcgtctctccacatacattctaagggagcacatggtgaaggtaattcagtgtcattggattttcagaattccttagtgtccaaaccagacccacctccatctcagaataagccagcaactttcagaccaccaaaccgagaagatactgctcaggcagctttctatccccagaaaagttttccagataaagccccagttaatggaactgaacagactcagaaaacagtcactccagcatacaatcgattcacaccaaaaccatatacaagttctgcccgaccatttgaacgcaagtttgaaagtcctaaattcaatcacaatcttctgccaagtgaaactgcacataaacctgacttgtcttcaaaaactcccacttctccaaaaactcttgtgaaatcgcacagtttggcacagcctcctgagtttgacagtggagttgaaactttctctatccatgcagagaagcctaaatatcaaataaataatatcagcacagtgcctaaagctattcctgtgagtccttcagctgtggaagaggatgaagatgaagatggtcatactgtggtggccacagcccgaggcatatttaacagcaatgggggcgtgctgagttccatagaaactggtgttagtataattatccctcaaggagccattcccgaaggagttgagcaggaaatctatttcaaggtctgccgggacaacagcatccttccacctttagataaagagaaaggtgaaacactgctgagtcctttggtgatgtgtggtccccatggcctcaagttcctgaagcctgtggagctgcgcttaccacactgtgcgtccatgactcctgacggttggtcttttgctctaaaatcatccgactcctcgtcgggtgatcctaaaacctggcaaaacaagtgtcttcccggagatccaaattatctcgttggagcaaactgtgtttctgtccttattgaccacttttaactcttgaaatataggaacttaaataatgtgaaactggattaaacttaatctaaatggaaccactctatcaagtattataccttttttagagttgatactacagtttgttagtatgaggcatttgtttgaactgataaagatgagtgagcatgcccctgaaccatggtcggaaaacatgctacacactgcatgtttgtgattgacgggactgttggtattggctagaggttcaaagatattttgctttgtgatttttgtaatttttttatcgtcactgcttaacttcacatattgatttccgttaaaataccagccagtaaatgggggtgcatttgaggtctgttctttccaaagtacactgtttcaaactttactatggccctggcctagcatacgtacacattttattttattatgcatgaagtaatatgcacacattttttaaatgcacctggaatatataaccagtgttgtggatttaacagaaatgtacagcaaggagatttacaactgggggagggtgaagtgaagacaatgacttactgtacatgaaaacacatttttcttagggaaggatacaaaagcatgtgagactggttccatggcctcttcagatctctaacttcaccatattaccacagacatactaaccagcagaaatgccttaccctcatgttcttaattcttagctcattctccttgtgttactaagtttttatggcttttgtgcattatctagatactgtatcatgacaaagactgagtacgttgtgcatttggtggtttcagaaatgtgttatcacccagaagaaaatagtggtgtgatttggggatatttttttcttttcttttcttttcttttttttttttttttgacaaggggcagtggtggttttctgttctttctggctatgcatttgaaaattttgatgttttaaggatgcttgtacataatgcgtgcataccacttttgttcttggtttgtaaattaacttttataaactttaccttttttatacataaacaagaccacgtttctaaaggctacctttgtattctctcctgtacctcttgagccttgaactttgacctctgcagcaataaagcagcgtttctatgacacatgcaaggtcattttttttaagaaaaaggatgcacagagttgttacatttttaagtgctgcatttaaaagatacagttactcagaattctctagtttgattaaattcttgcaaagtatccctactgtaatttgtgatacaatgctgtgccctaaagtgtatttttttactaatagacaatttattatggcacatcagcacgatttctgtttagataatacaccactacattctgttaatcattaggtgtgactgaatttcttttgccgttattaaaaatctcaaatttctaaatctccaaaataaaactttttaaaataaagtgctggcttggtctgtttgcccactgttttctagtttcatgcagctttataatcctgttttaaaatcctgcacacaaatccctatcacccagcgtcacctaccacctcgtcgtctggtgttgcatgcagaatttctccccttggccagcatgtacagatgggtgggcagtgctcatctgaagggctcagactgaagtggggcagaaggacctggagacagagtgggagaaggcagcaggccgacttccccctgtgggtaaacacacacccctgcgtggagaaacacccctgcatggggacacacgtgcgtttgtgtgtgtgcgtgtaaccatttgtatatggttttattccccagataaatagcacgggcattgtttaatgtcacccacatttgggggaagaaaatgggtttagtgagcataaatattccattgtggacatcctacttacttaactgccacccctgttgacatttggattattgctatagtgtttcagtaaacacctttgtggactgaatccatctatgtggattttatttttttcatctttgttaaggtataatttacatagagtaagttactgtttttaaaatgtatagttcaaattttgacaaacacatactgtttatttaccacggttaatacatacaacagtttctttatcttctctaatcatttgtacccctttatactcaacccttcttccagcccctggcaggatgatctcttctgtttctatagttgcctttttgacagtgtcatataaatggaatcatacaata

SEQ ID NO: 344091 - DNA, 3721 bp, Homo sapiens
gagctcggccccattgtcatcatagcgcaggaaggatgtaaatagacacggcagttttaagcctccagaagtagcatctaaaccttcaggtgctcccatcattggtcccaaacccacttctcagaatcaattcagtgaacatgacaaaactctgtacaggatcccagaacctcaaaaacctcaactgaagccacctgaagatattgttcggtccaatcattatgaccctgaagaagatgaagaatattatcgaaaacagctgtcatactttgaccgaagaagttttgagaataagcctcctgcacacattgctgccagccatctctccgagcctgcaaagccagctcattctcagaatcaatcaaatttttctagttattcttcaaagggaaagcctcctgaagctgatggtgtggatagatcatttggcgagaaacgctatgaacccatccaggccactccccctcctcctccattgccctcgcagtatgcccagccatctcagcctgtcaccagcgcgtctctccacatacattctaagggagcacatggtgaaggtaattcagtgtcattggattttcagaattccttagtgtccaaaccagacccacctccatctcagaataagccagcaactttcagaccaccaaaccgagaagatactgctcaggcagctttctatccccagaaaagttttccagataaagccccagttaatggaactgaacagactcagaaaacagtcactccagcatacaatcgattcacaccaaaaccatatacaagttctgcccgaccatttgaacgcaagtttgaaagtcctaaattcaatcacaatcttctgccaagtgaaactgcacataaacctgacttgtcttcaaaaactcccacttctccaaaaactcttgtgaaatcgcacagtttggcacagcctcctgagtttgacagtggagttgaaactttctctatccatgcagagaagcctaaatatcaaataaataatatcagcacagtgcctaaagctattcctgtgagtccttcagctgtggaagaggatgaagatgaagatggtcatactgtggtggccacagcccgaggcatatttaacagcaatgggggcgtgctgagttccatagaaactggtgttagtataattatccctcaaggagccattcccgaaggagttgagcaggaaatctatttcaaggtctgccgggacaacagcatccttccacctttagataaagagaaaggtgaaacactgctgagtcctttggtgatgtgtggtccccatggcctcaagttcctgaagcctgtggagctgcgcttaccacactgtgcgtccatgactcctgacggttggtcttttgctctaaaatcatccgactcctcgtcgggtgatcctaaaacctggcaaaacaagtgtcttcccggagatccaaattatctcgttggagcaaactgtgtttctgtccttattgaccacttttaactcttgaaatataggaacttaaataatgtgaaactggattaaacttaatctaaatggaaccactctatcaagtattataccttttttagagttgatactacagtttgttagtatgaggcatttgtttgaactgataaagatgagtgagcatgcccctgaaccatggtcggaaaacatgctacacactgcatgtttgtgattgacgggactgttggtattggctagaggttcaaagatattttgctttgtgatttttgtaatttttttatcgtcactgcttaacttcacatattgatttccgttaaaataccagccagtaaatgggggtgcatttgaggtctgttctttccaaagtacactgtttcaaactttactatggccctggcctagcatacgtacacattttattttattatgcatgaagtaatatgcacacattttttaaatgcacctggaatatataaccagtgttgtggatttaacagaaatgtacagcaaggagatttacaactgggggagggtgaagtgaagacaatgacttactgtacatgaaaacacatttttcttagggaaggatacaaaagcatgtgagactggttccatggcctcttcagatctctaacttcaccatattaccacagacatactaaccagcagaaatgccttaccctcatgttcttaattcttagctcattctccttgtgttactaagtttttatggcttttgtgcattatctagatactgtatcatgacaaagactgagtacgttgtgcatttggtggtttcagaaatgtgttatcacccagaagaaaatagtggtgtgatttggggatatttttttcttttcttttcttttcttttttttttttttttgacaaggggcagtggtggttttctgttctttctggctatgcatttgaaaattttgatgttttaaggatgcttgtacataatgcgtgcataccacttttgttcttggtttgtaaattaacttttataaactttaccttttttatacataaacaagaccacgtttctaaaggctacctttgtattctctcctgtacctcttgagccttgaactttgacctctgcagcaataaagcagcgtttctatgacacatgcaaggtcattttttttaagaaaaaggatgcacagagttgttacatttttaagtgctgcatttaaaagatacagttactcagaattctctagtttgattaaattcttgcaaagtatccctactgtaatttgtgatacaatgctgtgccctaaagtgtatttttttactaatagacaatttattatggcacatcagcacgatttctgtttagataatacaccactacattctgttaatcattaggtgtgactgaatttcttttgccgttattaaaaatctcaaatttctaaatctccaaaataaaactttttaaaataaagtgctggcttggtctgtttgcccactgttttctagtttcatgcagctttataatcctgttttaaaatcctgcacacaaatccctatcacccagcgtcacctaccacctcgtcgtctggtgttgcatgcagaatttctccccttggccagcatgtacagatgggtgggcagtgctcatctgaagggctcagactgaagtggggcagaaggacctggagacagagtgggagaaggcagcaggccgacttccccctgtgggtaaacacacacccctgcgtggagaaacacccctgcatggggacacacgtgcgtttgtgtgtgtgcgtgtaaccatttgtatatggttttattccccagataaatagcacgggcattgtttaatgtcacccacatttgggggaagaaaatgggtttagtgagcataaatattccattgtggacatcctacttacttaactgccacccctgttgacatttggattattgctatagtgtttcagtaaacacctttgtggactgaatccatctatgtggattttatttttttcatctttgttaaggtataatttacatagagtaagttactgtttttaaaatgtatagttcaaattttgacaaacacatactgtttatttaccacggttaatacatacaacagtttctttatcttctctaatcatttgtacccctttatactcaacccttcttccagcccctggcaggatgatctcttctgtttctatagttgcctttttgacagtgtcatataaatggaatcatacaata

SEQ ID NO: 344092 - DNA, 2486 bp, Homo sapiens
gatctgctttgaaatacagcaatgtgttttgatacaaattcaatatgctgaagaaacagaagaaaattatgtctaaatatacgtatttgccctataattgcaaagcattacggatagcagtttactgaactgtaaatgacatcaacttcttttctctcataggtgatcctaaaacctggcaaaacaagtgtcttcccggagatccaaattatctcgttggagcaaactgtgtttctgtccttattgaccacttttaactcttgaaatataggaacttaaataatgtgaaactggattaaacttaatctaaatggaaccactctatcaagtattataccttttttagagttgatactacagtttgttagtatgaggcatttgtttgaactgataaagatgagtgagcatgcccctgaaccatggtcggaaaacatgctacacactgcatgtttgtgattgacgggactgttggtattggctagaggttcaaagatattttgctttgtgatttttgtaatttttttatcgtcactgcttaacttcacatattgatttccgttaaaataccagccagtaaatgggggtgcatttgaggtctgttctttccaaagtacactgtttcaaactttactatggccctggcctagcatacgtacacattttattttattatgcatgaagtaatatgcacacattttttaaatgcacctggaatatataaccagtgttgtggatttaacagaaatgtacagcaaggagatttacaactgggggagggtgaagtgaagacaatgacttactgtacatgaaaacacatttttcttagggaaggatacaaaagcatgtgagactggttccatggcctcttcagatctctaacttcaccatattaccacagacatactaaccagcagaaatgccttaccctcatgttcttaattcttagctcattctccttgtgttactaagtttttatggcttttgtgcattatctagatactgtatcatgacaaagactgagtacgttgtgcatttggtggtttcagaaatgtgttatcacccagaagaaaatagtggtgtgatttggggatatttttttcttttcttttcttttcttttttttttttttttgacaaggggcagtggtggttttctgttctttctggctatgcatttgaaaattttgatgttttaaggatgcttgtacataatgcgtgcataccacttttgttcttggtttgtaaattaacttttataaactttaccttttttatacataaacaagaccacgtttctaaaggctacctttgtattctctcctgtacctcttgagccttgaactttgacctctgcagcaataaagcagcgtttctatgacacatgcaaggtcattttttttaagaaaaaggatgcacagagttgttacatttttaagtgctgcatttaaaagatacagttactcagaattctctagtttgattaaattcttgcaaagtatccctactgtaatttgtgatacaatgctgtgccctaaagtgtatttttttactaatagacaatttattatggcacatcagcacgatttctgtttagataatacaccactacattctgttaatcattaggtgtgactgaatttcttttgccgttattaaaaatctcaaatttctaaatctccaaaataaaactttttaaaataaagtgctggcttggtctgtttgcccactgttttctagtttcatgcagctttataatcctgttttaaaatcctgcacacaaatccctatcacccagcgtcacctaccacctcgtcgtctggtgttgcatgcagaatttctccccttggccagcatgtacagatgggtgggcagtgctcatctgaagggctcagactgaagtggggcagaaggacctggagacagagtgggagaaggcagcaggccgacttccccctgtgggtaaacacacacccctgcgtggagaaacacccctgcatggggacacacgtgcgtttgtgtgtgtgcgtgtaaccatttgtatatggttttattccccagataaatagcacgggcattgtttaatgtcacccacatttgggggaagaaaatgggtttagtgagcataaatattccattgtggacatcctacttacttaactgccacccctgttgacatttggattattgctatagtgtttcagtaaacacctttgtggactgaatccatctatgtggattttatttttttcatctttgttaaggtataatttacatagagtaagttactgtttttaaaatgtatagttcaaattttgacaaacacatactgtttatttaccacggttaatacatacaacagtttctttatcttctctaatcatttgtacccctttatactcaacccttcttccagcccctggcaggatgatctcttctgtttctatagttgcctttttgacagtgtcatataaatggaatcatacaata

SEQ ID NO: 344093 - DNA, 6330 bp, Homo sapiens
cagtcggcgccggtgaacgagagcaacgcttctgaccctgccggagctcctcggagatgaaagccatgacgcgccttgcagaaaatgcattccgccttccgtgggaacaacgccgaggcacgcggtgacagccgtgaccatgctgtttgcccagtgaaggaaacaactgtcgggtatcggctctgccggcctttccagccgcactcatgcatggggctcaccccatgatgtgcgtggcttgtcgaggagcaagtggacaagtctcttaaggaaagctttggtgcacaggcgctttctccttgggggcgaattctgccagaccttggataaaaacaaacaggaagactcgcacggcagcggaaactgtcttccaagttacttgggttacccggcttttccttccgcgcttggggtcgggaccccggccgctcgtcccgccccctccccgcctcgcctcgcctcgcctcgtccagccccgcccccgccgggccgggcatgctcagtgggccgggccggcaggtttgcgtggccgctgagttgccggcgccggctgagccagcggacgccgcgttccttggcggccgccggttcccgggaagttacgtggcgaagccggcttccgaggagacgccgggaggccacgggtgctgctgacgggcgggcgaccgggcgaggccgacgtggccgggctgcgaaagctgcgggaggccgagtgggtggccgcgctcggagggaggtgccggtcgggcgcgccccgtggagaagacccgggcggggcgggcgcttcccggacttttgtccgagttgaattccctccccctgggccgggcccttccggccgcccccgcccgtgccccgctcgctctcgggagatgtttatttgggctgtggcgtgaggagcgggcgggccagcgccgcggagtttcgggtccgaggagcctcgcgcggcgctggagagagacaagatgtccgccagagctgcggccgccaagagcacagcaatggaggaaacagctatatgggaacaacatacagtgacgcttcacagggctcctggatttggatttggaattgcaatatctggtggacgagataatcctcattttcagagtggggaaacgtcaatagtgatttcagatgtgctgaaaggaggaccagctgaaggacagctacaggaaaatgaccgagttgcaatggttaacggagtttcaatggataatgttgaacatgcttttgctgttcagcaactaaggaaaagtgggaaaaatgcaaaaattacaattagaaggaagaagaaagttcaaataccagtaagtcgtcctgatcctgaaccagtatctgataatgaagaagatagttatgatgaggaaatacatgatccaagaagtggccggagtggtgtggttaacagaaggagtgagaagatttggccgagggatagaagtgcaagtagagagaggagcttgtccccgcggtcagacaggcggtcagtggcttccagccagcctgctaaacctactaaagtcacactggtgaaatcccggaaaaatgaagaatatggtcttcgattggcaagccatatatttgttaaggaaatttcacaagatagtttggcagcaagagatggcaatattcaagaaggtgatgttgtattgaagataaatggtactgtgacagaaaatatgtcattgacagatgcaaagacattgatagaaaggtctaaaggcaaattaaaaatggtagttcaaagagatgaacgggctacgctattgaatgtccctgatctttctgacagcatccactctgctaatgcctctgagagagacgacatttcagaaattcagtcactggcatcagatcattctggtcgatcacacgataggcctccccgccgcagccggtcacgatctcctgaccagcggtcagagccttctgatcattccaggcactcgccgcagcagccaagcaatggcagtctccggagtagagatgaagagagaatttctaaacctggggctgtctcaactcctgtaaagcatgctgatgatcacacacctaaaacagtggaagaagttacagttgaaagaaatgagaaacaaacaccttctcttccagaaccaaagcctgtgtatgcccaagttgggcaaccagatgtggatttacctgtcagtccatctgatggtgtcctacctaattcaactcatgaagatgggattcttcggcccagcatgaaattggtaaaattcagaaaaggagatagtgtgggtttgcggctggctggtggaaatgatgttggaatatttgtagctggcgttctagaagatagccctgcagccaaggaaggcttagaggaaggtgatcaaattctcagggtaaacaacgtagattttacaaatatcataagagaagaagccgtccttttcctgcttgacctccctaaaggagaagaagtgaccatattggctcagaagaagaaggatgtttatcgtcgcattgtagaatcagatgtaggagattctttctatattagaacccattttgaatatgaaaaggaatctccctatggacttagttttaacaaaggagaggtgttccgtgctgtggataccttgtacaatggaaaactgggctcttggcttgctattcgaattggtaaaaatcataaggaggtagaacgaggcatcatccctaataagaacagagctgagcagctagccagtgtacagtatacacttccaaaaacagcaggcggagaccgtgctgacttctggagattcagaggtcttcgcagctccaagagaaatcttcgaaaaagcagagaggatttgtccgctcagcctgttcaaacaaagtttccagcttatgaaagagtggttcttcgagaagctggatttctgaggcctgtaaccatttttggaccaatagctgatgttgccagagaaaagctggcaagagaagaaccagatatttatcaaattgcaaagagtgaaccacgagacgctggaactgaccaacgtagctctggcattattcgcctgcatacaataaagcaaatcatagatcaagacaaacatgctttattagatgtaacaccaaatgcagttgatcgtcttaactatgcccagtggtatccaattgttgtatttcttaaccctgattctaagcaaggagtaaaaacaatgagaatgaggttatgtccagaatctcggaaaagtgccaggaagttatacgagcgatctcataaacttcgtaaaaataatcaccatctttttacaactacaattaacttaaattcaatgaatgatggttggtatggtgcgctgaaagaagcaattcaacaacagcaaaaccagctggtatgggtttccgagggaaaggcggatggtgctacaagtgatgaccttgatttgcatgatgatcgtctgtcctacctgtcagctccaggtagtgaatactcaatgtatagcacggacagtagacacacttctgactatgaagacacagacacagaaggcggggcctacactgatcaagaactagatgaaactcttaatgatgaggttgggactccaccggagtctgccattacacggtcctctgagcctgtaagagaggactcctctggaatgcatcatgaaaaccaaacatatcctccttactcaccacaagcgcagccacaaccaattcatagaatagactcccctggatttaagccagcctctcaacagaaagcagaagcttcatctccagtcccttacctttcgcctgaaacaaacccagcatcatcaacctctgctgttaatcataatgtaaatttaactaatgtcagactggaggagcccaccccagctccttccacctcttactcaccacaagctgattctttaagaacaccaagtactgaggcagctcacataatgctaagagatcaagaaccatcattgtcgtcgcatgtagatccaacaaaggtgtatagaaaggatccatatcccgaggaaatgatgaggcagaaccatgttttgaaacagccagccgttagtcacccagggcacaggccagacaaagagcctaatctgacctatgaaccccaactcccatacgtagagaaacaagccagcagagacctcgagcagcccacatacagatacgagtcctcaagctatacggaccagttttctcgaaactatgaacatcgtctgcgatacgaagatcgcgtccccatgtatgaagaacagtggtcatattatgatgacaaacagccctacccatctcggccaccttttgataatcagcactctcaagaccttgactccagacagcatcccgaagagtcctcagaacgagggtactttccacgttttgaagagccagcccctctgtcttacgacagcagaccacgttacgaacaggcacctagagcatccgccctgcggcacgaagagcagccagctcctgggtatgacacacatggtagactcagaccggaagcccagccccacccttcagcagggcccaagcctgcagagtccaagcagtattttgagcaatattcacgcagttacgagcaagtaccaccccaaggatttacctctagagcaggtcattttgagcctctccatggtgctgcagctgtccctccgctgataccttcatctcagcataagccagaagctctgccttcaaacaccaaaccactgcctccacccccaactcaaaccgaagaagaggaagatccagcaatgaagccacagtctgtactcaccagagttaagatgtttgaaaacaaaagatctgcatccttagagaccaagaaggatgtaaatgacactggcagttttaagcctccagaagtagcatctaaaccttcaggtgctcccatcattggtcccaaacccacttctcagaatcaattcagtgaacatgacaaaactctgtacaggatcccagaacctcaaaaacctcaactgaagccacctgaagatattgttcggtccaatcattatgaccctgaagaagatgaagaatattatcgaaaacagctgtcatactttgaccgaagaagttttgagaataagcctcctgcacacattgctgccagccatctctccgagcctgcaaagccagctcattctcagaatcaatcaaatttttctagttattcttcaaagggaaagcctcctgaagctgatggtgtggatagatcatttggcgagaaacgctatgaacccatccaggccactccccctcctcctccattgccctcgcagtatgcccagccatctcagcctgtcaccagcgcgtctctccacatacattctaagggagcacatggtgaaggtaattcagtgtcattggattttcagaattccttagtgtccaaaccagacccacctccatctcagaataagccagcaactttcagaccaccaaaccgagaagatactgctcaggcagctttctatccccagaaaagttttccagataaagccccagttaatggaactgaacagactcagaaaacagtcactccagcatacaatcgattcacaccaaaaccatatacaagttctgcccgaccatttgaacgcaagtttgaaagtcctaaattcaatcacaatcttctgccaagtgaaactgcacataaacctgacttgtcttcaaaaactcccacttctccaaaaactcttgtgaaatcgcacagtttggcacagcctcctgagtttgacagtggagttgaaactttctctatccatgcagagaagcctaaatatcaaataaataatatcagcacagtgcctaaagctattcctgtgagtccttcagctgtggaagaggatgaagatgaagatggtcatactgtggtggccacagcccgaggcatatttaacagcaatgggggcgtgctgagttccatagaaactggtgttagtataattatccctcaaggagccattcccgaaggagttgagcaggaaatctatttcaaggtctgccgggacaacagcatccttccacctttagataaagagaaaggtgaaacactgctgagtcctttggtgatgtgtggtccccatggcctcaagttcctgaagcctgtggagctgcgcttaccacactgtgcgtccatgactcctgacggttggtcttttgctctaaaatcatccgactcctcgtcgggtgatcctaaaacctggcaaaacaagtgtcttcccggagatccaaattatctcgttggagcaaactgtgtttctgtccttattgaccacttttaactcttgaaatataggaacttaaataatgtgaaactggattaaacttaatctaaatgga

SEQ ID NO: 344094 - DNA, 6291 bp, Homo sapiens
cagtcggcgccggtgaacgagagcaacgcttctgaccctgccggagctcctcggagatgaaagccatgacgcgccttgcagaaaatgcattccgccttccgtgggaacaacgccgaggcacgcggtgacagccgtgaccatgctgtttgcccagtgaaggaaacaactgtcgggtatcggctctgccggcctttccagccgcactcatgcatggggctcaccccatgatgtgcgtggcttgtcgaggagcaagtggacaagtctcttaaggaaagctttggtgcacaggcgctttctccttgggggcgaattctgccagaccttggataaaaacaaacaggaagactcgcacggcagcggaaactgtcttccaagttacttgggttacccggcttttccttccgcgcttggggtcgggaccccggccgctcgtcccgccccctccccgcctcgcctcgcctcgcctcgtccagccccgcccccgccgggccgggcatgctcagtgggccgggccggcaggtttgcgtggccgctgagttgccggcgccggctgagccagcggacgccgcgttccttggcggccgccggttcccgggaagttacgtggcgaagccggcttccgaggagacgccgggaggccacgggtgctgctgacgggcgggcgaccgggcgaggccgacgtggccgggctgcgaaagctgcgggaggccgagtgggtggccgcgctcggagggaggtgccggtcgggcgcgccccgtggagaagacccgggcggggcgggcgcttcccggacttttgtccgagttgaattccctccccctgggccgggcccttccggccgcccccgcccgtgccccgctcgctctcgggagatgtttatttgggctgtggcgtgaggagcgggcgggccagcgccgcggagtttcgggtccgaggagcctcgcgcggcgctggagagagacaagatgtccgccagagctgcggccgccaagagcacagcaatggaggaaacagctatatgggaacaacatacagtgacgcttcacagggctcctggatttggatttggaattgcaatatctggtggacgagataatcctcattttcagagtggggaaacgtcaatagtgatttcagatgtgctgaaaggaggaccagctgaaggacagctacaggaaaatgaccgagttgcaatggttaacggagtttcaatggataatgttgaacatgcttttgctgttcagcaactaaggaaaagtgggaaaaatgcaaaaattacaattagaaggaagaagaaagttcaaataccagtaagtcgtcctgatcctgaaccagtatctgataatgaagaagatagttatgatgaggaaatacatgatccaagaagtggccggagtggtgtggttaacagaaggagtgagaagatttggccgagggatagaagtgcaagtagagagaggagcttgtccccgcggtcagacaggcggtcagtggcttccagccagcctgctaaacctactaaagtcacactggtgaaatcccggaaaaatgaagaatatggtcttcgattggcaagccatatatttgttaaggaaatttcacaagatagtttggcagcaagagatggcaatattcaagaaggtgatgttgtattgaagataaatggtactgtgacagaaaatatgtcattgacagatgcaaagacattgatagaaaggtctaaaggcaaattaaaaatggtagttcaaagagatgaacgggctacgctattgaatgtccctgatctttctgacagcatccactctgctaatgcctctgagagagacgacatttcagaaattcagtcactggcatcagatcattctggtcgatcacacgataggcctccccgccgcagccggtcacgatctcctgaccagcggtcagagccttctgatcattccaggcactcgccgcagcagccaagcaatggcagtctccggagtagagatgaagagagaatttctaaacctggggctgtctcaactcctgtaaagcatgctgatgatcacacacctaaaacagtggaagaagttacagttgaaagaaatgagaaacaaacaccttctcttccagaaccaaagcctgtgtatgcccaagttgggcaaccagatgtggatttacctgtcagtccatctgatggtgtcctacctaattcaactcatgaagatgggattcttcggcccagcatgaaattggtaaaattcagaaaaggagatagtgtgggtttgcggctggctggtggaaatgatgttggaatatttgtagctggcgttctagaagatagccctgcagccaaggaaggcttagaggaaggtgatcaaattctcagggtaaacaacgtagattttacaaatatcataagagaagaagccgtccttttcctgcttgacctccctaaaggagaagaagtgaccatattggctcagaagaagaaggatgtttatcgtcgcattgtagaatcagatgtaggagattctttctatattagaacccattttgaatatgaaaaggaatctccctatggacttagttttaacaaaggagaggtgttccgtgctgtggataccttgtacaatggaaaactgggctcttggcttgctattcgaattggtaaaaatcataaggaggtagaacgaggcatcatccctaataagaacagagctgagcagctagccagtgtacagtatacacttccaaaaacagcaggcggagaccgtgctgacttctggagattcagaggtcttcgcagctccaagagaaatcttcgaaaaagcagagaggatttgtccgctcagcctgttcaaacaaagtttccagcttatgaaagagtggttcttcgagaagctggatttctgaggcctgtaaccatttttggaccaatagctgatgttgccagagaaaagctggcaagagaagaaccagatatttatcaaattgcaaagagtgaaccacgagacgctggaactgaccaacgtagctctggcattattcgcctgcatacaataaagcaaatcatagatcaagacaaacatgctttattagatgtaacaccaaatgcagttgatcgtcttaactatgcccagtggtatccaattgttgtatttcttaaccctgattctaagcaaggagtaaaaacaatgagaatgaggttatgtccagaatctcggaaaagtgccaggaagttatacgagcgatctcataaacttcgtaaaaataatcaccatctttttacaactacaattaacttaaattcaatgaatgatggttggtatggtgcgctgaaagaagcaattcaacaacagcaaaaccagctggtatgggtttccgagggaaaggcggatggtgctacaagtgatgaccttgatttgcatgatgatcgtctgtcctacctgtcagctccaggtagtgaatactcaatgtatagcacggacagtagacacacttctgactatgaagacacagacacagaaggcggggcctacactgatcaagaactagatgaaactcttaatgatgaggttgggactccaccggagtctgccattacacggtcctctgagcctgtaagagaggactcctctggaatgcatcatgaaaaccaaacatatcctccttactcaccacaagcgcagccacaaccaattcatagaatagactcccctggatttaagccagcctctcaacagaaagcagaagcttcatctccagtcccttacctttcgcctgaaacaaacccagcatcatcaacctctgctgttaatcataatgtaaatttaactaatgtcagactggaggagcccaccccagctccttccacctcttactcaccacaagctgattctttaagaacaccaagtactgaggcagctcacataatgctaagagatcaagaaccatcattgtcgtcgcatgtagatccaacaaaggtgtatagaaaggatccatatcccgaggaaatgatgaggcagaaccatgttttgaaacagccagccgttagtcacccagggcacaggccagacaaagagcctaatctgacctatgaaccccaactcccatacgtagagaaacaagccagcagagacctcgagcagcccacatacagatacgagtcctcaagctatacggaccagttttctcgaaactatgaacatcgtctgcgatacgaagatcgcgtccccatgtatgaagaacagtggtcatattatgatgacaaacagccctacccatctcggccaccttttgataatcagcactctcaagaccttgactccagacagcatcccgaagagtcctcagaacgagggtactttccacgttttgaagagccagcccctctgtcttacgacagcagaccacgttacgaacaggcacctagagcatccgccctgcggcacgaagagcagccagctcctgggtatgacacacatggtagactcagaccggaagcccagccccacccttcagcagggcccaagcctgcagagtccaagcagtattttgagcaatattcacgcagttacgagcaagtaccaccccaaggatttacctctagagcaggtcattttgagcctctccatggtgctgcagctgtccctccgctgataccttcatctcagcataagccagaagctctgccttcaaacaccaaaccactgcctccacccccaactcaaaccgaagaagaggaagatccagcaatgaagccacagtctgtactcaccagagttaagatgtttgaaaacaaaagatctgcatccttagagaccaagaaggatgtaaatgacactggcagttttaagcctccagaagtagcatctaaaccttcaggtgctcccatcattggtcccaaacccacttctcagaatcaattcagtgaacatgacaaaactctgtacaggatcccagaacctcaaaaacctcaactgaagccacctgaagatattgttcggtccaatcattatgaccctgaagaagatgaagaatattatcgaaaacagctgtcatactttgaccgaagaagttttgagaataagcctcctgcacacattgctgccagccatctctccgagcctgcaaagccagctcattctcagaatcaatcaaatttttctagttattcttcaaagggaaagcctcctgaagctgatggtgtggatagatcatttggcgagaaacgctatgaacccatccaggccactccccctcctcctccattgccctcgcagtatgcccagccatctcagcctgtcaccagcgcgtctctccacatacattctaagggagcacatggtgaaggtaattcagtgtcattggattttcagaattccttagtgtccaaaccagacccacctccatctcagaataagccagcaactttcagaccaccaaaccgagaagatactgctcaggcagctttctatccccagaaaagttttccagataaagccccagttaatggaactgaacagactcagaaaacagtcactccagcatacaatcgattcacaccaaaaccatatacaagttctgcccgaccatttgaacgcaagtttgaaagtcctaaattcaatcacaatcttctgccaagtgaaactgcacataaacctgacttgtcttcaaaaactcccacttctccaaaaactcttgtgaaatcgcacagtttggcacagcctcctgagtttgacagtggagttgaaactttctctatccatgcagagaagcctaaatatcaaataaataatatcagcacagtgcctaaagctattcctgtgagtccttcagctgtggaagaggatgaagatgaagatggtcatactgtggtggccacagcccgaggcatatttaacagcaatgggggcgtgctgagttccatagaaactggtgttagtataattatccctcaaggagccattcccgaaggagttgagcaggaaatctatttcaaggtctgccgggacaacagcatccttccacctttagataaagagaaaggtgaaacactgctgagtcctttggtgatgtgtggtccccatggcctcaagttcctgaagcctgtggagctgcgcttaccacactgtgcgtccatgactcctgacggtgatcctaaaacctggcaaaacaagtgtcttcccggagatccaaattatctcgttggagcaaactgtgtttctgtccttattgaccacttttaactcttgaaatataggaacttaaataatgtgaaactggattaaacttaatctaaatgga

SEQ ID NO: 344095 - DNA, 2473 bp, Homo sapiens
cagtcggcgccggtgaacgagagcaacgcttctgaccctgccggagctcctcggagatgaaagccatgacgcgccttgcagaaaatgcattccgccttccgtgggaacaacgccgaggcacgcggtgacagccgtgaccatgctgtttgcccagtgaaggaaacaactgtcgggtatcggctctgccggcctttccagccgcactcatgcatggggctcaccccatgatgtgcgtggcttgtcgaggagcaagtggacaagtctcttaaggaaagctttggtgcacaggcgctttctccttgggggcgaattctgccagaccttggataaaaacaaacaggaagactcgcacggcagcggaaactgtcttccaagttacttgggttacccggcttttccttccgcgcttggggtcgggaccccggccgctcgtcccgccccctccccgcctcgcctcgcctcgcctcgtccagccccgcccccgccgggccgggcatgctcagtgggccgggccggcaggtttgcgtggccgctgagttgccggcgccggctgagccagcggacgccgcgttccttggcggccgccggttcccgggaagttacgtggcgaagccggcttccgaggagacgccgggaggccacgggtgctgctgacgggcgggcgaccgggcgaggccgacgtggccgggctgcgaaagctgcgggaggccgagtgggtggccgcgctcggagggaggtgccggtcgggcgcgccccgtggagaagacccgggcggggcgggcgcttcccggacttttgtccgagttgaattccctccccctgggccgggcccttccggccgcccccgcccgtgccccgctcgctctcgggagatgtttatttgggctgtggcgtgaggagcgggcgggccagcgccgcggagtttcgggtccgaggagcctcgcgcggcgctggagagagacaagatgtccgccagagctgcggccgccaagagcacagcaatggaggaaacagctatatgggaacaacatacagtgacgcttcacagggctcctggatttggatttggaattgcaatatctggtggacgagataatcctcattttcagagtggggaaacgtcaatagtgatttcagatgtgctgaaaggaggaccagctgaaggacagctacaggaaaatgaccgagttgcaatggttaacggagtttcaatggataatgttgaacatgcttttgctgttcagcaactaaggaaaagtgggaaaaatgcaaaaattacaattagaaggaagaagaaagttcaaataccagtaagtcgtcctgatcctgaaccagtatctgataatgaagaagatagttatgatgaggaaatacatgatccaagaagtggccggagtggtgtggttaacagaaggagtgagaagatttggccgagggatagaagtgcaagtagagagaggagcttgtccccgcggtcagacaggcggtcagtggcttccagccagcctgctaaacctactaaagtcacactggtgaaatcccggaaaaatgaagaatatggtcttcgattggcaagccatatatttgttaaggaaatttcacaagatagtttggcagcaagagatggcaatattcaagaaggtgatgttgtattgaagataaatggtactgtgacagaaaatatgtcattgacagatgcaaagacattgatagaaaggtctaaaggcaaattaaaaatggtagttcaaagagatgaacgggctacgctattgaatgtccctgatctttctgacagcatccactctgctaatgcctctgagagagacgacatttcagaaattcagtcactggcatcagatcattctggtcgatcacacgataggcctccccgccgcagccggtcacgatctcctgaccagcggtcagagccttctgatcattccaggcactcgccgcagcagccaagcaatggcagtctccggagtagagatgaagagagaatttctaaacctggggctgtctcaactcctgtaaagcatgctgatgatcacacacctaaaacagtggaagaagttacagttgaaagaaatgagaaacaaacaccttctcttccagaaccaaagcctgtgtatgcccaagttgggcaaccagatgtggatttacctgtcagtccatctgatggtgtcctacctaattcaactcatgaagatgggattcttcggtaatacaattttaaagttgtattgttttctttgttcattattaacattattcagagtaggaatttaattgtaaaccatattgcatatattttttaaaatagtacataccacctaatactatgattatttttatatttaacattctgctacttatatatgatagtgagttagaaattagacaacaaaggaactttttggatgctttctttctcaccgctgtctcctgcctagcttttaaattaggaattaga

SEQ ID NO: 344096 - DNA, 1631 bp, Homo sapiens
  misc_feature (1519)..(1519): n is a, c, g, or t
  misc_feature (1563)..(1563): n is a, c, g, or t
cagtcggcgccggtgaacgagagcaacgcttctgaccctgccggagctcctcggagatgaaagccatgacgcgccttgcagaaaatgcattccgccttccgtgggaacaacgccgaggcacgcggtgacagccgtgaccatgctgtttgcccagtgaaggaaacaactgtcgggtatcggctctgccggcctttccagccgcactcatgcatggggctcaccccatgatgtgcgtggcttgtcgaggagcaagtggacaagtctcttaaggaaagctttggtgcacaggcgctttctccttgggggcgaattctgccagaccttggataaaaacaaacaggaagactcgcacggcagcggaaactgtcttccaagttacttgggttacccggcttttccttccgcgcttggggtcgggaccccggccgctcgtcccgccccctccccgcctcgcctcgcctcgcctcgtccagccccgcccccgccgggccgggcatgctcagtgggccgggccggcaggtttgcgtggccgctgagttgccggcgccggctgagccagcggacgccgcgttccttggcggccgccggttcccgggaagttacgtggcgaagccggcttccgaggagacgccgggaggccacgggtgctgctgacgggcgggcgaccgggcgaggccgacgtggccgggctgcgaaagctgcgggaggccgagtgggtggccgcgctcggagggaggtgccggtcgggcgcgccccgtggagaagacccgggcggggcgggcgcttcccggacttttgtccgagttgaattccctccccctgggccgggcccttccggccgcccccgcccgtgccccgctcgctctcgggagatgtttatttgggctgtggcgtgaggagcgggcgggccagcgccgcggagtttcgggtccgaggagcctcgcgcggcgctggagagagacaagatgtccgccagagctgcggccgccaagagcacagcaatggaggaaacagctatatgggaacaacatacagtgacgcttcacagggctcctggatttggatttggaattgcaatatctggtggacgagataatcctcattttcagagtggggaaacgtcaatagtgatttcagatgtgctgaaaggaggaccagctgaaggacagctacaggaaaatgaccgagttgcaatggttaacggagtttcaatggataatgttgaacatgcttttgctgttcagcaactaaggaaaagtgggaaaaatgcaaaaattacaattagaaggaagaagaaagttcaaataccagtaagtcgtcctgatcctgaaccagtatctgataatgaagaagatagttatgatgaggaaatacatgatccaagaagtggccggagtggtgtggttaacagaaggagtgagaagatttggccgagggatagaagtgcaagtagagagaggaccagctgaaggacagctacaggaaaatgaccgagttgcaatggttaacggagtttcantggataatgttgaacatgcttttgctgttcagcaactaaggaanagtgggaaaaatgcaaaaattacaattagaaggaagaagaaggttcaaataccagtaagtcgtcctga

SEQ ID NO: 344097 - DNA, 397 bp, Homo sapiens
tccttaaatgtgaattttttatacaggtgtatagaaaggatccatatcccgaggaaatgatgaggcagaaccatgttttgaaacagccagccgttagtcacccagggcacaggccagacaaagagcctaatctgacctatgaaccccaactcccatacgtagagaaacaagccagcagagacctcgagcagcccacatacagatacgagtcctcaagctatacggaccagttttctcgaaactatgaacatcgtctgcgatacgaagatcgcgtccccatgtatgaagaacagtggtcatattatgatgacaaacagccctacccatctcggccaccttttgataatcagcactctcaagaccttgactccagacagcatcccgaagagtcctcaga

SEQ ID NO: 344098 - DNA, 8666 bp, Homo sapiens
tccgggtatggatgtcaatcttttgtctacaatgtgaatacatttatccttcggggaccatcaagactttcaggaaaggccccgcctgtctctgcgcggccactttgctgggacaaaggtcaactgaagaagtgggcaggcccgaggcaggagagatgctgaggagtccatgtgcaggggagggaaagggagaggcagtcagggagaggaggaggaggtaccgccagaaggggatcctcccgctccgaaaaccagacaccgggtcttgccctgtggtccaggcaggagtgcagtggtgcaacctcagctcactgcagccttgacctccccgggctcaagcgatcctccggccacagcacttggctgttcagcggctggaggagcagggccccaggtcctccccaccctcacctgctgctcccaggtcgtggccgtcttgctcttccaggtccttctctagggatgcaatattcacattgctaagatgcaggtctaacgcagaacctgtcaacagagccccccatcatccacagcccacccagcgctgcagagctcaggaagcctagctgaggaggacgaccgtcccacctgggcttagagtgagaccaagggcagaaggcgtgggagttgctggggcagccagggaaggacacccccagcccgtcctcgcagccccccacaggcagtgggaggcttggctgttcctccggcaaaacgggcatgctcagtgggccgggccggcaggtttgcgtggccgctgagttgccggcgccggctgagccagcggacgccgcgttccttggcggccgccggttcccgggaagttacgtggcgaagccggcttccgaggagacgccgggaggccacgggtgctgctgacgggcgggcgaccgggcgaggccgacgtggccgggctgcgaaagctgcgggaggccgagtgggtggccgcgctcggagggaggtgccggtcgggcgcgccccgtggagaagacccgggcggggcgggcgcttcccggacttttgtccgagttgaattccctccccctgggccgggcccttccggccgcccccgcccgtgccccgctcgctctcgggagatgtttatttgggctgtggcgtgaggagcgggcgggccagcgccgcggagtttcgggtccgaggagcctcgcgcggcgctggagagagacaagatgtccgccagagctgcggccgccaagagcacagcaatggaggaaacagctatatgggaacaacatacagtgacgcttcacagggctcctggatttggatttggaattgcaatatctggtggacgagataatcctcattttcagagtggggaaacgtcaatagtgatttcagatgtgctgaaaggaggaccagctgaaggacagctacaggaaaatgaccgagttgcaatggttaacggagtttcaatggataatgttgaacatgcttttgctgttcagcaactaaggaaaagtgggaaaaatgcaaaaattacaattagaaggaagaagaaagttcaaataccagtaagtcgtcctgatcctgaaccagtatctgataatgaagaagatagttatgatgaggaaatacatgatccaagaagtggccggagtggtgtggttaacagaaggagtgagaagatttggccgagggatagaagtgcaagtagagagaggagcttgtccccgcggtcagacaggcggtcagtggcttccagccagcctgctaaacctactaaagtcacactggtgaaatcccggaaaaatgaagaatatggtcttcgattggcaagccatatatttgttaaggaaatttcacaagatagtttggcagcaagagatggcaatattcaagaaggtgatgttgtattgaagataaatggtactgtgacagaaaatatgtcattgacagatgcaaagacattgatagaaaggtctaaaggcaaattaaaaatggtagttcaaagagatgaacgggctacgctattgaatgtccctgatctttctgacagcatccactctgctaatgcctctgagagagacgacatttcagaaattcagtcactggcatcagatcattctggtcgatcacacgataggcctccccgccgcagccggtcacgatctcctgaccagcggtcagagccttctgatcattccaggcactcgccgcagcagccaagcaatggcagtctccggagtagagatgaagagagaatttctaaacctggggctgtctcaactcctgtaaagcatgctgatgatcacacacctaaaacagtggaagaagttacagttgaaagaaatgagaaacaaacaccttctcttccagaaccaaagcctgtgtatgcccaagttgggcaaccagatgtggatttacctgtcagtccatctgatggtgtcctacctaattcaactcatgaagatgggattcttcggcccagcatgaaattggtaaaattcagaaaaggagatagtgtgggtttgcggctggctggtggaaatgatgttggaatatttgtagctggcgttctagaagatagccctgcagccaaggaaggcttagaggaaggtgatcaaattctcagggtaaacaacgtagattttacaaatatcataagagaagaagccgtccttttcctgcttgacctccctaaaggagaagaagtgaccatattggctcagaagaagaaggatgtttatcgtcgcattgtagaatcagatgtaggagattctttctatattagaacccattttgaatatgaaaaggaatctccctatggacttagttttaacaaaggagaggtgttccgtgctgtggataccttgtacaatggaaaactgggctcttggcttgctattcgaattggtaaaaatcataaggaggtagaacgaggcatcatccctaataagaacagagctgagcagctagccagtgtacagtatacacttccaaaaacagcaggcggagaccgtgctgacttctggagattcagaggtcttcgcagctccaagagaaatcttcgaaaaagcagagaggatttgtccgctcagcctgttcaaacaaagtttccagcttatgaaagagtggttcttcgagaagctggatttctgaggcctgtaaccatttttggaccaatagctgatgttgccagagaaaagctggcaagagaagaaccagatatttatcaaattgcaaagagtgaaccacgagacgctggaactgaccaacgtagctctggcattattcgcctgcatacaataaagcaaatcatagatcaagacaaacatgctttattagatgtaacaccaaatgcagttgatcgtcttaactatgcccagtggtatccaattgttgtatttcttaaccctgattctaagcaaggagtaaaaacaatgagaatgaggttatgtccagaatctcggaaaagtgccaggaagttatacgagcgatctcataaacttcgtaaaaataatcaccatctttttacaactacaattaacttaaattcaatgaatgatggttggtatggtgcgctgaaagaagcaattcaacaacagcaaaaccagctggtatgggtttccgagggaaaggcggatggtgctacaagtgatgaccttgatttgcatgatgatcgtctgtcctacctgtcagctccaggtagtgaatactcaatgtatagcacggacagtagacacacttctgactatgaagacacagacacagaaggcggggcctacactgatcaagaactagatgaaactcttaatgatgaggttgggactccaccggagtctgccattacacggtcctctgagcctgtaagagaggactcctctggaatgcatcatgaaaaccaaacatatcctccttactcaccacaagcgcagccacaaccaattcatagaatagactcccctggatttaagccagcctctcaacagaaagcagaagcttcatctccagtcccttacctttcgcctgaaacaaacccagcatcatcaacctctgctgttaatcataatgtaaatttaactaatgtcagactggaggagcccaccccagctccttccacctcttactcaccacaagctgattctttaagaacaccaagtactgaggcagctcacataatgctaagagatcaagaaccatcattgtcgtcgcatgtagatccaacaaaggtgtatagaaaggatccatatcccgaggaaatgatgaggcagaaccatgttttgaaacagccagccgttagtcacccagggcacaggccagacaaagagcctaatctgacctatgaaccccaactcccatacgtagagaaacaagccagcagagacctcgagcagcccacatacagatacgagtcctcaagctatacggaccagttttctcgaaactatgaacatcgtctgcgatacgaagatcgcgtccccatgtatgaagaacagtggtcatattatgatgacaaacagccctacccatctcggccaccttttgataatcagcactctcaagaccttgactccagacagcatcccgaagagtcctcagaacgagggtactttccacgttttgaagagccagcccctctgtcttacgacagcagaccacgttacgaacaggcacctagagcatccgccctgcggcacgaagagcagccagctcctgggtatgacacacatggtagactcagaccggaagcccagccccacccttcagcagggcccaagcctgcagagtccaagcagtattttgagcaatattcacgcagttacgagcaagtaccaccccaaggatttacctctagagcaggtcattttgagcctctccatggtgctgcagctgtccctccgctgataccttcatctcagcataagccagaagctctgccttcaaacaccaaaccactgcctccacccccaactcaaaccgaagaagaggaagatccagcaatgaagccacagtctgtactcaccagagttaagatgtttgaaaacaaaagatctgcatccttagagaccaagaaggatgtaaatgacactggcagttttaagcctccagaagtagcatctaaaccttcaggtgctcccatcattggtcccaaacccacttctcagaatcaattcagtgaacatgacaaaactctgtacaggatcccagaacctcaaaaacctcaactgaagccacctgaagatattgttcggtccaatcattatgaccctgaagaagatgaagaatattatcgaaaacagctgtcatactttgaccgaagaagttttgagaataagcctcctgcacacattgctgccagccatctctccgagcctgcaaagccagctcattctcagaatcaatcaaatttttctagttattcttcaaagggaaagcctcctgaagctgatggtgtggatagatcatttggcgagaaacgctatgaacccatccaggccactccccctcctcctccattgccctcgcagtatgcccagccatctcagcctgtcaccagcgcgtctctccacatacattctaagggagcacatggtgaaggtaattcagtgtcattggattttcagaattccttagtgtccaaaccagacccacctccatctcagaataagccagcaactttcagaccaccaaaccgagaagatactgctcaggcagctttctatccccagaaaagttttccagataaagccccagttaatggaactgaacagactcagaaaacagtcactccagcatacaatcgattcacaccaaaaccatatacaagttctgcccgaccatttgaacgcaagtttgaaagtcctaaattcaatcacaatcttctgccaagtgaaactgcacataaacctgacttgtcttcaaaaactcccacttctccaaaaactcttgtgaaatcgcacagtttggcacagcctcctgagtttgacagtggagttgaaactttctctatccatgcagagaagcctaaatatcaaataaataatatcagcacagtgcctaaagctattcctgtgagtccttcagctgtggaagaggatgaagatgaagatggtcatactgtggtggccacagcccgaggcatatttaacagcaatgggggcgtgctgagttccatagaaactggtgttagtataattatccctcaaggagccattcccgaaggagttgagcaggaaatctatttcaaggtctgccgggacaacagcatccttccacctttagataaagagaaaggtgaaacactgctgagtcctttggtgatgtgtggtccccatggcctcaagttcctgaagcctgtggagctgcgcttaccacactgtgatcctaaaacctggcaaaacaagtgtcttcccggagatccaaattatctcgttggagcaaactgtgtttctgtccttattgaccacttttaactcttgaaatataggaacttaaataatgtgaaactggattaaacttaatctaaatggaaccactctatcaagtattataccttttttagagttgatactacagtttgttagtatgaggcatttgtttgaactgataaagatgagtgagcatgcccctgaaccatggtcggaaaacatgctacacactgcatgtttgtgattgacgggactgttggtattggctagaggttcaaagatattttgctttgtgatttttgtaatttttttatcgtcactgcttaacttcacatattgatttccgttaaaataccagccagtaaatgggggtgcatttgaggtctgttctttccaaagtacactgtttcaaactttactatggccctggcctagcatacgtacacattttattttattatgcatgaagtaatatgcacacattttttaaatgcacctggaatatataaccagtgttgtggatttaacagaaatgtacagcaaggagatttacaactgggggagggtgaagtgaagacaatgacttactgtacatgaaaacacatttttcttagggaaggatacaaaagcatgtgagactggttccatggcctcttcagatctctaacttcaccatattaccacagacatactaaccagcagaaatgccttaccctcatgttcttaattcttagctcattctccttgtgttactaagtttttatggcttttgtgcattatctagatactgtatcatgacaaagactgagtacgttgtgcatttggtggtttcagaaatgtgttatcacccagaagaaaatagtggtgtgatttggggatatttttttcttttcttttcttttcttttttttttttttttgacaaggggcagtggtggttttctgttctttctggctatgcatttgaaaattttgatgttttaaggatgcttgtacataatgcgtgcataccacttttgttcttggtttgtaaattaacttttataaactttaccttttttatacataaacaagaccacgtttctaaaggctacctttgtattctctcctgtacctcttgagccttgaactttgacctctgcagcaataaagcagcgtttctatgacacatgcaaggtcattttttttaagaaaaaggatgcacagagttgttacatttttaagtgctgcatttaaaagatacagttactcagaattctctagtttgattaaattcttgcaaagtatccctactgtaatttgtgatacaatgctgtgccctaaagtgtatttttttactaatagacaatttattatggcacatcagcacgatttctgtttagataatacaccactacattctgttaatcattaggtgtgactgaatttcttttgccgttattaaaaatctcaaatttctaaatctccaaaataaaactttttaaaataaagtgctggcttggtctgtttgcccactgttttctagtttcatgcagctttataatcctgttttaaaatcctgcacacaaatccctatcacccagcgtcacctaccacctcgtcgtctggtgttgcatgcagaatttctccccttggccagcatgtacagatgggtgggcagtgctcatctgaagggctcagactgaagtggggcagaaggacctggagacagagtgggagaaggcagcaggccgacttccccctgtgggtaaacacacacccctgcgtggagaaacacccctgcatggggacacacgtgcgtttgtgtgtgtgcgtgtaaccatttgtatatggttttattccccagataaatagcacgggcattgtttaatgtcacccacatttgggggaagaaaatgggtttagtgagcataaatattccattgtggacatcctacttacttaactgccacccctgttgacatttggattattgctatagtgtttcagtaaacacctttgtggactgaatccatctatgtggattttatttttttcatctttgttaaggtataatttacatagagtaagttactgtttttaaaatgtatagttcaaattttgacaaacacatactgtttatttaccacggttaatacatacaacagtttctttatcttctctaatcatttgtacccctttatactcaacccttcttccagcccctggcaggatgatctcttctgtttctatagttgcctttttgacagtgtcatataaatggaatcatacaata

SEQ ID NO: 344099 - DNA, 8462 bp, Homo sapiens
cagtcggcgccggtgaacgagagcaacgcttctgaccctgccggagctcctcggagatgaaagccatgacgcgccttgcagaaaatgcattccgccttccgtgggaacaacgccgaggcacgcggtgacagccgtgaccatgctgtttgcccagtgaaggaaacaactgtcgggtatcggctctgccggcctttccagccgcactcatgcatggggctcaccccatgatgtgcgtggcttgtcgaggagcaagtggacaagtctcttaaggaaagctttggtgcacaggcgctttctccttgggggcgaattctgccagaccttggataaaaacaaacaggaagactcgcacggcagcggaaactgtcttccaagttacttgggttacccggcttttccttccgcgcttggggtcgggaccccggccgctcgtcccgccccctccccgcctcgcctcgcctcgcctcgtccagccccgcccccgccgggccgggcatgctcagtgggccgggccggcaggtttgcgtggccgctgagttgccggcgccggctgagccagcggacgccgcgttccttggcggccgccggttcccgggaagttacgtggcgaagccggcttccgaggagacgccgggaggccacgggtgctgctgacgggcgggcgaccgggcgaggccgacgtggccgggctgcgaaagctgcgggaggccgagtgggtggccgcgctcggagggaggtgccggtcgggcgcgccccgtggagaagacccgggcggggcgggcgcttcccggacttttgtccgagttgaattccctccccctgggccgggcccttccggccgcccccgcccgtgccccgctcgctctcgggagatgtttatttgggctgtggcgtgaggagcgggcgggccagcgccgcggagtttcgggtccgaggagcctcgcgcggcgctggagagagacaagatgtccgccagagctgcggccgccaagagcacagcaatggaggaaacagctatatgggaacaacatacagtgacgcttcacagggctcctggatttggatttggaattgcaatatctggtggacgagataatcctcattttcagagtggggaaacgtcaatagtgatttcagatgtgctgaaaggaggaccagctgaaggacagctacaggaaaatgaccgagttgcaatggttaacggagtttcaatggataatgttgaacatgcttttgctgttcagcaactaaggaaaagtgggaaaaatgcaaaaattacaattagaaggaagaagaaagttcaaataccagtaagtcgtcctgatcctgaaccagtatctgataatgaagaagatagttatgatgaggaaatacatgatccaagaagtggccggagtggtgtggttaacagaaggagtgagaagatttggccgagggatagaagtgcaagtagagagaggagcttgtccccgcggtcagacaggcggtcagtggcttccagccagcctgctaaacctactaaagtcacactggtgaaatcccggaaaaatgaagaatatggtcttcgattggcaagccatatatttgttaaggaaatttcacaagatagtttggcagcaagagatggcaatattcaagaaggtgatgttgtattgaagataaatggtactgtgacagaaaatatgtcattgacagatgcaaagacattgatagaaaggtctaaaggcaaattaaaaatggtagttcaaagagatgaacgggctacgctattgaatgtccctgatctttctgacagcatccactctgctaatgcctctgagagagacgacatttcagaaattcagtcactggcatcagatcattctggtcgatcacacgataggcctccccgccgcagccggtcacgatctcctgaccagcggtcagagccttctgatcattccaggcactcgccgcagcagccaagcaatggcagtctccggagtagagatgaagagagaatttctaaacctggggctgtctcaactcctgtaaagcatgctgatgatcacacacctaaaacagtggaagaagttacagttgaaagaaatgagaaacaaacaccttctcttccagaaccaaagcctgtgtatgcccaagttgggcaaccagatgtggatttacctgtcagtccatctgatggtgtcctacctaattcaactcatgaagatgggattcttcggcccagcatgaaattggtaaaattcagaaaaggagatagtgtgggtttgcggctggctggtggaaatgatgttggaatatttgtagctggcgttctagaagatagccctgcagccaaggaaggcttagaggaaggtgatcaaattctcagggtaaacaacgtagattttacaaatatcataagagaagaagccgtccttttcctgcttgacctccctaaaggagaagaagtgaccatattggctcagaagaagaaggatgtttatcgtcgcattgtagaatcagatgtaggagattctttctatattagaacccattttgaatatgaaaaggaatctccctatggacttagttttaacaaaggagaggtgttccgtgctgtggataccttgtacaatggaaaactgggctcttggcttgctattcgaattggtaaaaatcataaggaggtagaacgaggcatcatccctaataagaacagagctgagcagctagccagtgtacagtatacacttccaaaaacagcaggcggagaccgtgctgacttctggagattcagaggtcttcgcagctccaagagaaatcttcgaaaaagcagagaggatttgtccgctcagcctgttcaaacaaagtttccagcttatgaaagagtggttcttcgagaagctggatttctgaggcctgtaaccatttttggaccaatagctgatgttgccagagaaaagctggcaagagaagaaccagatatttatcaaattgcaaagagtgaaccacgagacgctggaactgaccaacgtagctctggcattattcgcctgcatacaataaagcaaatcatagatcaagacaaacatgctttattagatgtaacaccaaatgcagttgatcgtcttaactatgcccagtggtatccaattgttgtatttcttaaccctgattctaagcaaggagtaaaaacaatgagaatgaggttatgtccagaatctcggaaaagtgccaggaagttatacgagcgatctcataaacttcgtaaaaataatcaccatctttttacaactacaattaacttaaattcaatgaatgatggttggtatggtgcgctgaaagaagcaattcaacaacagcaaaaccagctggtatgggtttccgagggaaaggcggatggtgctacaagtgatgaccttgatttgcatgatgatcgtctgtcctacctgtcagctccaggtagtgaatactcaatgtatagcacggacagtagacacacttctgactatgaagacacagacacagaaggcggggcctacactgatcaagaactagatgaaactcttaatgatgaggttgggactccaccggagtctgccattacacggtcctctgagcctgtaagagaggactcctctggaatgcatcatgaaaaccaaacatatcctccttactcaccacaagcgcagccacaaccaattcatagaatagactcccctggatttaagccagcctctcaacagaaagcagaagcttcatctccagtcccttacctttcgcctgaaacaaacccagcatcatcaacctctgctgttaatcataatgtaaatttaactaatgtcagactggaggagcccaccccagctccttccacctcttactcaccacaagctgattctttaagaacaccaagtactgaggcagctcacataatgctaagagatcaagaaccatcattgtcgtcgcatgtagatccaacaaaggtgtatagaaaggatccatatcccgaggaaatgatgaggcagaaccatgttttgaaacagccagccgttagtcacccagggcacaggccagacaaagagcctaatctgacctatgaaccccaactcccatacgtagagaaacaagccagcagagacctcgagcagcccacatacagatacgagtcctcaagctatacggaccagttttctcgaaactatgaacatcgtctgcgatacgaagatcgcgtccccatgtatgaagaacagtggtcatattatgatgacaaacagccctacccatctcggccaccttttgataatcagcactctcaagaccttgactccagacagcatcccgaagagtcctcagaacgagggtactttccacgttttgaagagccagcccctctgtcttacgacagcagaccacgttacgaacaggcacctagagcatccgccctgcggcacgaagagcagccagctcctgggtatgacacacatggtagactcagaccggaagcccagccccacccttcagcagggcccaagcctgcagagtccaagcagtattttgagcaatattcacgcagttacgagcaagtaccaccccaaggatttacctctagagcaggtcattttgagcctctccatggtgctgcagctgtccctccgctgataccttcatctcagcataagccagaagctctgccttcaaacaccaaaccactgcctccacccccaactcaaaccgaagaagaggaagatccagcaatgaagccacagtctgtactcaccagagttaagatgtttgaaaacaaaagatctgcatccttagagaccaagaaggatgtaaatgacactggcagttttaagcctccagaagtagcatctaaaccttcaggtgctcccatcattggtcccaaacccacttctcagaatcaattcagtgaacatgacaaaactctgtacaggatcccagaacctcaaaaacctcaactgaagccacctgaagatattgttcggtccaatcattatgaccctgaagaagatgaagaatattatcgaaaacagctgtcatactttgaccgaagaagttttgagaataagcctcctgcacacattgctgccagccatctctccgagcctgcaaagccagctcattctcagaatcaatcaaatttttctagttattcttcaaagggaaagcctcctgaagctgatggtgtggatagatcatttggcgagaaacgctatgaacccatccaggccactccccctcctcctccattgccctcgcagtatgcccagccatctcagcctgtcaccagcgcgtctctccacatacattctaagggagcacatggtgaaggtaattcagtgtcattggattttcagaattccttagtgtccaaaccagacccacctccatctcagaataagccagcaactttcagaccaccaaaccgagaagatactgctcaggcagctttctatccccagaaaagttttccagataaagccccagttaatggaactgaacagactcagaaaacagtcactccagcatacaatcgattcacaccaaaaccatatacaagttctgcccgaccatttgaacgcaagtttgaaagtcctaaattcaatcacaatcttctgccaagtgaaactgcacataaacctgacttgtcttcaaaaactcccacttctccaaaaactcttgtgaaatcgcacagtttggcacagcctcctgagtttgacagtggagttgaaactttctctatccatgcagagaagcctaaatatcaaataaataatatcagcacagtgcctaaagctattcctgtgagtccttcagctgtggaagaggatgaagatgaagatggtcatactgtggtggccacagcccgaggcatatttaacagcaatgggggcgtgctgagttccatagaaactggtgttagtataattatccctcaaggagccattcccgaaggagttgagcaggaaatctatttcaaggtctgccgggacaacagcatccttccacctttagataaagagaaaggtgaaacactgctgagtcctttggtgatgtgtggtccccatggcctcaagttcctgaagcctgtggagctgcgcttaccacactgtgcgtccatgactcctgacggtgatcctaaaacctggcaaaacaagtgtcttcccggagatccaaattatctcgttggagcaaactgtgtttctgtccttattgaccacttttaactcttgaaatataggaacttaaataatgtgaaactggattaaacttaatctaaatggaaccactctatcaagtattataccttttttagagttgatactacagtttgttagtatgaggcatttgtttgaactgataaagatgagtgagcatgcccctgaaccatggtcggaaaacatgctacacactgcatgtttgtgattgacgggactgttggtattggctagaggttcaaagatattttgctttgtgatttttgtaatttttttatcgtcactgcttaacttcacatattgatttccgttaaaataccagccagtaaatgggggtgcatttgaggtctgttctttccaaagtacactgtttcaaactttactatggccctggcctagcatacgtacacattttattttattatgcatgaagtaatatgcacacattttttaaatgcacctggaatatataaccagtgttgtggatttaacagaaatgtacagcaaggagatttacaactgggggagggtgaagtgaagacaatgacttactgtacatgaaaacacatttttcttagggaaggatacaaaagcatgtgagactggttccatggcctcttcagatctctaacttcaccatattaccacagacatactaaccagcagaaatgccttaccctcatgttcttaattcttagctcattctccttgtgttactaagtttttatggcttttgtgcattatctagatactgtatcatgacaaagactgagtacgttgtgcatttggtggtttcagaaatgtgttatcacccagaagaaaatagtggtgtgatttggggatatttttttcttttcttttcttttcttttttttttttttttgacaaggggcagtggtggttttctgttctttctggctatgcatttgaaaattttgatgttttaaggatgcttgtacataatgcgtgcataccacttttgttcttggtttgtaaattaacttttataaactttaccttttttatacataaacaagaccacgtttctaaaggctacctttgtattctctcctgtacctcttgagccttgaactttgacctctgcagcaataaagcagcgtttctatgacacatgcaaggtcattttttttaagaaaaaggatgcacagagttgttacatttttaagtgctgcatttaaaagatacagttactcagaattctctagtttgattaaattcttgcaaagtatccctactgtaatttgtgatacaatgctgtgccctaaagtgtatttttttactaatagacaatttattatggcacatcagcacgatttctgtttagataatacaccactacattctgttaatcattaggtgtgactgaatttcttttgccgttattaaaaatctcaaatttctaaatctccaaaataaaactttttaaaataaagtgctggcttggtctgtttgcccactgttttctagtttcatgcagctttataatcctgttttaaaatcctgcacacaaatccctatcacccagcgtcacctaccacctcgtcgtctggtgttgcatgcagaatttctccccttggccagcatgtacagatgggtgggcagtgctcatctgaagggctcagactgaagtggggcagaaggacctggagacagagtgggagaaggcagcaggccgacttccccctgtgggtaaacacacacccctgcgtggagaaacacccctgcatggggacacacgtgcgtttgtgtgtgtgcgtgtaaccatttgtatatggttttattccccagataaatagcacgggcattgtttaatgtcacccacatttgggggaagaaaatgggtttagtgagcataaatattccattgtggacatcctacttacttaactgccacccctgttgacatttggattattgctatagtgtttcagtaaacacctttgtggactgaatccatctatgtggattttatttttttcatctttgttaaggtataatttacatagagtaagttactgtttttaaaatgtatagttcaaattttgacaaacacatactgtttatttaccacggttaatacatacaacagtttctttatcttctctaatcatttgtacccctttatactcaacccttcttccagcccctggcaggatgatctcttctgtttctatagttgcctttttgacagtgtcatataaatggaatcatacaata

SEQ ID NO: 344100 - DNA, 8390 bp, Homo sapiens
cagtcggcgccggtgaacgagagcaacgcttctgaccctgccggagctcctcggagatgaaagccatgacgcgccttgcagaaaatgcattccgccttccgtgggaacaacgccgaggcacgcggtgacagccgtgaccatgctgtttgcccagtgaaggaaacaactgtcgggtatcggctctgccggcctttccagccgcactcatgcatggggctcaccccatgatgtgcgtggcttgtcgaggagcaagtggacaagtctcttaaggaaagctttggtgcacaggcgctttctccttgggggcgaattctgccagaccttggataaaaacaaacaggaagactcgcacggcagcggaaactgtcttccaagttacttgggttacccggcttttccttccgcgcttggggtcgggaccccggccgctcgtcccgccccctccccgcctcgcctcgcctcgcctcgtccagccccgcccccgccgggccgggcatgctcagtgggccgggccggcaggtttgcgtggccgctgagttgccggcgccggctgagccagcggacgccgcgttccttggcggccgccggttcccgggaagttacgtggcgaagccggcttccgaggagacgccgggaggccacgggtgctgctgacgggcgggcgaccgggcgaggccgacgtggccgggctgcgaaagctgcgggaggccgagtgggtggccgcgctcggagggaggtgccggtcgggcgcgccccgtggagaagacccgggcggggcgggcgcttcccggacttttgtccgagttgaattccctccccctgggccgggcccttccggccgcccccgcccgtgccccgctcgctctcgggagatgtttatttgggctgtggcgtgaggagcgggcgggccagcgccgcggagtttcgggtccgaggagcctcgcgcggcgctggagagagacaagatgtccgccagagctgcggccgccaagagcacagcaatggaggaaacagctatatgggaacaacatacagtgacgcttcacagggctcctggatttggatttggaattgcaatatctggtggacgagataatcctcattttcagagtggggaaacgtcaatagtgatttcagatgtgctgaaaggaggaccagctgaaggacagctacaggaaaatgaccgagttgcaatggttaacggagtttcaatggataatgttgaacatgcttttgctgttcagcaactaaggaaaagtgggaaaaatgcaaaaattacaattagaaggaagaagaaagttcaaataccagtaagtcgtcctgatcctgaaccagtatctgataatgaagaagatagttatgatgaggaaatacatgatccaagaagtggccggagtggtgtggttaacagaaggagtgagaagatttggccgagggatagaagtgcaagtagagagaggagcttgtccccgcggtcagacaggcggtcagtggcttccagccagcctgctaaacctactaaagtcacactggtgaaatcccggaaaaatgaagaatatggtcttcgattggcaagccatatatttgttaaggaaatttcacaagatagtttggcagcaagagatggcaatattcaagaaggtgatgttgtattgaagataaatggtactgtgacagaaaatatgtcattgacagatgcaaagacattgatagaaaggtctaaaggcaaattaaaaatggtagttcaaagagatgaacgggctacgctattgaatgtccctgatctttctgacagcatccactctgctaatgcctctgagagagacgacatttcagaaattcagtcactggcatcagatcattctggtcgatcacacgataggcctccccgccgcagccggtcacgatctcctgaccagcggtcagagccttctgatcattccaggcactcgccgcagcagccaagcaatggcagtctccggagtagagatgaagagagaatttctaaacctggggctgtctcaactcctgtaaagcatgctgatgatcacacacctaaaacagtggaagaagttacagttgaaagaaatgagaaacaaacaccttctcttccagaaccaaagcctgtgtatgcccaagttgggcaaccagatgtggatttacctgtcagtccatctgatggtgtcctacctaattcaactcatgaagatgggattcttcggcccagcatgaaattggtaaaattcagaaaaggagatagtgtgggtttgcggctggctggtggaaatgatgttggaatatttgtagctggcgttctagaagatagccctgcagccaaggaaggcttagaggaaggtgatcaaattctcagggtaaacaacgtagattttacaaatatcataagagaagaagccgtccttttcctgcttgacctccctaaaggagaagaagtgaccatattggctcagaagaagaaggatgtttatcgtcgcattgtagaatcagatgtaggagattctttctatattagaacccattttgaatatgaaaaggaatctccctatggacttagttttaacaaaggagaggtgttccgtgctgtggataccttgtacaatggaaaactgggctcttggcttgctattcgaattggtaaaaatcataaggaggtagaacgaggcatcatccctaataagaacagagctgagcagctagccagtgtacagtatacacttccaaaaacagcaggcggagaccgtgctgacttctggagattcagaggtcttcgcagctccaagagaaatcttcgaaaaagcagagaggatttgtccgctcagcctgttcaaacaaagtttccagcttatgaaagagtggttcttcgagaagctggatttctgaggcctgtaaccatttttggaccaatagctgatgttgccagagaaaagctggcaagagaagaaccagatatttatcaaattgcaaagagtgaaccacgagacgctggaactgaccaacgtagctctggcattattcgcctgcatacaataaagcaaatcatagatcaagacaaacatgctttattagatgtaacaccaaatgcagttgatcgtcttaactatgcccagtggtatccaattgttgtatttcttaaccctgattctaagcaaggagtaaaaacaatgagaatgaggttatgtccagaatctcggaaaagtgccaggaagttatacgagcgatctcataaacttcgtaaaaataatcaccatctttttacaactacaattaacttaaattcaatgaatgatggttggtatggtgcgctgaaagaagcaattcaacaacagcaaaaccagctggtatgggtttccgagggaaaggcggatggtgctacaagtgatgaccttgatttgcatgatgatcgtctgtcctacctgtcagctccaggtagtgaatactcaatgtatagcacggacagtagacacacttctgactatgaagacacagacacagaaggcggggcctacactgatcaagaactagatgaaactcttaatgatgaggttgggactccaccggagtctgccattacacggtcctctgagcctgtaagagaggactcctctggaatgcatcatgaaaaccaaacatatcctccttactcaccacaagcgcagccacaaccaattcatagaatagactcccctggatttaagccagcctctcaacagaaagcagaagcttcatctccagtcccttacctttcgcctgaaacaaacccagcatcatcaacctctgctgttaatcataatgtaaatttaactaatgtcagactggaggagcccaccccagctccttccacctcttactcaccacaagctgattctttaagaacaccaagtactgaggcagctcacataatgctaagagatcaagaaccatcattgtcgtcgcatgtagatccaacaaaggtgtatagaaaggatccatatcccgaggaaatgatgaggcagaaccatgttttgaaacagccagccgttagtcacccagggcacaggccagacaaagagcctaatctgacctatgaaccccaactcccatacgtagagaaacaagccagcagagacctcgagcagcccacatacagatacgagtcctcaagctatacggaccagttttctcgaaactatgaacatcgtctgcgatacgaagatcgcgtccccatgtatgaagaacagtggtcatattatgatgacaaacagccctacccatctcggccaccttttgataatcagcactctcaagaccttgactccagacagcatcccgaagagtcctcagaacgagggtactttccacgttttgaagagccagcccctctgtcttacgacagcagaccacgttacgaacaggcacctagagcatccgccctgcggcacgaagagcagccagctcctgggtatgacacacatggtagactcagaccggaagcccagccccacccttcagcagggcccaagcctgcagagtccaagcagtattttgagcaatattcacgcagttacgagcaagtaccaccccaaggatttacctctagagcaggtcattttgagcctctccatggtgctgcagctgtccctccgctgataccttcatctcagcataagccagaagctctgccttcaaacaccaaaccactgcctccacccccaactcaaaccgaagaagaggaagatccagcaatgaagccacagtctgtactcaccagagttaagatgtttgaaaacaaaagatctgcatccttagagaccaagaaggatgtaaatgacactggcagttttaagcctccagaagtagcatctaaaccttcaggtgctcccatcattggtcccaaacccacttctcagaatcaattcagtgaacatgacaaaactctgtacaggatcccagaacctcaaaaacctcaactgaagccacctgaagatattgttcggtccaatcattatgaccctgaagaagatgaagaatattatcgaaaacagctgtcatactttgaccgaagaagttttgagaataagcctcctgcacacattgctgccagccatctctccgagcctgcaaagccagctcattctcagaatcaatcaaatttttctagttattcttcaaagggaaagcctcctgaagctgatggtgtggatagatcatttggcgagaaacgctatgaacccatccaggccactccccctcctcctccattgccctcgcagtatgcccagccatctcagcctgtcaccagcgcgtctctccacatacattctaagggagcacatggtgaaggtaattcagtgtcattggattttcagaattccttagtgtccaaaccagacccacctccatctcagaataagccagcaactttcagaccaccaaaccgagaagatactgctcaggcagctttctatccccagaaaagttttccagataaagccccagttaatggaactgaacagactcagaaaacagtcactccagcatacaatcgattcacaccaaaaccatatacaagttctgcccgaccatttgaacgcaagtttgaaagtcctaaattcaatcacaatcttctgccaagtgaaactgcacataaacctgacttgtcttcaaaaactcccacttctccaaaaactcttgtgaaatcgcacagtttggcacagcctcctgagtttgacagtggagttgaaactttctctatccatgcagagaagcctaaatatcaaataaataatatcagcacagtgcctaaagctattcctgtgagtccttcagctgtggaagaggatgaagatgaagatggtcatactgtggtggccacagcccgaggcatatttaacagcaatgggggcgtgctgagttccatagaaactggtgttagtataattatccctcaaggagccattcccgaaggagttgagcaggaaatctatttcaaggtctgccgggacaacagcatccttccacctttagataaagagaaaggtgaaacactgctgagtcctttggtgatgtgtggtccccatggcctcaagttcctgaagcctgtggagctgcgcttaccacactgtgcgtccatgactcctgacgctgtccttattgaccacttttaactcttgaaatataggaacttaaataatgtgaaactggattaaacttaatctaaatggaaccactctatcaagtattataccttttttagagttgatactacagtttgttagtatgaggcatttgtttgaactgataaagatgagtgagcatgcccctgaaccatggtcggaaaacatgctacacactgcatgtttgtgattgacgggactgttggtattggctagaggttcaaagatattttgctttgtgatttttgtaatttttttatcgtcactgcttaacttcacatattgatttccgttaaaataccagccagtaaatgggggtgcatttgaggtctgttctttccaaagtacactgtttcaaactttactatggccctggcctagcatacgtacacattttattttattatgcatgaagtaatatgcacacattttttaaatgcacctggaatatataaccagtgttgtggatttaacagaaatgtacagcaaggagatttacaactgggggagggtgaagtgaagacaatgacttactgtacatgaaaacacatttttcttagggaaggatacaaaagcatgtgagactggttccatggcctcttcagatctctaacttcaccatattaccacagacatactaaccagcagaaatgccttaccctcatgttcttaattcttagctcattctccttgtgttactaagtttttatggcttttgtgcattatctagatactgtatcatgacaaagactgagtacgttgtgcatttggtggtttcagaaatgtgttatcacccagaagaaaatagtggtgtgatttggggatatttttttcttttcttttcttttcttttttttttttttttgacaaggggcagtggtggttttctgttctttctggctatgcatttgaaaattttgatgttttaaggatgcttgtacataatgcgtgcataccacttttgttcttggtttgtaaattaacttttataaactttaccttttttatacataaacaagaccacgtttctaaaggctacctttgtattctctcctgtacctcttgagccttgaactttgacctctgcagcaataaagcagcgtttctatgacacatgcaaggtcattttttttaagaaaaaggatgcacagagttgttacatttttaagtgctgcatttaaaagatacagttactcagaattctctagtttgattaaattcttgcaaagtatccctactgtaatttgtgatacaatgctgtgccctaaagtgtatttttttactaatagacaatttattatggcacatcagcacgatttctgtttagataatacaccactacattctgttaatcattaggtgtgactgaatttcttttgccgttattaaaaatctcaaatttctaaatctccaaaataaaactttttaaaataaagtgctggcttggtctgtttgcccactgttttctagtttcatgcagctttataatcctgttttaaaatcctgcacacaaatccctatcacccagcgtcacctaccacctcgtcgtctggtgttgcatgcagaatttctccccttggccagcatgtacagatgggtgggcagtgctcatctgaagggctcagactgaagtggggcagaaggacctggagacagagtgggagaaggcagcaggccgacttccccctgtgggtaaacacacacccctgcgtggagaaacacccctgcatggggacacacgtgcgtttgtgtgtgtgcgtgtaaccatttgtatatggttttattccccagataaatagcacgggcattgtttaatgtcacccacatttgggggaagaaaatgggtttagtgagcataaatattccattgtggacatcctacttacttaactgccacccctgttgacatttggattattgctatagtgtttcagtaaacacctttgtggactgaatccatctatgtggattttatttttttcatctttgttaaggtataatttacatagagtaagttactgtttttaaaatgtatagttcaaattttgacaaacacatactgtttatttaccacggttaatacatacaacagtttctttatcttctctaatcatttgtacccctttatactcaacccttcttccagcccctggcaggatgatctcttctgtttctatagttgcctttttgacagtgtcatataaatggaatcatacaata

SEQ ID NO: 344101 - DNA, 4210 bp, Homo sapiens
cggccgcagctctggcggacatcttgtctctctccagcgccgcgcgaggctcctcggacccgaaactccgcggcgctggcccgcccgctcctcacgccacagaccacgttacgaacaggcacctagagcatccgccctgcggcacgaagagcagccagctcctgggtatgacacacatggtagactcagaccggaagcccagccccacccttcagcagggcccaagcctgcagagtccaagcagtattttgagcaatattcacgcagttacgagcaagtaccaccccaaggatttacctctagagcaggtcattttgagcctctccatggtgctgcagctgtccctccgctgataccttcatctcagcataagccagaagctctgccttcaaacaccaaaccactgcctccacccccaactcaaaccgaagaagaggaagatccagcaatgaagccacagtctgtactcaccagagttaagatgtttgaaaacaaaagatctgcatccttagagaccaagaaggatgtaaatgacactggcagttttaagcctccagaagtagcatctaaaccttcaggtgctcccatcattggtcccaaacccacttctcagaatcaattcagtgaacatgacaaaactctgtacaggatcccagaacctcaaaaacctcaactgaagccacctgaagatattgttcggtccaatcattatgaccctgaagaagatgaagaatattatcgaaaacagctgtcatactttgaccgaagaagttttgagaataagcctcctgcacacattgctgccagccatctctccgagcctgcaaagccagctcattctcagaatcaatcaaatttttctagttattcttcaaagggaaagcctcctgaagctgatggtgtggatagatcatttggcgagaaacgctatgaacccatccaggccactccccctcctcctccattgccctcgcagtatgcccagccatctcagcctgtcaccagcgcgtctctccacatacattctaagggagcacatggtgaaggtaattcagtgtcattggattttcagaattccttagtgtccaaaccagacccacctccatctcagaataagccagcaactttcagaccaccaaaccgagaagatactgctcaggcagctttctatccccagaaaagttttccagataaagccccagttaatggaactgaacagactcagaaaacagtcactccagcatacaatcgattcacaccaaaaccatatacaagttctgcccgaccatttgaacgcaagtttgaaagtcctaaattcaatcacaatcttctgccaagtgaaactgcacataaacctgacttgtcttcaaaaactcccacttctccaaaaactcttgtgaaatcgcacagtttggcacagcctcctgagtttgacagtggagttgaaactttctctatccatgcagagaagcctaaatatcaaataaataatatcagcacagtgcctaaagctattcctgtgagtccttcagctgtggaagaggatgaagatgaagatggtcatactgtggtggccacagcccgaggcatatttaacagcaatgggggcgtgctgagttccatagaaactggtgttagtataattatccctcaaggagccattcccgaaggagttgagcaggaaatctatttcaaggtctgccgggacaacagcatccttccacctttagataaagagaaaggtgaaacactgctgagtcctttggtgatgtgtggtccccatggcctcaagttcctgaagcctgtggagctgcgcttaccacactgtgcgtccatgactcctgacggttggtcttttgctctaaaatcatccgactcctcgtcgggtgatcctaaaacctggcaaaacaagtgtcttcccggagatccaaattatctcgttggagcaaactgtgtttctgtccttattgaccacttttaactcttgaaatataggaacttaaataatgtgaaactggattaaacttaatctaaatggaaccactctatcaagtattataccttttttagagttgatactacagtttgttagtatgaggcatttgtttgaactgataaagatgagtgagcatgcccctgaaccatggtcggaaaacatgctacacactgcatgtttgtgattgacgggactgttggtattggctagaggttcaaagatattttgctttgtgatttttgtaatttttttatcgtcactgcttaacttcacatattgatttccgttaaaataccagccagtaaatgggggtgcatttgaggtctgttctttccaaagtacactgtttcaaactttactatggccctggcctagcatacgtacacattttattttattatgcatgaagtaatatgcacacattttttaaatgcacctggaatatataaccagtgttgtggatttaacagaaatgtacagcaaggagatttacaactgggggagggtgaagtgaagacaatgacttactgtacatgaaaacacatttttcttagggaaggatacaaaagcatgtgagactggttccatggcctcttcagatctctaacttcaccatattaccacagacatactaaccagcagaaatgccttaccctcatgttcttaattcttagctcattctccttgtgttactaagtttttatggcttttgtgcattatctagatactgtatcatgacaaagactgagtacgttgtgcatttggtggtttcagaaatgtgttatcacccagaagaaaatagtggtgtgatttggggatatttttttcttttcttttcttttcttttttttttttttttgacaaggggcagtggtggttttctgttctttctggctatgcatttgaaaattttgatgttttaaggatgcttgtacataatgcgtgcataccacttttgttcttggtttgtaaattaacttttataaactttaccttttttatacataaacaagaccacgtttctaaaggctacctttgtattctctcctgtacctcttgagccttgaactttgacctctgcagcaataaagcagcgtttctatgacacatgcaaggtcattttttttaagaaaaaggatgcacagagttgttacatttttaagtgctgcatttaaaagatacagttactcagaattctctagtttgattaaattcttgcaaagtatccctactgtaatttgtgatacaatgctgtgccctaaagtgtatttttttactaatagacaatttattatggcacatcagcacgatttctgtttagataatacaccactacattctgttaatcattaggtgtgactgaatttcttttgccgttattaaaaatctcaaatttctaaatctccaaaataaaactttttaaaataaagtgctggcttggtctgtttgcccactgttttctagtttcatgcagctttataatcctgttttaaaatcctgcacacaaatccctatcacccagcgtcacctaccacctcgtcgtctggtgttgcatgcagaatttctccccttggccagcatgtacagatgggtgggcagtgctcatctgaagggctcagactgaagtggggcagaaggacctggagacagagtgggagaaggcagcaggccgacttccccctgtgggtaaacacacacccctgcgtggagaaacacccctgcatggggacacacgtgcgtttgtgtgtgtgcgtgtaaccatttgtatatggttttattccccagataaatagcacgggcattgtttaatgtcacccacatttgggggaagaaaatgggtttagtgagcataaatattccattgtggacatcctacttacttaactgccacccctgttgacatttggattattgctatagtgtttcagtaaacacctttgtggactgaatccatctatgtggattttatttttttcatctttgttaaggtataatttacatagagtaagttactgtttttaaaatgtatagttcaaattttgacaaacacatactgtttatttaccacggttaatacatacaacagtttctttatcttctctaatcatttgtacccctttatactcaacccttcttccagcccctggcaggatgatctcttctgtttctatagttgcctttttgacagtgtcatataaatggaatcatacaata

SEQ ID NO: 344102 - DNA, 2171 bp, Homo sapiens
gttttttggcagtttttacatttatttaaacagaaaacgtgcacatgagctgcctactcattttcttcactgcgcagcctggcattggggttggtgactctgatggccagttgggcagctctttccacgatggctttgcggttcttggaggaaacattgtgagcgatctcggcacagtaagatttgttgcacatcagcagcacttccagctccttgacgttgtggaccaggaacttccggaagccactgggcagcatgtgctttgtttttttgttgcttccataaccaatgttgggcatcaagatctggcccttgaatcttctacgaaccctgttgtcaatgcctctgggtttccgccagttacgcttaattttgacatatcggtctgactggtgccggatgaacttcttggttctctttttgacgatcttgggcttcctcggcgctgctacggaggtggcagccaagtgaagacaatgacttactgtacatgaaaacacatttttcttagggaaggatacaaaagcatgtgagactggttccatggcctcttcagatctctaacttcaccatattaccacagacatactaaccagcagaaatgccttaccctcatgttcttaattcttagctcattctccttgtgttactaagtttttatggcttttgtgcattatctagatactgtatcatgacaaagactgagtacgttgtgcatttggtggtttcagaaatgtgttatcacccagaagaaaatagtggtgtgatttggggatatttttttcttttcttttcttttcttttttttttttttttgacaaggggcagtggtggttttctgttctttctggctatgcatttgaaaattttgatgttttaaggatgcttgtacataatgcgtgcataccacttttgttcttggtttgtaaattaacttttataaactttaccttttttatacataaacaagaccacgtttctaaaggctacctttgtattctctcctgtacctcttgagccttgaactttgacctctgcagcaataaagcagcgtttctatgacacatgcaaggtcattttttttaagaaaaaggatgcacagagttgttacatttttaagtgctgcatttaaaagatacagttactcagaattctctagtttgattaaattcttgcaaagtatccctactgtaatttgtgatacaatgctgtgccctaaagtgtatttttttactaatagacaatttattatggcacatcagcacgatttctgtttagataatacaccactacattctgttaatcattaggtgtgactgaatttcttttgccgttattaaaaatctcaaatttctaaatctccaaaataaaactttttaaaataaagtgctggcttggtctgtttgcccactgttttctagtttcatgcagctttataatcctgttttaaaatcctgcacacaaatccctatcacccagcgtcacctaccacctcgtcgtctggtgttgcatgcagaatttctccccttggccagcatgtacagatgggtgggcagtgctcatctgaagggctcagactgaagtggggcagaaggacctggagacagagtgggagaaggcagcaggccgacttccccctgtgggtaaacacacacccctgcgtggagaaacacccctgcatggggacacacgtgcgtttgtgtgtgtgcgtgtaaccatttgtatatggttttattccccagataaatagcacgggcattgtttaatgtcacccacatttgggggaagaaaatgggtttagtgagcataaatattccattgtggacatcctacttacttaactgccacccctgttgacatttggattattgctatagtgtttcagtaaacacctttgtggactgaatccatctatgtggattttatttttttcatctttgttaaggtataatttacatagagtaagttactgtttttaaaatgtatagttcaaattttgacaaacacatactgtttatttaccacggttaatacatacaacagtttctttatcttctctaatcatttgtacccctttatactcaacccttcttccagcccctggcaggatgatctcttctgtttctatagttgcctttttgacagtgtcatataaatggaatcatacaata

SEQ ID NO: 344103 - DNA, 6270 bp, Homo sapiens
cagtcggcgccggtgaacgagagcaacgcttctgaccctgccggagctcctcggagatgaaagccatgacgcgccttgcagaaaatgcattccgccttccgtgggaacaacgccgaggcacgcggtgacagccgtgaccatgctgtttgcccagtgaaggaaacaactgtcgggtatcggctctgccggcctttccagccgcactcatgcatggggctcaccccatgatgtgcgtggcttgtcgaggagcaagtggacaagtctcttaaggaaagctttggtgcacaggcgctttctccttgggggcgaattctgccagaccttggataaaaacaaacaggaagactcgcacggcagcggaaactgtcttccaagttacttgggttacccggcttttccttccgcgcttggggtcgggaccccggccgctcgtcccgccccctccccgcctcgcctcgcctcgcctcgtccagccccgcccccgccgggccgggcatgctcagtgggccgggccggcaggtttgcgtggccgctgagttgccggcgccggctgagccagcggacgccgcgttccttggcggccgccggttcccgggaagttacgtggcgaagccggcttccgaggagacgccgggaggccacgggtgctgctgacgggcgggcgaccgggcgaggccgacgtggccgggctgcgaaagctgcgggaggccgagtgggtggccgcgctcggagggaggtgccggtcgggcgcgccccgtggagaagacccgggcggggcgggcgcttcccggacttttgtccgagttgaattccctccccctgggccgggcccttccggccgcccccgcccgtgccccgctcgctctcgggagatgtttatttgggctgtggcgtgaggagcgggcgggccagcgccgcggagtttcgggtccgaggagcctcgcgcggcgctggagagagacaagatgtccgccagagctgcggccgccaagagcacagcaatggaggaaacagctatatgggaacaacatacagtgacgcttcacagggctcctggatttggatttggaattgcaatatctggtggacgagataatcctcattttcagagtggggaaacgtcaatagtgatttcagatgtgctgaaaggaggaccagctgaaggacagctacaggaaaatgaccgagttgcaatggttaacggagtttcaatggataatgttgaacatgcttttgctgttcagcaactaaggaaaagtgggaaaaatgcaaaaattacaattagaaggaagaagaaagttcaaataccagtaagtcgtcctgatcctgaaccagtatctgataatgaagaagatagttatgatgaggaaatacatgatccaagaagtggccggagtggtgtggttaacagaaggagtgagaagatttggccgagggatagaagtgcaagtagagagaggagcttgtccccgcggtcagacaggcggtcagtggcttccagccagcctgctaaacctactaaagtcacactggtgaaatcccggaaaaatgaagaatatggtcttcgattggcaagccatatatttgttaaggaaatttcacaagatagtttggcagcaagagatggcaatattcaagaaggtgatgttgtattgaagataaatggtactgtgacagaaaatatgtcattgacagatgcaaagacattgatagaaaggtctaaaggcaaattaaaaatggtagttcaaagagatgaacgggctacgctattgaatgtccctgatctttctgacagcatccactctgctaatgcctctgagagagacgacatttcagaaattcagtcactggcatcagatcattctggtcgatcacacgataggcctccccgccgcagccggtcacgatctcctgaccagcggtcagagccttctgatcattccaggcactcgccgcagcagccaagcaatggcagtctccggagtagagatgaagagagaatttctaaacctggggctgtctcaactcctgtaaagcatgctgatgatcacacacctaaaacagtggaagaagttacagttgaaagaaatgagaaacaaacaccttctcttccagaaccaaagcctgtgtatgcccaagttgggcaaccagatgtggatttacctgtcagtccatctgatggtgtcctacctaattcaactcatgaagatgggattcttcggcccagcatgaaattggtaaaattcagaaaaggagatagtgtgggtttgcggctggctggtggaaatgatgttggaatatttgtagctggcgttctagaagatagccctgcagccaaggaaggcttagaggaaggtgatcaaattctcagggtaaacaacgtagattttacaaatatcataagagaagaagccgtccttttcctgcttgacctccctaaaggagaagaagtgaccatattggctcagaagaagaaggatgtttatcgtcgcattgtagaatcagatgtaggagattctttctatattagaacccattttgaatatgaaaaggaatctccctatggacttagttttaacaaaggagaggtgttccgtgctgtggataccttgtacaatggaaaactgggctcttggcttgctattcgaattggtaaaaatcataaggaggtagaacgaggcatcatccctaataagaacagagctgagcagctagccagtgtacagtatacacttccaaaaacagcaggcggagaccgtgctgacttctggagattcagaggtcttcgcagctccaagagaaatcttcgaaaaagcagagaggatttgtccgctcagcctgttcaaacaaagtttccagcttatgaaagagtggttcttcgagaagctggatttctgaggcctgtaaccatttttggaccaatagctgatgttgccagagaaaagctggcaagagaagaaccagatatttatcaaattgcaaagagtgaaccacgagacgctggaactgaccaacgtagctctggcattattcgcctgcatacaataaagcaaatcatagatcaagacaaacatgctttattagatgtaacaccaaatgcagttgatcgtcttaactatgcccagtggtatccaattgttgtatttcttaaccctgattctaagcaaggagtaaaaacaatgagaatgaggttatgtccagaatctcggaaaagtgccaggaagttatacgagcgatctcataaacttcgtaaaaataatcaccatctttttacaactacaattaacttaaattcaatgaatgatggttggtatggtgcgctgaaagaagcaattcaacaacagcaaaaccagctggtatgggtttccgagggaaaggcggatggtgctacaagtgatgaccttgatttgcatgatgatcgtctgtcctacctgtcagctccaggtagtgaatactcaatgtatagcacggacagtagacacacttctgactatgaagacacagacacagaaggcggggcctacactgatcaagaactagatgaaactcttaatgatgaggttgggactccaccggagtctgccattacacggtcctctgagcctgtaagagaggactcctctggaatgcatcatgaaaaccaaacatatcctccttactcaccacaagcgcagccacaaccaattcatagaatagactcccctggatttaagccagcctctcaacagaaagcagaagcttcatctccagtcccttacctttcgcctgaaacaaacccagcatcatcaacctctgctgttaatcataatgtaaatttaactaatgtcagactggaggagcccaccccagctccttccacctcttactcaccacaagctgattctttaagaacaccaagtactgaggcagctcacataatgctaagagatcaagaaccatcattgtcgtcgcatgtagatccaacaaaggtgtatagaaaggatccatatcccgaggaaatgatgaggcagaaccatgttttgaaacagccagccgttagtcacccagggcacaggccagacaaagagcctaatctgacctatgaaccccaactcccatacgtagagaaacaagccagcagagacctcgagcagcccacatacagatacgagtcctcaagctatacggaccagttttctcgaaactatgaacatcgtctgcgatacgaagatcgcgtccccatgtatgaagaacagtggtcatattatgatgacaaacagccctacccatctcggccaccttttgataatcagcactctcaagaccttgactccagacagcatcccgaagagtcctcagaacgagggtactttccacgttttgaagagccagcccctctgtcttacgacagcagaccacgttacgaacaggcacctagagcatccgccctgcggcacgaagagcagccagctcctgggtatgacacacatggtagactcagaccggaagcccagccccacccttcagcagggcccaagcctgcagagtccaagcagtattttgagcaatattcacgcagttacgagcaagtaccaccccaaggatttacctctagagcaggtcattttgagcctctccatggtgctgcagctgtccctccgctgataccttcatctcagcataagccagaagctctgccttcaaacaccaaaccactgcctccacccccaactcaaaccgaagaagaggaagatccagcaatgaagccacagtctgtactcaccagagttaagatgtttgaaaacaaaagatctgcatccttagagaccaagaaggatgtaaatgacactggcagttttaagcctccagaagtagcatctaaaccttcaggtgctcccatcattggtcccaaacccacttctcagaatcaattcagtgaacatgacaaaactctgtacaggatcccagaacctcaaaaacctcaactgaagccacctgaagatattgttcggtccaatcattatgaccctgaagaagatgaagaatattatcgaaaacagctgtcatactttgaccgaagaagttttgagaataagcctcctgcacacattgctgccagccatctctccgagcctgcaaagccagctcattctcagaatcaatcaaatttttctagttattcttcaaagggaaagcctcctgaagctgatggtgtggatagatcatttggcgagaaacgctatgaacccatccaggccactccccctcctcctccattgccctcgcagtatgcccagccatctcagcctgtcaccagcgcgtctctccacatacattctaagggagcacatggtgaaggtaattcagtgtcattggattttcagaattccttagtgtccaaaccagacccacctccatctcagaataagccagcaactttcagaccaccaaaccgagaagatactgctcaggcagctttctatccccagaaaagttttccagataaagccccagttaatggaactgaacagactcagaaaacagtcactccagcatacaatcgattcacaccaaaaccatatacaagttctgcccgaccatttgaacgcaagtttgaaagtcctaaattcaatcacaatcttctgccaagtgaaactgcacataaacctgacttgtcttcaaaaactcccacttctccaaaaactcttgtgaaatcgcacagtttggcacagcctcctgagtttgacagtggagttgaaactttctctatccatgcagagaagcctaaatatcaaataaataatatcagcacagtgcctaaagctattcctgtgagtccttcagctgtggaagaggatgaagatgaagatggtcatactgtggtggccacagcccgaggcatatttaacagcaatgggggcgtgctgagttccatagaaactggtgttagtataattatccctcaaggagccattcccgaaggagttgagcaggaaatctatttcaaggtctgccgggacaacagcatccttccacctttagataaagagaaaggtgaaacactgctgagtcctttggtgatgtgtggtccccatggcctcaagttcctgaagcctgtggagctgcgcttaccacactgtgatcctaaaacctggcaaaacaagtgtcttcccggagatccaaattatctcgttggagcaaactgtgtttctgtccttattgaccacttttaactcttgaaatataggaacttaaataatgtgaaactggattaaacttaatctaaatgga

SEQ ID NO: 344104 - DNA, 6093 bp, Homo sapiens
cagtcggcgccggtgaacgagagcaacgcttctgaccctgccggagctcctcggagatgaaagccatgacgcgccttgcagaaaatgcattccgccttccgtgggaacaacgccgaggcacgcggtgacagccgtgaccatgctgtttgcccagtgaaggaaacaactgtcgggtatcggctctgccggcctttccagccgcactcatgcatggggctcaccccatgatgtgcgtggcttgtcgaggagcaagtggacaagtctcttaaggaaagctttggtgcacaggcgctttctccttgggggcgaattctgccagaccttggataaaaacaaacaggaagactcgcacggcagcggaaactgtcttccaagttacttgggttacccggcttttccttccgcgcttggggtcgggaccccggccgctcgtcccgccccctccccgcctcgcctcgcctcgcctcgtccagccccgcccccgccgggccgggcatgctcagtgggccgggccggcaggtttgcgtggccgctgagttgccggcgccggctgagccagcggacgccgcgttccttggcggccgccggttcccgggaagttacgtggcgaagccggcttccgaggagacgccgggaggccacgggtgctgctgacgggcgggcgaccgggcgaggccgacgtggccgggctgcgaaagctgcgggaggccgagtgggtggccgcgctcggagggaggtgccggtcgggcgcgccccgtggagaagacccgggcggggcgggcgcttcccggacttttgtccgagttgaattccctccccctgggccgggcccttccggccgcccccgcccgtgccccgctcgctctcgggagatgtttatttgggctgtggcgtgaggagcgggcgggccagcgccgcggagtttcgggtccgaggagcctcgcgcggcgctggagagagacaagatgtccgccagagctgcggccgccaagagcacagcaatggaggaaacagctatatgggaacaacatacagtgacgcttcacagggctcctggatttggatttggaattgcaatatctggtggacgagataatcctcattttcagagtggggaaacgtcaatagtgatttcagatgtgctgaaaggaggaccagctgaaggacagctacaggaaaatgaccgagttgcaatggttaacggagtttcaatggataatgttgaacatgcttttgctgttcagcaactaaggaaaagtgggaaaaatgcaaaaattacaattagaaggaagaagaaagttcaaataccagtaagtcgtcctgatcctgaaccagtatctgataatgaagaagatagttatgatgaggaaatacatgatccaagaagtggccggagtggtgtggttaacagaaggagtgagaagatttggccgagggatagaagtgcaagtagagagaggagcttgtccccgcggtcagacaggcggtcagtggcttccagccagcctgctaaacctactaaagtcacactggtgaaatcccggaaaaatgaagaatatggtcttcgattggcaagccatatatttgttaaggaaatttcacaagatagtttggcagcaagagatggcaatattcaagaaggtgatgttgtattgaagataaatggtactgtgacagaaaatatgtcattgacagatgcaaagacattgatagaaaggtctaaaggcaaattaaaaatggtagttcaaagagatgaacgggctacgctattgaatgtccctgatctttctgacagcatccactctgctaatgcctctgagagagacgacatttcagaaattcagtcactggcatcagatcattctggtcgatcacacgataggcctccccgccgcagccggtcacgatctcctgaccagcggtcagagccttctgatcattccaggcactcgccgcagcagccaagcaatggcagtctccggagtagagatgaagagagaatttctaaacctggggctgtctcaactcctgtaaagcatgctgatgatcacacacctaaaacagtggaagaagttacagttgaaagaaatgagaaacaaacaccttctcttccagaaccaaagcctgtgtatgcccaagttgggcaaccagatgtggatttacctgtcagtccatctgatggtgtcctacctaattcaactcatgaagatgggattcttcggcccagcatgaaattggtaaaattcagaaaaggagatagtgtgggtttgcggctggctggtggaaatgatgttggaatatttgtagctggcgttctagaagatagccctgcagccaaggaaggcttagaggaaggtgatcaaattctcagggtaaacaacgtagattttacaaatatcataagagaagaagccgtccttttcctgcttgacctccctaaaggagaagaagtgaccatattggctcagaagaagaaggatgtttatcgtcgcattgtagaatcagatgtaggagattctttctatattagaacccattttgaatatgaaaaggaatctccctatggacttagttttaacaaaggagaggtgttccgtgctgtggataccttgtacaatggaaaactgggctcttggcttgctattcgaattggtaaaaatcataaggaggtagaacgaggcatcatccctaataagaacagagctgagcagctagccagtgtacagtatacacttccaaaaacagcaggcggagaccgtgctgacttctggagattcagaggtcttcgcagctccaagagaaatcttcgaaaaagcagagaggatttgtccgctcagcctgttcaaacaaagtttccagcttatgaaagagtggttcttcgagaagctggatttctgaggcctgtaaccatttttggaccaatagctgatgttgccagagaaaagctggcaagagaagaaccagatatttatcaaattgcaaagagtgaaccacgagacgctggaactgaccaacgtagctctggcattattcgcctgcatacaataaagcaaatcatagatcaagacaaacatgctttattagatgtaacaccaaatgcagttgatcgtcttaactatgcccagtggtatccaattgttgtatttcttaaccctgattctaagcaaggagtaaaaacaatgagaatgaggttatgtccagaatctcggaaaagtgccaggaagttatacgagcgatctcataaacttcgtaaaaataatcaccatctttttacaactacaattaacttaaattcaatgaatgatggttggtatggtgcgctgaaagaagcaattcaacaacagcaaaaccagctggtatgggtttccgagggaaaggcggatggtgctacaagtgatgaccttgatttgcatgatgatcgtctgtcctacctgtcagctccaggtagtgaatactcaatgtatagcacggacagtagacacacttctgactatgaagacacagacacagaaggcggggcctacactgatcaagaactagatgaaactcttaatgatgaggttgggactccaccggagtctgccattacacggtcctctgagcctgtaagagaggactcctctggaatgcatcatgaaaaccaaacatatcctccttactcaccacaagcgcagccacaaccaattcatagaatagactcccctggatttaagccagcctctcaacagaaagcagaagcttcatctccagtcccttacctttcgcctgaaacaaacccagcatcatcaacctctgctgttaatcataatgtaaatttaactaatgtcagactggaggagcccaccccagctccttccacctcttactcaccacaagctgattctttaagaacaccaagtactgaggcagctcacataatgctaagagatcaagaaccatcattgtcgtcgcatgtagatccaacaaaggtgtatagaaaggatccatatcccgaggaaatgatgaggcagaaccatgttttgaaacagccagccgttagtcacccagggcacaggccagacaaagagcctaatctgacctatgaaccccaactcccatacgtagagaaacaagccagcagagacctcgagcagcccacatacagatacgagtcctcaagctatacggaccagttttctcgaaactatgaacatcgtctgcgatacgaagatcgcgtccccatgtatgaagaacagtggtcatattatgatgacaaacagccctacccatctcggccaccttttgataatcagcactctcaagaccttgactccagacagcatcccgaagagtcctcagaacgagggtactttccacgttttgaagagccagcccctctgtcttacgacagcagaccacgttacgaacaggcacctagagcatccgccctgcggcacgaagagcagccagctcctgggtatgacacacatggtagactcagaccggaagcccagccccacccttcagcagggcccaagcctgcagagtccaagcagtattttgagcaatattcacgcagttacgagcaagtaccaccccaaggatttacctctagagcaggtcattttgagcctctccatggtgctgcagctgtccctccgctgataccttcatctcagcataagccagaagctctgccttcaaacaccaaaccactgcctccacccccaactcaaaccgaagaagaggaagatccagcaatgaagccacagtctgtactcaccagagttaagatgtttgaaaacaaaagatctgcatccttagagaccaagaaggatgtaaatgacactggcagttttaagcctccagaagtagcatctaaaccttcaggtgctcccatcattggtcccaaacccacttctcagaatcaattcagtgaacatgacaaaactctgtacaggatcccagaacctcaaaaacctcaactgaagccacctgaagatattgttcggtccaatcattatgaccctgaagaagatgaagaatattatcgaaaacagctgtcatactttgaccgaagaagttttgagaataagcctcctgcacacattgctgccagccatctctccgagcctgcaaagccagctcattctcagaatcaatcaaatttttctagttattcttcaaagggaaagcctcctgaagctgatggtgtggatagatcatttggcgagaaacgctatgaacccatccaggccactccccctcctcctccattgccctcgcagtatgcccagccatctcagcctgtcaccagcgcgtctctccacatacattctaagggagcacatggtgaaggtaattcagtgtcattggattttcagaattccttagtgtccaaaccagacccacctccatctcagaataagccagcaactttcagaccaccaaaccgagaagatactgctcaggcagctttctatccccagaaaagttttccagataaagccccagttaatggaactgaacagactcagaaaacagtcactccagcatacaatcgattcacaccaaaaccatatacaagttctgcccgaccatttgaacgcaagtttgaaagtcctaaattcaatcacaatcttctgccaagtgaaactgcacataaacctgacttgtcttcaaaaactcccacttctccaaaaactcttgtgaaatcgcacagtttggcacagcctcctgagtttgacagtggagttgaaactttctctatccatgcagagaagcctaaatatcaaataaataatatcagcacagtgcctaaagctattcctgtgagtccttcagctgtggaagaggatgaagatgaagatggtcatactgtggtggccacagcccgaggcatatttaacagcaatgggggcgtgctgagttccatagaaactggtgttagtataattatccctcaaggagccattcccgaaggagttgagcaggaaatctatttcaaggtctgccgggacaacagcatccttccacctttagataaagagaaaggtaaatgtgtttatttttctccttagttttgataacttaagagttgccctgtgtgcactt

SEQ ID NO: 344105 - DNA, 399 bp, Homo sapiens
acttctgactatgaagacacagacacagaaggcggggcctacactgatcaagaactagatgaaactcttaatgatgaggttgggactccaccggagtctgccattacacggtcctctgagcctgtaagagaggactcctctggaatgcatcatgaaaaccaaacatatcctccttactcaccacaagcgcagccacaaccaattcatagaatagactcccctggatttaagccagcctctcaacaggtaagcagcaagcattcaacgttttgtagatagaggtgcattattaaattttagaatgtggtgattgagttaaaaatatatatgttgtcctttctccagattaagaattaatcttcaatttcaatttgagagtaccaagggcttaattctaaa

SEQ ID NO: 344106 - DNA, 414 bp, Homo sapiens
tactgattaaagtttaataaaagcattaaacttaattattttaagtaaatatgaagttgactgaattgaattgaaggaaaaattacttgaaaataattcaggttgttcacatccaaatcaatacgttccatgatgaaaaatttaaaatattaaggtctgataaatgacaagactaatgcctaagtataaatttacctaaatgacaacactgctaacagatgttatttaattgtcattttaaagagaaatccctaagcaattcacggtgctagtagagacaaagatgaaacacatgatcttgtttttgtaggatttcataattgatttggagtgggaaaataaaaaataactctagtaaaccctatgaaagaaggaaaaatcagaattaagggagcagagaggaagaaagatctt

SEQ ID NO: 344107 - DNA, 284 bp, Homo sapiens
gctaagctgcaagttcttgtctggagtcgaaggaccaataatatcgccttcacctgccccctcctggtccactcaccaggatgccaggcgggacttttgcaccaccctgactgtgaggcaatgccctggggatcctgctaagacacagctgctgacacggagacgggggtgcctgaggccctgcatttgtaacaagcttccaggcaatgcctgtaatcctggtcctcggtccagagtttgagaagcaaaaaaataaataatttatagggccccttgcctctcct

SEQ ID NO: 344108 - DNA, 283 bp, Homo sapiens
ggtggagcccaagagtttgagaccagcctgggcaacatagtgagacctctacaaaaactaaaaaataaaaaccagccaggcatggtggcacgtgcctgcagtcccagctacccaggaggaggatcgaggctgcagtgagctatgatcgtgccactgcactccagcttgggcaacagagcaagacctctcctcaaaacagaactccagcatggatacttacctggcaggggagataccgtgattacaaaactctagcatgggtgacagagcaaggccctgtctt

SEQ ID NO: 344109 - DNA, 432 bp, Homo sapiens
ggagtttgaggctgcagtgagccatgattgctccactgaactgcagcctaggtgacagagggagaccttgtctctaaagaaataaaaaataaaaataaaatacagtattgagaagctgagagcatggcatatatctgactgatttccattgtgatcacagagaagtgattcagccagacgtgatggaggaaatggtggtatcttgtgttattaagcacttgaacttggttgatgcactgcagtctctaataaatttccaatatcaagaagaacatgctgaagaatatgatttattatgtaaaattatgggagagacctttaagaaactcaatgccatggagagacagctgcagagtgttgcagaactggaacaaaaatggcaaagtgaagttgatgatgccatgcaggggaaactggagaacaacatgcctt

SEQ ID NO: 344110 - DNA, 384 bp, Homo sapiens
ggagtttgaggctgcagtgagccatgattgctccactgaactgcagcctaggtgacagagggagaccttgtctctaaagaaataaaaaataaaaataaaatacagtattgagaagctgagagcatggcatatatctgactgatttccattgtgatcacagagaagtgattcagccagacgtgatggaggaaatggtggtatcttgtgttattaagcacttgaacttggttgatgcactgcagtctctaataaatttccaatatcaagaagaacatgctgaagaatatgatttattatgtaaaattatgggagagacctttaagaaactcaatgccatggagagacagctgcaggtaaatgtctgataactgttggaaacaattt

SEQ ID NO: 344111 - DNA, 562 bp, Homo sapiens
tgagtgtgggcgtggtgctgggggtgcaggtgggcatgggtgtgtgcatgcaggcctggaggcggacagcagtcttcctgaggggtaggcatcttcttcattcagcgtctctccctacttttgctattcacattgaaggagcattatcagcgggttgttgacaagatgacaagtacccctgggaaatgatgactggcatttcattggctcaaagactgtactcaagtaaattactgcttgtttaacctcttttctccaatggccccaccccaactccatgcagaagtggcaggatgtgggtggcacaggggatgaggatggtaaaagccacaaggtgaccaggcaagagctgaggggctccacttcccaaagcagaagaaaaaaaagataaaacaacagaaaggagttcacttccttatccaagtctcattcattcatccatccatccacccatctagccaccaaacatccatcatcagctcaacccaaaagggcataattaaactttacttcctctctttcttcttcccagtcaatctaaaccttatcctaatcactgtag

SEQ ID NO: 344112 - DNA, 535 bp, Homo sapiens
tgtcatctcatactgtttcctctttgtgggaacagaagcagtttcttcagcctcagacctgagtgatgagggtcttggccagcacctagaccctcagagtaaggactcctaaggatcaaactgcagtgggcacctcttgtacccatctgtggtacccatggtcaagtccactgcaggaccaagttctgaccaccagagggcacttgcctactgtgttcatcccagaattaggctgtagaattcttgggaagctacatctttccagaggctgagactatgtcacggaactggcaaagaagggctcacccagatccttgaggcacttcaaggatagagcaggggtcattgcccaggtctcacttccacagggcacccctgctcttctagctggcctgtcacccagaagagccactggtcactctgggttttgttccagaggcaacttcttacatactggtgggtagacctccttagtgtaggctctgaggtttgctggtgaacaattccataggaagatctgcccggagaggacagg

SEQ ID NO: 344113 - DNA, 695 bp, Homo sapiens
gtttattcatgcagtgagctcattgtttctacagtcagaagatcaccagaaaaagatccatacctattttgtaacaagaattaggaaaccgaaatgactgagacatggtctctacttttgagacttttacaatgtagtgatctgagacagtgtgttcatttcagtgcaagccaatgctgcctattccgatcgctgctccctgatttgaatggcaggtgatcagtggcccgtgtggcttatggacacaccagagctcccaggggaagtgctctgaaaactcatcctggtcagagttcagaaggacacgtggagtataaggtcagatgcggagataaagggagatggtgtggccctcctgcctggggttgctgagcaggttgctggagacagtgatgtcactctgaaggagacagacacagaaacgtgtgtacagttgatggtgagcatctgagttgcgtcttgttagtgaggccaggagtgcctgtgtaagctggaacagattaggtatatgatttgtgaaacggagtttcatcctagatcttcatctagtcaaaggactgtttcctgattaggcattagcttagtggttgctagtctgtgttgacctttgaaaggcatgactaggctaactctgaagtttttgcttcacaccatttacaatttaaaattacctagagccttgtgggccattggaa

SEQ ID NO: 344114 - DNA, 422 bp, Homo sapiens
cgtccggccacccacacccgcgccgcggctggggcttgggttggggactgtggcggcgaagaagccggggagttctcacaagatctgatggtttaagcgtggcagtttcccctgagctctccttcctgctggtatgtaaggcgtgctttgcttcctcttcaccttccgccatgattgtacatttcctgaggcctccccagccatgcagaactgcatacaacttaggattcataactacatatatacggatagaagtgcatgaacagaaaatctgcccttctggaataccaaatgcaaaattaaagtgactacaagcagaatttggagaaaaaaataaaagatgcaatatagtttttaaaatcattgttaaaatataatgagtctgtactttgcttaaacaataaaaaagtcttcgatttata

SEQ ID NO: 344115 - DNA, 408 bp, Homo sapiens
  misc_feature (50)..(50): n is a, c, g, or t
tcacaaaagtcaatgtctcccccatcctcctataatcaaaaattctaggnagagagagttctcacaagatctgatggtttaagcgtggcagtttcccctgagctctccttcctgctggtatgtaaggcgtgctttgcttcctcttcaccttccgccatgattgtacatttcctgaggcctccccagccatgcagaactgcatacaacttaggattcataactacatatatacggatagaagtgcatgaacagaaaatctgcccttctggaataccaaatgcaaaattaaagtgactacaagcagaatttggagaaaaaaataaaagatgcaatatagtttttaaaatcattgttaaaatataatgagtctgtactttgcttaaacaataaaaaagtcttcgatttata

SEQ ID NO: 344116 - DNA, 285 bp, Homo sapiens
ggacggaaggcgtggaagcgggaggggccttcgtgtgaaaatcccttgtggggtttggtgtttcactttttaaaggcatacaacttaggattcataactacatatatacggatagaagtgcatgaacagaaaatctgcccttctggaataccaaatgcaaaattaaagtgactacaagcagaatttggagaaaaaaataaaagatgcaatatagtttttaaaatcattgttaaaatataatgagtctgtactttgcttaaacaataaaaaagtcttcgatttata

SEQ ID NO: 344117 - DNA, 376 bp, Homo sapiens
tggaaaaccttagaacaagaccagacttaattaacataaccagaaattatttcttccccagattttccttgtaggtggcagaatttctataccatgtatctttctacatccttctttggaaatgctggctttcccttttaactatcatatcctcataaccagatgatgtacttaaaaaaactggcctcctggcctcctttaaaactggttcttcttttgaactgccaacatatgcaactttgaaactcacaatgccattgcttgaaaatttaaccaactccagctcacataagtcctaaaatgatctcctaatcctcaataggattttcttttttcctcactccacttcccatgtattactgtacatcctccccca

SEQ ID NO: 344118 - DNA, 1653 bp, Homo sapiens
gcgcgcccgagccgggttatcatggcggctcccttggtcctggtgctggtggtggctgtgacagtgcgggcggccttgttccgctccagtctggccgagttcatttccgagcgggtggaggtggtgtccccactgagctcttggaagagagtggttgaaggcctttcactgttggacttgggagtatctccgtattctggagcagtatttcatgaaactccattaataatatacctctttcatttcctaattgactatgctgaattggtgtttatgataactgatgcactcactgctattgccctgtattttgcaatccaggacttcaataaagttgtgtttaaaaagcagaaactcctcctagaactggaccagtatgccccagatgtggccgaactcatccggacccctatggaaatgcgttacatccctttgaaagtggccctgttctatctcttaaatccttacacgattttgtcttgtgttgccaagtctacctgtgccatcaacaacaccctcattgctttcttcattttgactacgataaaaggcagtgctttcctcagtgctatttttcttgccttagcgacataccagtctctgtacccactcaccttgtttgtcccaggactcctctatctcctccagcggcagtacatacctgtgaaaatgaagagcaaagccttctggatcttttcttgggagtatgccatgatgtatgtgggaagcctagtggtaatcatttgcctctccttcttccttctcagctcttgggatttcatccccgcagtctatggctttatactttctgttccagatctcactccaaacattggtcttttctggtacttctttgcagagatgtttgagcacttcagcctcttctttgtatgtgtgtttcagatcaacgtcttcttctacaccatccccttagccataaagctaaaggagcaccccatcttcttcatgtttatccagatcgctgtcatcgccatctttaagtcctacccgacagtgggggacgtggcgctctacatggccttcttccccgtgtggaaccatctctacagattcctgagaaacatctttgtcctcacctgcatcatcatcgtctgttccctgctcttccctgtcctgtggcacctctggatttatgcaggaagtgccaactctaatttcttttatgccatcacactgaccttcaacgttgggcagatcctgctcatctctgattacttctatgccttcctgcggcgggagtactacctcacacatggcctctacttgaccgccaaggatggcacagaggccatgctcgtgctcaagtaggcctggctggcacagggctgcatggacctcagggggctgtggggccagaagctgggccaagccctccagccagagttgccagcaggcgagtgcttgggcagaagaggttcgagtccagggtcacaagtctctggtaccaaaagggacccatggctgactgacagcaaggcctatggggaagaactgggagctccccaacttggacccccaccttgtggctctgcacaccaaggagccccctcccagacaggaaggagaagaggcaggtgagcagggcttgttagattgtggctacttaataaatgttttttgttatgaagtcta

SEQ ID NO: 344119 - DNA, 1703 bp, Homo sapiens
gcgcgcccgagccgggttatcatggcggctcccttggtcctggtgctggtggtggctgtgacagtgcgggcggccttgttccgctccagtctggccgagttcatttccgagcgggtggaggtggtgtccccactgagctcttggaagagagtggttgaaggcctttcactgttggacttgggagtatctccgtattctggagcagtatttcatgaaactccattaataatatacctctttcatttcctaattgactatgctgaattggtgtttatgataactgatgcactcactgctattgccctgtattttgcaatccaggacttcaataaagttgtgtttaaaaagcagaaactcctcctagaactggaccagtatgccccagatgtggccgaactcatccggacccctatggaaatgcgttacatccctttgaaagtggccctgttctatctcttaaatccttacacgattttgtcttgtgttgccaagtctacctgtgccatcaacaacaccctcattgctttcttcattttgactacgataaaaggcagtgctttcctcagtgctatttttcttgccttagcgacataccagtctctgtacccactcaccttgtttgtcccaggactcctctatctcctccagcggcagtacatacctgtgaaaatgaagagcaaagccttctggatcttttcttgggagtatgccatgatgtatgtgggaagcctagtggtaatcatttgcctctccttcttccttctcagctcttgggatttcatccccgcagtctatggctttatactttctgttccagatctcactccaaacattggtcttttctggtacttctttgcagagatgtttgagcacttcagcctcttctttgtatgtgtgtttcagatcaacgtcttcttctacaccatccccttagccataaagctaaaggagcaccccatcttcttcatgtttatccagatcgctgtcatcgccatctttaagtcctacccgacagtgggggacgtggcgctctacatggccttcttccccgtgtggaaccatctctacagattcctgagaaacatctttgtcctcacctgcatcatcatcgtctgttccctgctcttccctgtcctgtggcacctctggatttatgcaggaagtgccaactctaatttcttttatgccatcacactgaccttcaacgttgggcagatcctgctcatctctgattacttctatgccttcctgcggcgggagtactacctcacacatggcctctacttgaccgccaaggatggcacagaggccatgctcgtgctcaagtaggcctggctggcacagggctgcatggacctcagggggctgtggggccagaagctgggccaagccctccagccagagttgccagcaggcgagtgcttgggcagaagaggttcgagtccagggtcacaagtctctggtaccaaaagggacccatggctgactgacagcaaggcctatggggaagaactgggagctccccaacttggacccccaccttgtggctctgcacaccaaggagccccctcccagacaggaaggagaagaggcaggtgagcagggcttgttagattgtggctacttaataaatgttttttgttatgaagtctaccctgagaccacatctgcattgcactcctagagggggtggcccctaataa

SEQ ID NO: 344120 - DNA, 1607 bp, Homo sapiens
gcgcgcccgagccgggttatcatggcggctcccttggtcctggtgctggtggtggctgtgacagtgcgggcggccttgttccgctccagtctggccgagttcatttccgagcgggtggaggtggtgtccccactgagctcttggaagagagtggttgaaggcctttcactgttggacttgggagtatctccgtattctggagcagtatttcatgaaactccattaataatatacctctttcatttcctaattgactatgctgaattggtgtttatgataactgatgcactcactgctattgccctgtattttgcaatccaggacttcaataaagttgtgtttaaaaagcagaaactcctcctagaactggaccagtatgccccagatgtggccgaactcatccggacccctatggaaatgcgttacatccctttgaaagtggccctgttctatctcttaaatccttacacgattttgtcttgtgttgccaagtctacctgtgccatcaacaacaccctcattgctttcttcattttgactacgataaaaggcagtgctttcctcagtgctatttttcttgccttagcgacataccagtctctgtacccactcaccttgtttgtcccaggactcctctatctcctccagcggcagtacatacctgtgaaaatgaagagcaaagccttctggatcttttcttgggagtatgccatgatgtatgtgggaagcctagtggtaatcatttgcctctccttcttccttctcagctcttgggatttcatccccgcagtctatggctttatactttctgttccagatctcactccaaacattggtcttttctggtacttctttgcagagatgtttgagcacttcagcctcttctttgtatgtgtgtttcagatcaacgtcttcttctacaccatccccttagccataaagctaaaggagcaccccatcttcttcatgtttatccagatcgctgtcatcgccatctttaagtcctacccgacagtgggggacgtggcgctctacatggccttcttccccgtgtggaaccatctctacagattcctgagaaacatctttgtcctcacctgcatcatcatcgtctgttccctgctcttccctgtcctgtggcacctctggatttatgcaggaagtgccaactctaatttcttttatgccatcacactgaccttcaacgttgggcagatcctgctcatctctgattacttctatgccttcctgcggcgggagtactacctcacacatggcctctacttgaccgccaaggatggcacagaggccatgctcgtgctcaagtaggcctggctggcacagggctgcatggacctcagggggctgtggggccagaagctgggccaagccctccagccagagttgccagcaggcgagtgcttgggcagaagaggttcgagtccagggtcacaagtctctggtaccaaaagggacccatggctgactgacagcaaggcctatggggaagaactgggagctcacctgcctcttctccttcctgtctgggagggggctccttggtgtgcagagcagcaaggtgggggtccaagttggggagcgtcgac

SEQ ID NO: 344121 - DNA, 1205 bp, Homo sapiens
gcgcgcccgagccgggttatcatggcggctcccttggtcctggtgctggtggtggctgtgacagtgcgggcggccttgttccgctccagtctggccgagttcatttccgagcgggtggaggtggtgtccccactgagctcttggaagagagtggttgaaggcctttcactgttggacttgggagtatctccgtattctggagcagtatttcatgaaactccattaataatatacctctttcatttcctaattgactatgctgaattggtgtttatgataactgatgcactcactgctattgccctgtattttgcaatccaggacttcaataaagttgtgtttaaaaagcagaaactcctcctagaactggaccagtatgccccagatgtggccgaactcatccggacccctatggaaatgcgttacatccctttgaaagtggccctgttctatctcttaaatccttacacgattttgtcttgtgttgccaagtctacctgtgccatcaacaacaccctcattgctttcttcattttgactacgataaaagcggcagtacatacctgtgaaaatgaagagcaaagccttctggatcttttcttgggagtatgccatgatgtatgtgggaagcctagtggtaatcatttgcctctccttcttccttctcagctcttgggatttcatccccgcagtctatggctttatggagcaccccatcttcttcatgtttatccagatcgctgtcatcgccatctttaagtcctacccgacagtgggggacgtggcgctctacatggccttcttccccgtgtggaaccatctctacagattggagaggagaaaaggaacgtggcccctccctgagtgtaggtcccagacgctggactctctggagcttggatgagtcatacagacgcacaattgtggtgttagggaacagcctgctggcagagcccatgccagcctgcatggtacagcagaaggagccagttaccaaagggctggatttgtgtgtgtgtttgttttgtttttattactattgtatagcgataaaagaatgttgatagatatacatataaagaatcatgataaaatatattcccacgtgttttggcacctcgtttaagaaagggaatatcaccatggcctttgaagtccccaaatcccccctgttccccttctgattggactggatttttcaggtg

SEQ ID NO: 344122 - DNA, 225 bp, Homo sapiens
ctacgttgaatatatttaatgtggctaggaattccatttaaacattagctgtcagcgctaacatgcatgctcccacattcacctttctgttttcctgtgcagtggagaggagaaaaggaacgtggcccctccctgagtgtaggtcccagacgctggactctctggagcttggatgagtcatacagacgcacaattgtggtgttagggaacagcctgctggcagag

SEQ ID NO: 344123 - DNA, 1808 bp, Homo sapiens
gcgcgcccgagccgggttatcatggcggctcccttggtcctggtgctggtggtggctgtgacagtgcgggcggccttgttccgctccagtctggccgagttcatttccgagcgggtggaggtggtgtccccactgagctcttggaagagagtggttgaaggcctttcactgttggacttgggagtatctccgtattctggagcagtatttcatgaaactccattaataatatacctctttcatttcctaattgactatgctgaattggtgtttatgataactgatgcactcactgctattgccctgtattttgcaatccaggacttcaataaagttgtgtttaaaaagcagaaactcctcctagaactggaccagtatgccccagatgtggccgaactcatccggacccctatggaaatgcgttacatccctttgaaagtggccctgttctatctcttaaatccttacacgattttgtcttgtgttgccaagtctacctgtgccatcaacaacaccctcattgctttcttcattttgactacgataaaaggcagtgctttcctcagtgctatttttcttgccttagcgacataccagtctctgtacccactcaccttgtttgtcccaggactcctctatctcctccaggtactgagcatcaataactgctgacatcagaaacaaaaaccaagcctcctgacaaaagaacattacccaccaccaaagtttgccaaaaggataaaatccaaaattgatcaagcctctggatatagctgcaatttgcaagaaatactgaaaacaagcggcagtacatacctgtgaaaatgaagagcaaagccttctggatcttttcttgggagtatgccatgatgtatgtgggaagcctagtggtaatcatttgcctctccttcttccttctcagctcttgggatttcatccccgcagtctatggctttatactttctgttccagatctcactccaaacattggtcttttctggtacttctttgcagagatgtttgagcacttcagcctcttctttgtatgtgtgtttcagatcaacgtcttcttctacaccatccccttagccataaagctaaaggagcaccccatcttcttcatgtttatccagatcgctgtcatcgccatctttaagtcctacccgacagtgggggacgtggcgctctacatggccttcttccccgtgtggaaccatctctacagattcctgagaaacatctttgtcctcacctgcatcatcatcgtctgttccctgctcttccctgtcctgtggcacctctggatttatgcaggaagtgccaactctaatttcttttatgccatcacactgaccttcaacgttgggcagatcctgctcatctctgattacttctatgccttcctgcggcgggagtactacctcacacatggcctctacttgaccgccaaggatggcacagaggccatgctcgtgctcaagtaggcctggctggcacagggctgcatggacctcagggggctgtggggccagaagctgggccaagccctccagccagagttgccagcaggcgagtgcttgggcagaagaggttcgagtccagggtcacaagtctctggtaccaaaagggacccatggctgactgacagcaaggcctatggggaagaactgggagctccccaacttggacccccaccttgtggctctgcacaccaaggagccccctcccagacaggaaggagaagaggcaggtgagcagggcttgttagattgtggctacttaataaatgttttttgttatgaagtcta

SEQ ID NO: 344124 - DNA, 762 bp, Homo sapiens
ggggagccattgactgaggagtctggggtttgcttcttggcaccccagtacctctgggggtgctctgcctttgagctacatgatgctcaccttgggcctctccattcaggggggccattgcagcagggaaagcatgccagagagagcgtgtcaggctaactgtaaccctctgtctttgcagtcctgagaaacatctttgtcctcacctgcatcatcatcgtctgttccctgctcttccctgtcctgtggcacctctggatttatgcaggaagtgccaactctaatttcttttatgccatcacactgaccttcaacgttgggcagatcctgctcatctctgattacttctatgccttcctgcggcgggagtactacctcacacatggcctctacttgaccgccaaggatggcacagaggccatgctcgtgctcaagtaggcctggctggcacagggctgcatggacctcagggggctgtggggccagaagctgggccaagccctccagccagagttgccagcaggcgagtgcttgggcagaagaggttcgagtccagggtcacaagtctctggtaccaaaagggacccatggctgactgacagcaaggcctatggggaagaactgggagctccccaacttggacccccaccttgtggctctgcacaccaaggagccccctcccagacaggaaggagaagaggcaggtgagcagggcttgttagattgtggctacttaataaatgttttttgttatgaagtcta

SEQ ID NO: 344125 - DNA, 374 bp, Homo sapiens
tgattgtgatccagagccaggcaggggcgttcctgtcttccaacaacacctgccagcagttcagggatcctgggtttagggggaggtacccagcagcgcctcacaccctctctctccccccagatcctgctcatctctgattacttctatgccttcctgcggcgggagtactacctcacacatggcctctacttgaccgccaaggatggcacagaggccatgctcgtgctcaagtaggcctggctggcacagggctgcatggacctcagggggctgtggggccagaagctgggccaagccctccagccagagttgccagcaggcgagtgcttgggcagaagaggttcgagtccagggtcacaagtctctggtac

SEQ ID NO: 344126 - DNA, 223 bp, Homo sapiens
tgcatctttatttgggactctgatcagaaaaggagtcttagatagcctattatctaattttgagagtacatgaaaaataaattaggcattttctcagtatagtgaaatcatatttcaaatgatgcacctgcaagactagagttgatcgttgagcttacatataagcattcttctgtagaatttttagtaatcttaatggcaatccacaatgatgaattgaagc

SEQ ID NO: 344127 - DNA, 338 bp, Homo sapiens
ggatatccgattcatgtaatgtaataccagctaatttttgtatttttggtagagaaggtgtttcaccatgttggccaggctggtcttgaactctggacctcaagtggtcctcctgccttggactcccaaaatgttaagattacaggcatgaaccactgcctccggtccagaatgattttgtcagaagaagccatttgagctaaagcgtagagatgggataaacctggaatacttggaggaacttggagcagttgagaaggctggagagtgtggacctgaggaaggaggtgggagaagggaattaaggaattaaggtggaattaaggaattgaggaaag

SEQ ID NO: 344128 - DNA, 256 bp, Homo sapiens
gatggtcttgatctcctgaccttatgatccgccctccttggcctcccaaagtgttgggattgcaaggcgtgagccactgcgcccagcctccaggcctcagttttcttatgtgtaaatggggatgataaaacccggacctgcctatgaacggttcagttggatcaaagtagaatgagtgcagaagaagaagcatgatttgtaaaagatggtacaaaagctagtattttaaaaggtgttttacaaagcactttcacat

SEQ ID NO: 344129 - DNA, 822 bp, Homo sapiens
gttaaaagcaggcatagttgaattattcttaatatccactgtcctcatcctcttctcctgtcattctgtaaactgacctagtcctcccctacgtttaggacttaggctagtgaaactgaccttctcagctacaagaggactatatgctacttttttagtacaaaattcattgagggtgtgttcaccttgacctcacttgtttataactaacacacaaataccagaaggcccttaccatacctctttatgttgcttacatggatatttcactacagtgcattgtttctgttaacattagttcaaaattcaacctcttccagagtcagccttagttttaaataaaactaataactgttagacatctggtggtatgaaaataaaaaaactaataactgtgtttctagactctaatgggtatagcctaaactgagataagtgcagttttcctttttactcctaaagtgtaagtaaggtaagattgtttcatgggaagtcaatagcttcctgaaacaatgctttgtcttctcatgctgttaaccagtagtttattagaatgatttaaagccttttgaatataactgctttgctgctttttaagatcaagccctcttgttggatgttaacatttagtactgagcatttgagttgcatctgtcctaataatagattgtattttgaagtcatttttgttactgaccttttgatttttattttttattattattattttttattttgactgagtttcactctgtcacccaggctggactcagatggcgccattgtactcctgtctgggcaacaagagcaaaacacagtctt

SEQ ID NO: 344130 - DNA, 479 bp, Homo sapiens
acaatccagttgtctatcaactgatgaatggatgaataatatgtagcatattcatgcaatagaatattttctgcaataaaaggaagtgctgataaatgctacaacatagatgaatttgaaaccttatgctaagagaaaaaaaagctaatgacaaaagaccaccgattttatgattccatttatgtgaaatatccagaatagtcatagtcacagaaacagaaaggagattagtggtggcctagggctgatggaggaaaaggaggatggagagtgactgctggtaggtactaggctttgttagggggcataaagatatcctaaaactaaaccgtggtgatgattgcatagccctatgcatatttagtgagtatactaaaacccattaaattttacactttaaatgataaattgtataatatgtgaattatatctcaataaagttgttttgggtttttttgtttgttttgagacaggacctc

SEQ ID NO: 344131 - DNA, 459 bp, Homo sapiens
cttttttttttttgagagggagtctcgctctgtcaccaggctgaagtgcagtggtgcaatctcggctcatggcaacctctgcctcccggattcaagtgattctcctgcctctgcctccagagcagctgggactacaggtacgtgccactacacccagttgatttttgtatttttagtagagatggggtttcaccatgtggctaggatggtctcgatctcttgacctcgtgatcctcctgcctcagcctcccaaagtgctgggattacagatgtgagccaccacgcctggcctgggttctggatttttacatgtggggaggaggtgggattttgtggttatttgcactggtggctggttcaactctgggaggcttggggaagggggagaagtttatgagtcttttggtccagactaaactcatcaaaggaactggcctgacataaccattcacatgtgag

SEQ ID NO: 344132 - DNA, 451 bp, Homo sapiens
acaggtggtctgtagaccacacttcaagaattatcttcaaggattgggctagttttagtttgtagtgatttcttgtgtctcttaatgaaggcctagtcaatatagtctggattgattggataaacacagaggaacaagagagcggcagaattgtaccatgcatgcagcaggccatgctctacacgggcctctcaggatgcagcagagaggtaggatatacaggctttttggaatactgatgtgagtgtagaggccagaaaaatgaagctaggtggtattggaggagaatctctgaagactgctctcagtaggctgacaacaagttaagatgaatgtgtaactgttttctacattcttcttactgctataaaaataattgaaatgcagaatgcttaacttcattcagctgtaagccttgtaagaacatcaataaaaatttaaaaattctaaa

SEQ ID NO: 344133 - DNA, 476 bp, Homo sapiens
  misc_feature (10)..(10): n is a, c, g, or t
  misc_feature (18)..(18): n is a, c, g, or t
  misc_feature (26)..(26): n is a, c, g, or t
acttctaagnccccaagncttggaanacaggaaggcctagtcaatatagtctggattgattggataaacacagaggaacaagagagcggcagaattgtaccatgcatgcagcaggccatgctctacacgggcctctcaggatgcagcagagaggtaggacactgaaactggacattgtagaagatgaattatgagagtgatttatgaaagaaagacagtggagaattgcaatcgatggagacattcaaagaaaagactttggcactacatcaaaagagagtagaataaatgacgaaactaaagcacaaagagattaaagaacttatccaaggtcatgcagctggaaagaagtggatttgggattgtgaacatcacaatttcacaaactacatttcatgatgggtagagctagtcaaacgtctgaaaataaagtttggcctcgttggcctcagcggtggagctctgcggccggaaag

SEQ ID NO: 344134 - DNA, 486 bp, Homo sapiens
ttacatggtttatgtctctcaaaatatcttatacattcttaaacattttcagaaagcagttggtgtagataactgaaactgcagaagagaaaactgtgaataaaagggaacaactgtacccttacaaccaccactgtaatcaagaggtataacagcttcatcagttcaacactgaaactggacattgtagaagatgaattatgagagtgatttatgaaagaaagacagtggagaattgcaatcgatggagacattcaaagaaaagactttggcactacatcaaaagagagtagaataaatgacgaaactaaagcacaaagagattaaagaacttatccaaggtcatgcagctggaaagaagtggatttgggattgtgaacatcacaatttcacaaactacatttcatgatgggtagagctagtcaaacgtctgaaaataaagtttggcctcgttggcctcagcggtggagctctgcggccggaaag

SEQ ID NO: 344135 - DNA, 492 bp, Homo sapiens
  misc_feature (56)..(56): n is a, c, g, or t
tacttatcccattaacagcaccgcgtgatttcataaaataaataaaacccctcganaggcaccagttggtgtagataactgaaactgcagaagagaaaactgtgaataaaagggaacaactgtacccttacaaccaccactgtaatcaagaggtataacagcttcatcagttcaacactgaaactggacattgtagaagatgaattatgagagtgatttatgaaagaaagacagtggagaattgcaatcgatggagacattcaaagaaaagactttggcactacatcaaaagagagtagaataaatgacgaaactaaagcacaaagagattaaagaacttatccaaggtcatgcagctggaaagaagtggatttgggattgtgaacatcacaatttcacaaactacatttcatgatgggtagagctagtcaaacgtctgaaaataaagtttggcctcgttggcctcagcggtggagctctgcggccggaaag

SEQ ID NO: 344136 - DNA, 460 bp, Homo sapiens
  misc_feature (10)..(10): n is a, c, g, or t
  misc_feature (18)..(18): n is a, c, g, or t
  misc_feature (26)..(26): n is a, c, g, or t
acttctaagnccccaagncttggaanacagcagttggtgtagataactgaaactgcagaagagaaaactgtgaataaaagggaacaactgtacccttacaaccaccactgtaatcaagaggtataacagcttcatcagttcaacactgaaactggacattgtagaagatgaattatgagagtgatttatgaaagaaagacagtggagaattgcaatcgatggagacattcaaagaaaagactttggcactacatcaaaagagagtagaataaatgacgaaactaaagcacaaagagattaaagaacttatccaaggtcatgcagctggaaagaagtggatttgggattgtgaacatcacaatttcacaaactacatttcatgatgggtagagctagtcaaacgtctgaaaataaagtttggcctcgttggcctcagcggtggagctctgcggccggaaag

SEQ ID NO: 344137 - DNA, 496 bp, Homo sapiens
  misc_feature (10)..(10): n is a, c, g, or t
  misc_feature (18)..(18): n is a, c, g, or t
  misc_feature (26)..(26): n is a, c, g, or t
acttctaagnccccaagncttggaanacaggaaggcctagtcaatatagtctggattgattggataaacacagaggaacaagagagcggcagaattgtaccatgcatgcagcaggccatgctctacacgggcctctcaggatgcagcagagaggtaggacactgaaactggacattgtagaagatgaattatgagagtgatttatgaaagaaagacagtggagaattgcaatcgatggagacattcaaagaaaagactttggcactacatcaaaagagagtagaataaatgacgaaactaaagcacaaagagattaaagaacttatccaaggtcatgcagctggaaagaagtggatttgggattgtgaacatcacaatttcacaaactacatttcatgatgggtagagctagtcaaacgtctgaaaataaagtttggatggatgcggccgaaccctgcgggaagcattctaaataaatgaatgtatactttctaat

SEQ ID NO: 344138 - DNA, 179 bp, Homo sapiens
acactgaaactggacattgtagaagatgaattatgagagtgatttatgaaagaaagacagtggagaattgcaatcgatggagacattcaaagaaaagactttggcactacatcaaaagagagtagaataagtagtctttgcttatacattttaaatgaaaataaatgtttatcatacat

SEQ ID NO: 344139 - DNA, 255 bp, Homo sapiens
tctgaggagccaatgacccctttcaaaatagggcttttttccacctcccaaccctgccccaaccctatcagagcataaatacagctaatcaacctgggtgcagttgatgagctcaataatgtctcttggtcatcagtgacagcattgaaaacaattgcttggcttcttgattctcactcctgaaaatagtcctctcacttggtttctcccttgcgttttgaggacagtcatagagacactttcctcatgtctgat

SEQ ID NO: 344140 - DNA, 776 bp, Homo sapiens
ggattttgaaaaattcaaactgtgaacaccacaatgttatagagcatatgaggtagtagccagcatgaaggatgttttcttcctgagaaacagtgtcaagggctggaggaagagggcaaaatagcagactcagagggcaaataaattttggtattacttggtcacacaaggttatacaggtgttttcttgtaggatttttcagagcctttaatagtctaatgttgcattgagaatctcaaagaggaaaccatagaatgaggcatttgccatacctatctgatcatgaattttcttttcccccacagccttctcctgtgtcaatgtccaatgaagcacgatttgggaaactgtcctagagaaactttataccttcccgctcttctggagatcttttcctcttttcattcatctactttccccaaccagccatctgcctaagaaaggtcacatgttatcatctcatttttgtttagcctctgcagctgtggactatctttattacataggaattctttactagcttgtcctgtatttaaaaatattctaagttttgaggcaaagaagatccagatgctgcaataaatatatgcactgaggagttcacaggcctgacttttggtctcctttctaccactaactgtgtttttgttcctctctgagcttcattttctcatctccaatacggaagtattagaatcagtgatctctaggctctttaagattaatgactttgagatatccctgggagtccttagctcttatggagcagcgtccc

SEQ ID NO: 344141 - DNA, 508 bp, Homo sapiens
gccccaagttcccagttcatgtcagacactgaagacacacttgtgaggatcgggaagccccgcggtagccccagtcgacctctgggtgccacgtggcacctccactgttgtgactacacacacaagcccgggacacccacttgttagctcaggaaccaggcggccagcagatatctgctcagatgaacgtccagagactcaatcctctggcattctcaggttcaaggttggaaaacgcattaagacgagagccacacagtcagcagaatctgcgccattagctttctcgtacttaaacgtctgtctaaataagagtcaaaggcacaaaatgagaaggaatatcttactagggattgtgacttgcacttgccatattttgaaagtactggttcctatcttgctctctcaaactgcatttaagaaaccctacatcagaagttattttcatttcttctgtgaaaaacagaaaatcaataaaagactggaaaaacatatgaaatataattct

SEQ ID NO: 344142 - DNA, 486 bp, Homo sapiens
gctcaaaaaagtttcatttttttatttagctttctgacttagattctcactgtgaatcccttgcttgctcatgcataagtgtatttgcaataccaaatatacaggtttagtatttttgcctgttagtgattgtttcacatgtgtaacgttttggttgagatgttaaatggtggacgagtactgtggatgtgaatgtgggaagtaattttaatcatatgtaattggtcacaaggcctaatttgcagtaactattgctgttttatttaacaatgccttgttgctttgtatgcattaatgtttggatgtaaagattgtgtgtctatccaacagggagccacagtatttaaattgaccaacctaatgttacaactactttgaggtggccaaatgtaaactaaaagccttaattaaagtggtgcaattttgtataacttagcatcagtagttcaataaatttggattgccatgcaagggcttgcattataa

SEQ ID NO: 344143 - DNA, 874 bp, Homo sapiens
cccgcgggcggaagctggagcgaggctgaacgcctgacgtcaaggcgacatcgccaaacctcgcccagattcaggcgtgtaaaccagccggagcggcgcggcagcggcaggaccgccgtggcgcctagagtagcgacccggggggagcgcggggcgacgctggctgcagggacccggtgacagcgtgagaggtgaggtactaggttttgacaagcttgcatcatgcgtgagtataagctagtcgttcttggctcaggaggcgttggaaagtctgctttgactgtacaatttgttcaaggaatttttgtagaaaaatacgatcctacgatagaagattcttatagaaagcaagttgaagtagatgcacaacagtgtatgcttgaaatcttggatactgcaggaacggagcaatttacagcaatgagggatttatacatgaaaaatggacaaggatttgcattagtttattccatcacagcacagtccacatttaacgatttacaagacctgagagaacagattcttcgagttaaagacactgatgatgttccaatgattcttgttggtaataagtgtgacttggaagatgaaagagttgtagggaaggaacaaggtcaaaatctagcaagacaatggaacaactgtgcattcttagaatcttcatttaaaaattaaaatgtttaattgagatctttttaatgaccctagatgccggtaaaaattaacttgtaaaaaacttccaggtggcctgggtaaaggctttggtcaaaaaggttaattaatggtcaagctggctttaatattcctttggcaattggaagcttttgagcccgggtttttggatcattggttgcccttttcaccggtggtctgc

SEQ ID NO: 344144 - DNA, 378 bp, Homo sapiens
ctctagacgatcccctgacacgccgaacgtccatacttttcaaatctcttattatatgtttcctttttttgtttacatagggaacaatgtttatagtcgtgtgtacagtgggggtctacaacaagaagtgtatattttcaaacaattttttaatgatttaacaatttttgtaaatcattttcaggcttctgcagctgtagattctcactgtgaatcccttgcttgctcatgcataagtgtatttgcaataccaaatatacaggtttagtatttttgcctgttagtgattgtttcacatgtgtaacgttttggttgagatgttaaatggtggacgagtactgtggatgtgaatgtggttcctcggcgtggggtaccgag

SEQ ID NO: 344145 - DNA, 762 bp, Homo sapiens
cccgcgggcggaagctggagcgaggctgaacgcctgacgtcaaggcgacatcgccaaacctcgcccagattcaggcgtgtaaaccagccggagcggcgcggcagcggcaggaccgccgtggcgcctagagtagcgacccggggggagcgcggggcgacgctggctgcagggacccggtgacagcgtgagaggtgaggtactaggttttgacaagcttgcatcatgcgtgagtataagctagtcgttcttggctcaggaggcgttggaaagtctgctttgactgtacaatttgttcaaggaatttttgtagaaaaatacgatcctacgatagaagattcttatagaaaggtatatattactttggaaggccttttgcttttgattttaatataaatacttattttagctttataattattgaatgttttatacaaaggatggaggcagagttaatttataaaattagtgggaaaagtttacactttctggcattgcatagttaccagtttaagaggatcataaacacccatactctcacatattcacagaattttttgtaatttgacacataaactttaaagcagaccatccatttcaagtagtagccccatgttactttcagtcccctacctagcaagactgattactctcaagctcccttctttttaacctagaaataggtggacacaggtcttcctaagctttctacttactaacctcttgagaaagtgccaccactcacaatactggttgaatatccct

SEQ ID NO: 344146 - DNA, 2121 bp, Homo sapiens
cccgcgggcggaagctggagcgaggctgaacgcctgacgtcaaggcgacatcgccaaacctcgcccagattcaggcgtgtaaaccagccggagcggcgcggcagcggcaggaccgccgtggcgcctagagtagcgacccggggggagcgcggggcgacgctggctgcagggacccggtgacagcgtgagaggtgaggtactaggttttgacaagcttgcatcatgcgtgagtataagctagtcgttcttggctcaggaggcgttggaaagtctgctttgactgtacaatttgttcaaggaatttttgtagaaaaatacgatcctacgatagaagattcttatagaaagcaagttgaagtagatgcacaacagtgtatgcttgaaatcttggatactgcaggaacggagcaatttacagcaatgagggatttatacatgaaaaatggacaaggatttgcattagtttattccatcacagcacagtccacatttaacgatttacaagacctgagagaacagattcttcgagttaaagacactgatgatgttccaatgattcttgttggtaataagtgtgacttggaagatgaaagagttgtagggaaggaacaaggtcaaaatctagcaagacaatggaacaactgtgcattcttagaatcttctgcaaaatcaaaaataaatgttaatgagatcttttatgacctagtgcggcaaattaacagaaaaactccagtgcctgggaaggctcgcaaaaagtcatcatgtcagctgctttaatatactaaatgcattgtagctctgagccaggtctgaagaactgttgcccaattcaacagtgccagcattccaactttgttaaacctaccaacatcttaaatggactttcctgtggtggtaccctttaagaggcggatgaaagctactatatcagtttgcacattctaatcactttccagtatcacaagagagatttttacttatataatagtcctagagtttgcagctggtaaaaccagaggctacatccagtattactgctaagagacattcttcatccaccaatgttgtacatgtatgaaaatggtgtactgtatactttaacatgccccatactttgtattggagagtacaataatgtaaatcctaaaagcaccactattttagcataataaaagaaagtccaaagagctcctatatagactactccagataacttcgcttctttgatacttgtagcttattgtaattttttttaagaaattcaaggtcattattattgtacaaaataagcgctttgattaacacagctatatagtttttttaatttttaaaaaacctgtggagacggtgatcttgtctttaaaacatgatagtcctttcagtataatgtcttagattaaagacgttgcctttaatatctgttgggaaggaaatgtccagacttttcaaatctcttattatatgtttcctttttttgtttacatagggaacaatgtttatagtcgtgtgtacagtgggggtctacaacaagaagtgtatattttcaaacaattttttaatgatttaacaatttttgtaaatcattttcaggcttctgcagctgtagattctcactgtgaatcccttgcttgctcatgcataagtgtatttgcaataccaaatatacaggtttagtatttttgcctgttagtgattgtttcacatgtgtaacgttttggttgagatgttaaatggtggacgagtactgtggatgtgaatgtgggaagtaattttaatcatatgtaattggtcacaaggcctaatttgcagtaactattgctgttttatttaacaatgccttgttgctttgtatgcattaatgtttggatgtaaagattgtgtgtctatccaacagggagccacagtatttaaattgaccaacctaatgttacaactactttgaggtggccaaatgtaaactaaaagccttaattaaagtggtgcaattttgtataacttagcatcagtagttcaataaatttggattgccatgcaagggcttgcattataattacttgccacttgaatgtgttttgtgtaatgttttaacagtgctagtaaataaatacgggtttaccctgg

SEQ ID NO: 344147 - DNA, 1998 bp, Homo sapiens
cccgcgggcggaagctggagcgaggctgaacgcctgacgtcaaggcgacatcgccaaacctcgcccagattcaggcgtgtaaaccagccggagcggcgcggcagcggcaggaccgccgtggcgcctagagtagcgacccggggggagcgcggggcgacgctggctgcagggacccggtgacagcgtgagaggtgaggtactaggttttgacaagcttgcatcatgcgtgagtataagctagtcgttcttggctcaggaggcgttggaaagtctgctttgactgtacaatttgttcaaggaatttttgtagaaaaatacgatcctacgatagaagattcttatagaaagcaagttgaagtagatgcacaacagtgtatgcttgaaatcttggatactgcaggaacggagcaatttacagcaatgagggatttatacatgaaaaatggacaaggatttgcattagtttattccatcacagcacagtccacatttaacgatttacaagacctgagagaacagattcttcgagttaaagacactgatgatgttccaatgattcttgttggtaataagtgtgacttggaagatgaaagagttgtagggaaggaacaaggtcaaaatctagcaagacaatggaacaactgtgcattcttagaatcttctgcaaaatcaaaaataaatgttaatgagatcttttatgacctagtgcggcaaattaacagaaaaactccagtgcctgggaaggctcgcaaaaagtcatcatgtcagctgctttaatatactaaatgcattgtagctctgagccaggtctgaagaactgttgcccaattcaacagtgccagcattccaactttgttaaacctaccaacatcttaaatggactttcctgtggtggtaccctttaagaggcggatgaaagctactatatcagtttgcacattctaatcactttccagtatcacaagagagatttttacttatataatagtcctagagtttgcagctggtaaaaccagaggctacatccagtattactgctaagagacattcttcatccaccaatgttgtacatgtatgaaaatggtgtactgtatactttaacatgccccatactttgtattggagagtacaataatgtaaatcctaaaagcaccactattttagcataataaaagaaagtccaaagagctcctatatagactactccagataacttcgcttctttgatacttgtagcttattgtaattttttttaagaaattcaaggtcattattattgtacaaaataagcgctttgattaacacagctatatagtttttttaatttttaaaaaacctgtggagacggtgatgttgcctttaatatctgttgggaaggaaatgtccagacttttcaaatctcttattatatgtttcctttttttgtttacatagggaacaatgtttatagtcgtgtgtacagtgggggtctacaacaagaagtgtatattttcaaacaattttttaatgatttaacaatttttgtaaatcattttcaggcttctgcagctgtagattctcactgtgaatcccttgcttgctcatgcataagtgtatttgcaataccaaatatacaggtttagtatttttgcctgttagtgattgtttcacatgtgtaacgttttggttgagatgttaaatggtggacgagtactgtggatgtgaatgtgggaagtaattttaatcatatgtaattggtcacaaggcctaatttgcagtaactattgctgttttatttaacaatgccttgttgctttgtatgcattaatgtttggatgtaaagattgtgtgtctatccaacagggagccacagtatttaaattgaccaacctaatgttacaactactttgaggtggccaaatgtaaactaaaagccttaattaaagtggtgcaattttgtataacttagcatcagtagttcaataaatttggattgccatgcaagggcttgcattataa

SEQ ID NO: 344148 - DNA, 2015 bp, Homo sapiens
atttgagctatttcgaaactatttttttctctagaattaagtgctgagaatccatattgagactggttcgtgtaggtttccctgtgttgacttgagaacacatggcttttgaacttgattacaatttgggggtctttgaatcttgattacttagctatttttcctcctgctttgttgaagtattgctggatattagtttgtaaagttgttaaaatctgtgtgtcttatttttgatacattagcttttttgtgtatattaaggtagttttatgtacattgaaaaaatgaacatgtattttaatttttctaccagcaagttgaagtagatgcacaacagtgtatgcttgaaatcttggatactgcaggaacggagcaatttacagcaatgagggatttatacatgaaaaatggacaaggatttgcattagtttattccatcacagcacagtccacatttaacgatttacaagacctgagagaacagattcttcgagttaaagacactgatgatgttccaatgattcttgttggtaataagtgtgacttggaagatgaaagagttgtagggaaggaacaaggtcaaaatctagcaagacaatggaacaactgtgcattcttagaatcttctgcaaaatcaaaaataaatgttaatgagatcttttatgacctagtgcggcaaattaacagaaaaactccagtgcctgggaaggctcgcaaaaagtcatcatgtcagctgctttaatatactaaatgcattgtagctctgagccaggtctgaagaactgttgcccaattcaacagtgccagcattccaactttgttaaacctaccaacatcttaaatggactttcctgtggtggtaccctttaagaggcggatgaaagctactatatcagtttgcacattctaatcactttccagtatcacaagagagatttttacttatataatagtcctagagtttgcagctggtaaaaccagaggctacatccagtattactgctaagagacattcttcatccaccaatgttgtacatgtatgaaaatggtgtactgtatactttaacatgccccatactttgtattggagagtacaataatgtaaatcctaaaagcaccactattttagcataataaaagaaagtccaaagagctcctatatagactactccagataacttcgcttctttgatacttgtagcttattgtaattttttttaagaaattcaaggtcattattattgtacaaaataagcgctttgattaacacagctatatagtttttttaatttttaaaaaacctgtggagacggtgatcttgtctttaaaacatgatagtcctttcagtataatgtcttagattaaagacgttgcctttaatatctgttgggaaggaaatgtccagacttttcaaatctcttattatatgtttcctttttttgtttacatagggaacaatgtttatagtcgtgtgtacagtgggggtctacaacaagaagtgtatattttcaaacaattttttaatgatttaacaatttttgtaaatcattttcaggcttctgcagctgtagattctcactgtgaatcccttgcttgctcatgcataagtgtatttgcaataccaaatatacaggtttagtatttttgcctgttagtgattgtttcacatgtgtaacgttttggttgagatgttaaatggtggacgagtactgtggatgtgaatgtgggaagtaattttaatcatatgtaattggtcacaaggcctaatttgcagtaactattgctgttttatttaacaatgccttgttgctttgtatgcattaatgtttggatgtaaagattgtgtgtctatccaacagggagccacagtatttaaattgaccaacctaatgttacaactactttgaggtggccaaatgtaaactaaaagccttaattaaagtggtgcaattttgtataacttagcatcagtagttcaataaatttggattgccatgcaagggcttgcattataa

SEQ ID NO: 344149 - DNA, 1996 bp, Homo sapiens
cccgcgggcggaagctggagcgaggctgaacgcctgacgtcaaggcgacatcgccaaacctcgcccagattcaggcgtgtaaaccagccggagcggcgcggcagcggcaggaccgccgtggcgcctagagtagcgacccggggggagcgcggggcgacgctggctgcagggacccggtgacagcgtgagaggtgaggtactaggttttgacaagcttgcatcatgcgtgagtataagctagtcgttcttggctcaggaggcgttggaaagtctgctttgactgtacaatttgttcaaggaatttttgtagaaaaatacgatcctacgatagaagattcttatagaaagcaagttgaagtagatgcacaacagtgtatgcttgaaatcttggatactgcaggaacggagcaatttacagcaatgagggatttatacatgaaagatttacaagacctgagagaacagattcttcgagttaaagacactgatgatgttccaatgattcttgttggtaataagtgtgacttggaagatgaaagagttgtagggaaggaacaaggtcaaaatctagcaagacaatggaacaactgtgcattcttagaatcttctgcaaaatcaaaaataaatgttaatgagatcttttatgacctagtgcggcaaattaacagaaaaactccagtgcctgggaaggctcgcaaaaagtcatcatgtcagctgctttaatatactaaatgcattgtagctctgagccaggtctgaagaactgttgcccaattcaacagtgccagcattccaactttgttaaacctaccaacatcttaaatggactttcctgtggtggtaccctttaagaggcggatgaaagctactatatcagtttgcacattctaatcactttccagtatcacaagagagatttttacttatataatagtcctagagtttgcagctggtaaaaccagaggctacatccagtattactgctaagagacattcttcatccaccaatgttgtacatgtatgaaaatggtgtactgtatactttaacatgccccatactttgtattggagagtacaataatgtaaatcctaaaagcaccactattttagcataataaaagaaagtccaaagagctcctatatagactactccagataacttcgcttctttgatacttgtagcttattgtaattttttttaagaaattcaaggtcattattattgtacaaaataagcgctttgattaacacagctatatagtttttttaatttttaaaaaacctgtggagacggtgatcttgtctttaaaacatgatagtcctttcagtataatgtcttagattaaagacgttgcctttaatatctgttgggaaggaaatgtccagacttttcaaatctcttattatatgtttcctttttttgtttacatagggaacaatgtttatagtcgtgtgtacagtgggggtctacaacaagaagtgtatattttcaaacaattttttaatgatttaacaatttttgtaaatcattttcaggcttctgcagctgtagattctcactgtgaatcccttgcttgctcatgcataagtgtatttgcaataccaaatatacaggtttagtatttttgcctgttagtgattgtttcacatgtgtaacgttttggttgagatgttaaatggtggacgagtactgtggatgtgaatgtgggaagtaattttaatcatatgtaattggtcacaaggcctaatttgcagtaactattgctgttttatttaacaatgccttgttgctttgtatgcattaatgtttggatgtaaagattgtgtgtctatccaacagggagccacagtatttaaattgaccaacctaatgttacaactactttgaggtggccaaatgtaaactaaaagccttaattaaagtggtgcaattttgtataacttagcatcagtagttcaataaatttggattgccatgcaagggcttgcattataa

SEQ ID NO: 344150 - DNA, 1994 bp, Homo sapiens
cccgcgggcggaagctggagcgaggctgaacgcctgacgtcaaggcgacatcgccaaacctcgcccagattcaggcgtgtaaaccagccggagcggcgcggcagcggcaggaccgccgtggcgcctagagtagcgacccggggggagcgcggggcgacgctggctgcagggacccggtgacagcgtgagaggtgaggtactaggttttgacaagcttgcatcatgcgtgagtataagctagtcgttcttggctcaggaggcgttggaaagtctgctttgactgtacaatttgttcaaggaatttttgtagaaaaatacgatcctacgatagaagattcttatagaaagcaagttgaagtagatgcacaacagtgtatgcttgaaatcttggatactgcaggaacggagcaatttacagcaatgagggatttatacatgaaaaatggacaaggatttgcattagtttattccatcacagcacagtccacatttaacgatttacaagacctgagagaacagattcttcgagttaaagacactgatgatgttccaatgattcttgttggtaataagtgtgacttggaagatgaaagagttgtagggaaggaacaaggtcaaaatctagcaagacaatggaacaactgtgcattcttagaatcttctgcaaaatcaaaaataaatgttaatgagatcttttatgacctagtgcggcaaattaacagaaaaactccagtgcctgggaaggctcgcagtctgaagaactgttgcccaattcaacagtgccagcattccaactttgttaaacctaccaacatcttaaatggactttcctgtggtggtaccctttaagaggcggatgaaagctactatatcagtttgcacattctaatcactttccagtatcacaagagagatttttacttatataatagtcctagagtttgcagctggtaaaaccagaggctacatccagtattactgctaagagacattcttcatccaccaatgttgtacatgtatgaaaatggtgtactgtatactttaacatgccccatactttgtattggagagtacaataatgtaaatcctaaaagcaccactattttagcataataaaagaaagtccaaagagctcctatatagactactccagataacttcgcttctttgatacttgtagcttattgtaattttttttaagaaattcaaggtcattattattgtacaaaataagcgctttgattaacacagctatatagtttttttaatttttaaaaaacctgtggagacggtgatcttgtctttaaaacatgatagtcctttcagtataatgtcttagattaaagacgttgcctttaatatctgttgggaaggaaatgtccagacttttcaaatctcttattatatgtttcctttttttgtttacatagggaacaatgtttatagtcgtgtgtacagtgggggtctacaacaagaagtgtatattttcaaacaattttttaatgatttaacaatttttgtaaatcattttcaggcttctgcagctgtagattctcactgtgaatcccttgcttgctcatgcataagtgtatttgcaataccaaatatacaggtttagtatttttgcctgttagtgattgtttcacatgtgtaacgttttggttgagatgttaaatggtggacgagtactgtggatgtgaatgtgggaagtaattttaatcatatgtaattggtcacaaggcctaatttgcagtaactattgctgttttatttaacaatgccttgttgctttgtatgcattaatgtttggatgtaaagattgtgtgtctatccaacagggagccacagtatttaaattgaccaacctaatgttacaactactttgaggtggccaaatgtaaactaaaagccttaattaaagtggtgcaattttgtataacttagcatcagtagttcaataaatttggattgccatgcaagggcttgcattataa

SEQ ID NO: 344151 - DNA, 1906 bp, Homo sapiens
cccgcgggcggaagctggagcgaggctgaacgcctgacgtcaaggcgacatcgccaaacctcgcccagattcaggcgtgtaaaccagccggagcggcgcggcagcggcaggaccgccgtggcgcctagagtagcgacccggggggagcgcggggcgacgctggctgcagggacccggtgacagcgtgagaggtgaggtactaggttttgacaagcttgcatcatgcgtgagtataagctagtcgttcttggctcaggaggcgttggaaagtctgctttgactgtacaatttgttcaaggaatttttgtagaaaaatacgatcctacgatagaagattcttatagaaagcaagttgaagtagatgcacaacagtgtatgcttgaaatcttggatactgcaggaacggagcaatttacagcaatgagggatttatacatgaaaaatggacaaggatttgcattagtttattccatcacagcacagtccacatttaacgatttacaagacctgagagaacagattcttcgagttaaagacactgatgatatcttttatgacctagtgcggcaaattaacagaaaaactccagtgcctgggaaggctcgcaaaaagtcatcatgtcagctgctttaatatactaaatgcattgtagctctgagccaggtctgaagaactgttgcccaattcaacagtgccagcattccaactttgttaaacctaccaacatcttaaatggactttcctgtggtggtaccctttaagaggcggatgaaagctactatatcagtttgcacattctaatcactttccagtatcacaagagagatttttacttatataatagtcctagagtttgcagctggtaaaaccagaggctacatccagtattactgctaagagacattcttcatccaccaatgttgtacatgtatgaaaatggtgtactgtatactttaacatgccccatactttgtattggagagtacaataatgtaaatcctaaaagcaccactattttagcataataaaagaaagtccaaagagctcctatatagactactccagataacttcgcttctttgatacttgtagcttattgtaattttttttaagaaattcaaggtcattattattgtacaaaataagcgctttgattaacacagctatatagtttttttaatttttaaaaaacctgtggagacggtgatcttgtctttaaaacatgatagtcctttcagtataatgtcttagattaaagacgttgcctttaatatctgttgggaaggaaatgtccagacttttcaaatctcttattatatgtttcctttttttgtttacatagggaacaatgtttatagtcgtgtgtacagtgggggtctacaacaagaagtgtatattttcaaacaattttttaatgatttaacaatttttgtaaatcattttcaggcttctgcagctgtagattctcactgtgaatcccttgcttgctcatgcataagtgtatttgcaataccaaatatacaggtttagtatttttgcctgttagtgattgtttcacatgtgtaacgttttggttgagatgttaaatggtggacgagtactgtggatgtgaatgtgggaagtaattttaatcatatgtaattggtcacaaggcctaatttgcagtaactattgctgttttatttaacaatgccttgttgctttgtatgcattaatgtttggatgtaaagattgtgtgtctatccaacagggagccacagtatttaaattgaccaacctaatgttacaactactttgaggtggccaaatgtaaactaaaagccttaattaaagtggtgcaattttgtataacttagcatcagtagttcaataaatttggattgccatgcaagggcttgcattataa

SEQ ID NO: 344152 - DNA, 1661 bp, Homo sapiens
  misc_feature (15)..(15): n is a, c, g, or t
  misc_feature (18)..(18): n is a, c, g, or t
gttttttttttggcnccnctgtcgattcggctcggtacccagttcgccggagactctcacgctggctgcagggccccggtgacagcgtgagagtactaggttttgacaagcttgcatcatgcgtgagtataagctagtcgttcttggctcaggaggcgttggaaagtctgctttgactgtacaatttgttcaaggaatttttgtagaaaaatacgatcctacgatagaagattcttatagaaagcaagttgaagtagatgcacaacagtgtattgcaaaatcaaaaataaatgttaatgagatcttttatgacctagtgcggcaaattaacagaaaaactccagtgcctgggaaggctcgcaaaaagtcatcatgtcagctgctttaatatactaaatgcattgtagctctgagccaggtctgaagaactgttgcccaattcaacagtgccagcattccaactttgttaaacctaccaacatcttaaatggactttcctgtggtggtaccctttaagaggcggatgaaagctactatatcagtttgcacattctaatcactttccagtatcacaagagagatttttacttatataatagtcctagagtttgcagctggtaaaaccagaggctacatccagtattactgctaagagacattcttcatccaccaatgttgtacatgtatgaaaatggtgtactgtatactttaacatgccccatactttgtattggagagtacaataatgtaaatcctaaaagcaccactattttagcataataaaagaaagtccaaagagctcctatatagactactccagataacttcgcttctttgatacttgtagcttattgtaattttttttaagaaattcaaggtcattattattgtacaaaataagcgctttgattaacacagctatatagtttttttaatttttaaaaaacctgtggagacggtgatcttgtctttaaaacatgatagtcctttcagtataatgtcttagattaaagacgttgcctttaatatctgttgggaaggaaatgtccagacttttcaaatctcttattatatgtttcctttttttgtttacatagggaacaatgtttatagtcgtgtgtacagtgggggtctacaacaagaagtgtatattttcaaacaattttttaatgatttaacaatttttgtaaatcattttcaggcttctgcagctgtagattctcactgtgaatcccttgcttgctcatgcataagtgtatttgcaataccaaatatacaggtttagtatttttgcctgttagtgattgtttcacatgtgtaacgttttggttgagatgttaaatggtggacgagtactgtggatgtgaatgtgggaagtaattttaatcatatgtaattggtcacaaggcctaatttgcagtaactattgctgttttatttaacaatgccttgttgctttgtatgcattaatgtttggatgtaaagattgtgtgtctatccaacagggagccacagtatttaaattgaccaacctaatgttacaactactttgaggtggccaaatgtaaactaaaagccttaattaaagtggtgcaattttgtataacttagcatcagtagttcaataaatttggattgccatgcaagggcttgcattataa

SEQ ID NO: 344153 - DNA, 1854 bp, Homo sapiens
ttaatagaatgtttaaatatggaattagaaattatataacgtgattgtaaatctgtaaaacaccatcatgaaataaattctatttgtctgctctgaacgagctttttagccactttcattgaaagagtgaggaagaacttgattatctgatactagaaaccttggttagatgtgcattctatacttatgatctaattctaggagtacattacgattgtgtaaacacaggatcacccagtttgttaatattgctatctgacttttcaatcctaattctaataaggttgacttgactaacaattttaatgtgatttttttcctttttaatccttggaaggtaatgcacaaaaatttgcacaaaggtactttccctttctgttcctaagattttcatttaactgactttcaagagggcagcagaatagacttcatctttttggaatgaaaaggtctgccgtgaattgtggtatgttgccactaatgtaatgcctagaacaagagcctagattatattcatttctaacacttttaagactgttttcttaactgtttgcttttgggtctttactttttctagcccatgtttttaattaatttttttccttttgacagtctgaagaactgttgcccaattcaacagtgccagcattccaactttgttaaacctaccaacatcttaaatggactttcctgtggtggtaccctttaagaggcggatgaaagctactatatcagtttgcacattctaatcactttccagtatcacaagagagatttttacttatataatagtcctagagtttgcagctggtaaaaccagaggctacatccagtattactgctaagagacattcttcatccaccaatgttgtacatgtatgaaaatggtgtactgtatactttaacatgccccatactttgtattggagagtacaataatgtaaatcctaaaagcaccactattttagcataataaaagaaagtccaaagagctcctatatagactactccagataacttcgcttctttgatacttgtagcttattgtaattttttttaagaaattcaaggtcattattattgtacaaaataagcgctttgattaacacagctatatagtttttttaatttttaaaaaacctgtggagacggtgatcttgtctttaaaacatgatagtcctttcagtataatgtcttagattaaagacgttgcctttaatatctgttgggaaggaaatgtccagacttttcaaatctcttattatatgtttcctttttttgtttacatagggaacaatgtttatagtcgtgtgtacagtgggggtctacaacaagaagtgtatattttcaaacaattttttaatgatttaacaatttttgtaaatcattttcaggcttctgcagctgtagattctcactgtgaatcccttgcttgctcatgcataagtgtatttgcaataccaaatatacaggtttagtatttttgcctgttagtgattgtttcacatgtgtaacgttttggttgagatgttaaatggtggacgagtactgtggatgtgaatgtgggaagtaattttaatcatatgtaattggtcacaaggcctaatttgcagtaactattgctgttttatttaacaatgccttgttgctttgtatgcattaatgtttggatgtaaagattgtgtgtctatccaacagggagccacagtatttaaattgaccaacctaatgttacaactactttgaggtggccaaatgtaaactaaaagccttaattaaagtggtgcaattttgtataacttagcatcagtagttcaataaatttggattgccatgcaagggcttgcattataa

SEQ ID NO: 344154 - DNA, 1432 bp, Homo sapiens
  misc_feature (11)..(11): n is a, c, g, or t
  misc_feature (25)..(25): n is a, c, g, or t
  misc_feature (38)..(38): n is a, c, g, or t
  misc_feature (63)..(63): n is a, c, g, or t
  misc_feature (112)..(112): n is a, c, g, or t
  misc_feature (126)..(126): n is a, c, g, or t
  misc_feature (128)..(128): n is a, c, g, or t
  misc_feature (133)..(133): n is a, c, g, or t
  misc_feature (156)..(156): n is a, c, g, or t
  misc_feature (162)..(162): n is a, c, g, or t
  misc_feature (177)..(177): n is a, c, g, or t
  misc_feature (203)..(203): n is a, c, g, or t
  misc_feature (220)..(220): n is a, c, g, or t
  misc_feature (225)..(225): n is a, c, g, or t
  misc_feature (230)..(230): n is a, c, g, or t
  misc_feature (246)..(246): n is a, c, g, or t
  misc_feature (259)..(259): n is a, c, g, or t
  misc_feature (275)..(275): n is a, c, g, or t
  misc_feature (280)..(280): n is a, c, g, or t
  misc_feature (358)..(358): n is a, c, g, or t
  misc_feature (362)..(362): n is a, c, g, or t
ccgcccatggncgggccccccgggnaatttccgatttnaaaagttttttaaaccccagggttnttaaaaaaaaccttgtttgcccccaaatttccaacccaaggtgcccaangccatttcccaaancnttttnggtttaaaaccccttaccccaanccattnctttaaaaattgggnccctttttcccctggtggggttgggntaccccctttttaaaanaaggnccggnaattgaaaaaggcttnccttaataatccnaggtttttggcccccnatttncttaaattccacctttttccccaggtattcccccaaaagagaaggattttttttacctttaataattaattaagtccntaanaaggtttgccaagcttgggtaaaaacccaagagggcttaccatccccagtattactgctaagagacattcttcatccaccaatgttgtacatgtatgaaaatggtgtactgtatactttaacatgccccatactttgtattggagagtacaataatgtaaatcctaaaagcaccactattttagcataataaaagaaagtccaaagagctcctatatagactactccagataacttcgcttctttgatacttgtagcttattgtaattttttttaagaaattcaaggtcattattattgtacaaaataagcgctttgattaacacagctatatagtttttttaatttttaaaaaacctgtggagacggtgatcttgtctttaaaacatgatagtcctttcagtataatgtcttagattaaagacgttgcctttaatatctgttgggaaggaaatgtccagacttttcaaatctcttattatatgtttcctttttttgtttacatagggaacaatgtttatagtcgtgtgtacagtgggggtctacaacaagaagtgtatattttcaaacaattttttaatgatttaacaatttttgtaaatcattttcaggcttctgcagctgtagattctcactgtgaatcccttgcttgctcatgcataagtgtatttgcaataccaaatatacaggtttagtatttttgcctgttagtgattgtttcacatgtgtaacgttttggttgagatgttaaatggtggacgagtactgtggatgtgaatgtgggaagtaattttaatcatatgtaattggtcacaaggcctaatttgcagtaactattgctgttttatttaacaatgccttgttgctttgtatgcattaatgtttggatgtaaagattgtgtgtctatccaacagggagccacagtatttaaattgaccaacctaatgttacaactactttgaggtggccaaatgtaaactaaaagccttaattaaagtggtgcaattttgtataacttagcatcagtagttcaataaatttggattgccatgcaagggcttgcattataa

SEQ ID NO: 344155 - DNA, 904 bp, Homo sapiens
cccgggctcgcaggaattcggcacgagagaaagtccaaagagctcctatatagactactccagataacttcgcttctttgatacttgtagcttattgtaattttttttaagaaattcaaggtcattattattgtacaaaataagcgctttgattaacacagctatatagtttttttaatttttaaaaaacctgtggagacggtgatcttgtctttaaaacatgatagtcctttcagtataatgtcttagattaaagacgttgcctttaatatctgttgggaaggaaatgtccagacttttcaaatctcttattatatgtttcctttttttgtttacatagggaacaatgtttatagtcgtgtgtacagtgggggtctacaacaagaagtgtatattttcaaacaattttttaatgatttaacaatttttgtaaatcattttcaggcttctgcagctgtagattctcactgtgaatcccttgcttgctcatgcataagtgtatttgcaataccaaatatacaggtttagtatttttgcctgttagtgattgtttcacatgtgtaacgttttggttgagatgttaaatggtggacgagtactgtggatgtgaatgtgggaagtaattttaatcatatgtaattggtcacaaggcctaatttgcagtaactattgctgttttatttaacaatgccttgttgctttgtatgcattaatgtttggatgtaaagattgtgtgtctatccaacagggagccacagtatttaaattgaccaacctaatgttacaactactttgaggtggccaaatgtaaactaaaagccttaattaaagtggtgcaattttgtataacttagcatcagtagttcaataaatttggattgccatgcaagggcttgcattataa

SEQ ID NO: 344156 - DNA, 731 bp, Homo sapiens
gcggccgcccgcgatctagaacgagacggtgatcttgtctttaaaacatgatagtcctttcagtataatgtcttagattaaagacgttgcctttaatatctgttgggaaggaaatgtccagacttttcaaatctcttattatatgtttcctttttttgtttacatagggaacaatgtttatagtcgtgtgtacagtgggggtctacaacaagaagtgtatattttcaaacaattttttaatgatttaacaatttttgtaaatcattttcaggcttctgcagctgtagattctcactgtgaatcccttgcttgctcatgcataagtgtatttgcaataccaaatatacaggtttagtatttttgcctgttagtgattgtttcacatgtgtaacgttttggttgagatgttaaatggtggacgagtactgtggatgtgaatgtgggaagtaattttaatcatatgtaattggtcacaaggcctaatttgcagtaactattgctgttttatttaacaatgccttgttgctttgtatgcattaatgtttggatgtaaagattgtgtgtctatccaacagggagccacagtatttaaattgaccaacctaatgttacaactactttgaggtggccaaatgtaaactaaaagccttaattaaagtggtgcaattttgtataacttagcatcagtagttcaataaatttggattgccatgcaagggcttgcattataa

SEQ ID NO: 344157 - DNA, 262 bp, Homo sapiens
tgtgttttgtgtaatgttttaacagtgctagtaaataaatacgggtttaccctggttttaattgtaataggtgcattttacacagcatggtttcataatttaacatctgggcaagccagactcattaattacaggaataaggaagtagcgagttttctggtattgtttgaatatccacataaccaccttttgaacttttccttgagaaataattttgtaaatcaagcagtattacttacgaataaatgcctttgggtaatgt

SEQ ID NO: 344158 - DNA, 2050 bp, Homo sapiens
cccgcgggcggaagctggagcgaggctgaacgcctgacgtcaaggcgacatcgccaaacctcgcccagattcaggcgtgtaaaccagccggagcggcgcggcagcggcaggaccgccgtggcgcctagagtagcgacccggggggagcgcggggcgacgctggctgcagggacccggtgacagcgtgagaggtgaggtactaggttttgacaagcttgcatcatgcgtgagtataagctagtcgttcttggctcaggaggcgttggaaagtctgctttgactgtacaatttgttcaaggaatttttgtagaaaaatacgatcctacgatagaagattcttatagaaagcaagttgaagtagatgcacaacagtgtatgcttgaaatcttggatactgcaggaacggagcaatttacagcaatgagggatttatacatgaaaaatggacaaggatttgcattagtttattccatcacagcacagtccacatttaacgatttacaagacctgagagaacagattcttcgagttaaagacactgatgatgttccaatgattcttgttggtaataagtgtgacttggaagatgaaagagttgtagggaaggaacaaggtcaaaatctagcaagacaatggaacaactgtgcattcttagaatcttctgcaaaatcaaaaataaatgttaatgagatcttttatgacctagtgcggcaaattaacagaaaaactccagtgcctgggaaggctcgcaaaaagtcatcatgtcagctgctttaatatactaaatgcattgtagctctgagccaggtctgaagaactgttgcccaattcaacagtgccagcattccaactttgttaaacctaccaacatcttaaatggactttcctgtggtggtaccctttaagaggcggatgaaagctactatatcagtttgcacattctaatcactttccagtatcacaagagagatttttacttatataatagtcctagagtttgcagctggtaaaaccagaggctacatccagtattactgctaagagacattcttcatccaccaatgttgtacatgtatgaaaatggtgtactgtatactttaacatgccccatactttgtattggagagtacaataatgtaaatcctaaaagcaccactattttagcataataaaagaaagtccaaagagctcctatatagactactccagataacttcgcttctttgatacttgtagcttattgtaattttttttaagaaattcaaggtcattattattgtacaaaataagcgctttgattaacacagctatatagtttttttaatttttaaaaaacctgtggagacggtgatcttgtctttaaaacatgatagtcctttcagtataatgtcttagattaaagacgttgcctttaatatctgttgggaaggaaatgtccagacttttcaaatctcttattatatgtttcctttttttgtttacatagggaacaatgtttatagtcgtgtgtacagtgggggtctacaacaagaagtgtatattttcaaacaattttttaatgatttaacaatttttgtaaatcattttcaggcttctgcagctgtagattctcactgtgaatcccttgcttgctcatgcataagtgtatttgcaataccaaatatacaggtttagtatttttgcctgttagtgattgtttcacatgtgtaacgttttggttgagatgttaaatggtggacgagtactgtggatgtgaatgtgggaagtaattttaatcatatgtaattggtcacaaggcctaatttgcagtaactattgctgttttatttaacaatgccttgttgctttgtatgcattaatgtttggatgtaaagattgtgtgtctatccaacagggagccacagtatttaaattgaccaacctaatgttacaactactttgaggtggccaaatgtaaactaaaagccttaattaaagtggtgcaattttgtataacttagcatcagtagttcaataaatttggattgccatgcaagggcttgcattataa

SEQ ID NO: 344159 - DNA, 2414 bp, Homo sapiens
  misc_feature (2375)..(2375): n is a, c, g, or t
cccgcgggcggaagctggagcgaggctgaacgcctgacgtcaaggcgacatcgccaaacctcgcccagattcaggcgtgtaaaccagccggagcggcgcggcagcggcaggaccgccgtggcgcctagagtagcgacccggggggagcgcggggcgacgctggctgcagggacccggtgacagcgtgagaggtgaggtactaggttttgacaagcttgcatcatgcgtgagtataagctagtcgttcttggctcaggaggcgttggaaagtctgctttgactgtacaatttgttcaaggaatttttgtagaaaaatacgatcctacgatagaagattcttatagaaagcaagttgaagtagatgcacaacagtgtatgcttgaaatcttggatactgcaggaacggagcaatttacagcaatgagggatttatacatgaaaaatggacaaggatttgcattagtttattccatcacagcacagtccacatttaacgatttacaagacctgagagaacagattcttcgagttaaagacactgatgatgttccaatgattcttgttggtaataagtgtgacttggaagatgaaagagttgtagggaaggaacaaggtcaaaatctagcaagacaatggaacaactgtgcattcttagaatcttctgcaaaatcaaaaataaatgttaatgagatcttttatgacctagtgcggcaaattaacagaaaaactccagtgcctgggaaggctcgcaaaaagtcatcatgtcagctgctttaatatactaaatgcattgtagctctgagccaggtctgaagaactgttgcccaattcaacagtgccagcattccaactttgttaaacctaccaacatcttaaatggactttcctgtggtggtaccctttaagaggcggatgaaagctactatatcagtttgcacattctaatcactttccagtatcacaagagagatttttacttatataatagtcctagagtttgcagctggtaaaaccagaggctacatccagtattactgctaagagacattcttcatccaccaatgttgtacatgtatgaaaatggtgtactgtatactttaacatgccccatactttgtattggagagtacaataatgtaaatcctaaaagcaccactattttagcataataaaagaaagtccaaagagctcctatatagactactccagataacttcgcttctttgatacttgtagcttattgtaattttttttaagaaattcaaggtcattattattgtacaaaataagcgctttgattaacacagctatatagtttttttaatttttaaaaaacctgtggagacggtgatcttgtctttaaaacatgatagtcctttcagtataatgtcttagattaaagacgttgcctttaatatctgttgggaaggaaatgtccagacttttcaaatctcttattatatgtttcctttttttgtttacatagggaacaatgtttatagtcgtgtgtacagtgggggtctacaacaagaagtgtatattttcaaacaattttttaatgatttaacaatttttgtaaatcattttcaggcttctgcagctgtagattctcactgtgaatcccttgcttgctcatgcataagtgtatttgcaataccaaatatacaggtttagtatttttgcctgttagtgattgtttcacatgtgtaacgttttggttgagatgttaaatggtggacgagtactgtggatgtgaatgtgggaagtaattttaatcatatgtaattggtcacaaggcctaatttgcagtaactattgctgttttatttaacaatgccttgttgctttgtatgcattaatgtttggatgtaaagattgtgtgtctatccaacagggagccacagtatttaaattgaccaacctaatgttacaactactttgaggtggccaaatgtaaactaaaagccttaattaaagtggtgcaattttgtataacttagcatcagtagttcaataaatttggattgccatgcaagggcttgcattataattacttgccacttgaatgtgttttgtgtaatgttttaacagtgctagtaaataaatacgggtttaccctggaaaaaaaaaaaaaaaaaaaaaaaaaaaaacccgggggcctcttattggggggggggaaaaaggggtaatatggacaggccgccaagtgtgtcatatagagcgtgtcctcggtaaccccaactttttctttgtatacacaggggtggaaacactgccgcgcggacccccaatagtaggaggaaggccagcgaaataaaatacaacgaaaaagcgcaagcgttacccttgcttagactcacttccgcagcaaaaangaaaataacaaaaacaaacaccacacaacacaaacaggg

SEQ ID NO: 344160 - DNA, 2090 bp, Homo sapiens
cccgcgggcggaagctggagcgaggctgaacgcctgacgtcaaggcgacatcgccaaacctcgcccagattcaggcgtgtaaaccagccggagcggcgcggcagcggcaggaccgccgtggcgcctagagtagcgacccggggggagcgcggggcgacgctggctgcagggacccggtgacagcgtgagaggtgaggtactaggttttgacaagcttgcatcatgcgtgagtataagctagtcgttcttggctcaggaggcgttggaaagtctgctttgactgtacaatttgttcaaggaatttttgtagaaaaatacgatcctacgatagaagattcttatagaaagcaagttgaagtagatgcacaacagtgtatgcttgaaatcttggatactgcaggaacggagcaatttacagcaatgagggatttatacatgaaaaatggacaaggatttgcattagtttattccatcacagcacagtccacatttaacgatttacaagacctgagagaacagattcttcgagttaaagacactgatgatgttccaatgattcttgttggtaataagtgtgacttggaagatgaaagagttgtagggaaggaacaaggtcaaaatctagcaagacaatggaacaactgtgcattcttagaatcttctgcaaaatcaaaaataaatgttaatgagatcttttatgacctagtgcggcaaattaacagaaaaactccagtgcctgggaaggctcgcaaaaagtcatcatgtcagctgctttaatatactaaatgcattgtagctctgagccaggtctgaagaactgttgcccaattcaacagtgccagcattccaactttgttaaacctaccaacatcttaaatggactttcctgtggtggtaccctttaagaggcggatgaaagctactatatcagtttgcacattctaatcactttccagtatcacaagagagatttttacttatataatagtcctagagtttgcagctggtaaaaccagaggctacatccagtattactgctaagagacattcttcatccaccaatgttgtacatgtatgaaaatggtgtactgtatactttaacatgccccatactttgtattggagagtacaataatgtaaatcctaaaagcaccactattttagcataataaaagaaagtccaaagagctcctatatagactactccagataacttcgcttctttgatacttgtagcttattgtaattttttttaagaaattcaaggtcattattattgtacaaaataagcgctttgattaacacagctatatagtttttttaatttttaaaaaacctgtggagacggtgatcttgtctttaaaacatgatagtcctttcagtataatgtcttagattaaagacgttgcctttaatatctgttgggaaggaaatgtccagacttttcaaatctcttattatatgtttcctttttttgtttacatagggaacaatgtttatagtcgtgtgtacagtgggggtctacaacaagaagtgtatattttcaaacaattttttaatgatttaacaatttttgtaaatcattttcaggcttctgcagctgtagattctcactgtgaatcccttgcttgctcatgcataagtgtatttgcaataccaaatatacaggtttagtatttttgcctgttagtgattgtttcacatgtgtaacgttttggttgagatgttaaatggtggacgagtactgtggatgtgaatgtgggaagtaattttaatcatatgtaattggtcacaaggcctaatttgcagtaactattgctgttttatttaacaatgccttgttgctttgtatgcattaatgtttggatgtaaagattgtgtgtctatccaacagggagccacagtatttaaattgaccaacctaatgttacaactactttgaggtggccaaatgtaaactaaaagccttaattaaagtggtgcaattttgtataacttagcatcagtagttcaataaatttggattgccatgcaagggcttgcattataaacaaaaaaaaatcacatagtacaaaccatcaggaaacaag

SEQ ID NO: 344161 - DNA, 2336 bp, Homo sapiens
cccgcgggcggaagctggagcgaggctgaacgcctgacgtcaaggcgacatcgccaaacctcgcccagattcaggcgtgtaaaccagccggagcggcgcggcagcggcaggaccgccgtggcgcctagagtagcgacccggggggagcgcggggcgacgctggctgcagggacccggtgacagcgtgagaggtgaggtactaggttttgacaagcttgcatcatgcgtgagtataagctagtcgttcttggctcaggaggcgttggaaagtctgctttgactgtacaatttgttcaaggaatttttgtagaaaaatacgatcctacgatagaagattcttatagaaagcaagttgaagtagatgcacaacagtgtatgcttgaaatcttggatactgcaggaacggagcaatttacagcaatgagggatttatacatgaaaaatggacaaggatttgcattagtttattccatcacagcacagtccacatttaacgatttacaagacctgagagaacagattcttcgagttaaagacactgatgatgttccaatgattcttgttggtaataagtgtgacttggaagatgaaagagttgtagggaaggaacaaggtcaaaatctagcaagacaatggaacaactgtgcattcttagaatcttctgcaaaatcaaaaataaatgttaatgagatcttttatgacctagtgcggcaaattaacagaaaaactccagtgcctgggaaggctcgcaaaaagtcatcatgtcagctgctttaatatactaaatgcattgtagctctgagccaggtctgaagaactgttgcccaattcaacagtgccagcattccaactttgttaaacctaccaacatcttaaatggactttcctgtggtggtaccctttaagaggcggatgaaagctactatatcagtttgcacattctaatcactttccagtatcacaagagagatttttacttatataatagtcctagagtttgcagctggtaaaaccagaggctacatccagtattactgctaagagacattcttcatccaccaatgttgtacatgtatgaaaatggtgtactgtatactttaacatgccccatactttgtattggagagtacaataatgtaaatcctaaaagcaccactattttagcataataaaagaaagtccaaagagctcctatatagactactccagataacttcgcttctttgatacttgtagcttattgtaattttttttaagaaattcaaggtcattattattgtacaaaataagcgctttgattaacacagctatatagtttttttaatttttaaaaaacctgtggagacggtgatcttgtctttaaaacatgatagtcctttcagtataatgtcttagattaaagacgttgcctttaatatctgttgggaaggaaatgtccagacttttcaaatctcttattatatgtttcctttttttgtttacatagggaacaatgtttatagtcgtgtgtacagtgggggtctacaacaagaagtgtatattttcaaacaattttttaatgatttaacaatttttgtaaatcattttcaggcttctgcagctgtagattctcactgtgaatcccttgcttgctcatgcataagtgtatttgcaataccaaatatacaggtttagtatttttgcctgttagtgattgtttcacatgtgtaacgttttggttgagatgttaaatggtggacgagtactgtggatgtgaatgtgggaagtaattttaatcatatgtaattggtcacaaggcctaatttgcagtaactattgctgttttatttaacaatgccttgttgctttgtatgcattaatgtttggatgtaaagattgtgtgtctatccaacagggagccacagtatttaaattgaccaacctaatgttacaactactttgaggtggccaaatgtaaactaaaagccttaattaaagtggtgcaattttgtataaaaaaacaaaaaaaaagaaaaacaaaaacaaaaaaaaaaagacacacacactacacacgccgggcgggcgcgcgcagcggcagagagaagagaccgtctaaaacaccggcagagagggagggggggaaaagagaggggcggcagacgagcaacagaaggagagaacaaaaggaaaacaagagacacaaaaaaaagggagagggaaaactacaagaagagataaaaaacagcgggggaggaaaccgcagaaggcaataaaaaaaagacagacggagaagatcgagagaaaagggagggaaacaacaaaagggaagcaaagaagactgaagacaaaaacaccga

SEQ ID NO: 344162 - DNA, 1869 bp, Homo sapiens
cccgcgggcggaagctggagcgaggctgaacgcctgacgtcaaggcgacatcgccaaacctcgcccagattcaggcgtgtaaaccagccggagcggcgcggcagcggcaggaccgccgtggcgcctagagtagcgacccggggggagcgcggggcgacgctggctgcagggacccggtgacagcgtgagaggtgaggcttgaaatcttggatactgcaggaacggagcaatttacagcaatgagggatttatacatgaaaaatggacaaggatttgcattagtttattccatcacagcacagtccacatttaacgatttacaagacctgagagaacagattcttcgagttaaagacactgatgatgttccaatgattcttgttggtaataagtgtgacttggaagatgaaagagttgtagggaaggaacaaggtcaaaatctagcaagacaatggaacaactgtgcattcttagaatcttctgcaaaatcaaaaataaatgttaatgagatcttttatgacctagtgcggcaaattaacagaaaaactccagtgcctgggaaggctcgcaaaaagtcatcatgtcagctgctttaatatactaaatgcattgtagctctgagccaggtctgaagaactgttgcccaattcaacagtgccagcattccaactttgttaaacctaccaacatcttaaatggactttcctgtggtggtaccctttaagaggcggatgaaagctactatatcagtttgcacattctaatcactttccagtatcacaagagagatttttacttatataatagtcctagagtttgcagctggtaaaaccagaggctacatccagtattactgctaagagacattcttcatccaccaatgttgtacatgtatgaaaatggtgtactgtatactttaacatgccccatactttgtattggagagtacaataatgtaaatcctaaaagcaccactattttagcataataaaagaaagtccaaagagctcctatatagactactccagataacttcgcttctttgatacttgtagcttattgtaattttttttaagaaattcaaggtcattattattgtacaaaataagcgctttgattaacacagctatatagtttttttaatttttaaaaaacctgtggagacggtgatcttgtctttaaaacatgatagtcctttcagtataatgtcttagattaaagacgttgcctttaatatctgttgggaaggaaatgtccagacttttcaaatctcttattatatgtttcctttttttgtttacatagggaacaatgtttatagtcgtgtgtacagtgggggtctacaacaagaagtgtatattttcaaacaattttttaatgatttaacaatttttgtaaatcattttcaggcttctgcagctgtagattctcactgtgaatcccttgcttgctcatgcataagtgtatttgcaataccaaatatacaggtttagtatttttgcctgttagtgattgtttcacatgtgtaacgttttggttgagatgttaaatggtggacgagtactgtggatgtgaatgtgggaagtaattttaatcatatgtaattggtcacaaggcctaatttgcagtaactattgctgttttatttaacaatgccttgttgctttgtatgcattaatgtttggatgtaaagattgtgtgtctatccaacagggagccacagtatttaaattgaccaacctaatgttacaactactttgaggtggccaaatgtaaactaaaagccttaattaaagtggtgcaattttgtataacttagcatcagtagttcaataaatttggattgccatgcaagggcttgcattataa

SEQ ID NO: 344163 - DNA, 1913 bp, Homo sapiens
cccgcgggcggaagctggagcgaggctgaacgcctgacgtcaaggcgacatcgccaaacctcgcccagattcaggcgtgtaaaccagccggagcggcgcggcagcggcaggaccgccgtggcgcctagagtagcgacccggggggagcgcggggcgacgctggctgcagggacccggtgacagcgtgagaggtgagactgtacaatttgttcaaggaatttttgtagaaaaatacgatcctacgatagaagattcttatagaaagcaagttgaagtagatgcacaacagtgtatgcttgaaatcttggatactgcaggaacggagcaatttacagcaatgagggatttatacatgaaagatttacaagacctgagagaacagattcttcgagttaaagacactgatgatgttccaatgattcttgttggtaataagtgtgacttggaagatgaaagagttgtagggaaggaacaaggtcaaaatctagcaagacaatggaacaactgtgcattcttagaatcttctgcaaaatcaaaaataaatgttaatgagatcttttatgacctagtgcggcaaattaacagaaaaactccagtgcctgggaaggctcgcaaaaagtcatcatgtcagctgctttaatatactaaatgcattgtagctctgagccaggtctgaagaactgttgcccaattcaacagtgccagcattccaactttgttaaacctaccaacatcttaaatggactttcctgtggtggtaccctttaagaggcggatgaaagctactatatcagtttgcacattctaatcactttccagtatcacaagagagatttttacttatataatagtcctagagtttgcagctggtaaaaccagaggctacatccagtattactgctaagagacattcttcatccaccaatgttgtacatgtatgaaaatggtgtactgtatactttaacatgccccatactttgtattggagagtacaataatgtaaatcctaaaagcaccactattttagcataataaaagaaagtccaaagagctcctatatagactactccagataacttcgcttctttgatacttgtagcttattgtaattttttttaagaaattcaaggtcattattattgtacaaaataagcgctttgattaacacagctatatagtttttttaatttttaaaaaacctgtggagacggtgatcttgtctttaaaacatgatagtcctttcagtataatgtcttagattaaagacgttgcctttaatatctgttgggaaggaaatgtccagacttttcaaatctcttattatatgtttcctttttttgtttacatagggaacaatgtttatagtcgtgtgtacagtgggggtctacaacaagaagtgtatattttcaaacaattttttaatgatttaacaatttttgtaaatcattttcaggcttctgcagctgtagattctcactgtgaatcccttgcttgctcatgcataagtgtatttgcaataccaaatatacaggtttagtatttttgcctgttagtgattgtttcacatgtgtaacgttttggttgagatgttaaatggtggacgagtactgtggatgtgaatgtgggaagtaattttaatcatatgtaattggtcacaaggcctaatttgcagtaactattgctgttttatttaacaatgccttgttgctttgtatgcattaatgtttggatgtaaagattgtgtgtctatccaacagggagccacagtatttaaattgaccaacctaatgttacaactactttgaggtggccaaatgtaaactaaaagccttaattaaagtggtgcaattttgtataacttagcatcagtagttcaataaatttggattgccatgcaagggcttgcattataa

SEQ ID NO: 344164 - DNA, 1617 bp, Homo sapiens
cccgcgggcggaagctggagcgaggctgaacgcctgacgtcaaggcgacatcgccaaacctcgcccagattcaggcgtgtaaaccagccggagcggcgcggcagcggcaggaccgccgtggcgcctagagtagcgacccggggggagcgcggggcgacgctggctgcagggacccggtgacagcgtgagaggtgaggtactaggttttgacaagcttgcatcatgcgtgagtataagctagtcgttcttggctcaggaggcgttggaaagtctgctttgactgtacaatttgttcaaggaatttttgtagaaaaatacgatcctacgatagaagattcttatagaaagcaagttgaagtagatgcacaacagtgtatgcttgaaatcttggatactgcaggaacggagcaatttacagcaatgagggatttatacatgaaaaatggacaaggatttgcattagtttattccatcacagcacagtccacatttaacgatttacaagacctgagagaacagattcttcgagttaaagacactgatgatgttccaatgattcttgttggtaataagtgtgacttggaagatgaaagagttgtagggaaggaacaaggtcaaaatctagcaagacaatggaacaactgtgcattcttagaatcttctgcaaaatcaaaaataaatgttaatgagatcttttatgacctagtgcggcaaattaacagaaaaactccagtgcctgggaaggctcgcaaaaagtcatcatgtcagctgctttaatatactaaatgcattgtagctctgagccaggtctgaagaactgttgcccaattcaacagtgccagcattccaactttgttaaacctaccaacatcttaaatggactttcctgtggtggtaccctttaagaggcggatgaaagctactatatcagtttgcacattctaatcactttccagtatcacaagagagatttttacttatataatagtcctagagtttgcagctggtaaaaccagaggctacatccagtattactgctaagagacattcttcatccaccaatgttgtacatgtatgaaaatggtgtactgtatactttaacatgccccatactttgtattggagagtacaataatgtaaatcctaaaagcaccactattttagcataataaaagaaagtccaaagagctcctatatagactactccagataacttcgcttctttgatacttgtagcttattgtaattttttttaagaaattcaaggtcattattattgtacaaaataagcgctttgattaacacagctatatagtttttttaatttttaaaaaacctgtggagacggtgatcttgtctttaaaacatgatagtcctttcagtataatgtcttagattaaagacgttgcctttaatatctgttgggaaggaaatgtccagacttttcaaatctcttattatatgtttcctttttttgtttcgaagcagagtctcgctgtgtcacccaggctggagtgcagtggtgcgatctcagctcactgcaatctccacatcctgggttcaagtgatcttcccacctcagcctcatgagtatgtaggattacagcatgctcataa

SEQ ID NO: 344165 - DNA, 552 bp, Homo sapiens
atgaacacaaatgcgcagtctcctctgcgatcggtagctaaggatgttaggccatgattggactaggatgggagatgaactgagaactatggattctgtaggttgttgttgtctcttcccaccccaagcaacaagtgatgacacacacacacacacacacacacacacacacacacacacacacacatcccgtagtgactaacaggatctccctccaggggatttgcagaaaggggagcagaaaacatcccaggggcctttcacagctacttccttgagccccctttcagactgctgtctagacctgtcgcagcccaaacatcaccaccctgatatgcagaagctggcatccttacctgaaattcaacaccaagaaatgatctcttctactcaacactgatagaaatacctctaagcaatgtcctcattggcaggggtggagtgggggagtttcttaaaaagtgaggcctctgcctaccacctagagaacctggaaatttccatctgtgccacaaagtccaaatcactggccactgcccttgtgtatggcag

SEQ ID NO: 344166 - DNA, 548 bp, Homo sapiens
ttgttggtggagtgacccgagagtatacaggaattgagggcatatgagatctctggactctgcactccattttgctgtacactcaaaactactctaaaataataatatatctttaaaaatctataactagcacgtagcccttttcaagcctccaactggttggagccagttcgattaaagctcagaagaaaaactggttaataagctagttctgacccaactggcaagaagcggcaggaaagacccaggccaggggagcatattgcacatgcatgcaccaggaaactggaggaagcttggaggccctttagcctggtcctgagcccgctgaaactgcagttacagcacagatgcctggggcaccaatctgaatctgccaacatccaaggccacatgaacacaaatgcgcagtctcctctgcgatcggtagctaaggatgttaggccatgattggactaggatgggagatgaactgagaactatggattctgtaggttgttgttgtctcttcccaccccaagcaacaagtgatgacacacacacacaca

SEQ ID NO: 344167 - DNA, 446 bp, Homo sapiens
ttttttttgagacgagtctcgctctttcacccaggctggagtgaagtggcctgatcttggctcactgcaacctccctgccctggagcttcaagcgattttcatgcctctgcctcccaattagctgggattatagacgcccaccatcacacccggctaacttttgcatttttagtagagactaacatggtttcgccacgttggccaggttggtctcgaactcctgacctcgggtgatccacccgcctcggcctcccaaactgctggtattacaggcatgagacaccaagcccggccatatacatttttattaaaatcgttctgtaggttccagaggaaaacgtcctcttgacagtcatggaatacaaatacagtacttatcattttgtctgtaagatttccataattttccacccaacatattaaatgactgaatgaatgcgagctt

SEQ ID NO: 344168 - DNA, 430 bp, Homo sapiens
cgtgggaagaagggcagctgcaagcagatctgtccacctctgctgagaagcccaggacctctgggtagtgcagggcaggacgggacaaggggcttccgcctgtggtcagtgtattcacagtcctcttcaaagatcagagagatccacgcctgctgttgccaccagcaccggggctcctaggcttcacttcagacactgcagcaagggcagccctggggtgctttcggctccccagccccctccccccaaccttgaaaggaaagatcagcgttccatcctcagtttcaagatggggacactgatggcaacgtggacttcagggagccccaaggggaggtgagggaaggagagggaatcatatcctagggttgctcaaagatgttggctaccattataaccctcagtgagtgctcactcactgttatcatca

SEQ ID NO: 344169 - DNA, 498 bp, Homo sapiens
gtaggacaagcaaaaatgagggtaaagtggtgggcagggggaggtgaagagtgtcatgaaggtagctctattgtgctggagtgcaggaggattgagagatgtgagggatatcagactgaggacgtgaactggagccaagcggagggggagaatgtattctgtgcacaattgggaaggttttaacaatgtttccagagaggataacaggttttaacaatgtttccagagagagaataacaggacaatagctatgctttggaaagagaaatctgatggcagcctggagaatggcatgggaggggagagagtgatggcaggcagttaggctcaaagcctggagcaccctccccggccagagtgtgtgctgagccccttagtgaaattgacctcacacggtatatgagtctgagaattagccatgtagaatgtatacatataaaaaatacctataaataatctcttcatcttctactacatggtcctttttagttttcctct

SEQ ID NO: 344170 - DNA, 357 bp, Homo sapiens
ctgtaataagaaagaggctgctttgtgcccctcatgagactgcctcttgtcccaggtttgtgctcaaaattaaattcatttcctctttcccaaacctcattgggaaggcttcatcacagggcttcaccatttctgtgagttgcacctccattccactaatccttttggtgatttcttctccctcacatctaatttttagtaatttcctattgcttctataacaaattatcaaaaatgtattagcttaaaagaataaattatcttacaggtctagaggtcagaagtccaaaataagtcacactgagctaaaatcaaggtgttggcagggagtctttaggagagaatctgttttttgtt

SEQ ID NO: 344171 - DNA, 808 bp, Homo sapiens
ttagtcttctcttccatcccaaccatctgccctatagatacgtgctattagtcatttggaattggattaggaattcaaaccaaagtctaggtaaaatagtcaatagtatttatctgtcattaatccatcacttatttttaagaaagaaacaatgagtgcacagcctaataatggaggtctctctgtgaaatgaggcacattatacatttcaacagctctactgaaattgagtaccagaatacagaacttaactcaaataatattatattgagtataagaataagaaaggttttttttttttggtttgtttcctacataattggggtgagtggataaaagtagtttaaacatcctaaggggtagacaagattaatttgatgttcgtgacacggcccaagtacctgtttatcttaaaagcgcatgatgtatgggaacagaatggaaaaataaggccaggtgagtaaaattgttcagagattttaaaaattaaaaaaagaaaaaagacattagtgaaggagtgcagtaaatagccaacagctgttttcattctcctgaaaagtagtgaagtagtgatggcaataattatgaagaaattgaatgccgagtaagagaatgcagtaatggatttagaacctattagaatgagccataggaaaaggtataaatgggttgtgatggaggccaaggacagagaattcatttggttaatgtcccagtatctataataatcagtgaaagaacaagaaaatcatattaagaaagcaaaagcagactgggcacagtggctcacatttgtcatcacagcact

SEQ ID NO: 344172 - DNA, 475 bp, Homo sapiens
ggcagctagggtagcatcatgccggaggaggacaaacgcctgctgaggtggtgaccctgccttgccctgccaagcacgtagcagttagcaccaactagatacagacatactccacaggagttggaaggggcagagagaagggttcgtaccctgatcagggagtgtcctcccacaactctaaggccaagcctatcagcccttccaagtgggagtgctgccagctttctgtttactgtgaccacctgtgtgcagcaattgggtctgtcacctacaggaaagggacatacatatctgctggccactgtcaacatcacctgtataacaagagattaatatgccttgaatatgtacagaatgtttttcaaaggacagaagcagctctggggaagaagaggacttcagcttttcagtcttctgcattctttcagtattttgccacatatcaggttttgttttgtttttgagacagggtctc

SEQ ID NO: 344173 - DNA, 619 bp, Homo sapiens
cgttttcaggggaatgaattggaagtaaccattatgatggtggtagaagcattatgtgaacttcattgtcctgaagctatacagggaattgctgtctggtcatcatctattgttggaaaaaatcttctgtggattaactcagtggctcaacaggctgaagggaggtttgaaaaggcctctgtggagtaccaggaacacctgtgtgccatgacaggtgttgattgctgcatctccagctttgacaaatcggtgctcaccttagccaatgctgggcgtaacagtgccagcccgaaacattctctgaatggtgaatccagaaaaactgtgctgtccaaaccgactgactcttcccctgaggttataaattatttaggaaataaagcatgtgagtgctacatctcaattgccgattgggctgctgtgcaggaatggcagaacgctatccatgacttgaaaaagagtaccagtagcacttccctcaacctgaaagctgacttcaactatataaaatcattaagcagctttgagtctggaaaatttgttgaatgtaccgagcagttagaattgttaccaggagaaaatatcaatctacttgctggaggatcaaaagaaaaaatag

SEQ ID NO: 344174 - DNA, 433 bp, Homo sapiens
cgttttcaggggaatgaattggaagtaaccattatgatggtggtagaagcattatgtgaacttcattgtcctgaagctatacagggaattgctgtctggtcatcatctattgttggaaaaaatcttctgtggattaactcagtggctcaacaggctgaagggagcattgaagcttgctataaatcacttcaccaggaggcgtcttcagtttgttctttagttagcagcaatacttgagtgcctttcttactgaagaattagtggcaaatcacactgtaaaacaagacctgagcaagccagggggtctcggcagcttaactccacattgaaatctgtggggacagccacaatgctgcaaatcctctctcccctcttccctatcactcctcttttccttccttcagtctccataaaagggaagggaagcttcgat

SEQ ID NO: 344175 - DNA, 1281 bp, Homo sapiens
tgcctgggcgacagagtgagaccctgtctccaaaaaaaaaaaaaaaaaaggaagacttctggctgccttttcctttttcaaaggcattttactggtctcttgggagcactgcagtttttttttaaaaaacctggaaacaaagttcgttaatatctgtagaaaaaagaggttatgtgcagtgctcacacctgtaatcccagcactttgggaggccaaggcgggcagatcacctgaggtcaggagtttgagaccagtctggccaacatggcaaaaccccatctctactaaaaatacaaacattagctgggtgtggtgttgggcaccttataatcccagctactcgggaggctgaggcaggagaatcacttgaacccggggggcggaggttgcagtgagctgagatcatgccactgaagttcactccagcctgggtaaaagagcaaaactccatctcaaaaaaaaaaaaatctataaaaaagaaatcaaacaaatttattaggaatgtggctctctttctcagagtttttccctttgtgctataaaagcaagttttaaaaggaactgaaatgacagctcagcaggtagaatcatttagtaaactcatagagctcctggcactgcttcaagggcccctgtgggctgtgttgggcttgtctaggttatgtatctcttttcaattattttcttagttaatcatcaaatttttaattgagcaaccttctagagcagttggatttacatgcacttttgggcacgtggatttgctgccatttattctagaatttttgaagggctagacccctggacatagcagatagctctattgtttaggatcaaacaaacctccagcaggatccttggaacgaggaaggagccaggacttagcagagcacgccaaggtattcgctgaaggaaactggcccttccaggggactgcatggaacccggggggttgggaatacagtgccccaaaacccagtgtgtcttttaagttcagcctccctagccagtgtgccctgtgcgtgatcactgtaaagccacacctttcaaatcaggaggtgtaagaagttgtctttaacctaagggaagaggaaacagtttgctaaaaataaggccattacctgctggaactgtcacagtaggttctaattaacttgtctcctcttgttgttttcaaaatgatgtattctaattcaaagtaaagactgtagagacaattctaaattattttcttcttttttagggggtgttgtggggagggtctcactctgtcacccagat

SEQ ID NO: 344176 - DNA, 514 bp, Homo sapiens
gaactctggggctcaagcattcctcccacctcagcctcccaagtagctgggcctacaagtcttcttggcttcaagtcttcttcctcagcggtctcactctgtcaccaaggctggagtgcagtggtgctgcgatctcggctcactgcaacttccacctccaaggcccaagcgatcctcccaccacagcctcctgagtggctgggactagaggaaacattcaaatcagttgacaaagaatggctgatgctgaaatgacttgctgtctcggtgtggagtggaaacaatcctgctaaatttcatattgcagtgacaccaaagcaaaggacagatctcaagacaacttttattgaaatggaaaacagttaattttaactaaagaataagagaaatgccaacagaaataaaagacccagaaatcagaggacaatgtgcgaaactctatatactgagacacacaaattgaaacaacccaaataaatgccaaatgcacaagaaaataaatgtaacttatcag

SEQ ID NO: 344177 - DNA, 365 bp, Homo sapiens
taaaagattaaaatagataattttacgctaaagaaacgcttagtagaaacgaaatcattgtgaaacattcaaatcagttgacaaagaatggctgatgctgaaatgacttgctgtctcggtgtggagtggaaacaatcctgctaaatttcatattgcagtgacaccaaagcaaaggacagatctcaagacaacttttattgaaatggaaaacagttaattttaactaaagaataagagaaatgccaacagaaataaaagacccagaaatcagaggacaatgtgcgaaactctatatactgagacacacaaattgaaacaacccaaataaatgccaaatgcacaagaaaataaatgtaacttatcag

SEQ ID NO: 344178 - DNA, 403 bp, Homo sapiens
taaaagattaaaatagataattttacgctaaagaaacgcttagtagaaacgaaatcattgtgaaacattcaaatcagttgacaaagaatggctgatgctgaaatgacttgctgtctcggtgtggagtggaaacaatcctgctaaatttcatattgcagtgacaccaaagcaaaggacagatctcaagacaacttttattgaaatggaaaacagttaattttaactaaagaataagagaaatgccaacagaaataaaagacccagaaatcagaggacaatgtgcgaaactctatatactgagacacacaaattgaaacaacccaaataaatgccaaatgcacaagaaaataaatgtaacttatcagggaacaaaaaaagaaagcgattggcctccttggcctca

SEQ ID NO: 344179 - DNA, 622 bp, Homo sapiens
atggtctattctaaggtaacaaaaatgtgctcttatgttttcttctaagagcttccactgttttatctttcatacagctggaatcaattttttatgtggtattaggtaggggtcctgatacattttgttcagtatagataaacaaacgactcagtatcattttttgaaaagatcatccttcaaccactacatgccactctcacctttgtcaacactttatctatcactgcgtcagaatctttttaatggctatatagttttccattgtatgcatgtgctataaattactaaatccatccccaattagccaacacttgagagtttccatgtttttggtataaataatgctataatgaataaccttgtccatgtattattccccacatgtggagtatatttgtaagataaactcagagaaacggagttgctaagtcaaagggtatgtgcatttttaatcaatacatgatagaggttataccaactttaattggaattttcaagtcacaatgaactccaaagtattatgataagatacagcacattgccatttcagttactccaaagttcccaacatttttggcccttaggattcttttataaaagacatcaaatgtataacaat

SEQ ID NO: 344180 - DNA, 255 bp, Homo sapiens
agggtttcactctcgttgcccaggctggagtgcaatggcatgatcttggctcaccacaacctccacctcccaagttcaagcgattctcctgcctcagcatgccgagtagctgggattacaggtcatctctctgccatcgggaggcagcatcgagcaaccccgtgctggggcatcaggcaagaccagagctcaaatccaggctgcccacttctcacgtgtaaatgtggatagcagcagtttgtcttacacaaggct

SEQ ID NO: 344181 - DNA, 6561 bp, Homo sapiens
caccttctttagtgctgcccctgggcagaatcccatcgtgcctgagacccaggttcttcatgaagaaatcgagctccctggttccaatgtgaaacttcgctatctgagctctagaactgcagggtacaagtcactgctgaagatcaccatgacccagtccacagtgcccctgaacctcattagggttcacctgatggtggctgtcgaggggcatctcttccagaagtcattccaggcttctcccaacctggcctacaccttcatctgggacaagacagatgcgtatggccaaagggtgtatggactctcagatgctgttgtgtctgtcgggtttgaatatgagacctgtcccagtctaattctctgggagaaaaggacagccctccttcagggattcgagctggacccctccaacctcggtggctggtccctagacaaacaccacatcctcaatgttaaaagtggaatcctacacaaaggcactggggaaaaccagttcctgacccagcagcctgccatcatcaccagcatcatgggcaatggtcgccgccggagcatttcctgtcccagctgcaacggccttgctgaaggcaacaagctgctggccccagtggctctggctgttggaatcgatgggagcctctatgtgggtgacttcaattacatccgacgcatctttccctctcgaaatgtgaccagcatcttggagttacgaaataaagagtttaaacatagcaacaacccagcacacaagtactacttggcagtggaccccgtgtccggctcgctctacgtgtccgacaccaacagcaggagaatctaccgcgtcaagtctctgagtggaaccaaagacctggctgggaattcggaagttgtggcagggacgggagagcagtgtctaccctttgatgaagcccgctgcggggatggagggaaggccatagatgcaaccctgatgagcccgagaggtattgcagtagacaagaatgggctcatgtactttgtcgatgccaccatgatccggaaggttgaccagaatggaatcatctccaccctgctgggctccaatgacctcactgccgtccggccgctgagctgtgattccagcatggatgtagcccaggttcgtctggagtggccaacagaccttgctgtcaatcccatggataactccttgtatgttctagagaacaatgtcatccttcgaatcaccgagaaccaccaagtcagcatcattgcgggacgccccatgcactgccaagttcctggcattgactactcactcagcaaactagccattcactctgccctggagtcagccagtgccattgccatttctcacactggggtcctctacatcactgagacagatgagaagaagattaaccgtctacgccaggtaacaaccaacggggagatctgccttttagctggggcagcctcggactgcgactgcaaaaacgatgtcaattgcaactgctattcaggagatgatgcctacgcgactgatgccatcttgaattccccatcatccttagctgtagctccagatggtaccatttacattgcagaccttggaaatattcggatcagggcggtcagcaagaacaagcctgttcttaatgccttcaaccagtatgaggctgcatcccccggagagcaggagttatatgttttcaacgctgatggcatccaccaatacactgtgagcctggtgacaggggagtacttgtacaatttcacatatagtactgacaatgatgtcactgaattgattgacaataatgggaattccctgaagatccgtcgggacagcagtggcatgccccgtcacctgctcatgcctgacaaccagatcatcaccctcaccgtgggcaccaatggaggcctcaaagtcgtgtccacacagaacctggagcttggtctcatgacctatgatggcaacactgggctcctggccaccaagagcgatgaaacaggatggacgactttctatgactatgaccacgaaggccgcctgaccaacgtgacgcgccccacgggggtggtaaccagtctgcaccgggaaatggagaaatctattaccattgacattgagaactccaaccgtgatgatgacgtcactgtcatcaccaacctctcttcagtagaggcctcctacacagtggtacaagatcaagttcggaacagctaccagctctgtaataatggtaccctgagggtgatgtatgctaatgggatgggtatcagcttccacagcgagccccatgtcctagcgggcaccatcacccccaccattggacgctgcaacatctccctgcctatggagaatggcttaaactccattgagtggcgcctaagaaaggaacagattaaaggcaaagtcaccatctttggcaggaagctccgggtccatggaagaaatctcttgtccattgactatgatcgaaatattcggactgaaaagatctatgatgaccaccggaagttcaccctgaggatcatttatgaccaggtgggccgccccttcctctggctgcccagcagcgggctggcagctgtcaacgtgtcatacttcttcaatgggcgcctggctgggcttcagcgtggggccatgagcgagaggacagacatcgacaagcaaggccgcatcgtgtcccgcatgttcgctgacgggaaagtgtggagctactcctaccttgacaagtccatggtcctcctgcttcagagccaacgtcagtatatatttgagtatgactcctctgaccgcctccttgccgtcaccatgcccagcgtggcccggcacagcatgtccacacacacctccatcggctacatccgtaatatttacaacccgcctgaaagcaatgcttcggtcatctttgactacagtgatgacggccgcatcctgaagacctcctttttgggcaccggacgccaggtgttctacaagtatgggaaactctccaagttatcagagattgtctacgacagtaccgccgtcaccttcgggtatgacgagaccactggtgtcttgaagatggtcaacctccaaagtgggggcttctcctgcaccatcaggtaccggaagattggccccctggtggacaagcagatctacaggttctccgaggaaggcatggtcaatgccaggtttgactacacctatcatgacaacagcttccgcatcgcaagcatcaagcccgtcataagtgagactcccctccccgttgacctctaccgctatgatgagatttctggcaaggtggaacactttggtaagtttggagtcatctattatgacatcaaccagatcatcaccactgccgtgatgaccctcagcaaacacttcgacacccatgggcggatcaaggaggtccagtatgagatgttccggtccctcatgtactggatgacggtgcaatatgacagcatgggcagggtgatcaagagggagctaaaactggggccctatgccaataccacgaagtacacctatgactacgatggggacgggcagctccagagcgtggccgtcaatgaccgcccgacctggcgctacagctatgaccttaatgggaatctccacttactgaacccaggcaacagtgtgcgcctcatgcccttgcgctatgacctccgggatcggataaccagactcggggatgtgcagtacaaaattgacgacgatggctatctgtgccagagagggtctgacatcttcgaatacaattccaagggcctcctaacaagagcctacaacaaggccagcgggtggagtgtccagtaccgctatgatggcgtaggacggcgggcttcctacaagaccaacctgggccaccacctgcagtacttctactctgacctccacaacccgacgcgcatcacccatgtctacaatcactccaactcggagattacctcactgtactacgacctccagggccacctctttgccatggagagcagcagtggggaggagtactatgttgcctctgataacacagggactcctctggctgtgttcagcatcaacggcctcatgatcaaacagctgcagtacacggcctatggggagatttattatgactccaaccccgacttccagatggtcattggcttccatgggggactctatgaccccctgaccaagctggtccacttcactcagcgtgattatgatgtgctggcaggacgatggacctccccagactataccatgtggaaaaacgtgggcaaggagccggccccctttaacctgtatatgttcaagagcaacaatcctctcagcagtgagctagatttgaagaactacgtgacagatgtgaaaagctggcttgtgatgtttggatttcagcttagcaacatcattcctggcttcccgagagccaaaatgtatttcgtgcctcctccctatgaattgtcagagagtcaagcaagtgagaatggacagctcattacaggtgtccaacagacaacagagagacataaccaggccttcatggctctggaaggacaggtcattactaaaaagctccacgccagcatccgagagaaagcaggtcactggtttgccaccaccacgcccatcattggcaaaggcatcatgtttgccatcaaagaagggcgggtgaccacgggcgtgtccagcatcgccagcgaagatagccgcaaggtggcatctgtgctgaacaacgcctactacctggacaagatgcactacagcatcgagggcaaggacacccactactttgtgaagattggctcagccgatggcgacctggtcacactaggcaccaccatcggccgcaaggtgctagagagcggggtgaacgtgaccgtgtcccagcccacgctgctggtcaacggcaggactcgaaggttcacgaacattgagttccagtactccacgctgctgctcagcatccgctatggcctcacccccgacaccctggacgaagagaaggcccgcgtcctggaccaggcgagacagagggccctgggcacggcctgggccaaggagcagcagaaagccagggacgggagagaggggagccgcctgtggactgagggcgagaagcagcagcttctgagcaccgggcgcgtgcaagggtacgagggatattacgtgcttcccgtggagcaatacccagagcttgcagacagtagcagcaacatccagtttttaagacagaatgagatgggaaagaggtaacaaaataatctgctgccattccttgtctgaatggctcagcaggagtaactgttatctcctctcctaaggagatgaagacctaacaggggcactgcggctgggctgctttaggagaccaagtggcaagaaagctcacattttttgagttcaaatgctactgtccaagcgagaagtccctcatcctgaagtagactaaagcccggctgaaaattccgaggaaaacaaaacaaacgaatgaatgaacagacacacacaatgttccaagttcccctaaaatatgacccacttgttctgggtctacgcagaaaagagacgcaaagtgtccaaaaggaacaaaagaacaaaaacgaataagcaaagaagaaaacaaacaaaaacaaaacaaaacaaacacacggaccgataaacaaagaagcgaagataagaaagaaggcctcatatccaattacctcactcattcacatgtgagcgacacgcagacatccgcgagggccagcgtcaccagaccagctgcgggacaaaccactcagactgcttgtaggacaaatacttctgacattttcgtttaagcaaatacaggtgcatttaaaacacgactttgggggtgatttgtgtgtagcgcctggggaggggggataaaagaggaggagtgagcactggaaatactttttaaagaaaaaaaaacatgagggaataaaagaaattcctatcaaaaatcaaagtgaaataataccatccagcacttaactctcaggtcccaactaagtctggcctgagctaatttatttgagcgcagagtgtaaaatttaattcaaaatggtggctataatcactacagataaatttcatactcttttgtctttggagattccattgtggacagtaatacgcagttacagggtgtagtctgtttagattccgtagttcgtgggtatcagtttcggtagaggtgcagcatcgtgacacttttgctaacaggtaccacttctgatcaccctgtacatacatgagccgaaaggcacaatcactgtttcagatttaaaattattagtgtgtttgtttggtccagaaactgagacaatcacatgacagtcaccacgaggagagaaaatttaaaaaataaaaataaaaacaaaaaaaattttaaaaattaaaaaaacaaaaataaagtctaataagaactttggtacaggaacttttttgtaatatacatgtatgaattgttcatcgagtttttatattaattttaatttgctgctaagcaaagactagggacaggcaaagataatttatggcaaagtgtttaaattgtttatacataaataaagtctctaaaactcctgtgg

SEQ ID NO: 344182 - DNA, 3030 bp, Homo sapiens
  misc_feature (26)..(27): n is a, c, g, or t
tatgctgtaccagaggatcccccagnnaaacagctatgaccttaatgggaatctccacttactgaacccaggcaacagtgtgcgcctcatgcccttgcgctatgacctccgggatcggataaccagactcggggatgtgcagtacaaaattgacgacgatggctatctgtgccagagagggtctgacatcttcgaatacaattccaagggcctcctaacaagagcctacaacaaggccagcgggtggagtgtccagtaccgctatgatggcgtaggacggcgggcttcctacaagaccaacctgggccaccacctgcagtacttctactctgacctccacaacccgacgcgcatcacccatgtctacaatcactccaactcggagattacctcactgtactacgacctccagggccacctctttgccatggagagcagcagtggggaggagtactatgttgcctctgataacacagggactcctctggctgtgttcagcatcaacggcctcatgatcaaacagctgcagtacacggcctatggggagatttattatgactccaaccccgacttccagatggtcattggcttccatgggggactctatgaccccctgaccaagctggtccacttcactcagcgtgattatgatgtgctggcaggacgatggacctccccagactataccatgtggaaaaacgtgggcaaggagccggccccctttaacctgtatatgttcaagagcaacaatcctctcagcagtgagctagatttgaagaactacgtgacagatgtgaaaagctggcttgtgatgtttggatttcagcttagcaacatcattcctggcttcccgagagccaaaatgtatttcgtgcctcctccctatgaattgtcagagagtcaagcaagtgagaatggacagctcattacaggtgtccaacagacaacagagagacataaccaggccttcatggctctggaaggacaggtcattactaaaaagctccacgccagcatccgagagaaagcaggtcactggtttgccaccaccacgcccatcattggcaaaggcatcatgtttgccatcaaagaagggcgggtgaccacgggcgtgtccagcatcgccagcgaagatagccgcaaggtggcatctgtgctgaacaacgcctactacctggacaagatgcactacagcatcgagggcaaggacacccactactttgtgaagattggctcagccgatggcgacctggtcacactaggcaccaccatcggccgcaaggtgctagagagcggggtgaacgtgaccgtgtcccagcccacgctgctggtcaacggcaggactcgaaggttcacgaacattgagttccagtactccacgctgctgctcagcatccgctatggcctcacccccgacaccctggacgaagagaaggcccgcgtcctggaccaggcgagacagagggccctgggcacggcctgggccaaggagcagcagaaagccagggacgggagagaggggagccgcctgtggactgagggcgagaagcagcagcttctgagcaccgggcgcgtgcaagggtacgagggatattacgtgcttcccgtggagcaatacccagagcttgcagacagtagcagcaacatccagtttttaagacagaatgagatgggaaagaggtaacaaaataatctgctgccattccttgtctgaatggctcagcaggagtaactgttatctcctctcctaaggagatgaagacctaacaggggcactgcggctgggctgctttaggagaccaagtggcaagaaagctcacattttttgagttcaaatgctactgtccaagcgagaagtccctcatcctgaagtagactaaagcccggctgaaaattccgaggaaaacaaaacaaacgaatgaatgaacagacacacacaatgttccaagttcccctaaaatatgacccacttgttctgggtctacgcagaaaagagacgcaaagtgtccaaaaggaacaaaagaacaaaaacgaataagcaaagaagaaaacaaacaaaaacaaaacaaaacaaacacacggaccgataaacaaagaagcgaagataagaaagaaggcctcatatccaattacctcactcattcacatgtgagcgacacgcagacatccgcgagggccagcgtcaccagaccagctgcgggacaaaccactcagactgcttgtaggacaaatacttctgacattttcgtttaagcaaatacaggtgcatttaaaacacgactttgggggtgatttgtgtgtagcgcctggggaggggggataaaagaggaggagtgagcactggaaatactttttaaagaaaaaaaaacatgagggaataaaagaaattcctatcaaaaatcaaagtgaaataataccatccagcacttaactctcaggtcccaactaagtctggcctgagctaatttatttgagcgcagagtgtaaaatttaattcaaaatggtggctataatcactacagataaatttcatactcttttgtctttggagattccattgtggacagtaatacgcagttacagggtgtagtctgtttagattccgtagttcgtgggtatcagtttcggtagaggtgcagcatcgtgacacttttgctaacaggtaccacttctgatcaccctgtacatacatgagccgaaaggcacaatcactgtttcagatttaaaattattagtgtgtttgtttggtccagaaactgagacaatcacatgacagtcaccacgaggagagaaaatttaaaaaataaaaataaaaacaaaaaaaattttaaaaattaaaaaaacaaaaataaagtctaataagaactttggtacaggaacttttttgtaatatacatgtatgaattgttcatcgagtttttatattaattttaatttgctgctaagcaaagactagggacaggcaaagataatttatggcaaagtgtttaaattgtttatacataaataaagtctctaaaactcctgtgg

SEQ ID NO: 344183 - DNA, 2955 bp, Homo sapiens
ctatacggttcgtgcttggaaatccttgtggcccttgatcagtttgcatactggtcgctgtcagtccagaatcgtgtcgtgactgtagacaaatccctgacgagggtctgacatcttcgaatacaattccaagggcctcctaacaagagcctacaacaaggccagcgggtggagtgtccagtaccgctatgatggcgtaggacggcgggcttcctacaagaccaacctgggccaccacctgcagtacttctactctgacctccacaacccgacgcgcatcacccatgtctacaatcactccaactcggagattacctcactgtactacgacctccagggccacctctttgccatggagagcagcagtggggaggagtactatgttgcctctgataacacagggactcctctggctgtgttcagcatcaacggcctcatgatcaaacagctgcagtacacggcctatggggagatttattatgactccaaccccgacttccagatggtcattggcttccatgggggactctatgaccccctgaccaagctggtccacttcactcagcgtgattatgatgtgctggcaggacgatggacctccccagactataccatgtggaaaaacgtgggcaaggagccggccccctttaacctgtatatgttcaagagcaacaatcctctcagcagtgagctagatttgaagaactacgtgacagatgtgaaaagctggcttgtgatgtttggatttcagcttagcaacatcattcctggcttcccgagagccaaaatgtatttcgtgcctcctccctatgaattgtcagagagtcaagcaagtgagaatggacagctcattacaggtgtccaacagacaacagagagacataaccaggccttcatggctctggaaggacaggtcattactaaaaagctccacgccagcatccgagagaaagcaggtcactggtttgccaccaccacgcccatcattggcaaaggcatcatgtttgccatcaaagaagggcgggtgaccacgggcgtgtccagcatcgccagcgaagatagccgcaaggtggcatctgtgctgaacaacgcctactacctggacaagatgcactacagcatcgagggcaaggacacccactactttgtgaagattggctcagccgatggcgacctggtcacactaggcaccaccatcggccgcaaggtgctagagagcggggtgaacgtgaccgtgtcccagcccacgctgctggtcaacggcaggactcgaaggttcacgaacattgagttccagtactccacgctgctgctcagcatccgctatggcctcacccccgacaccctggacgaagagaaggcccgcgtcctggaccaggcgagacagagggccctgggcacggcctgggccaaggagcagcagaaagccagggacgggagagaggggagccgcctgtggactgagggcgagaagcagcagcttctgagcaccgggcgcgtgcaagggtacgagggatattacgtgcttcccgtggagcaatacccagagcttgcagacagtagcagcaacatccagtttttaagacagaatgagatgggaaagaggtaacaaaataatctgctgccattccttgtctgaatggctcagcaggagtaactgttatctcctctcctaaggagatgaagacctaacaggggcactgcggctgggctgctttaggagaccaagtggcaagaaagctcacattttttgagttcaaatgctactgtccaagcgagaagtccctcatcctgaagtagactaaagcccggctgaaaattccgaggaaaacaaaacaaacgaatgaatgaacagacacacacaatgttccaagttcccctaaaatatgacccacttgttctgggtctacgcagaaaagagacgcaaagtgtccaaaaggaacaaaagaacaaaaacgaataagcaaagaagaaaacaaacaaaaacaaaacaaaacaaacacacggaccgataaacaaagaagcgaagataagaaagaaggcctcatatccaattacctcactcattcacatgtgagcgacacgcagacatccgcgagggccagcgtcaccagaccagctgcgggacaaaccactcagactgcttgtaggacaaatacttctgacattttcgtttaagcaaatacaggtgcatttaaaacacgactttgggggtgatttgtgtgtagcgcctggggaggggggataaaagaggaggagtgagcactggaaatactttttaaagaaaaaaaaacatgagggaataaaagaaattcctatcaaaaatcaaagtgaaataataccatccagcacttaactctcaggtcccaactaagtctggcctgagctaatttatttgagcgcagagtgtaaaatttaattcaaaatggtggctataatcactacagataaatttcatactcttttgtctttggagattccattgtggacagtaatacgcagttacagggtgtagtctgtttagattccgtagttcgtgggtatcagtttcggtagaggtgcagcatcgtgacacttttgctaacaggtaccacttctgatcaccctgtacatacatgagccgaaaggcacaatcactgtttcagatttaaaattattagtgtgtttgtttggtccagaaactgagacaatcacatgacagtcaccacgaggagagaaaatttaaaaaataaaaataaaaacaaaaaaaattttaaaaattaaaaaaacaaaaataaagtctaataagaactttggtacaggaacttttttgtaatatacatgtatgaattgttcatcgagtttttatattaattttaatttgctgctaagcaaagactagggacaggcaaagataatttatggcaaagtgtttaaattgtttatacataaataaagtctctaaaactcctgtgg

SEQ ID NO: 344184 - DNA, 473 bp, Homo sapiens
taggcaaccaccatgatccatcaaaattggcatgtccagtgaaataaatctgtttaatctggtctaagcttcccatctttcatgacttttgagttgacatttggggaaatggactaaattctgtctgtttgaatgcttggtcctcaaaagccaactgatatgttctgttcccctttcctttctgcagtccatggtcctcctgcttcagagccaacgtcagtatatatttgagtatgactcctctgaccgcctccttgccgtcaccatgcccagcgtggcccggcacagcatgtccacacacacctccatcggctacatccgtaatatttacaacccgcctgaaagcaatgcttcggtcatctttgactacagtgatgacggccgcatcctgaagacctcctttttgggcaccggacgccaggtgttctacaagtatgggaaactctccaagttatcagagattgtctacgaca

SEQ ID NO: 344185 - DNA, 5926 bp, Homo sapiens
  misc_feature (5821)..(5821): n is a, c, g, or t
  misc_feature (5841)..(5841): n is a, c, g, or t
  misc_feature (5857)..(5857): n is a, c, g, or t
  misc_feature (5866)..(5866): n is a, c, g, or t
  misc_feature (5908)..(5908): n is a, c, g, or t
caccttctttagtgctgcccctgggcagaatcccatcgtgcctgagacccaggttcttcatgaagaaatcgagctccctggttccaatgtgaaacttcgctatctgagctctagaactgcagggtacaagtcactgctgaagatcaccatgacccagtccacagtgcccctgaacctcattagggttcacctgatggtggctgtcgaggggcatctcttccagaagtcattccaggcttctcccaacctggcctacaccttcatctgggacaagacagatgcgtatggccaaagggtgtatggactctcagatgctgttgtgtctgtcgggtttgaatatgagacctgtcccagtctaattctctgggagaaaaggacagccctccttcagggattcgagctggacccctccaacctcggtggctggtccctagacaaacaccacatcctcaatgttaaaagtggaatcctacacaaaggcactggggaaaaccagttcctgacccagcagcctgccatcatcaccagcatcatgggcaatggtcgccgccggagcatttcctgtcccagctgcaacggccttgctgaaggcaacaagctgctggccccagtggctctggctgttggaatcgatgggagcctctatgtgggtgacttcaattacatccgacgcatctttccctctcgaaatgtgaccagcatcttggagttacgaaataaagagtttaaacatagcaacaacccagcacacaagtactacttggcagtggaccccgtgtccggctcgctctacgtgtccgacaccaacagcaggagaatctaccgcgtcaagtctctgagtggaaccaaagacctggctgggaattcggaagttgtggcagggacgggagagcagtgtctaccctttgatgaagcccgctgcggggatggagggaaggccatagatgcaaccctgatgagcccgagaggtattgcagtagacaagaatgggctcatgtactttgtcgatgccaccatgatccggaaggttgaccagaatggaatcatctccaccctgctgggctccaatgacctcactgccgtccggccgctgagctgtgattccagcatggatgtagcccaggttcgtctggagtggccaacagaccttgctgtcaatcccatggataactccttgtatgttctagagaacaatgtcatccttcgaatcaccgagaaccaccaagtcagcatcattgcgggacgccccatgcactgccaagttcctggcattgactactcactcagcaaactagccattcactctgccctggagtcagccagtgccattgccatttctcacactggggtcctctacatcactgagacagatgagaagaagattaaccgtctacgccaggtaacaaccaacggggagatctgccttttagctggggcagcctcggactgcgactgcaaaaacgatgtcaattgcaactgctattcaggagatgatgcctacgcgactgatgccatcttgaattccccatcatccttagctgtagctccagatggtaccatttacattgcagaccttggaaatattcggatcagggcggtcagcaagaacaagcctgttcttaatgccttcaaccagtatgaggctgcatcccccggagagcaggagttatatgttttcaacgctgatggcatccaccaatacactgtgagcctggtgacaggggagtacttgtacaatttcacatatagtactgacaatgatgtcactgaattgattgacaataatgggaattccctgaagatccgtcgggacagcagtggcatgccccgtcacctgctcatgcctgacaaccagatcatcaccctcaccgtgggcaccaatggaggcctcaaagtcgtgtccacacagaacctggagcttggtctcatgacctatgatggcaacactgggctcctggccaccaagagcgatgaaacaggatggacgactttctatgactatgaccacgaaggccgcctgaccaacgtgacgcgccccacgggggtggtaaccagtctgcaccgggaaatggagaaatctattaccattgacattgagaactccaaccgtgatgatgacgtcactgtcatcaccaacctctcttcagtagaggcctcctacacagtggtacaagatcaagttcggaacagctaccagctctgtaataatggtaccctgagggtgatgtatgctaatgggatgggtatcagcttccacagcgagccccatgtcctagcgggcaccatcacccccaccattggacgctgcaacatctccctgcctatggagaatggcttaaactccattgagtggcgcctaagaaaggaacagattaaaggcaaagtcaccatctttggcaggaagctccgggtccatggaagaaatctcttgtccattgactatgatcgaaatattcggactgaaaagatctatgatgaccaccggaagttcaccctgaggatcatttatgaccaggtgggccgccccttcctctggctgcccagcagcgggctggcagctgtcaacgtgtcatacttcttcaatgggcgcctggctgggcttcagcgtggggccatgagcgagaggacagacatcgacaagcaaggccgcatcgtgtcccgcatgttcgctgacgggaaagtgtggagctactcctaccttgacaagtccatggtcctcctgcttcagagccaacgtcagtatatatttgagtatgactcctctgaccgcctccttgccgtcaccatgcccagcgtggcccggcacagcatgtccacacacacctccatcggctacatccgtaatatttacaacccgcctgaaagcaatgcttcggtcatctttgactacagtgatgacggccgcatcctgaagacctcctttttgggcaccggacgccaggtgttctacaagtatgggaaactctccaagttatcagagattgtctacgacagtaccgccgtcaccttcgggtatgacgagaccactggtgtcttgaagatggtcaacctccaaagtgggggcttctcctgcaccatcaggtaccggaagattggccccctggtggacaagcagatctacaggttctccgaggaaggcatggtcaatgccaggtttgactacacctatcatgacaacagcttccgcatcgcaagcatcaagcccgtcataagtgagactcccctccccgttgacctctaccgctatgatgagatttctggcaaggtggaacactttggtaagtttggagtcatctattatgacatcaaccagatcatcaccactgccgtgatgaccctcagcaaacacttcgacacccatgggcggatcaaggaggtccagtatgagatgttccggtccctcatgtactggatgacggtgcaatatgacagcatgggcagggtgatcaagagggagctaaaactggggccctatgccaataccacgaagtacacctatgactacgatggggacgggcagctccagagcgtggccgtcaatgaccgcccgacctggcgctacagctatgaccttaatgggaatctccacttactgaacccaggcaacagtgtgcgcctcatgcccttgcgctatgacctccgggatcggataaccagactcggggatgtgcagtacaaaattgacgacgatggctatctgtgccagagagggtctgacatcttcgaatacaattccaagggcctcctaacaagagcctacaacaaggccagcgggtggagtgtccagtaccgctatgatggcgtaggacggcgggcttcctacaagaccaacctgggccaccacctgcagtacttctactctgacctccacaacccgacgcgcatcacccatgtctacaatcactccaactcggagattacctcactgtactacgacctccagggccacctctttgccatggagagcagcagtggggaggagtactatgttgcctctgataacacagggactcctctggctgtgttcagcatcaacggcctcatgatcaaacagctgcagtacacggcctatggggagatttattatgactccaaccccgacttccagatggtcattggcttccatgggggactctatgaccccctgaccaagctggtccacttcactcagcgtgattatgatgtgctggcaggacgatggacctccccagactataccatgtggaaaaacgtgggcaaggagccggccccctttaacctgtatatgttcaagagcaacaatcctctcagcagtgagctagatttgaagaactacgtgacagatgtgaaaagctggcttgtgatgtttggatttcagcttagcaacatcattcctggcttcccgagagccaaaatgtatttcgtgcctcctccctatgaattgtcagagagtcaagcaagtgagaatggacagctcattacaggtgtccaacagacaacagagagacataaccaggccttcatggctctggaaggacaggtcattactaaaaagctccacgccagcatccgagagaaagcaggtcactggtttgccaccaccacgcccatcattggcaaaggcatcatgtttgccatcaaagaagggcgggtgaccacgggcgtgtccagcatcgccagcgaagatagccgcaaggtggcatctgtgctgaacaacgcctactacctggacaagatgcactacagcatcgagggcaaggacacccactactttgtgaagattggctcagccgatggcgacctggtcacactaggcaccaccatcggccgcaaggtgctagagagcggggtgaacgtgaccgtgtcccagcccacgctgctggtcaacggcaggactcgaaggttcacgaacattgagttccagtactccacgctgctgctcagcatccgctatggcctcacccccgacaccctggacgaagagaaggcccgcgtcctggaccaggcgagacagagggccctgggcacggcctgggccaaggagcagcagaaagccagggacgggagagaggggagccgcctgtggactgagggcgagaagcagcagcttctgagcaccgggcgcgtgcaagggtacgagggatattacgtgcttcccgtggagcaatacccagagcttgcagacagtagcagcaacatccagtttttaagacagaatgagatgggaaagaggtaacaaaataatctgctgccattccttgtctgaatggctcagcaggagtaactgttatctcctctcctaaggagatgaagacctaacaggggcactgcggctgggctgctttaggagaccaagtggcaagaaagctcacattttttgagttcaaatgctactgtccaagcgagaagtccctcatcctgaagtagactaaagcccggctgaaaattccgaggaaaacaaaacaaacgaatgaatgaacagacacacacaatgttccaagttcccctaaaatatgacccacttgttctgggtctacgcagaaaagagacgcaaagtgtccaaaaggaacaaaagaacaaaaacgaataagcaaagaagaaaacaaacaaaaacaaaacaaaacaaacacacggaccgataaacaaagaagcgaagataagaaagaaggcctcatatccaattacctcactcattcacatgtgagcgacacgcagacatccgcgagggccagcgtcaccagaccagctgcgggacaaaccactcagactgcttgtaggacaaatacttctgacattttcgtttaagcaaatacaggtgcatttaaaacaaaaaaaaaaaaanaaaaaaaaaaaaaaaaaaanaaaaaaaaaaaaaaanaaaaaaaanaaaaaaaaaaaaaaaaaaaaaaaaaaaaaaaaaaaaaaaaanaaaaaaaaaaaaaaaaca

SEQ ID NO: 344186 - DNA, 2614 bp, Homo sapiens
caccttctttagtgctgcccctgggcagaatcccatcgtgcctgagacccaggttcttcatgaagaaatcgagctccctggttccaatgtgaaacttcgctatctgagctctagaactgcagggtacaagtcactgctgaagatcaccatgacccagtccacagtgcccctgaacctcattagggttcacctgatggtggctgtcgaggggcatctcttccagaagtcattccaggcttctcccaacctggcctacaccttcatctgggacaagacagatgcgtatggccaaagggtgtatggactctcagatgctgttgtgtctgtcgggtttgaatatgagacctgtcccagtctaattctctgggagaaaaggacagccctccttcagggattcgagctggacccctccaacctcggtggctggtccctagacaaacaccacatcctcaatgttaaaagtggaatcctacacaaaggcactggggaaaaccagttcctgacccagcagcctgccatcatcaccagcatcatgggcaatggtcgccgccggagcatttcctgtcccagctgcaacggccttgctgaaggcaacaagctgctggccccagtggctctggctgttggaatcgatgggagcctctatgtgggtgacttcaattacatccgacgcatctttccctctcgaaatgtgaccagcatcttggagttacgaaataaagagtttaaacatagcaacaacccagcacacaagtactacttggcagtggaccccgtgtccggctcgctctacgtgtccgacaccaacagcaggagaatctaccgcgtcaagtctctgagtggaaccaaagacctggctgggaattcggaagttgtggcagggacgggagagcagtgtctaccctttgatgaagcccgctgcggggatggagggaaggccatagatgcaaccctgatgagcccgagaggtattgcagtagacaagaatgggctcatgtactttgtcgatgccaccatgatccggaaggttgaccagaatggaatcatctccaccctgctgggctccaatgacctcactgccgtccggccgctgagctgtgattccagcatggatgtagcccaggttcgtctggagtggccaacagaccttgctgtcaatcccatggataactccttgtatgttctagagaacaatgtcatccttcgaatcaccgagaaccaccaagtcagcatcattgcgggacgccccatgcactgccaagttcctggcattgactactcactcagcaaactagccattcactctgccctggagtcagccagtgccattgccatttctcacactggggtcctctacatcactgagacagatgagaagaagattaaccgtctacgccaggtaacaaccaacggggagatctgccttttagctggggcagcctcggactgcgactgcaaaaacgatgtcaattgcaactgctattcaggagatgatgcctacgcgactgatgccatcttgaattccccatcatccttagctgtagctccagatggtaccatttacattgcagaccttggaaatattcggatcagggcggtcagcaagaacaagcctgttcttaatgccttcaaccagtatgaggctgcatcccccggagagcaggagttatatgttttcaacgctgatggcatccaccaatacactgtgagcctggtgacaggggagtacttgtacaatttcacatatagtactgacaatgatgtcactgaattgattgacaataatgggaattccctgaagatccgtcgggacagcagtggcatgccccgtcacctgctcatgcctgacaaccagatcatcaccctcaccgtgggcaccaatggaggcctcaaagtcgtgtccacacagaacctggagcttggtctcatgacctatgatggcaacactgggctcctggccaccaagagcgatgaaacaggatggacgactttctatgactatgaccacgaaggccgcctgaccaacgtgacgcgccccacgggggtggtaaccagtctgcaccgggaaatggagaaatctattaccattgacattgagaactccaaccgtgatgatgacgtcactgtcatcaccaacctctcttcagtagaggcctcctacacagtggtacaagatcaagttcggaacagctaccagctctgtaataatggtaccctgagggtgatgtatgctaatgggatgggtatcagcttccacagcgagccccatgtcctagcgggcaccatcacccccaccattggacgctgcaacatctccctgcctatggagaatggcttaaactccattgagtggcgcctaagaaaggaacagattaaaggcaaagtcaccatctttggcaggaagctccgggtttaagaatgatggtggccttccgcagttgtcccagatgaaccaacccgatgtgaccaagcttctgttggcagaggagaagacctatctttctgaccaccactgtgtgttttgctctgaaaatgatggctccaatcccgtataattcagacggcattaacttttggacctgtttttaaaaaaataaaaaatcctactactcag

SEQ ID NO: 344187 - DNA, 562 bp, Homo sapiens
ggtttgctctgtgtgagacatgcaagccttttcaagaactgagctcacctggatattgattccagtggcatgtgtttgcctgtattcttttatctttagattttaggccctcttagaggaggccagggtccattcccaagcttaagaagtaacatcatttaccaaagagccctgtaacaaaacaacccagggttctaagttcacatgtggctcataccccgtaagacctaatttcccggctctgaaccagagtccagctggagatgacctgatggcttcaggggatgtcccagggctattcatttctctttaaaaattttaaatctatttatttgttttcgagttgacaaaaaacgtatatatttgccatgtacaacatggtgtcttgaaacatgtatatgtgccgggcgcgggggctcacttctgtaatcccagcactttggtaggccgaggtggacagagcatgaggtcaggagatcgagaccatcttggctaacatggtgaaaccctgtctctactaaaaatacaaaaaattagccgggcgtggtggcagtcgcctgta

SEQ ID NO: 344188 - DNA, 1801 bp, Homo sapiens
cgcgcggctggggctcggctccgggggtggcggtcggacagtgtctagcacgctcagtccgggcttggggccccgcggcggagaaggaggtagagggggcggcggcggcggcggcggtggtggcggcaccatgtttcttcactcagttaatctctggaacctggcgttttatgtcttcatggtctttctggcaaccctggggctgtgggatgtcttcttcggcttcgaggagaataagtgcagtatgagctacatgtttgagtacccggagtatcagagttcagcagtgcctaagacctgggtctcaacagaccacctctccattgtgtggtgtaaacaattgcagttgactacagttcgagcattctttgatcttattgatgctgatactaaacaaataactcaaaattccaagaagaaactgtcagttttgtatcaccactttataagacacccatcaaaacattttgaggaaaatccagctataatttctgacttaacagggacatctatgtgggttctagtaaaagtgtccaaatggacctatgtagcttacaacgaatctgagaagatatattttacatttcctcttgaaaatcatagaaaaatctacactcatgtctattgtcagagcactatgctggatacaaatagttggatttttgcttgcataaacagcacttctatgtgcctgcaaggggttgatttatcatggaaagctgaactgctgccaacaattaagtatctgacattaagacttcaagactatccatctttgtctcatcttgttgtttatgtaccatctgttcgtggaagtaagtttgttgtagattgtgaattctttaaaaaagagaaaagatacatacagcttcctgtaactcatcttttttcctttggattgtcttcaaggaaagtggtgttaaatacaaatggcctatactacaatctagagcttctgaactttggacagatataccaagcttttaaaatcaacgtggtaagcaagtgctcagcagtcaaagaagaaataaccagtatctatagacttcatattccttggtcttatgaagattcactaaccattgcacaggctccatcttccacagaaatttctctgaaactccatattgctcaaccagaaaacaatacccatgtggcattatttaaaatgtacacgtcatcagactgtcggtacgaggtgacagttaagacttccttttcacaaatacttggacaggttgttgcttagaatatgctaccatgttggataaagaagccaaaccatacaaagttgatccttttgtaattatcattaagtttctgttggggtaagttttattatctgtgataatgattttaattgtgttttacatgtaacattatatttggttccataatgcaatataaattttcatacagatttggcagttgacttgtttcattaaatgaggtttttttttttctcttaggcaaaggtctaataagtatatcaatgtctacttcaatagtatcatttcaaaagtaattattcactttatgtatatcagtctaaacttagactgcctttaatgtttgtaaataggtgtatatggtccatgatctgtgagtatcctagattcaaacgcaaatcattacagggtattgatgaaacagtgcctctctgatcacttttaaaagtatattttagacctctctaccctagttaacattccattcttaatttagtcacattttcagatttttggttaagcatcaatatgtagatctttttttccatcattacaactaacttggctttcta

SEQ ID NO: 344189 - DNA, 707 bp, Homo sapiens
gttcatatttataatattaaagcaatacaaaaaattgtgataaaaatttgactccaactactgcatgctctcaaaatgtccattttttttacaaatactgcatatcttcaagaagtccatattttgacaaaatcattttaaacttccctaaaaatatttatctcctttctaatatcaaatagacttcctaattatcaaaaagttgtatttatggtagagataattaaggatgaatttctttttaaaatattattttggcttaaatttctttagctggcatgatatggtaataagatattctacttaattaaatattttaggtagtaaaggagcaaaatagcattcactcagctgtcaaataattagatatgtgggaaagtatactaaacagtaacactctactttaatgcaatttgcatggtggttcaaaagattctttaagatcttgagtgcctttaaggtttaccattatagaaaatcaattattatgcttagagatatgcataagtgctcaatttaataaaatgtaaaggagtttagaggaaaataaccttttttttcaataattgttttaaactaggtgacagttaagacttccttttcacaaatacttggacaggtaagagagattcctggctggttgattatttactgctttatgaatagataactctaaggaagggttgtagactttttccataaggggc

SEQ ID NO: 344190 - DNA, 2461 bp, Homo sapiens
cgcgcggctggggctcggctccgggggtggcggtcggacagtgtctagcacgctcagtccgggcttggggccccgcggcggagaaggaggtagagggggcggcggcggcggcggcggtggtggcggcaccatgtttcttcactcagttaatctctggaacctggcgttttatgtcttcatggtctttctggcaaccctggggctgtgggatgtcttcttcggcttcgaggagaataagtgcagtatgagctacatgtttgagtacccggagtatcagaaaatagaacttccaaagaaactggcaaaacgctatcccgcatatgagttgtatctttatggagagggatcctatgctgaagaacacaaaattctccctttgacgggtattccagttctctttcttcctggtaatgctggaagttataagcaagttcgttctattggctccattgcacttagaaaagcagaggacattgacttcaagtaccactttgacttctttagtgtgaacttcaatgaagaactggtggctttgtatggtggaagtcttcagaagcagaccaagtttgtacatgaatgtattaaaacaattctcaaactctataagggtcaagaatttgctccaaaaagtgtggcaataattggtcattctatgggtggccttgttgcaagagcattgcttacactgaaaaattttaagcatgatctgataaatcttcttattacacaagccacacctcatgttgctcctgtgatgccattagatcgtttcattacagatttttatacgactgtaaacaactattggattctaaatgctcgacacataaatttaaccacactttctgtagctggaggattccgggattaccaagttcgttcaggattgacttttctaccaaaattaagccatcataccagtgccttatctgttgtgagttcagcagtgcctaagacctgggtctcaacagaccacctctccattgtgtggtgtaaacaattgcagttgactacagttcgagcattctttgatcttattgatgctgatactaaacaaataactcaaaattccaagaagaaactgtcagttttgtatcaccactttataagacacccatcaaaacattttgaggaaaatccagctataatttctgacttaacagggacatctatgtgggttctagtaaaagtgtccaaatggacctatgtagcttacaacgaatctgagaagatatattttacatttcctcttgaaaatcatagaaaaatctacactcatgtctattgtcagagcactatgctggatacaaatagttggatttttgcttgcataaacagcacttctatgtgcctgcaaggggttgatttatcatggaaagctgaactgctgccaacaattaagtatctgacattaagacttcaagactatccatctttgtctcatcttgttgtttatgtaccatctgttcgtggaagtaagtttgttgtagattgtgaattctttaaaaaagagaaaagatacatacagcttcctgtaactcatcttttttcctttggattgtcttcaaggaaagtggtgttaaatacaaatggcctatactacaatctagagcttctgaactttggacagatataccaagcttttaaaatcaacgtggtaagcaagtgctcagcagtcaaagaagaaataaccagtatctatagacttcatattccttggtcttatgaagattcactaaccattgcacaggctccatcttccacagaaatttctctgaaactccatattgctcaaccagaaaacaatacccatgtggcattatttaaaatgtacacgtcatcagactgtcggtacgaggtgacagttaagacttccttttcacaaatacttggacaggttgttgcttagaatatgctaccatgttggataaagaagccaaaccatacaaagttgatccttttgtaattatcattaagtttctgttggggtaagttttattatctgtgataatgattttaattgtgttttacatgtaacattatatttggttccataatgcaatataaattttcatacagatttggcagttgacttgtttcattaaatgaggtttttttttttctcttaggcaaaggtctaataagtatatcaatgtctacttcaatagtatcatttcaaaagtaattattcactttatgtatatcagtctaaacttagactgcctttaatgtttgtaaataggtgtatatggtccatgatctgtgagtatcctagattcaaacgcaaatcattacagggtattgatgaaacagtgcctctctgatcacttttaaaagtatattttagacctctctaccctagttaacattccattcttaatttagtcacattttcagatttttggttaagcatcaatatgtagatctttttttccatcattacaactaacttggctttcta

SEQ ID NO: 344191 - DNA, 512 bp, Homo sapiens
aagttaagattgccacctggaaactttgggctcctcttacctttaaggcaacaggctaagaaaggagttacagtgttatctggggtgattgaccaggactgtgaagatgaaatcagtctactactccacaacggagtagatggagatggtcaaggggttaccgccagtctgtttcttgcgctgataatttttctagacattaaatctcaccatttgttcccaacaaagaaagaaagacaggaccaccagactctacagggtgatctgacactaacaacttaacaaccattctactgagtcaacaaatttctcctctgtgtacagacttcaaccgaagaatctaatactactgtgaagtgctgctgggcaggacacacgttcaggagacacagtaggggaacagatgaggccagagtggcccacagccggggtgaagagcccccaattatttataaagtgtttgctgcctcatttatgaaaataaatagtgcaaagctgttacaagtattaca

SEQ ID NO: 344192 - DNA, 380 bp, Homo sapiens
gaggacattgaggtaaagctttcactatagaagtgcccacgagctcttccaaacatattttcctttttaaataagctctagatggagatggtcaaggggttaccgccagtctgtttcttgcgctgataatttttctagacattaaatctcaccatttgttcccaacaaagaaagaaagacaggaccaccagactctacaggtctagggatggatctggggatgctccacaaagtgcagctgtggagaatgcagaagaagagttggctagtgggacattcccactgaggagcatggcagggggaatgtctaatattcactaagagaattcttgaaatgtaacatttagatgaaactcttcaagtttccttaaaatacaaat

SEQ ID NO: 344193 - DNA, 331 bp, Homo sapiens
agtttgcaacccttcaaaatgccatcttttgcatgaagccttttttcatcaatccaacaggaagtatctgtcctccttctgaattatgaaagcaccttaatacctgttttgtggtacctatttcactttgtattttaagatccagacagccagactaccatgtaattcaagatctttacaagttgaactccctatctgcttcatcatcagctgggcaaacctcccatgtgctccagccacatgcggcaggtacattttcctagttcctggagtgctttctccacccctttcgatggggagaaaacctgagtatactttttttttttttttt

SEQ ID NO: 344194 - DNA, 556 bp, Homo sapiens
caaaattggccccttgcacccccccctggggccacaaaaagggaaccccctttcccccaaaaaaaaaaaaaaaaaaaaaaaaaaaaaaaaagaaaagaaaaatcctcagagcatgaacatcagcagctcttcttggatgaaaacattgatcagttaatttaaatggatagtattgtgattaataatccttttaagatttccctgactcagtttaatgtagctgtttggtggccctggagcagtcaaccaggagtgcacctttcaggtgcactagggtataaacgcacagagcccttagacaaagaagccaaacatttatccatcaagcactgatagtgggagctgcatttggggagtttgagcttcttaacagcaacattcttctttgtttgattgtttgctttggaagtctctgataagcgaaacttttttataagtggtttccatgaaccaggcttattactctcagataagaacaactcacattcatactttaaaagatgtctttaatctttttcagcagatgagagattctgcttaaacaaaaagtagaaaa

SEQ ID NO: 344195 - DNA, 602 bp, Homo sapiens
ttatacaaatgtgaagaatgtggcaaagcttttaagaaatcctcatccattactaaacaagataatttgtactggagagaaaacctacaaacgtgaggaatgtggcaaagcctttaatggtcccctcaactttctgcacataagataatttatactgtggagaagccttacaaatgtgaaaaatgtagcaaaccttttaactaatcctcaacccttactacacataagataattaatgctggagggaaatcccacccatgtggcaaagcttttaatcaatcctcaaaccttactaaacataagataactcatactggagaaaaatcttagaaatgtgaaggatgtggtaaagccgttatccagtcctcaactcccactaaacataacataattcatactggagagaaacctcacaactgtgaagaatgtggcaaagcttttaaccagtcctacaaacctttttgaacaaaataattcatacaggagagaaacactacaaatgtgaggaatgtgacaaagcctttaaccagtcctcaattcttaccaaacataagaaaattcatattggagattaaccttatgagtgtgaaaaatatggcaaa

SEQ ID NO: 344196 - DNA, 355 bp, Homo sapiens
tggcctggcaccaggcaggtactgtccctgggtaagcagcagtattggtaccaggctgggaggtgggatgcggggggcccttgctcccctcctccctcactggaaccctgagagcgactgctggacaccgtgcttagctgggagctcggagctcacagtgctggggaaggacccaagacctcaggtcctctcaaagtagcaagcattcttcctgctgcaggcctgttggggacaagggcctgagggacaaacagggcaggggctacttcaacccaattcctggcctgcctagcctcagctgccctccaatttttgtatttttttaattgatttttttgaaattttttagaaacag

SEQ ID NO: 344197 - DNA, 2882 bp, Homo sapiens
ctttcattcctttcctttccttcctttttcctctttctttctttccttttctctctctctctttttctttctctctttctttcgagatggagtctcgctctgttgccaggctggagtgcagtggcatgatctcggctcactgcaatctctgcctcccgggttcaagggattctcctgcctcagcctccctagtagctgggattaaaggcacgcactgccacgcccggctaatttttgtatttttaatagcgacagggtttcaccgtgttggccaggatggtctcgatctcctgacctcatgatccacctgcctcggcctccgaaagtgctgggattacaggcgtgagccaccgtgcccagccaggtctttttcttaaagagggacagactgaaggtaggctgtgaatggtcagttatttgtatttctttaccttttatgctatcttgtagtttgaccagtttgcaaaacaaattgaataaaaagtaattgataatgttgttttgatgctcagtgtttgagggaaacacaatctagtgaatggggttattggttgtcacacctgggagagtgaaaatgaggggctcacaacccaggtgaggtcatctggtgccactcagccccatcccagagaaagcagccttgggatgctggcctcggtgacaaccaagaagtgatggtgggttgctagagacagggtggagcacagagccctggaaggaagcaggaagtcaggttcaagaaaggacttgtgacctcacccttggcttcagggttttatttttctttcttttaaaacattttgagacaacatgtagacattcaaacttacagaacaaagaactattttttccctgaatcatttgagactaagttccctcctatcaccagacatttctacaaatgaggaccttcacaggactaaggtgccaccatcagaaccacaatatgtggggacggtactgccagctaagccttagtgctgtttcggtgttgacagctgtcacaatgatgcccttttcagtagaggagcctgtgatggtcacgtgttgcaggtgatcattgtgccatttggtttacttctgtctggaaagtttctcctttctgtaacctccatgaccttgacacatgaggtcactcttctcacccgccccacctctgggagggtgcctgatttgccctgccccacccagcggctttaggactcagctcttcaggaacaattagggagagggcccttgggtctaactgcaaaatcatacttgaactagaaaatcccgttggcataggtatggattgtcatatagaaacatttttcgcagtgtgccccgtggaacacttgttctgtatgttgttaacagatgttttgcaaaaaatgaaaaggacctgagctctaataagtttgggaaatgctgaattgaagtgaaacagcttttcttggtgtgagacctttcagagtctttaaaggagagttgctgaccacacgtgaaatcacaatagaaaatggccagcaggcctccaggtaggcagcaattcctagacatttgcctgtgttccctgggggagctggtggcctgtgaccatccactgggaaattcccttctgtggcgaggttctgttgttttccagaggctcccacggagcatgctgggtgggtggtctgtatgagaccacaccgttgatgagcagtgaggcccaaacaggtatatcaaaaaatgctcagcatcgctgatcatcagggaaatgcacatcataaacacagtgagacgttgcctcacacctgccagaatggctactgtcagacgaaagacaacaagtgtgggtgaggatgtggagaaaagcgaacacttgtccacctttggtgagaatgtaaattggtatagccattatggaaaacaggaagttcctgaaaaaattaagaacagctaccaggaatcccacatctgggtgtatatccaaaagaaatgaagtcagtaccttgaagagatctctgcagcccctgttcattgcagcattattcacaatagccaagatagggaaaaagcctcagtgtctactgacaaataaagatggatcaagaaaatgcatgtatgtatacacacacacagtggaataccaagtcttgcagaagaaggaaatcctgtcatttgtgacaacatggatgagctgagagaacattatgctaagtgaaataagccagacacagaaagaaaaataccagatgatctcacttatatgtggaatctaaaaaggttggactcagaagcagagagtggaatggtggttaccaaaggccagagggtgcaggaagtgagcagatgttggtgaaagggtgcagaggttcagctatgcaacatgaatgaattctggagatccactgtgcagcatggtgactatgatactgctttgtgtatttaaaattttcagagagtagatcttgtgttctttcccctctccaaataaaaggaaattatttgaggtgatggatatgtttaactagcttgactggggcaatgattttgtaatgataagtatctcaaaacatcatgttgtacaacataagtatacaattgacccttgaacaatacaggtttgaactctgtgggtccacttacatgcggttttttttttctgtaaaagttacacccgatgcgtcagccccttcttctacctcttccacctctggcacccttggcacagcaagaccaaccccccacttcctcctcctcctcctcagcctactcagggtaaagacaaggatgaagacctttatgatgatccacttccacttaatatataataaatatattttctcctcatgattttcttaaaactttttctgtattttattgtaagaatacagtatataatacatacaacatcg

SEQ ID NO: 344198 - DNA, 667 bp, Homo sapiens
ctttcattcctttcctttccttcctttttcctctttctttctttccttttctctctctctctttttctttctctctttctttcgagatggagtctcgctctgttgccaggctggagtgcagtggcatgatctcggctcactgcaatctctgcctcccgggttcaagggattctcctgcctcagcctccctagtagctgggattaaaggcacgcactgccacgcccggctaatttttgtatttttaatagcgacagggtttcaccgtgttggccaggatggtctcgatctcctgacctcatgatccacctgcctcggcctccgaaagtgctgggattacaggcgtgagccaccgtgcccagccaggtctttttcttaaagagggacagactgaaggtaggctgtgaatggtcagttatttgtatttctttaccttttatgctatcttgtagtttgaccagtttgcaaaacaaattgaataaaaagtaattgataaaaaaaaaaaaaaaaaaaaaaaaaaaaaaaaaaaaaaaaaaaaaaaaaaaaaaaaaaaaaaaaaaaaaaaaaaagaaaggagagaggagcgaggcgagcaaaaaaaaaaaagaggagaggagggaaaaaaaaagggacaattaaggggcccgcggggttaatggcggggggggc

SEQ ID NO: 344199 - DNA, 599 bp, Homo sapiens
ggcatgtatctattctaaaaatattattcagagtctcttcttcacaaaacgaaagaaagacccctctatcttaaaaaagtactagaacacatgaaacaaaagaccctccatatctatgagaagataaggctaaattttcaagttctttttttaattactaaatcacttcaaacagtttccaaacataatagggacaatatggtgtgactcttgatgttggcttctacaattagtgtgttattaattaaactcttgagtactataataacttgacagttaaagcccttctttgcatttaaagtgcatgcaaactgtggctccaattataaataaactctactgcgatgggcttaaaactgcaaatttaattattcagagcaaattgttcaatctatgctctattctggaggatgcttcctgaatattctcgtgtgctcgatatgaatgggggtctaaagtagggttccatagcataggcctgcttgcgcatctctctgccccagcttccctaccctccctgctactgctccaaactggaaattcacgtgggttttccaggcatgcctcattcagtccactctccttcaccatggcgctgc

SEQ ID NO: 344200 - DNA, 205 bp, Homo sapiens
tagaagaaaacaaaatatatacatatttcaatgaagagcagagataatttcccaattgaaatggggataatagaaattattctattgaagcaatagaaatgtatcaattataaagtatttgagtttaatgctattaaatttgaaatgctacaggaagggaaaaaagattaaaagcaacagagtaggggaaaaattttaactaaca

SEQ ID NO: 344201 - DNA, 520 bp, Homo sapiens
acagttgagactaccatgcaactagctaacgacaccacacaggaagaaaacctcaaatatcaatattaaccttgaatgcaaacaatgtatacactccacttaaaagacactgagtggcaaactggatgaaaaaacaagacccatccttctactgtcttcaagagagcaatctcacatgtaatgacacacaaaggctcaaagtaaagatctatctatacagaaagatctttctcaaagtaaagatctatctatacagaaagatctttctcaaagtaaaaatctttctatagagaaagatctatcatgcaagtaaaaacaaaaaagggcagaggttgttattcctatatcagataaaatagactttaacaataaaaaggacaaaaagtaatattacataatgataaagggttttattcaacaaataaataggcacccaacattggagcacccaaatctataaaacaattacttctagacctaagaaaagacttatatagccacacaataataagggaagaat

SEQ ID NO: 344202 - DNA, 467 bp, Homo sapiens
tgatgggggctgatgggagtgagagtgcaccatcccctgtgatactcgctgtgtgtattttcctggaggctcagtagcttgtttgtctccaaaggaattaagttccacatgagccagttttcataataaacctccttttatgtatctttatcctattctgtttgtctgcagaacactaatacagatttggtactgggagtggggtcactgatgtaagtaccagagtctgagggctcccatgtccacaggcaggagaagatcaatgtcccaacttgagagaatttgccctccttctgtcgttttgttctatttgggcccttaatggattgggtgatggcctacccatataggtgagggcagaccttctgtactcagtctgattccagtgccaatctcttccagaaacgccctcgcagacacacccagaaagaatgttttaccaggtatctggacatcctttggctcag

SEQ ID NO: 344203 - DNA, 425 bp, Homo sapiens
actttagaaagaagttggaagaggaaacattaggaatttcctttcaaactccaatcaaaacagcccatttgaatatttttttaaaaaaattccaaaaattcttcctgtgaggatgcattggctaaagcaggtcaaagttgctgaagaggactaagcgagcctcttggggaagatgatatcatctgatctgtacacatgtcacattcagaacattctgcatggctgctgctgagctcccatctgtcagatctcaacagagagaacaaagactagagatgtgagtaattcaagaaacatccatttactagctgaaaaaacaaataaaattaggaggagccactttcttcttgttacatgttactgatacgtgttctacctggccataccacacattacataaaatgtattcaactactttactgtca

SEQ ID NO: 344204 - DNA, 411 bp, Homo sapiens
cgcaaaatgctttaggctgtatggcctgatctctttccagctttagaagaggtgcctggattagcctggaaaggttgctcacagagagggaggccgagtttcagatccctggatggtagaacaggaaaaagcccatgagttctgccttccagccagccccgggcctgtgtagccctgtctcccttcatctcctggggcccaggccggatgggagagtggtgagaaggtgtcctccaggtttgagagtgagagatttcagcagtggggagcagagtcccagtgctcactctgggtggggctgtgggagagaactcgtgtgcaccacgctgtttgcccttgatgtattttctcaggttctgacattcttgccttctgaactttcgagtaagacgtgggagaaaccagcaagag

SEQ ID NO: 344205 - DNA, 349 bp, Homo sapiens
acattttatgatcttcatctgtagcgcaaaatgctttaggctgtatggcctgatctctttccagctttagaagaggtgcctggattagcctggaaaggttgctcacagagagggaggccgagtttcagatccctggatggtagaacaggaaaaagcccatgagttctgccttccagccagccccgggcctgtgtagccctgtctcccttcatctcctggggcccaggccggatgggagagtggtgagaaggtgtcctccaggtttgagagtgagagatttcagcagtggggagcagagtcccagtgctcactctgggtggggctgtgggagagaactcgtgtgcaccac

SEQ ID NO: 344206 - DNA, 856 bp, Homo sapiens
cgtcggagggcgggacttccgccgtcctcctggtggtggtcgttttggttctgtgtggtgtttcaccaacttcggcctatggctctgtctgacgtcaccgaagtgacggaacggaaaagcgcgagaagcggctcggttcccaccacggagaggcgggagtgagtcaactgacaagcgctggggacagtggcgtccttgtcttgcctttgtcgctcccgccccgctcttccctggctgggctggcggaggccttgctgatgaacctgactgagggtcccctggcgatggcagaaatggaccctacacagggccgtgtggtctttgaggacgtggccatatatttctcccaggaggagtgggggcaccttgatgaggctcagagattgctgtaccgtgatgtgatgctggagaatttggcccttttgtcctcactaggttcttggcatggagctgaggatgaggaggcaccttcacagcaaggtttttctgtaggagtgtcagaggttacaacttcaaagccctgtctgtccagccagaaggtccaccctagtgagacatgtggcccacccttgaaagacattctgtgcctggttgagcacaatggaattcatcctgagcaacacatatatatttgtgaggcagagctttttcagcacccaaagcagcaaattggagaaaatctttccagaggggatgattggataccttcatttgggaagaaccacagagttcacatggcagaggagatcttcacatgcatggagggctggaaggacttaccagccacctcatgccttctccagcaccagggccctcaaagcgagtggaagccatacagggacacagaggacagaga

SEQ ID NO: 344207 - DNA, 617 bp, Homo sapiens
cgtcggagggcgggacttccgccgtcctcctggtggtggtcgttttggttctgtgtggtgtttcaccaacttcggcctatggctctgtctgacgtcaccgaagtgacggaacggaaaagcgcgagaagcggctcggttcccaccacggagaggcgggagtgagtcaactgacaagcgctggggacagtggcgtccttgtcttgcctttgtcgctcccgccccgctcttccctggctgggctggcggaggccttgctgatgaacctgactgagggtcccctggcgatggcagaaatggaccctacacagggccgtgtggtctttgaggacgtggccatatatttctcccaggaggagtgggggcaccttgatgaggctcagagattgctgtaccgtgatgtgatgctggagaatttggcccttttgtcctcactaggttcttggcatggagctgaggatgaggaggcaccttcacagcaaggtttttctgtaggagtgtcagaggttacaacttcaaagccctgtctgtccagccagaaggtccaccctagtgagacatgtggcccacccttgaattccattgtgctcaaccaggcacagaatgtctttcaagggtgg

SEQ ID NO: 344208 - DNA, 360 bp, Homo sapiens
ttggttctgtgtggtgtttcaccaacttcggcctatggctctgtctgacgtcaccgaagtgacggaacggaaaagcgcgagaagcggctcggttcccaccacggagaggcgggagtgagtcaactgacaagcgctggggacagtggcgtccttgtcttgcctttgtcgctcccgccccgctcttccctggctgggctggcggaggccttgctgatgaacctgactgaggtgggtgtcccgtcccaggctcccccgcccgaccggtcctcccagtgctgaagccccctgaaggggccctgcaggtcaggccccttgtcccgaagagaggggcgttcctgtgtggggtccccgtatcagccg

SEQ ID NO: 344209 - DNA, 820 bp, Homo sapiens
cgtcggagggcgggacttccgccgtcctcctggtggtggtcgttttggttctgtgtggtgtttcaccaacttcggcctatggctctgtctgacgtcaccgaagtgacggaacggaaaagcgcgagaagcggctcggttcccaccacggagaggcgggagtgagtcaactgacaagcgctggggacagtggcgtccttgtcttgcctttgtcgctcccgccccgctcttccctggctgggctggcggaggccttgctgatgaacctgactgagggccgtgtggtctttgaggacgtggccatatatttctcccaggaggagtgggggcaccttgatgaggctcagagattgctgtaccgtgatgtgatgctggagaatttggcccttttgtcctcactaggttcttggcatggagctgaggatgaggaggcaccttcacagcaaggtttttctgtaggagtgtcagaggttacaacttcaaagccctgtctgtccagccagaaggtccaccctagtgagacatgtggcccacccttgaaagacattctgtgcctggttgagcacaatggaattcatcctgagcaacacatatatatttgtgaggcagagctttttcagcacccaaagcagcaaattggagaaaatctttccagaggggatgattggataccttcatttgggaagaaccacagagttcacatggcagaggagatcttcacatgcatggagggctggaaggacttaccagccacctcatgccttctccagcaccagggccctcaaagcgagtggaagccatacagggacacagaggacagaga

SEQ ID NO: 344210 - DNA, 1120 bp, Homo sapiens
cgttcatctattatttttgcccccattatcctcctttctgtgtaaacattaattcattttctcccatctttcctacccagcagatcttaaagagaggaagagtttgtaatattcttcaggggaagccttttgagattgaaatatcatactttgaatgataactctatatctatctataatatactatggtttaatgtttggaaatcaaacgcagtatttatttgtcatgtgaactactaaaagtaaatctgcatggacttcttgcctggtgagttacacagaaaatgaaagtgattatcagtggctgtggcaagatgaaaggaaccatgccaggacttctgagggaaggaagagtgtttgggactgaaaaatccttgtctggatctagtcctcagccactcagaagctggcatgccatgactcaaagagccgcccgtctggaatgaagacagtgacccgtaactcccacctgaagagcaggtgcttggaaaatgctgccagtccgcaggaaaaagttgttactgctgctgtctgtgaccaagaggacactttatttcttgaaacaactgggggcaaactggctcccagataaggcttcagtccctactcatgtgaggaaaccagccctgcacctgagagtttattcagtgacgataatactcacaagaccctttttggatttgtggcccaacccacaagttatagttccttctctgaatatttcatccagattgtgaagagcagcttctggcagccacagttgtactatgtgacccctacttcccatgcccaggactgattcgaccccgtagtagacacctaaagcaatcctgatcagtcagagtctttgttcctgacatttgggattagagcatggctgaaggtttaagacacaaacttggaagctgtggggcagcaatacacctccatgaggacagagaagcaggggaaataagaataaaccagaagctcacagaaacgcaggaaatacttctagagttctaacacttttcgggtttcttgttctagtccattcttgacacacttgtgcctcacagaagccaatggcaagaatgcagtcagatccttccaataaattccttttattctgtttacatta

SEQ ID NO: 344211 - DNA, 254 bp, Homo sapiens
caatattacagctatagtcaaggttaacttgatgtttcctttataaaacttgatttttttggaaagggggtgaaatatcttggacattaaaaatttattgtacaaaactatatgttactagttttctggcactgaaatattcatttctatttatatgtacctacctttagaatagtcagaaacttaattgtagagttatgtttaccatagtacattttcaatcgcattgtgaatttattctattttttttttct

SEQ ID NO: 344212 - DNA, 3054 bp, Homo sapiens
gccgagttcttatttttacggagggcttgtggccttagacgccagtttgcttatggaaatgaaacagaatagtccctgttcaaggatgtgtttcatgacagcacgagtgtaaatgagtgcccacacattttaacagccttgggcaggattttgctgctgagatccctagagcagctggttcttggctcattcttggggtagaggccgtggatcagggctgggggcaggggtgacaattgagaagtgcactgagccctttcctgttaacaattgggcatagaaagcaggattagtacttcctggttatacacttattttgtaaaaatagaattaatatcacagcaaccaatgtgtaggtttaagaaagtggccaggtgcagtggttcacgcctgtaatcccagcactttgggagggcggggcgggtggatcacgaggtcaggagctcaagaccagcctggccaagatggtgaaaccctgtctctactaaagatacaaaaattagccgggcgtggtggcgagcacctgtaatcccagctactcgtgaagccaaggcagagaattacttgaacccaggaggcggaggttacagtgagctgagatcacgccactgcactccatccagcctgggcgacagagcgagactcaaaagtatgattctggctgtagagttttctttttttctctgtctcaaaaaaaaaaagtgtcagcttggtcttgtcaagaggtgaaggaacttgttttattcttttattttttttttaagatagagacgggggtcttactatgttgcccaggctggcctcaaattcctggtctcaggcaatcctcctgcctcggcctcccaaagtgctgggatcagttgtgagccacactacccagccaaactccagttttagttaaactgtttcacctcatttttatgctgagttttgtaaagtaggtattcttgctgaacagagtcctgaaaatcaaactatacaagtagtaggaagtccattaagctgtttagaggaaaaagtgttataaatggcagttaaatgaacccaggaaagacccatcctcctttgtggctttctctgaggccccatgaggccaagcagaagcaaactggctctaggtgcagccagactttgaaaaggaatcccggccaggcttggtggctcatgcctgtaatcccagcactttgggaggtcaaggcaggcagatcacctgaggtcaggagttcaagaccagcctggccaacatggcgaaacactgtttctactaaaaatatgaaaattagctgggtgtgctggtaggcgcctgtaatcacagctacttgggaggctgaggcgggagaatcgctcaaacctgggaggcagaggttgcagtgggctgagatctcgccactgtactccagcctgggcgacagaccaaggctctgtctcaaaaaaaaaaaaaaaaaaaaaaaaaaagggaatcccaaccagatactggtgcaaggtcagagatgcagccaatggggagatttgtagaaagctcatagatgctaaaaacatgggtctttaggaaaattagaattcagctgagcctcctttcatttggacaatgttcagaagctcttacagggggctatggcaatcttttgatgcttcttatagctttctgaggttaacgcttttgtggtgggcatcggtagcaataaaatgcaaactttattgcatttccagtaaaatctctcccactttgagcaggaagcactcacaaaaaacgcatatacatgtcaacgttgtgagctcatcagagttttagaaatcaacttccacagtgaaagccaatgtaggcagaaggtttataacagaatccccaggcagagaagtgaatttcagagcatttcagggaggaaactcctctgcacatgtcagcatgtttaacatcgatgatggcaggttgtgtgctggcagccagagtctgaggccactgtccaaagttcagcgtcagtggttcctgttgctggtcatggagagagacaactggaaagtcaggtgtcttcacgctctaactagagcacagggatggaccatagccatgctaacctttgttaacccctaggacttgtcaaggtgtttaagcagtaggaatgaggaaacaacgttctgattcaagtaaatgtaactagaagtaaaaatttaaaaacttgtaagctcactaaagtgaagctctgcagacacggttcatatcctggtggctgagggcacataaccaagaacttacacaagcacccccaagccacaaagatcccagctgctatggttgaggggtaacctgccagcactggagccaagtgttggagctactgatccaaagttagctcacttctgcagaggctctgaaccagagcaaagaaatggcccagtgcaagcccagtgtgagccaagagttggccatgtaatcagttctggcccaaccaggtttgaaaggtagaggagcagtactgggttttggagagggaaggttggaacaaagccctttgcaggctataagcttcatttactaggccaggtctttctgtgtgaatgtgctttgactttggtctgtttatatgcatggggtaaacgtgggacagcctctgcagcttcactgcctgccggacgtgggtccagggctgccagctctgggtccttggtctgttgggggtcgcaaactgaaatggccatggggctatctgggcaggcaacacagatgagtggggatgggggaccccttctgtacagagcagcctctacttagtggccgctgacaggctgccccatgaggacgcaggcccaacattacctaatttaatcttctagaagtcagaattctgaatttttatgtcaactctcgactttttttttttttttgagacagagtcttgctctgtcgcccaggctggagtgcagtggcgcgatctcggctcactgcaagctccgtcccccgggttcacgccattctcctgcctcagcctcccaagtagctgggactgcaggcgcccaccaccacgcccggctaatttttttatttttagtgagacg

SEQ ID NO: 344213 - DNA, 2796 bp, Homo sapiens
gccgagttcttatttttacggagggcttgtggccttagacgccagtttgcttatggaaatgaaacagaatagtccctgttcaaggatgtgtttcatgacagcacgagtgtaaatgagtgcccacacattttaacagccttgggcaggattttgctgctgagatccctagagcagctggttcttggctcattcttggggtagaggccgtggatcagggctgggggcaggggtgacaattgagaagtgcactgagccctttcctgttaacaattgggcatagaaagcaggattagtacttcctggttatacacttattttgtaaaaatagaattaatatcacagcaaccaatgtgtaggtttaagaaagtggccaggtgcagtggttcacgcctgtaatcccagcactttgggagggcggggcgggtggatcacgaggtcaggagctcaagaccagcctggccaagatggtgaaaccctgtctctactaaagatacaaaaattagccgggcgtggtggcgagcacctgtaatcccagctactcgtgaagccaaggcagagaattacttgaacccaggaggcggaggttacagtgagctgagatcacgccactgcactccatccagcctgggcgacagagcgagactcaaaagtatgattctggctgtagagttttctttttttctctgtctcaaaaaaaaaaagtgtcagcttggtcttgtcaagaggtgaaggaacttgttttattcttttattttttttttaagatagagacgggggtcttactatgttgcccaggctggcctcaaattcctggtctcaggcaatcctcctgcctcggcctcccaaagtgctgggatcagttgtgagccacactacccagccaaactccagttttagttaaactgtttcacctcatttttatgctgagttttgtaaagtaggtattcttgctgaacagagtcctgaaaatcaaactatacaagtagtaggaagtccattaagctgtttagaggaaaaagtgttataaatggcagttaaatgaacccaggaaagacccatcctcctttgtggctttctctgaggccccatgaggccaagcagaagcaaactggctctaggtgcagccagactttgaaaaggaatcccggccaggcttggtggctcatgcctgtaatcccagcactttgggaggtcaaggcaggcagatcacctgaggtcaggagttcaagaccagcctgccaatggggagatttgtagaaagctcatagatgctaaaaacatgggtctttaggaaaattagaattcagctgagcctcctttcatttggacaatgttcagaagctcttacagggggctatggcaatcttttgatgcttcttatagctttctgaggttaacgcttttgtggtgggcatcggtagcaataaaatgcaaactttattgcatttccagtaaaatctctcccactttgagcaggaagcactcacaaaaaacgcatatacatgtcaacgttgtgagctcatcagagttttagaaatcaacttccacagtgaaagccaatgtaggcagaaggtttataacagaatccccaggcagagaagtgaatttcagagcatttcagggaggaaactcctctgcacatgtcagcatgtttaacatcgatgatggcaggttgtgtgctggcagccagagtctgaggccactgtccaaagttcagcgtcagtggttcctgttgctggtcatggagagagacaactggaaagtcaggtgtcttcacgctctaactagagcacagggatggaccatagccatgctaacctttgttaacccctaggacttgtcaaggtgtttaagcagtaggaatgaggaaacaacgttctgattcaagtaaatgtaactagaagtaaaaatttaaaaacttgtaagctcactaaagtgaagctctgcagacacggttcatatcctggtggctgagggcacataaccaagaacttacacaagcacccccaagccacaaagatcccagctgctatggttgaggggtaacctgccagcactggagccaagtgttggagctactgatccaaagttagctcacttctgcagaggctctgaaccagagcaaagaaatggcccagtgcaagcccagtgtgagccaagagttggccatgtaatcagttctggcccaaccaggtttgaaaggtagaggagcagtactgggttttggagagggaaggttggaacaaagccctttgcaggctataagcttcatttactaggccaggtctttctgtgtgaatgtgctttgactttggtctgtttatatgcatggggtaaacgtgggacagcctctgcagcttcactgcctgccggacgtgggtccagggctgccagctctgggtccttggtctgttgggggtcgcaaactgaaatggccatggggctatctgggcaggcaacacagatgagtggggatgggggaccccttctgtacagagcagcctctacttagtggccgctgacaggctgccccatgaggacgcaggcccaacattacctaatttaatcttctagaagtcagaattctgaatttttatgtcaactctcgactttttttttttttttgagacagagtcttgctctgtcgcccaggctggagtgcagtggcgcgatctcggctcactgcaagctccgtcccccgggttcacgccattctcctgcctcagcctcccaagtagctgggactgcaggcgcccaccaccacgcccggctaatttttttatttttagtgagacg

SEQ ID NO: 344214 - DNA, 2583 bp, Homo sapiens
gccgagttcttatttttacggagggcttgtggccttagacgccagtttgcttatggaaatgaaacagaatagtccctgttcaaggatgtgtttcatgacagcacgagtgtaaatgagtgcccacacattttaacagccttgggcaggattttgctgctgagatccctagagcagctggttcttggctcattcttggggtagaggccgtggatcagggctgggggcaggggtgacaattgagaagtgcactgagccctttcctgttaacaattgggcatagaaagcaggattagtacttcctggttatacacttattttgtaaaaatagaattaatatcacagcaaccaatgtgtaggtttaagaaagtggccagaagtgctgggatcagttgtgagccacactacccagccaaactccagttttagttaaactgtttcacctcatttttatgctgagttttgtaaagtaggtattcttgctgaacagagtcctgaaaatcaaactatacaagtagtaggaagtccattaagctgtttagaggaaaaagtgttataaatggcagttaaatgaacccaggaaagacccatcctcctttgtggctttctctgaggccccatgaggccaagcagaagcaaactggctctaggtgcagccagactttgaaaaggaatcccggccaggcttggtggctcatgcctgtaatcccagcactttgggaggtcaaggcaggcagatcacctgaggtcaggagttcaagaccagcctggccaacatggcgaaacactgtttctactaaaaatatgaaaattagctgggtgtgctggtaggcgcctgtaatcacagctacttgggaggctgaggcgggagaatcgctcaaacctgggaggcagaggttgcagtgggctgagatctcgccactgtactccagcctgggcgacagaccaaggctctgtctcaaaaaaaaaaaaaaaaaaaaaaaaaaagggaatcccaaccagatactggtgcaaggtcagagatgcagccaatggggagatttgtagaaagctcatagatgctaaaaacatgggtctttaggaaaattagaattcagctgagcctcctttcatttggacaatgttcagaagctcttacagggggctatggcaatcttttgatgcttcttatagctttctgaggttaacgcttttgtggtgggcatcggtagcaataaaatgcaaactttattgcatttccagtaaaatctctcccactttgagcaggaagcactcacaaaaaacgcatatacatgtcaacgttgtgagctcatcagagttttagaaatcaacttccacagtgaaagccaatgtaggcagaaggtttataacagaatccccaggcagagaagtgaatttcagagcatttcagggaggaaactcctctgcacatgtcagcatgtttaacatcgatgatggcaggttgtgtgctggcagccagagtctgaggccactgtccaaagttcagcgtcagtggttcctgttgctggtcatggagagagacaactggaaagtcaggtgtcttcacgctctaactagagcacagggatggaccatagccatgctaacctttgttaacccctaggacttgtcaaggtgtttaagcagtaggaatgaggaaacaacgttctgattcaagtaaatgtaactagaagtaaaaatttaaaaacttgtaagctcactaaagtgaagctctgcagacacggttcatatcctggtggctgagggcacataaccaagaacttacacaagcacccccaagccacaaagatcccagctgctatggttgaggggtaacctgccagcactggagccaagtgttggagctactgatccaaagttagctcacttctgcagaggctctgaaccagagcaaagaaatggcccagtgcaagcccagtgtgagccaagagttggccatgtaatcagttctggcccaaccaggtttgaaaggtagaggagcagtactgggttttggagagggaaggttggaacaaagccctttgcaggctataagcttcatttactaggccaggtctttctgtgtgaatgtgctttgactttggtctgtttatatgcatggggtaaacgtgggacagcctctgcagcttcactgcctgccggacgtgggtccagggctgccagctctgggtccttggtctgttgggggtcgcaaactgaaatggccatggggctatctgggcaggcaacacagatgagtggggatgggggaccccttctgtacagagcagcctctacttagtggccgctgacaggctgccccatgaggacgcaggcccaacattacctaatttaatcttctagaagtcagaattctgaatttttatgtcaactctcgactttttttttttttttgagacagagtcttgctctgtcgcccaggctggagtgcagtggcgcgatctcggctcactgcaagctccgtcccccgggttcacgccattctcctgcctcagcctcccaagtagctgggactgcaggcgcccaccaccacgcccggctaatttttttatttttagtgagacg

SEQ ID NO: 344215 - DNA, 759 bp, Homo sapiens
ggctcttgggtccctatgtggctgttgctcccctctgggcctctgcttggccttctgtgaagggcacaaagagtccagtgggaccacatgaaggtcactctccatgtggagtggagagaccgcctgggagagatggctgagggcctgctggggaccaaagtctgagctcataaagaaaagccagcagttcctctgttgctcttttcctttacagaattagttacattgtcataattaaagaaaactcaagggctgggctcagtggctcatgcctgtaaacccagcactttgggaggccgaggagggcggattgcctgagatcaggagttcaagaccagcctggccagcatggcgaaaccctgtctctacttaaaaaaaaaaaaaaaaaaaaaaaaaaattagctgggtgtggtggtgcacacctggaatcccagctgtcaggaggctgaggcaggagaatcgcttgaacctgggatgggagactctgtctcaaaacaaaaacaaagaaactcatgtgaaagaaggcaacatttccccccaacacaaggaagctccacagtcccctgggaggacccaaggatgcaggcgccccagaccctgctggcaggaggacacagtgtctgttgggaggtcatcctgctgtgtctgttaactataaattgcaggtcacatttgagtgttgcttagcccttcgtcctgaagttacttgcagtttgtccaggcacgcgccaacaaggactgctccaaccttgtcaaagc

SEQ ID NO: 344216 - DNA, 744 bp, Homo sapiens
ggctcttgggtccctatgtggctgttgctcccctctgggcctctgcttggccttctgtgaagggcacaaagagtccagtgggaccacatgaaggtcactctccatgtggagtggagagaccgcctgggagagatggctgagggcctgctggggaccaaagtctgagctcataaagaaaagccagcagttcctctgttgctcttttcctttacagaattagttacattgtcataattaaagaaaactcaagggctgggctcagtggctcatgcctgtaaacccagcactttgggaggccgaggagggcggattgcctgagatcaggagttcaagaccagcctggccagcatggcgaaaccctgtctctactaaaaaaaaaaaaattagctgggtgtggtggtgcacacctggaatcccagctgtcaggaggctgaggcaggagaatcgcttgaacctgggatgggagactctgtctcaaaacaaaaacaaagaaactcatgtgaaagaaggcaacatttccccccaacacaaggaagctccacagtcccctgggaggacccaaggatgcaggcgccccagaccctgctggcaggaggacacagtgtctgttgggaggtcatcctgctgtgtctgttaactataaattgcaggtcacatttgagtgttgcttagcccttcgtcctgaagttacttgcagtttgtccaggcacgcgccaacaaggactgctccaaccttgtcaaagc

SEQ ID NO: 344217 - DNA, 459 bp, Homo sapiens
attaccaggtatggaacactttgtctttcttgaattggccacaccgatagaacagccatgttccaacccagactgctggctccaaggcaacagtttctgttgagaagatgcttgttgtggttgatctctctagtcattactctatagccgtgaagagcagacatgcctggtgcctgggtcaagctgtccctgcaggccttggggacactgcatgaaccaggccaggtgtagggggtctctcttgctttggccttggagagtcctctctggggtggaagtggaccagcatcaagggtctgctcatatacagtttttcttcttttaattataatctctcagtactttaggccacccttttcctgcgcgttctcaaatgaaaagacactgatgtcttagccaataggagagagcagtttgccctcatgacattcctttctcactagaacctcaatcttgtta

SEQ ID NO: 344218 - DNA, 638 bp, Homo sapiens
tccctctactggtgtcccaaacatcatccttctcatctacttaaaggtatcagttcatcagttcatacctttttttctctttgatcattaccctttgtcctttctccccactggattgttgtggcagtcttgagaatgcacatcccagcccctcagctagaggaagcacaactgatgatgctccagctgttgccgcctgaaatctattgctacgtttgctctcagaccatacttgccattggcttcttcgattcaataattgagagaagaggagaaacaaagacaggattgtccctcctttaaaggcccactgaggctccagggctcacccttactgaacttctcttaacctgcactgggtctaggatactttcagccaaacttccttccctctctccttcactggggtttaaacttgcattgcagtctggttgggcacagtggctcacgcctgtaatcccagcactttgggaggccaaggtgggcagatcacatgaggtcaggagtttgagaccggcctagctaacatggtgaaaacccgcctctactacaaagacaaaaatttgccaggtttggtggtgcatgcatgtaatcccagctacttgggaggctgaggcatgagaatcacttgcacctgg

SEQ ID NO: 344219 - DNA, 476 bp, Homo sapiens
cttaaaagaacctagccttcctagctcactttatcacgagctcaaaaatatacatccaaggacgtccattttcacatccttacgtgaaatccagatgtgcatcactcacttctcgcccatattaacacaaaaattcagcttctctttgtaggttccaaaagtaattatattctcactgaaagtattagtaagcaaggtagtgtttgcaatatgcaaggtagcatatctcagaggggagaaggaagactaagtttacattcattcagtgtgcatcattttttttgtttgtttgttttccaagctggagtgcagtggcatgatcatggcttcactgcagccttgaactcctgggctcaagcaatcctctggccttagcctcccaaggagctaggactacaggcatgggccatcgtgactgggctgattttttaaaaattatttttagtagagatgagatcttgttatgttgcccaggt

SEQ ID NO: 344220 - DNA, 474 bp, Homo sapiens
atgtattttcatttcattgagtgtatacctaggagtagaattgctaggttatatggcagtcctatgtttaaccattcgaggaattgccagacaatttttcaaagggatttgctccatttcatagtcccaaccagctgtgtacaagggttctcatttctccacgtcctggtaacactaattgttactgttttttttttttttttattatagtcatcctagtgagtgtgatatagtagttcattgtggttttgatttacattgacctgatggctaatgatgttttcgtgtgcttattggccatttatatcttcactggataaatgtctattcagatattttgtttatttttaagtcatattatttgtctttttattattgaattctaagagttctttatatagtctagatacaagcctattaccagatatatatgatttgcaaatattttttcccattctgtaggttgtcttttca

SEQ ID NO: 344221 - DNA, 223 bp, Homo sapiens
gttaagtttaaagtccaacaaaaatgagactacactgtttgcttttaaaactgtaaaatgaaatccaaagcaagacgtagcaaagaaccagcttcagtggtactgcagttctttatcctagcacagtatgtttctatgaactgcaccactgtagctgaacaggcatctaccaaacagaccactatgatcaagacaactttatttacttatttatttttgagac

SEQ ID NO: 344222 - DNA, 609 bp, Homo sapiens
aaattcgctgccgtcagacctttcttttttttttttggagacgcttttcactcttgtttcccaggctagagtgcagtggtgtgatctcggctcactgcagcctccgccaccacccacaattagaattctcaaagcaaacaggcctcagccttgaattgattacactaaagtagtgtttccacacttggtctaactaataatatacatatactactaacatacaaattctaggactccatcccacatctacagaatcttaatctctagggaaggagtttgggaatctctaagtttaacagtcaccttcagtgactaatacaacctggcaagttttggaaagaatgcatagaaggaaaataaatttaatcccaagaggagctagtttactcctaaagtatctccagatggtagaaatgtatgatataggaatttctgaatagcaaatcttcactgctatgtgaccttgaatgagttacttaaacttgctaaatctcagtttatttataaaaaggagaatactctttgttctggcaaaattaagggtgcaagaataaaactatatatgttggcatttattaaatattagtttctttccttttctactctaag

SEQ ID NO: 344223 - DNA, 90 bp, Homo sapiens
tcatttagacaggatggataacagggaaaagctagattatcaagtgcttggcagctgatataaataaatactaaataattcttatgccaa

SEQ ID NO: 344224 - DNA, 305 bp, Homo sapiens
ggccagcatgctttttaagatgtcaaaactgcataaaatagagaaaataaaaaacatggtaaatgcagatatccacttgttttgataccatttgttgaaaacactatgccattttcattaaattgcctctgcatcttggtaaaaatcagttgaccatatttgtaggtgtctacttgtttattttctattttgttgcactgaagtacttgctgtctttttttttaatgctttaagttctaggatacatgtgcacaacgtgcaggtttgttacataggtatacatgtgccatgttggtttgctgcac

SEQ ID NO: 344225 - DNA, 354 bp, Homo sapiens
agctggccaccccccaggagacatccctgatccctcattttctctctagagccacctcctgtcccttagcaaggcctgctggctctgcctccacgtcttttccacagctcccccatactcctgcgtcctccaccagcccccaagccctttccccctccacctgcagggttgcatggcctcctaaccagctctccacctcacacatgtgccctgtggtccaccgctctccctacaacagagtaagcttcagctcagacctacccttggtcaaaaccagtggtttccatgtgcatgagaattagacacatccttacaatgtccttcaaggcacaatgaaatccaccagccacctcc

SEQ ID NO: 344226 - DNA, 211 bp, Homo sapiens
tacaagctcctcaagaacaacaaatacttaacagatttggggcaaaaaatactcatttgccactatatacggatacaaagaaggatgaagacacaaattacttcttttaggagcttacaagtttacaagtctaattcaaacacacataaaactatttatggccttagaagtcaggagagtgtttactgttgtggggaagcagacactggaa

SEQ ID NO: 344227 - DNA, 785 bp, Homo sapiens
tctttggggttagggcttcatcatctacaactttaggggacacaaggcagttcatagcagttgctctcctttggtttgtatccaactacactgcctggttgatcttctctctgaatatttcggtgctatctctttccttcagtttgcatcttcccctctcagaaatgtatgtcaatctaaaagtccaatcccatccactttctgtattggtcatttcatcatcttccagggcttcatccatgacttgcacctgtgtgaccccaacttcggacctgccttctctcctggtcctgcttattcactcccccgcatccctctggccacctccaacaaaggaaaccttccccatgaccacaaaggaatttccctttgatttattcatttatttttcaatatcatgactgtattagtttcctaggactacaaaaaaaaaataccatgaactgactggtttcaaacaatagaaatttatttcctcacagttctgaagtctgcaaatccaaagtcacagcgtcagcagggctgtgctgactcagagggctgcggggagggtctctgtcagtactctggggagggtccctgtcaggcctcccagcacctggtgttgcctgcggtccttggctccttggcatccttgacttgcagaagtctcactccatccagtccctccctctagcgacatgtgacttttgccctgtgtgtgtctttgcatttcttctcctcttctaataaagccaacagtcatattggatgaagggcccaccttatttcagtatgacctcatg

SEQ ID NO: 344228 - DNA, 535 bp, Homo sapiens
ctaaataaacgtctgcttgaagcacttttatttgccagtagaagtaatatttccaactgtctcaggtcaagagttccttttggcctccagcctgatctcagactggactttcctctttgggaactcctatgccctctactcagaagactgtcctcttggcttcttttggcttttcagcaacattgacatttgtcttctgtattattattatatagtttgtttatttatttttactttttacagatatgaggtcttgccctgtcatccaggctgaaatacaatcatggctcactgcatcctcaaccttctgggctgaagcgacactcctgcctcagcctcccaagtagctgggaccataggaaagcatcttattttttttcattttttagttctctttcttattcttttgccacaagttgataattgaggccgatgcaagtgaagacatagatacatgccacagttaggattgtgtcatatacacagaacatgtgtttgtcattttcttttctttttttttttttttttgagacag

SEQ ID NO: 344229 - DNA, 119 bp, Homo sapiens
gattctctttttccatttcagtgaagaatgtcattggtgttttgaaggggattacattggacctgaagattgctttgggttgtttgctgttggcaaataaatggaaatgctactgattt

SEQ ID NO: 344230 - DNA, 459 bp, Homo sapiens
cttcctgatttgaacctcaagaggccaacctgcatggactgcttccacagatcccttgtcctctgacttacagttgaattcaccaaatagaagacattggaaatgagacccgagggttggaggaggaggaagcctgcaatgtgaacacgatggctggagctccggcagccattctggaccaggaggtagccttgaagatggaagccacatgttgggatggtgaatccaaaagatgaggagcctgtatcccctgtgacaccagaactgccataccagccctgggttcctccatctatactgccttcatatggtaaagaaatattcttggatcttgttaggtgtctgttgcagccaaacacaatcccaactgatattcactgtaaatgattccatggctccctgtagtacttctacaaagcatctatcacaattgtaattaataaaataattatgcaatta

SEQ ID NO: 344231 - DNA, 404 bp, Homo sapiens
  misc_feature (149)..(149): n is a, c, g, or t
ggtgaaatgctcattgaaattatatttttaaatagttaaatcatgataaccacattgactacttagtaacacacacagtgttagtgtgttagcctccattgtctcctgtctcatcttcacagagaccacatgaggtaggtactactccncattaggtgagaaactaaggtttagagaagctgagtaactttaccaaggtctgtggcgtggccaacaggcaagcagggcctcaaacctgggcctagtctactccaaactacatgctgccattcactatactctatactaactggtgatcttggccttaaatctgttttagcagtttaattcttgtttatataaatgatcttaaacactttatggggtttttttgggttttgtttttgtttttgtttttgagactg

SEQ ID NO: 344232 - DNA, 224 bp, Homo sapiens
gccaaagcagcaggaggattgcttgaggccaggagttcaagatcagcctgggcaacatagtgagaccccaacacttaaaaaaaaatagctgggcatgatgtcatgtgtctgagtcctagctattcgggacgctgaggcagaaggacgaggagtctgaggccgcactgagccatgattgtgccactgcacttcagcctgggcaacagagcaagaccctgtctctt

SEQ ID NO: 344233 - DNA, 836 bp, Homo sapiens
aaaatgaaaggcaaaaagcaataaaggcatgccttgacagaaatccagaagcctttaagcctaagatagggaaaggaaaggagggagaatctgatcgacgtcatagcaaagggtgtaattgcaaacgatcaggatgtcttaaaaactactgtgaatgctatgaggcaaaaataatgtgttcctcaatatgcaaatgtattggctgtaagaattttgaagaaagcccggaaaggaagacattgatgcatttggcagatgcagctgaagtaagggtacagcaacaaacagcagccaagacgaagttatcctctcaaatttcagacttgcttactaggccaacaccagctttaaatagtggaggcggaaaattgccatttacatttgtaactaaggaagtagctgaagccacatgtaattgcctccttgcccaggcagagcaggcagacaagaagggaaaatcaaaggcagcagcggaacggatgatacttgaggaattcggacgatgtttgatgagtgtcatcaactctgcaggaaaggcaaaaagtgacccttgtgccatgaattgctaactcttgcacaaaagactgataaatggaactgtacagaaaatttaaggtgcagggacacttgattttctggaagatactgaaggagaagaaattttaaatgaggaaattagtacattttaaatcttagttaaatctgcttatgccccttctaaattgaatttttctttattatatagattttttaatttgcttgggtttcttaagaattagatgttctctttctgatacctttgacaaaaaatgtttataaattcatataatttataa

SEQ ID NO: 344234 - DNA, 891 bp, Homo sapiens
aaaatgaaaggcaaaaagcaataaaggcatgccttgacagaaatccagaagcctttaagcctaagatagggaaaggaaaggagggagaatctgatcgacgtcatagcaaagggtgtaattgcaaacgatcaggatgtcttaaaaactactgtgaatgctatgaggcaaaaataatgtgttcctcaatatgcaaatgtattggctgtaagaattttgaagaaagcccggaaaggaagacattgatgcatttggcagatgcagctgaagtaagggtacagcaacaaacagcagccaagacgaagttatcctctcaaatttcagacttgcttactaggccaacaccagctttaaatagtggaggcggaaaattgccatttacatttgtaactaaggaagtagctgaagccacatgtaattgcctccttgcccaggcagagcaggcagacaagaagggaaaatcaaaggcagcagcggaacggatgatacttgaggaattcggacgatgtttgatgagtgtcatcaactctgcaggaaaggcaaaaagtgacccttgtgccatgaattgctaactcttgcacaaaagactgataaatggaactgtacagaaaatttaaggtgcagggacacttgattttctggaagaaaaacaattactgtattttaattcagtccttgttttaaaagacctgaaattataatactgaaggagaagaaattttaaatgaggaaattagtacattttaaatcttagttaaatctgcttatgccccttctaaattgaatttttctttattatatagattttttaatttgcttgggtttcttaagaattagatgttctctttctgatacctttgacaaaaaatgtttataaattcatataatttataa

SEQ ID NO: 344235 - DNA, 574 bp, Homo sapiens
tgagatcagaataacatatccagccttgagaagacaagggggtggagggagtgttccagggaaaggagacaccttatacaaaggctggaacaaattgaatgggttcagaaaacaaaaggaaggcccagagtgactggagcgtggcatttagggatgaaggtcaagtcagaaaagtatgtaagagtctggtcaagtaacagtctcgtaggccaaggtaaggaatttgggttttattttactgcagtgagagatataggagatttcacacagaggcgtgaaatggtctgatataggtttctaagaaccattctgacggccattagaaagtgcaagtttgggaatatggcgatcactgagaaagctatgggaccgtgcatggtagatcatgcctgtaatctcagcacttcggaaggccaaggcaggaggattgcttgaggccaggagttcaagaccagcctgggcaacacagtgagacctcatcgctacaaaaaataaaaacataagccaagtgtggtggcatgtgcctgtagtcccagctactcaggaggttaaggcaggaggattgcttgagccc

SEQ ID NO: 344236 - DNA, 635 bp, Homo sapiens
ccaacatggtgaaactgtctctactaaaaatacaaagattagctgggcatcgtggcatgtgcctgtagtccctgctactctggaggttgaggcacaagaattgtttgaacccggtagtcggaggttgcagtgagacgagatcacgctgctgcactccagctctggtgacagagcaagaccctctctcaaaataaataaataaattggacttttccaattaatattctgttctgtttaactgatctctcatgatttttgccttttaactctgtgcaatacattctgagtaatttcctcatatctatcttccagctgattgttttttcatatctgattaatctgctgttcaagccatcagacaattttaattatgacttttaatctagaaatttgattatttaaaaaatctgccctactttcctccttagagtatctgttatattctgttttttgatggtctagcttatgattatgattattctgaaaatactatctttcagatagttcttttattgggagtttttgaagggagcgtctagtccctcagtttgctgtaatttctgactcttgcacatggtgaagtttttccttgtacatttgtagtttgagattgaaagctcattttcagcagagct

SEQ ID NO: 344237 - DNA, 168 bp, Homo sapiens
cttaaactgtacagagaagtacccttacatctgttggtggacaggttgtttacaatcttggctattgtgaatactgctgcagtagacatgagagtgcagatatctctttgatattgatttcctttcttttggatgtatacccagcagtgggattgctagatcatatgg

SEQ ID NO: 344238 - DNA, 408 bp, Homo sapiens
tatcagcattttggtcacgaccattaaccaatctctgagatgttccaaactttcctttatcttcctgttttcttttgagccctccaaactcttccagcctctgctattacccaattccaaagttgtgtccacgttttcaggtatctttatagcagtgtcccactccttggtaccaattttctgtattaggccattcttgcactgccataaaaaaatacctgagactgggtgatttataaagagatttatggttcatggttctcaggctgtacaagcatggtgccaacatcacttgggttctggggagatataattcacatactatacaattcaccgatcaaaatgtatagttcaatcacttttagggtattcacggagttgtgcatccatcacggcaatcagctttag

SEQ ID NO: 344239 - DNA, 348 bp, Homo sapiens
gatcttcaagttgagaaacatcagaggaaagcaagatttctctcgtgctaagaaaaaggaaaattgggccaggcaaggtggctcacacctgtaatcccagcattttgggaggcttgaggcgggcagatcacgaggtcaggagatcaagaccatcctggctaacacggtgaaaccccacctctattaaaaatacaaaaaattagctgggcatggtggcacgtgcctgtagtcccagctatttgagaggctgaggtaggagaatcacttgaacctgggaggcagaggttgcagtgagccaggatcgtgccactgcacttcagcctgggtgacagaatgagactctgtctc

SEQ ID NO: 344240 - DNA, 411 bp, Homo sapiens
tgggttcaccttcctcactattgctttgctgagctgggtgggtttgggaaacccatttccacttaaggaggctcagtttgcctgtctgtgaaatgggcaggatgaggtgacccacatcccttggctactagaggttttggtttgtccccatgatcttgggagaggtggatcatcagtgcctgtaaaacaggacatggtagttaaaaaaagaaaaaaaccctgattgggttttgcagtcagaatcttccctggtgagtctctgtcacccaggttggggtgcagtggtgagatcatggctcactgcagcctcaaactcccagactcaagggatcttcctgcctcagcctcccaagtagctgaaactgcaggcatgttccaccgcacccagctaatttttaaactttttgtaga

SEQ ID NO: 344241 - DNA, 572 bp, Homo sapiens
gttgaatatccaacatcccccacactgccccagtgtctctgctcccttactgagccttactattattcttcatagccctatcactacctagtctagtattcactgaactgtgtcatccactagaatatgagcataatgagagcagagactacacctgtcggttcagtattctatcctcagcacatagaatggtacctggcacatagcagatgctaaaataaaatttaaatgaataaattaattcaatcaacaccttcaaggtgttattattacctacaactattgtttacaagaggtatgcaccgtggaagatcctggagacacaacaatgaataaagccaagccagttcctgcccccgtggagcttgtagtcaagacattgaacaagtgatcagaaagatgttgactgctgcagcagagggttgcaagctgctcatgagtatataacaagtagccctaaccaaagcattctctcccttggtttaatgtccacccattgaggtgactgctaaatactaatccatgactctatcccttggcattcaaactcacacatccacttacctgcctct

SEQ ID NO: 344242 - DNA, 560 bp, Homo sapiens
aataatagtgaattatctaagggagaaattatttaacactcattagatggttactcttggatatcaattgtgtcagccagaaaatagtcaaaaaattaaaacttaaagtccctgtagaagtccaggtatcctagttattgattgaaaggatcactatatgctttattttctagatttatagttgacaaactcgatgttttattgcaaaaattttaaagtttaccttggcatctgttcaacccccaaattgtgcttcacaaaacatggaatagaacaccacatcctagaagattttggtagcaggagtcaccagatgtctttgcctatcataaaacaatcatgcgattttgtaaaatgcttaatttttaagcaacacatcatcctgatgggtttccaaagatcattcagaacaaaatagccacccaaataactaaatgacttaaactgttaagtagagttgttcagcattatccatctgagtcctgaggaaagtgtgcctaaagggatgattttattttttctataattgatacttaaccattccttctgttagcaattag

SEQ ID NO: 344243 - DNA, 413 bp, Homo sapiens
agcatgagtccacaggagctggtacagggcctgggcccacaagggctggcctggagcttggggctgcagggacttacctggcaactagagtggctttggatcctggttctactgaaggctttgtctttggaaactggtctgaaggctggatcagtgggttctggactagatactagatcctcactctggcttggaccgtggagccacagggccagtctggatccatgggtataggtctgtgctctggagccacagtgactggattcatgggtagaagtctccgttttcgggtcaagaggctggatccacgggtgtgggtctttgttcagggcccacagtgactggcctggagactgggtccactggggccaggctaatgccagtatctctactggaacttatctggatcccag

SEQ ID NO: 344244 - DNA, 258 bp, Homo sapiens
aggagttgttgcagatccctggctaattaatcacttggaggcgggtgcaggggggctgtccaatggtggcgcaggaagaagggggcgtgggcgctggcagaccattcacatggtttgggtttcgcccagacctcgggttcatgccgtcacatcttgtccatctagagaaaggcacgcagagtccaggaatactcaaacccctttgtgaaaactcagaggaatttggtcagtaaggaactgattaatcaaaaaaaaaaa

SEQ ID NO: 344245 - DNA, 305 bp, Homo sapiens
tatttagagatttattataaaaatttgtgatagtttctagaaggtatcagcagccatccattcccttgccctattctggcctccaccacttttcctcagaagctagtttacctaattatcaaccactttttgtgtaaagcaatgcagatagagaacaatagaatggagaactcatccaggttagtgacattctcacagggagtgtgttggttctaagaccaggttctaggatatggttcttagcttcacaggacctgaaagctgattcttcattattttaaagtttattagcctttccaggatag

SEQ ID NO: 344246 - DNA, 411 bp, Homo sapiens
aacaaaatgagattaaaatattccctcagttttaaaggctagctaatttattcctctattattgatttactttcttatgtgtcctgataataacaagatctatcatttcttgagcaacagcttagttcctaacacacagccaatttttctatatgttctttttacgccccacttattggatattaaaacaaggagggttttttttttttttttttttttttttttttttttttgagacggagtcccactctgtctcccagactggagtgcagtggcactatcttggtttcctgcaagctctgcctcctgggttcacgccattctcctgcctcagcctcccgagtagctgggactacaggctcccgccaccacacccggctattttttgtatttttagtagagatggggttt

SEQ ID NO: 344247 - DNA, 611 bp, Homo sapiens
caataaaccattagaaaaaacaaatgtacacacacattaagtgacacaacttttatttttatttatttattttttaatggatggtgatttcaatgggtggcgatttcaatggggatttttcctcgtgacaagatttgttcttactcttgttgaattagaaaagttagctccaatattatgataaattggatatataaatgtcagtgctaatagcttagtattttagtcttccacaaattgatgcctgtggtatctggacattccttgcctgttcttgtaaataaggagatagtgatgtttaaggaatagcactctggccagaagagcaaaaaaaacaaaacaaagcaaaacaaaaagaccaggtgctgtggctcacgcccgtaattctagcactttgggaggccgaggtgggtggatcatttgaggtcaggaattcaagaccaacctggccaacgtagtgaaaccccatctctactaaaaatacaaaaaattagccgggcgtggtggcaggcgcctgtaatcccagctacttgggaggctgaggcaggagaattgcttgaacccaggaggcagaggttgcagtgagccgagatcatgccattgcactccag

SEQ ID NO: 344248 - DNA, 362 bp, Homo sapiens
gctgggtcctatggtaagcatatgtttaggttttttaaggatgtgcaaaaaaatattttccagaatagccgtaccatttgacattctcaccagcaacgtctaagagatctaacttctccacagctttaccagtcttaagttcactactttttacattaattattctaataagtaaggatgttgaatatcttttcatgtgcttagttgccattggtatatccccttcagtgaaatgttattttgggtctttctctgattttctaattgaacttttttgatatatttaatacctcccaaatttacatttttggaaagtgtttgtttgcttgttggtttgtttgttttgagacaggatctcactc

SEQ ID NO: 344249 - DNA, 1889 bp, Homo sapiens
gaggtcagaagataaccagaaaaataccattacaagcaaagaaaattacagaccaatatccatcataaatgtgcaaaaattataaactaaattttagccaaatttaatgatttatacacatacatgcttacacacatggacacacacacgtatcctttacatgcaggtataaagaataatattaatacataatgaccaagtgtgtatcccaggttggttaacattcagaaattggtcaatctaattcactacattaataaactgaaaaaaatcacatgattatctcaatagatacagaagaagcacttaacaaagtccattatttattcctagtaaaaattatcagtaaaataagaacagttgagattttcctcaaactgataagaggaatccatgaaaacctacagctgtcatacttaatggtgaaacagtgaatgctttgtgcctacgatcaggtacaaatcaaagatgtcttcattcatgtcttctttcaccattgtacttgaaaaagaataaaagacatccagagtggaaaggaagaagtgcaactatcttaattcatggacaacatgaccattgtagaaaatctgatagaatctacaaaaaaagctattagaactagtaaacatcaaaaaatttaaaatacatagggataaatctgttataaagatgtgaaagacctgtgtgctaaacactgcaaagcattccagagagaaattaaagaggacctaaataaatggagaaacacttcttgttcatggtttggaagattcactattccagatatcagttctccctaaattaatctatacaatcctaatcaaaatctcagccagcttttcaaaaaatagaaactgacaaaaaccgattacaaaatacatttggaaatacaaaggatctagaactactttgaaaaagcagcatctttatttataatagccccaaactggaagcaacctaaatggaaaaaaaaaaaaaaacaacctgtgattagatcatgtaacgaatactattcagcataaaaggaacaaaaatattatgcaacaatgtggatgaattgcaaatacattatgctaaatgaaagaagtaatctcaaagagcacatactatatgcttccatttatatggcattctgaaaaaggcaaatctttaacagtggagaatgtatcagtagttgccagggtttaggaactggggaaggaactgataaaggagttacctgagagaatttttaggggtgttggaacaggtctaaatttttgttatggtggttacaaagttctatacctttttcaaaagtgatataattcactaggcatggtggcacgttccggtagtcccagctactcggggggctgaggcaggaggatcatctgaacccaggggttgaggctgcagtgagcccgtgatcacaccactgcactccagccaggaaaacagaaagagaccctggctcaaaaaaaaaaaaaaattatgattaaagacagatgttctgcattgtataaggtgaggttatcttatgtctctctctgctactccagcttattctgtagtatctgtattttgttttgcatattgaccttgtgttaagggttctttagaagaaaaggtttaggctgcgtgtggtgtctcatgtctacaaccgctaaggtgggaggattgcttgaggccaggagtttgagaccagcttggggaacatagtgagactccacctctacaaaaaaaatttttttaattagctgggcatggtggtgcatgcctgtagcccttcctacttggaaggctgaggtaggaggatcgcttgaacccaggagtttgaggctgcagtgagctatgataatgccagtgcactccagcctgggcaacgtagcaagatcttgtctctctta

SEQ ID NO: 344250 - DNA, 872 bp, Homo sapiens
  misc_feature (822)..(822): n is a, c, g, or t
  misc_feature (868)..(868): n is a, c, g, or t
gaggtcagaagataaccagaaaaataccattacaagcaaagaaaattacagaccaatatccatcataaatgtgcaaaaattataaactaaattttagccaaatttaatgatttatacacatacatgcttacacacatggacacacacacgtatcctttacatgcaggtataaagaataatattaatacataatgaccaagtgtgtatcccaggttggttaacattcagaaattggtcaatctaattcactacattaataaactgaaaaaaatcacatgattatctcaatagatacagaagaagcacttaacaaagtccattatttattcctagtaaaaattatcagtaaaataagaacagttgagattttcctcaaactgataagaggaatccatgaaaacctacagctgtcatacttaatggtgaaacagtgaatgctttgtgcctacgatcaggtacaaatcaaagatgtcttcattcatgtcttctttcaccattgtacttgaaaaagaataaaagacatccagagtggaaaggaagaagtgcaactatcttaattcatggacaacatgaccattgtagaaaatctgatagaatctacaaaaaaagctattagaactagtaaacatcaaaaaatttaaaatacatagggataaatctgttataaagatgtgaaagacctgtgtgctaaacactgcaaagcattccagagagaaattaaagaggacctaaataaatggagaaacacttcttgttcatggtttggaagattcactattccagatatcagttctcctaattatcttcatctataattagcanttcaaaatgactgcaaccgtcaatcttgatcagactgctcttgaangttt

SEQ ID NO: 344251 - DNA, 422 bp, Homo sapiens
aaagttttctactcaactgcagaaaagggattgaatagagactttgtttcatattcataccccttcaaattttgaattacatggattaccccttcaagaaatgaattttttaaagtactaaaataaaagcaagggttagaggtggaggtatcaagtactccctatgatttcgcagctttcagaagatcggtcctcacattctatgggcactaaaatggttgggcctcaagacacctccatgtggggtatattctttctaaccacagatttctatcttcattgacaagataaacactgcaactataagttttgcctatagcttttggttttaacttcttttgaggttctccttgctaacgatctaggcactaacccctaacttccatgtctttttaaaatgtgccttgtggctttcagtggca

SEQ ID NO: 344252 - DNA, 690 bp, Homo sapiens
gtttgtatatatgtctagttgcaatttcttttccatgcagtactccagataccacacaaaataagattactagtgggtactcattgttgaaccacagagtgcattgtaaaccagatacacattttctcccatgccattccttctgcaggtttttctagattccttggtggatacttgtatcttgtgtttattttcctctcctgcctcagacgtgatgcctggtgctgactttttaattttttttttcttaccagaaagtactgagctcaactgaaacagtgattttaaataagcagtgttcatggttttgttggttagtgtgtctttcattttctggcccattattgaactcctttcctagttttactataaactttaagttcgatgggagaaggatcaaagaagacaaaaacacaacgcattccagttaattcaaacaatatttcgtgagcacatcatgaacttagtcaatgtgatgatcatcaaaaacacatcttcaaataatgcgtaactagtcctttgccctgccctcaaggcgctaaagatctgacaagatgctgtcttgctggccgcaggaatctggagttcagaacggaggtctagacacagcgggaggtgacatgaaaaaggtaaaagtagatattataaagagagaataggaagataaaaagccagagaaacctgggagcc

SEQ ID NO: 344253 - DNA, 412 bp, Homo sapiens
aacccatttatgctggaggtggcaaatttttttgtgtgtgaaaaatcagaccatggtgatgaccctgagcagtagggtcatctagcagtaggaagtataaataactcccacaagcttagtgctccaataatggaacactaggcataaatgggttagcttctctctttccaacaggcccctgaactttgacacacactcagcctgagccaacaaataattcctccttatgcccctcctaaacacaggctgacctcagggtgaaacattctctgatctaggatctaattttggcacctttcatcctgtcctccccttcccacattctttctagttttgtgtgttcctctttaaataaagcccttttctgcctaacatttcagatgactgcagatatagttggtatttttcccgt

SEQ ID NO: 344254 - DNA, 547 bp, Homo sapiens
cttctgagtcacactccactttcttcaccaactcctaaaatgcaaactgctctttacctactgagttattctgcttatatttctaatttttctgattgtattatattctgattatattttggttctggttatattttcctactgtatttatatttactccactatgacattccaaataaagtggactattttaatgagtctatatgtgtgaaatgtgtgcctaaacattttgcacaaatggtggtatccctgccggcgaggaagcatgataggaatcaggctatttttgagtcagaggatctggatccggggccgaggctggcaccggctcctcctctgagctggcacctcctgggggaagcagctgagctgatgagcgaggttgcaaggtggggcgggagcttctgttaaagtccagctctgctaactctgccgcccgcccactgggtgaaatgctcctgaagcagctgtgcatctttcccgtccccgaggctcggtcttagaaagaggggcctgactcagactgaaatgcgatcacccagcactg

SEQ ID NO: 344255 - DNA, 659 bp, Homo sapiens
tgtttaattcacaaaaatgttttaatagccaactgtgaggggagggagaccagaagttcattagtgaggcacagtaaatgtgatgctgaggtatggcacctgtactgctaaaggagagcactggcatggataaaacatttggcatttcctaaaatcacctcctggcctgtctttcaagcaagtgaaaaggaagaagttgtggattgatttgggaagtacatttggaaaatgacctaatgtgataagctggaaccaatagggttaaaaaccctggtgaggtatacagccttgattctaaaagtggaaagtttgagtgaaggctagacccttggaaattgtaggggaggtagtgtaaaatgaagaatacatggccaggcgcggtggctcacgcctgtaatcccagcactttgggaggccaaggcaggcagatcacctgaggtcaggagttcgagaccagcctgaccaacatggagaaaccctgtctctactaaaaatacaaaattagccgggcatggtggcacatgcctgtaatcccagctactcgggaggctgaggcaggagactcgcttagacccaggaggcggaggttgtggtgcgctgagatcacaccattgcattccagcctgggcaacaagcgtgaagctccatctcaaaaaaac

SEQ ID NO: 344256 - DNA, 1831 bp, Homo sapiens
cagcctgtggccgctcccggctcggagtgtgatctaagcaggtcgcgtaccttcctcaggtgactccggccacagcccattgtccgcggccaccggcggagtttagccgcagacctcgaagcgccccggggtccttcccgaacggcagcggctgcggcgggtccatggagaagggccctgtgcgggcaccggcggagaagccgcggggcgccaggtgcagcaatgggttccccgagcgggatccgccgcggcccgggcccagcaggccggcggagaagcccccgcggcccgaggccaagagcgcgcagcccgcggacggctggaagggcgagcggccccgcagcgaggaggataacgagctgaacctccctaacctggcagccgcctactcgtccatcctgagctcgctgggcgagaacccccagcggcaagggctgctcaagacgccctggagggcggcctcggccatgcagttcttcaccaagggctaccaggagaccatctcagatgtcctaaacgatgctatatttgatgaagatcatgatgagatggtgattgtgaaggacatagacatgttttccatgtgtgagcatcacttggttccatttgttggaaaggtccatattggttatcttcctaacaagcaagtccttggcctcagcaaacttgcgaggattgtagaaatctatagtagaagactacaagttcaggagcgccttacaaaacaaattgctgtagcaatcacggaagccttgcggcctgctggagtcggggtagtggttgaagcaacaggtctgcagaaccatagcttccacgcacctgaacgagcacagaatgaactgacggtggaagacattatgagctgtgtccaacgttttaaccaaagcgtatcgtaccaacgatctgtgaaaatgcactggaagcttctggtcccggtttcctttgtggtctatgtgggtcttgtcctcattgtaactccgtatagatggtataggtattttaatcctggaagctgttgccttattaatgattatcttaaaatttcctccattggggcagcgtgggccaaattaaaacaaacaaaaccgcaactcctccacagaaacacaaacacagttattccatgaagtttagtatttggttgacatagtgctcttcaaattcatcccattaccctaaaagtaataactttgatgcttgctttaactttagtcccatctctgccactttgatgctatttgggttatgatggggcaagatggcagaggtattgggtttttttgtttttttccattcctctctacttctgtttcctagctttttctttctggagtttaagtacagtgatggttggcttgagtacctttttaaatctagcccagtataaacattagcctgcttaatatttagacatttataggtagaattctgagcactcaactcatgtttggcattttaaagtaaaaacaagtgtgacttcgaggaccaaagaaattgtcagctatacatttatctttatgaactcatttatattcctttttaatgactcgttgttctaacatttcctagaagtgttcttataaaggtctaatgtatccacaggctgttgtcttattagtaaatgcaaagtaatgactttgtctgttttactctagtctttagtacttcaaaattaccttttcatatccatgatcttgagtccatttgggggatttttaagaatttgatgtatttcaatacactgttcaaaattaaattgtttaattttatgtatgagtatgtatgttcctgaagttggtcctatttaaattattaaactattgtaactttg

SEQ ID NO: 344257 - DNA, 916 bp, Homo sapiens
cagcctgtggccgctcccggctcggagtgtgatctaagcaggtcgcgtaccttcctcaggtgactccggccacagcccattgtccgcggccaccggcggagtttagccgcagacctcgaagcgccccggggtccttcccgaacggcagcggctgcggcgggtccatggagaagggccctgtgcgggcaccggcggagaagccgcggggcgccaggtgcagcaatgggttccccgagcgggatccgccgcggcccgggcccagcaggccggcggagaagcccccgcggcccgaggccaagagcgcgcagcccgcggacggctggaagggcgagcggccccgcagcgaggaggataacgagctgaacctccctaacctggcagccgcctactcgtccatcctgagctcgctgggcgagaacccccagcggcaagggctgctcaagacgccctggagggcggcctcggccatgcagttcttcaccaagggctaccaggagaccatctcagatgtcctaaacgatgctatatttgatgaagatcatgatgagatggtgattgtgaaggacatagacatgttttccatgtgtgagcatcacttggttccatttgttggaaaggtccatattggttatcttcctaacaagcaagtccttggcctcagcaaacttgcgaggattgtagaaatctatagtagaagactacaagttcaggagcgccttacaaaacaaattgctgtagcaatcacggaagccttgcggcctgctggagtcggggtagtggttgaagcaacgtaagtctgcatctgcctttagtaacgtcataatggtgcactagaagtgatcttgctatttagtgcttctcatattttgtagcaccaggtgatgccacacaactgatatgataactgtagatttcc

SEQ ID NO: 344258 - DNA, 2867 bp, Homo sapiens
cagcctgtggccgctcccggctcggagtgtgatctaagcaggtcgcgtaccttcctcaggtgactccggccacagcccattgtccgcggccaccggcggagtttagccgcagacctcgaagcggccctgtgcgggcaccggcggagaagccgcggggcgccaggtgcagcaatgggttccccgagcgggatccgccgcggcccgggcccagcaggccggcggagaagcccccgcggcccgaggccaagagcgcgcagcccgcggacggctggaagggcgagcggccccgcagcgaggaggataacgagctgaacctccctaacctggcagccgcctactcgtccatcctgagctcgctgggcgagaacccccagcggcaagggctgctcaagacgccctggagggcggcctcggccatgcagttcttcaccaagggctaccaggagaccatctcagatgtcctaaacgatgctatatttgatgaagatcatgatgagatggtgattgtgaaggacatagacatgttttccatgtgtgagcatcacttggttccatttgttggaaaggtccatattggttatcttcctaacaagcaagtccttggcctcagcaaacttgcgaggattgtagaaatctatagtagaagactacaagttcaggagcgccttacaaaacaaattgctgtagcaatcacggaagccttgcggcctgctggagtcggggtagtggttgaagcaacacacatgtgtatggtaatgcgaggtgtacagaaaatgaacagcaaaactgtgaccagcacaatgttgggtgtgttccgggaggatccaaagactcgggaagagttcctgactctcattaggagctgagcttcattcagtgtgtgtgcgttggttgccgatcgtactgccagtagcattgtctgtctgtccggtcttgtttgtacattccattttcaattgttacagatgtgaactttattccttgtcactaattatatttaaaattatttctaggaagtcaaataaatataataaagggttgagccctctactttcttcttgccacctttttgtggcaatattaaagtgaactgctaatagtgtaagtacgtgcacaaaaccactgccagataaccagaggggcctgggaagggagaagaattagtgtatttttttcaaatagtacagtaatttgcctcataagcataggagcattgggaatgagagggaactgtgcccagtatactgttttttttcttcctccaataaaagtggtgtagtgccgaaagtgctaaaatatttagtgcggtattgctctgtgaattcaagttcaacagacttcactttggtcatgtttattaaaccaccagtgacatttaaaaatatatttttagcagtcgtaatgttagtcaccaagggaaggtggtggaatgtctatgtttttgattttactgtgagttaaaaaggcacatttctaccttctattgtttttaaattcaagaatagggaattagttcctggtgttgtttacgagtgtattctcgtgtcaacatacagggatttagacatttaactctctgtgccttgataagaatatcatttagagtgtagatacttttgcctttttaaaaaagccattattttatgagacttagtactcacactgcaaataactagtcagctcagttttaactttataggtttattgagtttcctttgtgtgatccatgtagatgcctcaaaatgtttcttcttcttcttttttttaatcttataagatatttttctaagtatttccagaaacatttgagagtgcccatcattttcaggtctgcagaaccatagcttccacgcacctgaacgagcacagaatgaactgacggtggaagacattatgagctgtgtccaacgttttaaccaaagcgtatcgtaccaacgatctgtgaaaatgcactggaagcttctggtcccggtttcctttgtggtctatgtgggtcttgtcctcattgtaactccgtatagatggtataggtattttaatcctggaagctgttgccttattaatgattatcttaaaatttcctccattggggcagcgtgggccaaattaaaacaaacaaaaccgcaactcctccacagaaacacaaacacagttattccatgaagtttagtatttggttgacatagtgctcttcaaattcatcccattaccctaaaagtaataactttgatgcttgctttaactttagtcccatctctgccactttgatgctatttgggttatgatggggcaagatggcagaggtattgggtttttttgtttttttccattcctctctacttctgtttcctagctttttctttctggagtttaagtacagtgatggttggcttgagtacctttttaaatctagcccagtataaacattagcctgcttaatatttagacatttataggtagaattctgagcactcaactcatgtttggcattttaaagtaaaaacaagtgtgacttcgaggaccaaagaaattgtcagctatacatttatctttatgaactcatttatattcctttttaatgactcgttgttctaacatttcctagaagtgttcttataaaggtctaatgtatccacaggctgttgtcttattagtaaatgcaaagtaatgactttgtctgttttactctagtctttagtacttcaaaattaccttttcatatccatgatcttgagtccatttgggggatttttaagaatttgatgtatttcaatacactgttcaaaattaaattgtttaattttatgtatgagtatgtatgttcctgaagttggtcctatttaaattattaaactattgtaactttg

SEQ ID NO: 344259 - DNA, 2864 bp, Homo sapiens
cagcctgtggccgctcccggctcggagtgtgatctaagcaggtcgcgtaccttcctcaggtgactccggccacagcccattgtccgcggccaccggcggagtttagccgcagacctcgaagcgccccggggtccttcccgaacggcagcggctgcggcgggtccatggagaagggccctgtgcgggcaccggcggagaagccgcggggcgccaggtgcagcaatgggttccccgagcgggatccgccgcggcccgggcccagcaggccggcggagaagcccccgcggcccgaggccaagagcgcgcagcccgcggacggctggaagggcgagcggccccgcagcgaggaggataacgagctgaacctccctaacctggcagccgcctactcgtccatcctgagctcgctgggcgagaacccccagcggcaagggctgctcaagacgccctggagggcggcctcggccatgcagttcttcaccaagggctaccaggagaccatctcagatgtcctaaacgatgctatatttgatgaagatcatgatgagatggtgattgtgaaggacatagacatgttttccatgtgtgagcatcacttggttccatttgttggaaaggtccatattggttatcttcctaacaagcaagtccttggcctcagcaaacttgcgaggattgtagaaatctatagtagaagactacaagttcaggagcgccttacaaaacaaattgctgtagcaatcacggaagccttgcggcctgctggagtcggggtagtggttgaagcaacacacatgtgtatggtaatgcgaggtgtacagaaaatgaacagcaaaactgtgaccagcacaatgttgggtgtgttccgggaggatccaaagactcgggaagagttcctgactctcattaggagctgagcttcattcagtgtgtgtgcgttggttgccgatcgtactgccagtagcattgtctgtctgtccggtcttgtttgtacattccattttcaattgttacagatgtgaactttattccttgtcactaattatatttaaaattatttctaggaagtcaaataaatataataaagggttgagccctctactttcttcttgccacctttttgtggcaatattaaagtgaactgctaatagtgtaagtacgtgcacaaaaccactgccagataaccagaggggcctgggaagggagaagaattagtgtatttttttcaaatagtacagtaatttgcctcataagcataggagcattgggaatgagagggaactgtgcccagtatactgttttttttcttcctccaataaaagtggtgtagtgccgaaagtgctaaaatatttagtgcggtattgctctgtgaattcaagttcaacagacttcactttggtcatgtttattaaaccaccagtgacatttaaaaatatatttttagcagtcgtaatgttagtcaccaagggaaggtggtggaatgtctatgtttttgattttactgtgagttaaaaaggcacatttctaccttctattgtttttaaattcaagaatagggaattagttcctggtgttgtttacgagtgtattctcgtgtcaacatacagggatttagacatttaactctctgtgccttgataagaatatcatttagagtgtagatacttttgcctttttaaaaaagccattattttatgagacttagtactcacactgcaaataactagtcagctcagttttaactttataggtttattgagtttcctttgtgtgatccatgtagatgcctcaaaatgtttcttcttcttcttttttttaatcttataagatatttttctaagtatttccagaaacatttgagagtgcccatcattttcaggtctgcagaaccatagcttccacgcacctgaacgagcacagaatgaactgacggtggaagacattatgagctgtgtccaacgttttaaccaaagcgtatcgtaccaacgatctgtgaaaatgcactggaagcttctggtcccggtttcctttgtggtctatgtgggtcttgtcctcattgtaactccgtatagatggtataggtattttaatcctggaagctgttgccttattaatgattatcttaaaatttcctccattggggcagcgtgggccaaattaaaacaaacaaaaccgcaactcctccacagaaacacaaacacagttattccatgaagtttagtatttggttgacatagtgctcttcaaattcatcccattaccctaaaagtaataactttgatgcttgctttaactttagtcccatctctgccactttgatgctatttgggttatgatggggcaagatggcagaggtattgggtttttttgtttttttccattcctctctacttctgtttcctagctttttctttctggagtttaagtacagtgatggttggcttgagtacctttttaaatctagcccagtataaacattagcctgcttaatatttagacatttataggtagaattctgagcactcaactcatgtttggcattttaaagtaatgaactcatttatattcctttttaatgactcgttgttctaacatttcctagaagtgttcttataaaggtctaatgtatccacaggctgttgtcttattagtaaatgcaaagtaatgactttgtctgttttactctagtctttagtacttcaaaattaccttttcatatccatgatcttgagtccatttgggggatttttaagaatttgatgtatttcaatacactgttcaaaattaaattgtttaattttatgtatgagtatgtatgttcctgaagttggtcctatttaaattattaaactattgtaactttg

SEQ ID NO: 344260 - DNA, 2864 bp, Homo sapiens
cagcctgtggccgctcccggctcggagtgtgatctaagcaggtcgcgtaccttcctcaggtgactccggccacagcccattgtccgcggccaccggcggagtttagccgcagacctcgaagcgccccggggtccttcccgaacggcagcggctgcggcgggtccatggagaagggccctgtgcgggcaccggcggagaagccgcggggcgccaggtgcagcaatgggttccccgagcgggatccgccgcggcccgggcccagcaggccggcggagaagcccccgcggcccgaggccaagagcgcgcagcccgcggacggctggaagggcgagcggccccgcagcgaggaggataacgagctgaacctccctaacctggcagccgcctactcgtccatcctgagctcgctgggcgagaacccccagcggcaagggctgctcaagacgccctggagggcggcctcggccatgcagttcttcaccaagggctaccaggagaccatctcagatgtcctaaacgatgctatatttgatgaagatcatgatgagatggtgattgtgaaggacatagacatgttttccatgtgtgagcatcacttggttccatttgttggaaaggtccatattggttatcttcctaacaagcaagtccttggcctcagcaaacttgcgaggattgtagaaatctatagtagaagactacaagttcaggagcgccttacaaaacaaattgctgtagcaatcacggaagccttgcggcctgctggagtcggggtagtggttgaagcaacacacatgtgtatggtaatgcgaggtgtacagaaaatgaacagcaaaaagttcctgactctcattaggagctgagcttcattcagtgtgtgtgcgttggttgccgatcgtactgccagtagcattgtctgtctgtccggtcttgtttgtacattccattttcaattgttacagatgtgaactttattccttgtcactaattatatttaaaattatttctaggaagtcaaataaatataataaagggttgagccctctactttcttcttgccacctttttgtggcaatattaaagtgaactgctaatagtgtaagtacgtgcacaaaaccactgccagataaccagaggggcctgggaagggagaagaattagtgtatttttttcaaatagtacagtaatttgcctcataagcataggagcattgggaatgagagggaactgtgcccagtatactgttttttttcttcctccaataaaagtggtgtagtgccgaaagtgctaaaatatttagtgcggtattgctctgtgaattcaagttcaacagacttcactttggtcatgtttattaaaccaccagtgacatttaaaaatatatttttagcagtcgtaatgttagtcaccaagggaaggtggtggaatgtctatgtttttgattttactgtgagttaaaaaggcacatttctaccttctattgtttttaaattcaagaatagggaattagttcctggtgttgtttacgagtgtattctcgtgtcaacatacagggatttagacatttaactctctgtgccttgataagaatatcatttagagtgtagatacttttgcctttttaaaaaagccattattttatgagacttagtactcacactgcaaataactagtcagctcagttttaactttataggtttattgagtttcctttgtgtgatccatgtagatgcctcaaaatgtttcttcttcttcttttttttaatcttataagatatttttctaagtatttccagaaacatttgagagtgcccatcattttcaggtctgcagaaccatagcttccacgcacctgaacgagcacagaatgaactgacggtggaagacattatgagctgtgtccaacgttttaaccaaagcgtatcgtaccaacgatctgtgaaaatgcactggaagcttctggtcccggtttcctttgtggtctatgtgggtcttgtcctcattgtaactccgtatagatggtataggtattttaatcctggaagctgttgccttattaatgattatcttaaaatttcctccattggggcagcgtgggccaaattaaaacaaacaaaaccgcaactcctccacagaaacacaaacacagttattccatgaagtttagtatttggttgacatagtgctcttcaaattcatcccattaccctaaaagtaataactttgatgcttgctttaactttagtcccatctctgccactttgatgctatttgggttatgatggggcaagatggcagaggtattgggtttttttgtttttttccattcctctctacttctgtttcctagctttttctttctggagtttaagtacagtgatggttggcttgagtacctttttaaatctagcccagtataaacattagcctgcttaatatttagacatttataggtagaattctgagcactcaactcatgtttggcattttaaagtaaaaacaagtgtgacttcgaggaccaaagaaattgtcagctatacatttatctttatgaactcatttatattcctttttaatgactcgttgttctaacatttcctagaagtgttcttataaaggtctaatgtatccacaggctgttgtcttattagtaaatgcaaagtaatgactttgtctgttttactctagtctttagtacttcaaaattaccttttcatatccatgatcttgagtccatttgggggatttttaagaatttgatgtatttcaatacactgttcaaaattaaattgtttaattttatgtatgagtatgtatgttcctgaagttggtcctatttaaattattaaactattgtaactttg

SEQ ID NO: 344261 - DNA, 1974 bp, Homo sapiens
cagcctgtggccgctcccggctcggagtgtgatctaagcaggtcgcgtaccttcctcaggtgactccggccacagcccattgtccgcggccaccggcggagtttagccgcagacctcgaagcgccccggggtccttcccgaacggcagcggctgcggcgggtccatggagaagggccctgtgcgggcaccggcggagaagccgcggggcgccaggtgcagcaatgggttccccgagcgggatccgccgcggcccgggcccagcaggccggcggagaagcccccgcggcccgaggccaagagcgcgcagcccgcggacggctggaagggcgagcggccccgcagcgaggaggataacgagctgaacctccctaacctggcagccgcctactcgtccatcctgagctcgctgggcgagaacccccagcggcaagggctgctcaagacgccctggagggcggcctcggccatgcagttcttcaccaagggctaccaggagaccatctcagatgtcctaaacgatgctatatttgatgaagatcatgatgagatggtgattgtgaaggacatagacatgttttccatgtgtgagcatcacttggttccatttgttggaaaggtccatattggttatcttcctaacaagcaagtccttggcctcagcaaacttgcgaggattgtagaaatctatagtagaagactacaagttcaggagcgccttacaaaacaaattgctgtagcaatcacggaagccttgcggcctgctggagtcggggtagtggttgaagcaacacacatgtgtatggtaatgcgaggtgtacagaaaatgaacagcaaaactgtgaccagcacaatgttgggtgtgttccgggaggatccaaagactcgggaagagttcctgactctcattaggagctgagcttcattcagtgtgtaggtctgcagaaccatagcttccacgcacctgaacgagcacagaatgaactgacggtggaagacattatgagctgtgtccaacgttttaaccaaagcgtatcgtaccaacgatctgtgaaaatgcactggaagcttctggtcccggtttcctttgtggtctatgtgggtcttgtcctcattgtaactccgtatagatggtataggtattttaatcctggaagctgttgccttattaatgattatcttaaaatttcctccattggggcagcgtgggccaaattaaaacaaacaaaaccgcaactcctccacagaaacacaaacacagttattccatgaagtttagtatttggttgacatagtgctcttcaaattcatcccattaccctaaaagtaataactttgatgcttgctttaactttagtcccatctctgccactttgatgctatttgggttatgatggggcaagatggcagaggtattgggtttttttgtttttttccattcctctctacttctgtttcctagctttttctttctggagtttaagtacagtgatggttggcttgagtacctttttaaatctagcccagtataaacattagcctgcttaatatttagacatttataggtagaattctgagcactcaactcatgtttggcattttaaagtaaaaacaagtgtgacttcgaggaccaaagaaattgtcagctatacatttatctttatgaactcatttatattcctttttaatgactcgttgttctaacatttcctagaagtgttcttataaaggtctaatgtatccacaggctgttgtcttattagtaaatgcaaagtaatgactttgtctgttttactctagtctttagtacttcaaaattaccttttcatatccatgatcttgagtccatttgggggatttttaagaatttgatgtatttcaatacactgttcaaaattaaattgtttaattttatgtatgagtatgtatgttcctgaagttggtcctatttaaattattaaactattgtaactttg

SEQ ID NO: 344262 - DNA, 418 bp, Homo sapiens
tctcaaactgagctccttatcacatccacagttcaggagcgccttacaaaacaaattgctgtagcaatcacggaagccttgcggcctgctggagtcggggtagtggttgaagcaacgtaagtctgcatctgcctttagtaacgtcataatggtgcactagaagtgatcttgctatttagtgcttctcatattttgtagcaccaggtgatgccacacaactgatatgataactgtagatttccatccctgagcctaaagctcttttaccactttcatttactgttactgatataggaacagaatatgggagaagtattttttgagggtaggatggggcttgtggaggcatagggagttaaaagcacaggtgtagagatttgcataatcaatagccttttttttttttgagatggagcct

SEQ ID NO: 344263 - DNA, 601 bp, Homo sapiens
tttttccattcctctctacttctgtttcctagctttttctttctggagtttaagtacagtgatggttggcttgagtacctttttaaatctagcccagtataaacattagcctgcttaatatttagacatttataggtagaattctgagcactcaactcatgtttggcattttaaagtaaaaacaagtgtgacttcgaggaccaaagaaattgtcagctatacatttatctttatgaactcatttatattcctttttaatgactcgttgttctaacatttcctagaagtgttcttataaaggtctaatgtatccacaggctgttgtcttattagtaaatgcaaagtaatgactttgtctgttttactctagtctttagtacttcaaaattaccttttcatatccatgatcttgagtccatttgggggatttttaagaatttgatgtatttcaatacactgttcaaaattaaattgtttaattttatgtatgagtatgtatgttcctgaagttggtcctatttaaattattaaactattgtaactttgttcttgtgaaagttgtttctttttcaaccaccactataaatatttaaataacttg

SEQ ID NO: 344264 - DNA, 2918 bp, Homo sapiens
cagcctgtggccgctcccggctcggagtgtgatctaagcaggtcgcgtaccttcctcaggtgactccggccacagcccattgtccgcggccaccggcggagtttagccgcagacctcgaagcgccccggggtccttcccgaacggcagcggctgcggcgggtccatggagaagggccctgtgcgggcaccggcggagaagccgcggggcgccaggtgcagcaatgggttccccgagcgggatccgccgcggcccgggcccagcaggccggcggagaagcccccgcggcccgaggccaagagcgcgcagcccgcggacggctggaagggcgagcggccccgcagcgaggaggataacgagctgaacctccctaacctggcagccgcctactcgtccatcctgagctcgctgggcgagaacccccagcggcaagggctgctcaagacgccctggagggcggcctcggccatgcagttcttcaccaagggctaccaggagaccatctcagatgtcctaaacgatgctatatttgatgaagatcatgatgagatggtgattgtgaaggacatagacatgttttccatgtgtgagcatcacttggttccatttgttggaaaggtccatattggttatcttcctaacaagcaagtccttggcctcagcaaacttgcgaggattgtagaaatctatagtagaagactacaagttcaggagcgccttacaaaacaaattgctgtagcaatcacggaagccttgcggcctgctggagtcggggtagtggttgaagcaacacacatgtgtatggtaatgcgaggtgtacagaaaatgaacagcaaaactgtgaccagcacaatgttgggtgtgttccgggaggatccaaagactcgggaagagttcctgactctcattaggagctgagcttcattcagtgtgtgtgcgttggttgccgatcgtactgccagtagcattgtctgtctgtccggtcttgtttgtacattccattttcaattgttacagatgtgaactttattccttgtcactaattatatttaaaattatttctaggaagtcaaataaatataataaagggttgagccctctactttcttcttgccacctttttgtggcaatattaaagtgaactgctaatagtgtaagtacgtgcacaaaaccactgccagataaccagaggggcctgggaagggagaagaattagtgtatttttttcaaatagtacagtaatttgcctcataagcataggagcattgggaatgagagggaactgtgcccagtatactgttttttttcttcctccaataaaagtggtgtagtgccgaaagtgctaaaatatttagtgcggtattgctctgtgaattcaagttcaacagacttcactttggtcatgtttattaaaccaccagtgacatttaaaaatatatttttagcagtcgtaatgttagtcaccaagggaaggtggtggaatgtctatgtttttgattttactgtgagttaaaaaggcacatttctaccttctattgtttttaaattcaagaatagggaattagttcctggtgttgtttacgagtgtattctcgtgtcaacatacagggatttagacatttaactctctgtgccttgataagaatatcatttagagtgtagatacttttgcctttttaaaaaagccattattttatgagacttagtactcacactgcaaataactagtcagctcagttttaactttataggtttattgagtttcctttgtgtgatccatgtagatgcctcaaaatgtttcttcttcttcttttttttaatcttataagatatttttctaagtatttccagaaacatttgagagtgcccatcattttcaggtctgcagaaccatagcttccacgcacctgaacgagcacagaatgaactgacggtggaagacattatgagctgtgtccaacgttttaaccaaagcgtatcgtaccaacgatctgtgaaaatgcactggaagcttctggtcccggtttcctttgtggtctatgtgggtcttgtcctcattgtaactccgtatagatggtataggtattttaatcctggaagctgttgccttattaatgattatcttaaaatttcctccattggggcagcgtgggccaaattaaaacaaacaaaaccgcaactcctccacagaaacacaaacacagttattccatgaagtttagtatttggttgacatagtgctcttcaaattcatcccattaccctaaaagtaataactttgatgcttgctttaactttagtcccatctctgccactttgatgctatttgggttatgatggggcaagatggcagaggtattgggtttttttgtttttttccattcctctctacttctgtttcctagctttttctttctggagtttaagtacagtgatggttggcttgagtacctttttaaatctagcccagtataaacattagcctgcttaatatttagacatttataggtagaattctgagcactcaactcatgtttggcattttaaagtaaaaacaagtgtgacttcgaggaccaaagaaattgtcagctatacatttatctttatgaactcatttatattcctttttaatgactcgttgttctaacatttcctagaagtgttcttataaaggtctaatgtatccacaggctgttgtcttattagtaaatgcaaagtaatgactttgtctgttttactctagtctttagtacttcaaaattaccttttcatatccatgatcttgagtccatttgggggatttttaagaatttgatgtatttcaatacactgttcaaaattaaattgtttaattttatgtatgagtatgtatgttcctgaagttggtcctatttaaattattaaactattgtaactttg

SEQ ID NO: 344265 - DNA, 1919 bp, Homo sapiens
cagcctgtggccgctcccggctcggagtgtgatctaagcaggtcgcgtaccttcctcaggtgactccggccacagcccattgtccgcggccaccggcggagtttagccgcagacctcgaagcgccccggggtccttcccgaacggcagcggctgcggcgggtccatggagaagggccctgtgcgggcaccggcggagaagccgcggggcgccaggtgcagcaatgggttccccgagcgggatccgccgcggcccgggcccagcaggccggcggagaagcccccgcggcccgaggccaagagcgcgcagcccgcggacggctggaagggcgagcggccccgcagcgaggaggataacgagctgaacctccctaacctggcagccgcctactcgtccatcctgagctcgctgggcgagaacccccagcggcaagggctgctcaagacgccctggagggcggcctcggccatgcagttcttcaccaagggctaccaggagaccatctcagatgtcctaaacgatgctatatttgatgaagatcatgatgagatggtgattgtgaaggacatagacatgttttccatgtgtgagcatcacttggttccatttgttggaaaggtccatattggttatcttcctaacaagcaagtccttggcctcagcaaacttgcgaggattgtagaaatctatagtagaagactacaagttcaggagcgccttacaaaacaaattgctgtagcaatcacggaagccttgcggcctgctggagtcggggtagtggttgaagcaacgaagtcaaataaatataataaagggttgagccctctactttcttcttgccacctttttgtggcaatattaaagtgaactgctaatagtaggtctgcagaaccatagcttccacgcacctgaacgagcacagaatgaactgacggtggaagacattatgagctgtgtccaacgttttaaccaaagcgtatcgtaccaacgatctgtgaaaatgcactggaagcttctggtcccggtttcctttgtggtctatgtgggtcttgtcctcattgtaactccgtatagatggtataggtattttaatcctggaagctgttgccttattaatgattatcttaaaatttcctccattggggcagcgtgggccaaattaaaacaaacaaaaccgcaactcctccacagaaacacaaacacagttattccatgaagtttagtatttggttgacatagtgctcttcaaattcatcccattaccctaaaagtaataactttgatgcttgctttaactttagtcccatctctgccactttgatgctatttgggttatgatggggcaagatggcagaggtattgggtttttttgtttttttccattcctctctacttctgtttcctagctttttctttctggagtttaagtacagtgatggttggcttgagtacctttttaaatctagcccagtataaacattagcctgcttaatatttagacatttataggtagaattctgagcactcaactcatgtttggcattttaaagtaaaaacaagtgtgacttcgaggaccaaagaaattgtcagctatacatttatctttatgaactcatttatattcctttttaatgactcgttgttctaacatttcctagaagtgttcttataaaggtctaatgtatccacaggctgttgtcttattagtaaatgcaaagtaatgactttgtctgttttactctagtctttagtacttcaaaattaccttttcatatccatgatcttgagtccatttgggggatttttaagaatttgatgtatttcaatacactgttcaaaattaaattgtttaattttatgtatgagtatgtatgttcctgaagttggtcctatttaaattattaaactattgtaactttg

SEQ ID NO: 344266 - DNA, 3121 bp, Homo sapiens
  misc_feature (2946)..(2946): n is a, c, g, or t
cagcctgtggccgctcccggctcggagtgtgatctaagcaggtcgcgtaccttcctcaggtgactccggccacagcccattgtccgcggccaccggcggagtttagccgcagacctcgaagcgccccggggtccttcccgaacggcagcggctgcggcgggtccatggagaagggccctgtgcgggcaccggcggagaagccgcggggcgccaggtgcagcaatgggttccccgagcgggatccgccgcggcccgggcccagcaggccggcggagaagcccccgcggcccgaggccaagagcgcgcagcccgcggacggctggaagggcgagcggccccgcagcgaggaggataacgagctgaacctccctaacctggcagccgcctactcgtccatcctgagctcgctgggcgagaacccccagcggcaagggctgctcaagacgccctggagggcggcctcggccatgcagttcttcaccaagggctaccaggagaccatctcagatgtcctaaacgatgctatatttgatgaagatcatgatgagatggtgattgtgaaggacatagacatgttttccatgtgtgagcatcacttggttccatttgttggaaaggtccatattggttatcttcctaacaagcaagtccttggcctcagcaaacttgcgaggattgtagaaatctatagtagaagactacaagttcaggagcgccttacaaaacaaattgctgtagcaatcacggaagccttgcggcctgctggagtcggggtagtggttgaagcaacacacatgtgtatggtaatgcgaggtgtacagaaaatgaacagcaaaactgtgaccagcacaatgttgggtgtgttccgggaggatccaaagactcgggaagagttcctgactctcattaggagctgagcttcattcagtgtgtgtgcgttggttgccgatcgtactgccagtagcattgtctgtctgtccggtcttgtttgtacattccattttcaattgttacagatgtgaactttattccttgtcactaattatatttaaaattatttctaggaagtcaaataaatataataaagggttgagccctctactttcttcttgccacctttttgtggcaatattaaagtgaactgctaatagtgtaagtacgtgcacaaaaccactgccagataaccagaggggcctgggaagggagaagaattagtgtatttttttcaaatagtacagtaatttgcctcataagcataggagcattgggaatgagagggaactgtgcccagtatactgttttttttcttcctccaataaaagtggtgtagtgccgaaagtgctaaaatatttagtgcggtattgctctgtgaattcaagttcaacagacttcactttggtcatgtttattaaaccaccagtgacatttaaaaatatatttttagcagtcgtaatgttagtcaccaagggaaggtggtggaatgtctatgtttttgattttactgtgagttaaaaaggcacatttctaccttctattgtttttaaattcaagaatagggaattagttcctggtgttgtttacgagtgtattctcgtgtcaacatacagggatttagacatttaactctctgtgccttgataagaatatcatttagagtgtagatacttttgcctttttaaaaaagccattattttatgagacttagtactcacactgcaaataactagtcagctcagttttaactttataggtttattgagtttcctttgtgtgatccatgtagatgcctcaaaatgtttcttcttcttcttttttttaatcttataagatatttttctaagtatttccagaaacatttgagagtgcccatcattttcaggtctgcagaaccatagcttccacgcacctgaacgagcacagaatgaactgacggtggaagacattatgagctgtgtccaacgttttaaccaaagcgtatcgtaccaacgatctgtgaaaatgcactggaagcttctggtcccggtttcctttgtggtctatgtgggtcttgtcctcattgtaactccgtatagatggtataggtattttaatcctggaagctgttgccttattaatgattatcttaaaatttcctccattggggcagcgtgggccaaattaaaacaaacaaaaccgcaactcctccacagaaacacaaacacagttattccatgaagtttagtatttggttgacatagtgctcttcaaattcatcccattaccctaaaagtaataactttgatgcttgctttaactttagtcccatctctgccactttgatgctatttgggttatgatggggcaagatggcagaggtattgggtttttttgtttttttccattcctctctacttctgtttcctagctttttctttctggagtttaagtacagtgatggttggcttgagtacctttttaaatctagcccagtataaacattagcctgcttaatatttagacatttataggtagaattctgagcactcaactcatgtttggcattttaaagtaaaaacaagtgtgacttcgaggaccaaagaaattgtcagctatacatttatctttatgaactcatttatattcctttttaatgactcgttgttctaacatttcctagaagtgttcttataaaggtctaatgtatccacaggctgttgtcttattagtaaatgcaaagtaatgactttgtctgttttactctagtctttagtacttcaaaattaccttttcatatccatgatcttgagtccatttgggggatttttaagaatttgatgtatttcaatacactgttcaaaattaaattgtttaattttatgtatgagtatgtatgttcctgaagttggtcctatttaaattattaaactattgtaactttgaaaaaaaaaaaatgactactttgagacnagcagtcagtgctgcaagcccaacgttctgggggtgaccaagacacgactgcccgtctgtgctggccctattaaggactgggttcggagattctttactgacctggacctgaaaaactcaggggttcacaaacttaaatgcctagcaaccttaccgttttcagaggggaggagca

SEQ ID NO: 344267 - DNA, 2864 bp, Homo sapiens
cagcctgtggccgctcccggctcggagtgtgatctaagcaggtcgcgtaccttcctcaggtgactccggccacagcccattgtccgcggccaccggcggagtttagccgcagacctcgaagcgccccggggtccttcccgaacggcagcggctgcggcgggtccatggagaagggccctgtgcgggcaccggcggagaagccgcggggcgccaggtgcagcaatgggttccccgagcgggatccgccgcggcccgggcccagcaggccggcggagaagcccccgcggcccgaggccaagagcgcgcagcccgcggacggctggaagggcgagcggccccgcagcgaggaggataacgagctgaacctccctaacctggcagccgcctactcgtccatcctgagctcgctgggcgagaacccccagcggcaagggctgctcaagacgccctggagggcggcctcggccatgcagttcttcaccaagggctaccaggagaccatctcagatgtcctaaacgatgctatatttgatgaagatcatgatgagatggtgattgtgaaggacatagacatgttttccatgtgtgagcatcacttggttccatttgttggaaaggtccatattggttatcttcctaacaagcaagtccttggcctcagcaaacttgcgaggattgtagaaatctatagtagaagactacaagttcaggagcgccttacaaaacaaattgctgtagcaatcacggaagccttgcggcctgctggagtcggggtagtggttgaagcaacacacatgtgtatggtaatgcgaggtgtacagaaaatgaacagcaaaactgtgaccagcacaatgttgggtgtgttccgggaggatccaaagactcgggaagagttcctgactctcattaggagctgagcttcattcagtgtgtgtgcgttggttgccgatcgtactgccagtagcattgtctgtctgtccggtcttgtttgtacattccattttcaattgttacagatgtgaactttattccttgtcactaattatatttaaaattatttctaggaagtcaaataaatataataaagggttgagccctctactttcttcttgccacctttttgtggcaatattaaagtgaactgctaatagtgtaagtacgtgcacaaaaccactgccagataaccagaggggcctgggaagggagaagaattagtgtatttttttcaaatagtacagtaatttgcctcataagcataggagcattgggaatgagagggaactgtgcccagtatactgttttttttcttcctccaataaaagtggtgtagtgccgaaagtgctaaaatatttagtgcggtattgctctgtgaattcaagttcaacagacttcactttggtcatgtttattaaaccaccagtgacatttaaaaatatatttttagcagtcgtaatgttagtcaccaagggaaggtggtggaatgtctatgtttttgattttactgtgagttaaaaaggcacatttctaccttctattgtttttaaattcaagaatagggaattagttcctggtgttgtttacgagtgtattctcgtgtcaacatacagggatttagacatttaactctctgtgccttgataagaatatcatttagagtgtagatacttttgcctttttaaaaaagccattattttatgagacttagtactcacactgcaaataactagtcagctcagttttaactttataggtttattgagtttcctttgtgtgatccatgtagatgcctcaaaatgtttcttcttcttcttttttttaatcttataagatatttttctaagtatttccagaaacatttgagagtgcccatcattttcaggtctgcagaaccatagcttccacgcacctgaacgagcacagaatgaactgacggtggaagacattatgagctgtgtccaacgttttaaccaaagcgtatcgtaccaacgatctgtgaaaatgcactggaagcttctggtcccggtttcctttgtggtctatgtgggtcttgtcctcattgtaactccgtatagatggtataggtattttaatcctggaagctgttgccttattaatgattatcttaaaatttcctccattggggcagcgtgggccaaattaaaacaaacaaaaccgcaactcctccacagaaacacaaacacagttattccatgaagtttagtatttggttgacatagtgctcttcaaattcatcccattaccctatgctatttgggttatgatggggcaagatggcagaggtattgggtttttttgtttttttccattcctctctacttctgtttcctagctttttctttctggagtttaagtacagtgatggttggcttgagtacctttttaaatctagcccagtataaacattagcctgcttaatatttagacatttataggtagaattctgagcactcaactcatgtttggcattttaaagtaaaaacaagtgtgacttcgaggaccaaagaaattgtcagctatacatttatctttatgaactcatttatattcctttttaatgactcgttgttctaacatttcctagaagtgttcttataaaggtctaatgtatccacaggctgttgtcttattagtaaatgcaaagtaatgactttgtctgttttactctagtctttagtacttcaaaattaccttttcatatccatgatcttgagtccatttgggggatttttaagaatttgatgtatttcaatacactgttcaaaattaaattgtttaattttatgtatgagtatgtatgttcctgaagttggtcctatttaaattattaaactattgtaactttg

SEQ ID NO: 344268 - DNA, 1919 bp, Homo sapiens
cagcctgtggccgctcccggctcggagtgtgatctaagcaggtcgcgtaccttcctcaggtgactccggccacagcccattgtccgcggccaccggcggagtttagccgcagacctcgaagcgccccggggtccttcccgaacggcagcggctgcggcgggtccatggagaagggccctgtgcgggcaccggcggagaagccgcggggcgccaggtgcagcaatgggttccccgagcgggatccgccgcggcccgggcccagcaggccggcggagaagcccccgcggcccgaggccaagagcgcgcagcccgcggacggctggaagggcgagcggccccgcagcgaggaggataacgagctgaacctccctaacctggcagccgcctactcgtccatcctgagctcgctgggcgagaacccccagcggcaagggctgctcaagacgccctggagggcggcctcggccatgcagttcttcaccaagggctaccaggagaccatctcagatgtcctaaacgatgctatatttgatgaagatcatgatgagatggtgattgtgaaggacatagacatgttttccatgtgtgagcatcacttggttccatttgttggaaaggtccatattggttatcttcctaacaagcaagtccttggcctcagcaaacttgcgaggattgtagaaatctatagtagaagactacaagttcaggagcgccttacaaaacaaattgctgtagcaatcacggaagccttgcggcctgctggagtcggggtagtggttgaagcaacacacatgtgtatggtaatgcgaggtgtacagaaaatgaacagcaaaactgtgaccagcacaatgttgggtgtgttccgggaggatccaaagactcgggaagagttcctgactctcattaggagctgagcttcattcagtgtgtgtgcgttggttgccgatcgtactgccagtagcattgtctgtctgtccggtcttgtttgtacattccattttcaattgttacagatgtgaactttattccttgtcactaattatatttaaaattatttctaggaagtcaaataaatataataaagggttgagccctctactttcttcttgccacctttttgtggcaatattaaagtgaactgctaatagtgtaagtacgtgcacaaaaccactgccagataaccagaggggcctgggaagggagaagaattagtgtatttttttcaaatagtacagtaatttgcctcataagcataggagcattgggaatgagagggaactgtgcccagtatactgttttttttcttcctccaataaaagtggtgtagtgccgaaagtgctaaaatatttagtgcggtattgctctgtgaattcaagttcaacagacttcactttggtcatgtttattaaaccaccagtgacatttaaaaatatatttttagcagtcgtaatgttagtcaccaagggaaggtggtggaatgtctatgtttttgattttactgtgagttaaaaaggcacatttctaccttctattgtttttaaattcaagaatagggaattagttcctggtgttgtttacgagtgtattctcgtgtcaacatacagggatttagacatttaactctctgtgccttgataagaatatcatttagagtgtagatacttttgcctttttaaaaaagccattattttatgagacttagtactcacactgcaaataactagtcagctcagttttaactttataggtttattgagtttcctttgtgtgatccatgtagatgcctcaaaatgtttcttcttcttcttttttttaatcttataagatatttttctaagtatttccagaaacatttgagagtgcccatcattttcaaatgtttcttcttcttcttttttttaatcttataagattaa

SEQ ID NO: 344269 - DNA, 441 bp, Homo sapiens
tgctctatcttggatggggggagggcaaaatgagctgggcaggcttgtgctccggttccctaatggtgacagcagcaaccagccatgatgggcatgggtggacaatccccaggcctcaggtggagtgttctgcttggtaaagagacagtagcagctgcactgaggacttgcctgggtggtcatagtctgggccaatgggtgagaaacatgcaacccccactcataccccagtcttagtggggctggcccctccagcagtgaaagcctatgcctagcttacaccttcttggtcgtaagagcaagtcccaaaggcaactcacaccctgttcatatcctaatccccatcctggggttgcccacttcctggcagcagcagctgcagtgcacaccttgctcacttcctacgccaggtgagaaggcactcccagctcactcccaagt

SEQ ID NO: 344270 - DNA, 310 bp, Homo sapiens
aaatagctatcaacacacatctttacccagttacttggcctttataccttgtactatggatcaactactcatgctcctaagtccattatttctgtttatattgtacattccatttccacttgcctactaataggcattgcctaagaaattctcccctctcttttctacattgtattttcactactaagtattaccattaacatgttaaaaaaattcttttaaggaaaaaaaaaacccaaatattttggctctgttatttcccctttattttattttatttttattttttttgagatggagtctcactctg

SEQ ID NO: 344271 - DNA, 229 bp, Homo sapiens
tcattctcttcagctctaaaagtggtgactaatgcctgccctgcagtgatgtggggagcctaggagctaggttcttaggcagcgccccgcacttcaacatgactgaataatggccttctcttggtctcaggcccaccattctcgtgggtgaaactggaggttggctgactgggcgaggccactgcttaggaccttcctcctgtaaaacagggggagtggcctcagctct

SEQ ID NO: 344272 - DNA, 468 bp, Homo sapiens
aatgacttcctacaacctcttcctctgaaatctaagggaaaatgaaagaatttaacacagagataaagagaatttggaacctgagggcgaatgtgggaactgcctcatataaatcagcttttatctcatctgagatgaaagatgtgtaatcatttattgaggatgatgatggggcagcttgaagatagagacccagatagcaaagggtgctgggaaaaacattacaaggaaggtctaagaatatctgcaaaggagagagcttttctgggaatgtcagtcttaaccaaaggttactgaaagatgcttctataaaggaggatcaccttcctacccacaaagtgttgtgggaagtcagggatcccaaacagagggaccggctgaagccatggcagaagaacgtggattgtgaagatttcatggacatttattagttccccaagttaatacttgtataatttcttatgcctg

SEQ ID NO: 344273 - DNA, 532 bp, Homo sapiens
tgtgttgcccaggctggtctcgaacttctgagctcaagcaatcctcccacctcagcctcctaaacatagtaggttcttaaatgttttgatgggtgaatgaattaattgatagttgacaggactttctaactggatagcagatggaactgggaagtagaggagacagattactgaaaattggaagaacgcaaatatggaatcctgttcagcgggtgtttgctgagcccttcttgtgcaaaaggctgaagcgggaagtgcaaaataggccccagctgctggtgtactccagggaggggtccagagcccagaatctgcccatatacaccagttctaggtcttagtctcaccaacctaagatgtcagtttcctttctgctcacccacctgtctgaatttgagaagtagatacttctttgttttgttttgagtattactgtccacaggcatagaatccatgtgactgtgactttaaggctgtatattattccattatattgatgtattatcatttaataaaaccattccctggcaaa

SEQ ID NO: 344274 - DNA, 390 bp, Homo sapiens
ccgctgcacctggcctcattcctgtgttttttatttaaacaggtacaaaggaatgtagttcacaccttgtcccaaacctgggtactgcagtacccaagtgcattgcaaaacaccctgatggacagtgacatcttgagctttactcagtactctttgcaaatttttgacaagaaaagtgcaagttactaaggtggtaagaagtggagggatggtcaacatacaggtgtgtgtcgagggtgaggaggtaaaggtcccacaattgtcaggcagaggatgtctgggcattgcctttcttatactcccttatcagcccagaagctggaagactcctgcttccctttgagtggtctctgtcacagtcacggcaccctcccctgtgactcccagcca

SEQ ID NO: 344275 - DNA, 396 bp, Homo sapiens
tgctgcactccagcctgggcgacagagtgagacaccgtctcctccaccacccccaaaaaaacttattaagaaattaaatactaaaatattaaataaaaatatggatatatacagctgggcgtggtggctcacgcctgtaatcccagcactttgggaggccgaagccggcagatcacctgaggtcaggagtttgagaccagcctggtcaacatggcaaaaccctgtctgtactagaaatacaaaaattagtcaggcgtggtggcaggcgcctgtaatcccagctacttgagggaagctgaagcatgagaatggcttgaacccgggaggtggaggttgtactgagctgagattgcgccactacactccagcctgggcaacacggtgaaactccatttc

SEQ ID NO: 344276 - DNA, 218 bp, Homo sapiens
tgagggcatgtctggctggcacatcacagtatctactctaccagctcacagttattaccgtggtactaaagtcagggtctctcagttacccttagtggtggcaagttaagcttatatgttaggaaattgggctactaggcagtagtcatgaagtcatgaggcttcaagatcaggcagatagccagttttttgttgtttttttgagatggggtctcact

SEQ ID NO: 344277 - DNA, 628 bp, Homo sapiens
tttttttttggagacagggtcttgctctgtcacccaggcttgagtgcagtggcatgatctcggctcactgcaacctgcgcctcccgggttcaagcgattctcctgcctcagcctccctagtagctgggactacaggcatgtaccaccatgcccaactaatttttgtatttttaatagagacggggttttgccatgttggtcaggctggtcttgaactcctgacctcaggtgatctgcccgcctcggcctcccaaagtgctggcattacaaaatgagccactgtgcctggccctcttttcacagtttttgacttaaaatctgttttatctgatacaggtatagctagtcttgcttactttgtttctggttgagtgaaatatcttcttctgttcctttacttttagtctatatatgtctttagaggtaaaatgattttcttgtaagcagcatataggtggatgtgtcatgtgtttgggaggccgagccgggagttttgcttgagcaggagtgcaagaccaacctaggcaacatagtgagatcccatttctacaaataaatgaatacataagtaatttaaaagctacagagggagaagagattaaaataggcccattcagccaggttgtgt

SEQ ID NO: 344278 - DNA, 261 bp, Homo sapiens
gattgcctcaactctaaggattgaactgatattgaagtttcattttaattaattacaaagtgcatcgtaaagtttcaaacagtaaagttttactagaatcaccagagttgaggtttaattaaaagacttttgaatctgagctttgattcaaatctctataggtatgttgactactgactatagttaagtaaatagaagagtcatattgtccacccacaattttttttttcttttcttttcttttgagacagggcctcactc

SEQ ID NO: 344279 - DNA, 328 bp, Homo sapiens
gagctgggccagtgtcggggtacccagcgggataaagggttcgggacctgggctccaaggagggggctgggaaggggtgttcagggaggactgagtgatggcttggaggcggctggaccaggaacacctcatgggagtttgcgaatggggaggggactctggagatggctgtgccaggcctgacttcattccttgcattcctcagcaggccccagactcctgatggtcctaagtgggggaaggtgagccagagagggccttctgggtactgccctccccccactccatcagtctgtctcagtctctctttacaccctcccccatccag

SEQ ID NO: 344280 - DNA, 389 bp, Homo sapiens
ctggttgtagtatatagagatacagattatataatcatagagtatcagaaggcttttaggaaactcagtgtaaatgttgcctgaaataaccccagtgtctcagaagcactatgaaatggagacaaactacagatagctgatatttcatgatctctgcaagcaacaactcccaattcaggtctaattctcagcattctgggcagagaacaccatgagatctttctcctgcatgtgttctaaaccctaattctattaccctcaataggtgttaagttaaaaaaaaagctgtgaaatatttcaaatttaagtataattgattaatgagaacaccataaaggtgctgtcaaataataataaatattaataaaaactctggccaaagacactct

SEQ ID NO: 344281 - DNA, 503 bp, Homo sapiens
tcaggttgttgcatccatcatatgaggctaaaactaatttctcagtatagaaattaaatgatgaaataaatgtaaaatatttacctcagtgcttgacacaaaaatcaggactcatatcatttctttcatttctggcagtacaaagataaactggtacacttctctttcctcaggaaactcagtgtaaatgttgcctgaaataaccccagtgtctcagaagcactatgaaatggagacaaactacagatagctgatatttcatgatctctgcaagcaacaactcccaattcaggtctaattctcagcattctgggcagagaacaccatgagatctttctcctgcatgtgttctaaaccctaattctattaccctcaataggtgttaagttaaaaaaaaagctgtgaaatatttcaaatttaagtataattgattaatgagaacaccataaaggtgctgtcaaataataataaatattaataaaaactctggccaaagacactct

SEQ ID NO: 344282 - DNA, 611 bp, Homo sapiens
cgcgcccggcccagtgtggcattgtttttaacagagtgtctttaaaaataaaggctttttaaaatataaatatagcatagaaactaaaagcagtatcaaatacctagaaagatgccaagtaactggaaaagcttacctgattttagaattatttttaggtggaaaggatgaaggaaagataatcttttaatgtataagttaagcttggtgcagtgacaaatgtgtatagtctcagctactctggacgtgggaggattgcttgagcctaagaatttgaggctgtaatcatacctgtgaatagcaactgcattccatcctgggcaacataccaagaccccatctctaaaaataaataaataaatcagtgtttaggttaaaaatacagtctacagtagtaaagtagccaaaatattctaaacctccttacaacaatacaaacagcatatacagtattttaaaacatccctccttagaagagatttatggatccttttggagaagatcaaaaatattgcccattaaattgtgttggaagttgtttttttctttagttatggaaagaaaaggaaaggaagggttcattgaagttctttttcagtaacttgctttgt

SEQ ID NO: 344283 - DNA, 284 bp, Homo sapiens
atttacagaggtctcccaatgcagtttctggagtctagactgtaaattcctgaagaacaggactgtcttcccagcacttagctctgtgaatgacacatcatagggggcccacaatcagtcattaaactggatggttctcaagtgcctatctgaggtcaggacagatttacagacaactctcctccagtcaagggcaaaagtgtacaatgatgcttccctgcaccctgagagggcagaaaagagacgtgggacatctgcccaacctcagtaaggcaggattcctc

SEQ ID NO: 344284 - DNA, 410 bp, Homo sapiens
aaatggggagttggggactaggggacctgattcttgttttatgttcaaaggagagtgaagcattctctccattaagaaataacctccttaagtgtattctcactttggagttttgccactcattcattcacctgacgatgattaaagatataccacattctgggcatgtactaggtgctagagtaacaaatcttgggccttgtcgtgtagagcagaaaggtatgggctcaactagctatgttacaacttctagagaaccaaaatagagcaaacaaagagtggtgtgggattataggaggagggagaaattccttctagggagaggagaatgatacacagagaaaagtgaggttagggaagacttttcacataggggaagtttgagtaggacttggaagggggagtagctg

SEQ ID NO: 344285 - DNA, 692 bp, Homo sapiens
catgcatggctagcttttgtatttttagaatagacagggtttcaccatgttgggcaggctggtctcaaactcctgacctcaggtgatctgcccaccttggcctcccaaagtgcagggtttacaggcgtgagccactgtacccgatcctcaaacagatatttctacaccaatgttcatagcagcaatattcacaatagccaaaaggtgaaatcaacccaactgctcatcaatagatgaatggacaaacaaaatatggtatgcatacatacaatggaatattattcaaccataaaaaggaatacaattctgacacatactacaacatggatgaaccttaatgacattatgctaggccagtcacaaaatgacaaatattgaatgattccatatatgtgaggtcctttgaatagtgagattcgtaacaaacagaaagtggaatgctggctgcaagggatgagggggtggaagatgaagtattatggtctaatgggtacagagtttcagtttgggacgatgaaaaagttctgacagatggcagtgatggttgcacaaaaatgtgaacatacctgaactgatcacttaaaaatgattaaaatggtaagctttatgttacatatgtatgatcacaattaaaaaaagacaactatttagacaaaaataatgaacataaatcatggattttcaacatatag

SEQ ID NO: 344286 - DNA, 275 bp, Homo sapiens
ttaaaggaaacattgatcctttaaaagatttggggaaggaaaaacttttttttcaaaacactctgccattgaggtgggagactggttcaggtttgaatggtacagtgctgtttggtgctttcattagtgtctctcaggatttttccagtctgaaaactccaaggcgagagatgtcatcccgagtggtagacagtgatccttacaagatgccagggaggccaacagtgcataacgtatagggatggacgggacaaaagaggagggtagaagaagag

SEQ ID NO: 344287 - DNA, 347 bp, Homo sapiens
agtttattcacaggatgagggagcaaggcggaggctggagggttttaagccagtgatgaaatgctcagatctctctggcagaggggagctttgagggtgaggcaaaaggacagtgagagatgaaggtgccaggacctaagtcgatgggaactgggacaaaggcctggggcagaccaaagacaaatttcaaacagaaaaaaaccctgacaactgtgtgtggcaaggagggtgagggacgggaaggttgactccagctctgtgattcccccttgcacagaggaaatgatcgcaggggaggatccggcgtgggcaggtggagccggaggtgcctggatatgtgcagtcgg

SEQ ID NO: 344288 - DNA, 436 bp, Homo sapiens
  misc_feature (350)..(350): n is a, c, g, or t
  misc_feature (405)..(405): n is a, c, g, or t
gactctccttcagcaactccagaagcttcagactttggtgatgggcaaggtttctcgaacctgcaagttagctggcacgcagactggcacctgcctcatggtgagcttcccagcagggtagcacagtgaccgcccctgcctggcccctgtctcccctctccctccacttgccaaggccaagtgctgtgctgtaggagaaaccacatggaggaactccactctgaggctgttcctcggtgaggcactctggtgatgtgactggtgggtgcagtccactggcctgaagaggagagtctgtgtccctgggtataaagctgtgctgtccagaggctgaagtccacagcccctcngtgttctctctcccctctttctctcccacaatacacataggtacacactctcatnatgcacatacatgtacacatacatgcatatt

SEQ ID NO: 344289 - DNA, 6016 bp, Homo sapiens
gactctccttcagcaactccagaagcttcagactttggtgatgggcaaggtttctcgaacctgcaagttagctggcacgcagactggcacctgcctcatggttgtggtgctgtgctttgccgttgcattcggcagcttctttcaaggctacgggccctatccttctgccaccaagatggctctgcccagccagcattccctgcaggagccctacacagcctccgtggtgagatccagaaacctgctgatctacgaggaacattctcccccagaggagtcatccagcccgggctcggctggggagctggggggctgggatagaggttcctccctgctcagggtgtcagggctggagtccaggccggatgtggatcttccccatttcattatctcgaatgagaccagcctggagaagtcagtgcttttggagctgcagcagcacctggtcagcgccaaactggaggggaatgaaacactaaaagttgtagaactcgacagaagagtgaacaccactttctaaagaggctgcctgcaccccctccctttcccttaactctacttttacatccccaaaccacctttgtcatcagcttttcctctttgccactggatcttcatggagacatgggcaagcattagtggcttcagattggagaccagcctgggacttccctgcagtgagagagcatctccccctggtccatgcccctcctgtgcagaagggagcctgcatccctcccttcctttctcttactgccataggaaattattttaggggttggaggtgggacaagcaggcttgtttccaccaatagtgccaaaaagatattgcctaatgtgcacctgtgaggtgtaaccccccgctttggagacgagatggctcttgttcagtcaagaccccagactctggccacaaaaatgccataatgcctgttggtatttggcaaagcactgacccgtgtcctccgttgctcgcactggggtctctggtgtgaacacccccgacagcagccctccgcccactctgccccctgggagccctcgctggatcgtctcgtctcctgcagcagcactggcaggcgagggctctcgttcatattctcaggccgcaagtgcaatgcctgaggggatcaggcttttctactccaggcaaacctgccccatcttgtcgcttttaggacctcccacaacctggttccccacacatccatagttctgcctccccagcttctcctccccagttgtaaatagtatttattagcttgccgaggcttcctgctagcaaccacactgaagagatcgatgcctcctttcaagctagccaagttttctgcgagccttcagagctaggagggcaccctaggctctgggatcccgtgtctttccagacaatgttttgtttcctttcctttgttttttcttttaactggaataattaccattgaaaaagaagttcctttgagcatgtatgtgtctgcctctaggatgagctcagagcgagagatgacacaatgcctcactcaggccccgggctccctggccacaagctttttctatcctgttttcatgacagagaaggggaagccctgttctgacaacagacatttcagacaaccttgctggctttccacacctgcctggccccctcctccctccacacttccactttgtcctcctcgtcccctacctcaacaaagcagggtggggtaggtgacatttgtgtatccacattcttacctttggtagtcaggtttggctactttgcagctcgcccaaagagatacaacctaatccccaacctacttttagtttttttgttttttttttatggttaaaagtaacttttgtagtttaaaaaaatctttcctctttcatataaataagaagtggaaattgcctttttattgtgtaatgtagaaaaccctcaagtgttttttccgagcttgggaaagattttgtgtaggaaatgtgcatagagtttgtattttatttttattagcagctgaaatgcctttggttttggcttctctctctccctctctctctctgtctctccttctctctctccccccaccacccacccccacacacgtcatctgcattgttattggagcctgtacttagagggattaagcccacaccctggcttccattccatatcaggtacaggatttgatgttattaacatttgtcgtcatacctcataagtcggtccctgccttgtctgtctaggcccatttggggctccctgtgagtgattcccctctctctgctatgctggagacggttccagcctggaaagcggccaagttcatcttctcactgtgagtggaagctggatcgggcccccgtagtcctggcagccctgttgtctggagggttcttgttgtccctcccattagccagggcggagactgtctgagctgtgcaggaggagggttgctagtaggttctgcttctgcttctctctgctccactgtctgcagcccagatcctgttgggcctggctggtgtctggtaaccatgggcctccactgacccatccctctcttttaaactgtcaggtcattatcaggcataggcagcctatagggcccaaagaaggcaaaaagataagatttactcaagtagcatttgggcaatgaggaaggaaaggtttcaaatttaggggcagaagtgagagaatgagccaacccatgtacctgctgcaactgaaccagactgggttttcaaggctcccagacgtagagtaggaaacgtgctcttctaaatgaggagggagaagataaaggaaacttctagcccctgtccttagtgctttgaggattttattttctcccttactacgcttgcttgacgtcactctctctcgacctccaaacagcaggactctttctctgggaaaccatccttccaaaacggaatctatgtagacaatgggacgttaggcagagagctcagatggcccttttaagggggctccaagaaccaacatcactgctcttttagataaacctctgccctccactccttgcttgagtgggttaaaggaactaacagttgtccctttaggaggacaaaatggggtcaagaggacacagaagagttgtatagcaccagattggttccaaatagttaatggatgtgtgcacattttctgttcagggattaagaccagaatatcagtggatttgttttccccaccaagtggcctcttagactagtcattaacttatgattagctctaaagatttcaaatagtggcagacagtgtcttctgaatgtaagttttgagaaatacgagtctgtcagagcggccataagccataaagagtcaatctcttaattatatttttcatcatgtaaacaagtttcccatttccctttcttagattgcaccagtgaaggagatgttttgcaaagattcagagaactaatttttcactggataagacctgagtaacccagaccccccaccgtggttcttttcacagccctcgactttgcacttaaaaagggatattgtaaatgaaaggctgcagtgccagttttaagaaagaatttctgtgaagtgtgaggactctggagtctagctcacataaagagagtgttatataaaaatccgacagctgaactaggttgctcttttttggcagggagtggggatgagatttgacaccaatatgggcaaaattagataaccttttggttaatataaatgattttgatttggaggcctaatttgtagattgtgaaagcagcttttagtttaacttattcacagaccccttataattaccatgtttttttttttcttcctaaatctcttggttcagcttgtgaatcttacgtgcccgtaaagttgggatgttgaattggctcttctttgttctggcagtgagtcaagtgtccagcattttttcataagtgttttttaaaattgttctccagcattttatggctcctccctcccatgtcctcagacccagcaaaagcgtagaggcagaattagaggcctctccaggccagctcctctgcccacatgtcatacaaggtgtgaatttgagcacagtccagaaatggagacatcccacccccagttgaataatggcccattcatgccaaccttgccaacacggagagggcagagatgcactagaagaccttcatcctccccttcctctgccccaagtcactacagttggttctattgaagccagtctttaagaaacctgggttaaagacaccagcacttctgcttgctgggctggctggacctgtgaagccatgggcaggtagtgccctcttgagagtcattttatttggccaccttcaggtgagactatccatagacacatgctaggataggccccgctgggagggcagttacaggagagagtaggtggtggtgacgtgagggctgtgaaggatccagagacaagacttagatgtttcgttcattcactcactcattcagttactcctaagacttttcagtttcataaggaagagtgttgcctgaggccctagggaatattggggaatagaagggattgaggaaacattaataatagttattcaaaagacccaaatgcttatacttctctctcccttcttctctctctgacacacacacacacacacacacacacacacacacacacgtgcacattcctcccttacatgctcatttgtgccttaaatgtgccttataggtaaatccaggatgactgaggaatccctcgtcactgggagattttgtatatattcttttattattagattgagttgggtgtggggaaaaatttttttctgaaggctcaaaagtggtttcctaaaagtgagccactatcagatttgcacatcaggagaaaagaaatagggttacgtccattaggaaaatcccagtttgcaggagtgcaatcacatcaaaaaaacaaccagccaggattaaaggtattataaatcctcatagcggaacatttctcagggcaaaggaacctggctcatttgaagattaatgttccatgcctttgtggtcaaagggtcagcacttaacacaggaaaaaactaggtgttgttttgttttgttattttggacaacataaaattcaggaatgttttatttagccttggtttctagaaggaagggaaataatatttcttgagcatttactagggtgttgcgtgctgtgctaagtaaattttaagtctttcagttttatagatacggaaaacaagggtgactctttaccacaggatgaataaagaactaagtaatatgggaaatgcagcaatttctggactagctgagccgattccttcctgtgagcacactgtaagctttcaagttctctgggcaggaattacagcacctgtcccctgcaatggccctgctgtgtgatgctcatcgcttcccttcgtgctggagcagtcccccaggtgtccatctcctatctttttgttccaatcttctgtgagttccagctagcaggctttacatctggggaaaggaaaaccaggggttttagctctgttctctgctcccatccttcgctcaccagctgagtgagaacatgaactttttgcaccatgtacccatggcttacactacttagaaaatcaccttttcagataaaacagtttatgagttcatagagaacaccagcactctttgacaaaactgtgagtgaccctttttaaacaatgctgagcaggccctgagctataatcaacggtgagctttaatgtctatgctgacagttaggttttgctctcttttgtaacaggttacgtagaccagcagtgtttaaatctaaatacgttgtgagtctgttatctgtcctatcgcgttttttaaatgactttttattctttatcatagctaagtaaataccaaaaaaaaaaaaaagctttgtaggacacttgtacttagtttgggaaaaaaaaataaattgaaattgttatgcttttgtatttccatttcttgcaaataaatattttttcttaaatagta

SEQ ID NO: 344290 - DNA, 6048 bp, Homo sapiens
gactctccttcagcaactccagaagcttcagactttggtgatgggcaaggtttctcgaacctgcaagttagctggcacgcagactggcacctgcctcatggttgtggtgctgtgctttgccgttgcattcggcagcttctttcaaggctacgggccctatccttctgccaccaagatggctctgcccagccagcattccctgcaggagccctacacagcctccgtggtgagatccagaaacctgctgatctacgaggaacattctcccccagaggagtcatccagcccgggctcggctggggagctggggggctgggatagaggttcctccctgctcagggtgtcagggctggagtccaggccggatgtggatcttccccatttcattatctcgaatgagaccagcctggagaagtcagtgcttttggagctgcagcagcacctggtcagcgccaaactggaggggaatgaaacactaaaagttgtagaactcgacagaagagtgaacaccactttctaaagaggctgcctgcaccccctccctttcccttaactctacttttacatccccaaaccacctttgtcatcagcttttcctctttgccactggatcttcatggagacatgggcaagcattagtggcttcagattggagaccagcctgggacttccctgcagtgagagagcatctccccctggtccatgcccctcctgtgcagaagggagcctgcatccctcccttcctttctcttactgccataggaaattattttaggggttggaggtgggacaagcaggcttgtttccaccaatagtgccaaaaagatattgcctaatgtgcacctgtgaggtgtaaccccccgctttggagacgagatggctcttgttcagtcaagaccccagactctggccacaaaaatgccataatgcctgttggtatttggcaaagcactgacccgtgtcctccgttgctcgcactggggtctctggtgtgaacacccccgacagcagccctccgcccactctgccccctgggagccctcgctggatcgtctcgtctcctgcagcagcactggcaggcgagggctctcgttcatattctcaggccgcaagtgcaatgcctgaggggatcaggcttttctactccaggcaaacctgccccatcttgtcgcttttaggacctcccacaacctggttccccacacatccatagttctgcctccccagcttctcctccccagttgtaaatagtatttattagcttgccgaggcttcctgctagcaaccacactgaagagatcgatgcctcctttcaagctagccaagttttctgcgagccttcagagctaggagggcaccctaggctctgggatcccgtgtctttccagacaatgttttgtttcctttcctttgttttttcttttaactggaataattaccattgaaaaagaagttcctttgagcatgtatgtgtctgcctctaggatgagctcagagcgagagatgacacaatgcctcactcaggccccgggctccctggccacaagctttttctatcctgttttcatgacagagaaggggaagccctgttctgacaacagacatttcagacaaccttgctggctttccacacctgcctggccccctcctccctccacacttccactttgtcctcctcgtcccctacctcaacaaagcagggtggggtaggtgacatttgtgtatccacattcttacctttggtagtcaggtttggctactttgcagctcgcccaaagagatacaacctaatccccaacctacttttagtttttttgttttttttttatggttaaaagtaacttttgtagtttaaaaaaatctttcctctttcatataaataagaagtggaaattgcctttttattgtgtaatgtagaaaaccctcaagtgttttttccgagcttgggaaagattttgtgtaggaaatgtgcatagagtttgtattttatttttattagcagctgaaatgcctttggttttggcttctctctctccctctctctctctgtctctccttctctctctccccccaccacccacccccacacacgtcatctgcattgttattggagcctgtacttagagggattaagcccacaccctggcttccattccatatcaggtacaggatttgatgttattaacatttgtcgtcatacctcataagtcggtccctgccttgtctgtctaggcccatttggggctccctgtgagtgattcccctctctctgctatgctggagacggttccagcctggaaagcggccaagttcatcttctcactgtgagtggaagctggatcgggcccccgtagtcctggcagccctgttgtctggagggttcttgttgtccctcccattagccagggcggagactgtctgagctgtgcaggaggagggttgctagtaggttctgcttctgcttctctctgctccactgtctgcagcccagatcctgttgggcctggctggtgtctggtaaccatgggcctccactgacccatccctctcttttaaactgtcaggtcattatcaggcataggcagcctatagggcccaaagaaggcaaaaagataagatttactcaagtagcatttgggcaatgaggaaggaaaggtttcaaatttaggggcagaagtgagagaatgagccaacccatgtacctgctgcaactgaaccagactgggttttcaaggctcccagacgtagagtaggaaacgtgctcttctaaatgaggagggagaagataaaggaaacttctagcccctgtccttagtgctttgaggattttattttctcccttactacgcttgcttgacgtcactctctctcgacctccaaacagcaggactctttctctgggaaaccatccttccaaaacggaatctatgtagacaatgggacgttaggcagagagctcagatggcccttttaagggggctccaagaaccaacatcactgctcttttagataaacctctgccctccactccttgcttgagtgggttaaaggaactaacagttgtccctttaggaggacaaaatggggtcaagaggacacagaagagttgtatagcaccagattggttccaaatagttaatggatgtgtgcacattttctgttcagggattaagaccagaatatcagtggatttgttttccccaccaagtggcctcttagactagtcattaacttatgattagctctaaagatttcaaatagtggcagacagtgtcttctgaatgtaagttttgagaaatacgagtctgtcagagcggccataagccataaagagtcaatctcttaattatatttttcatcatgtaaacaagtttcccatttccctttcttagattgcaccagtgaaggagatgttttgcaaagattcagagaactaatttttcactggataagacctgagtaacccagaccccccaccgtggttcttttcacagccctcgactttgcacttaaaaagggatattgtaaatgaaaggctgcagtgccagttttaagaaagaatttctgtgaagtgtgaggactctggagtctagctcacataaagagagtgttatataaaaatccgacagctgaactaggttgctcttttttggcagggagtggggatgagatttgacaccaatatgggcaaaattagataaccttttggttaatataaatgattttgatttggaggcctaatttgtagattgtgaaagcagcttttagtttaacttattcacagaccccttataattaccatgtttttttttttcttcctaaatctcttggttcagcttgtgaatcttacgtgcccgtaaagttgggatgttgaattggctcttctttgttctggcagtgagtcaagtgtccagcattttttcataagtgttttttaaaattgttctccagcattttatggctcctccctcccatgtcctcagacccagcaaaagcgtagaggcagaattagaggcctctccaggccagctcctctgcccacatgtcatacaaggtgtgaatttgagcacagtccagaaatggagacatcccacccccagttgaataatggcccattcatgccaaccttgccaacacggagagggcagagatgcactagaagaccttcatcctccccttcctctgccccaagtcactacagttggttctattgaagccagtctttaagaaacctgggttaaagacaccagcacttctgcttgctgggctggctggacctgtgaagccatgggcaggtagtgccctcttgagagtcattttatttggccaccttcaggtgagactatccatagacacatgctaggataggccccgctgggagggcagttacaggagagagtaggtggtggtgacgtgagggctgtgaaggatccagagacaagacttagatgtttcgttcattcactcactcattcagttactcctaagacttttcagtttcataaggaagagtgttgcctgaggccctagggaatattggggaatagaagggattgaggaaacattaataatagttattcaaaagacccaaatgcttatacttctctctcccttcttctctctctgacacacacacacacacacacacacacacacacacacacgtgcacattcctcccttacatgctcatttgtgccttaaatgtgccttataggtaaatccaggatgactgaggaatccctcgtcactgggagattttgtatatattcttttattattagattgagttgggtgtggggaaaaatttttttctgaaggctcaaaagtggtttcctaaaagtgagccactatcagatttgcacatcaggagaaaagaaatagggttacgtccattaggaaaatcccagtttgcaggagtgcaatcacatcaaaaaaacaaccagccaggattaaaggtattataaatcctcatagcggaacatttctcagggcaaaggaacctggctcatttgaagattaatgttccatgcctttgtggtcaaagggtcagcacttaacacaggaaaaaactaggtgttgttttgttttgttattttggacaacataaaattcaggaatgttttatttagccttggtttctagaaggaagggaaataatatttcttgagcatttactagggtgttgcgtgctgtgctaagtaaattttaagtctttcagttttatagatacggaaaacaagggtgactctttaccacaggatgaataaagaactaagtaatatgggaaatgcagcaatttctggactagctgagccgattccttcctgtgagcacactgtaagctttcaagttctctgggcaggaattacagcacctgtcccctgcaatggccctgctgtgtgatgctcatcgcttcccttcgtgctggagcagtcccccaggtgtccatctcctatctttttgttccaatcttctgtgagttccagctagcaggctttacatctggggaaaggaaaaccaggggttttagctctgttctctgctcccatccttcgctcaccagctgagtgagaacatgaactttttgcaccatgtacccatggcttacactacttagaaaatcaccttttcagataaaacagtttatgagttcatagagaacaccagcactctttgacaaaactgtgagtgaccctttttaaacaatgctgagcaggccctgagctataatcaacggtgagctttaatgtctatgctgacagttaggttttgctctcttttgtaacaggttacgtagaccagcagtgtttaaatctaaatacgttgtgagtctgttatctgtcctatcgcgttttttaaatgactttttattctttatcatagctaagtaaataccaaaaaaaaaaaaaagctttgtaggacacttgtacttagtttgggaaaaaaaaataaattgaaattgttatgcttttgtatttccatttcttgcaaataaatattttttcttaaatagtaagatgttgcccagtctttataatcttggtact

SEQ ID NO: 344291 - DNA, 6458 bp, Homo sapiens
gactctccttcagcaactccagaagcttcagactttggtgatgggcaaggtttctcgaacctgcaagttagctggcacgcagactggcacctgcctcatggttgtggtgctgtgctttgccgttgcattcggcagcttctttcaaggctacgggccctatccttctgccaccaagatggctctgcccagccagcattccctgcaggagccctacacagcctccgtggtgagatccagaaacctgctgatctacgaggaacattctcccccagaggagtcatccagcccgggctcggctggggagctggggggctgggatagaggttcctccctgctcagggtgtcagggctggagtccaggccggatgtggatcttccccatttcattatctcgaatgagaccagcctggagaagtcagtgcttttggagctgcagcagcacctggtcagcgccaaactggaggggaatgaaacactaaaagttgtagaactcgacagaagagtgaacaccactttctaaagaggctgcctgcaccccctccctttcccttaactctacttttacatccccaaaccacctttgtcatcagcttttcctctttgccactggatcttcatggagacatgggcaagcattagtggcttcagattggagaccagcctgggacttccctgcagtgagagagcatctccccctggtccatgcccctcctgtgcagaagggagcctgcatccctcccttcctttctcttactgccataggaaattattttaggggttggaggtgggacaagcaggcttgtttccaccaatagtgccaaaaagatattgcctaatgtgcacctgtgaggtgtaaccccccgctttggagacgagatggctcttgttcagtcaagaccccagactctggccacaaaaatgccataatgcctgttggtatttggcaaagcactgacccgtgtcctccgttgctcgcactggggtctctggtgtgaacacccccgacagcagccctccgcccactctgccccctgggagccctcgctggatcgtctcgtctcctgcagcagcactggcaggcgagggctctcgttcatattctcaggccgcaagtgcaatgcctgaggggatcaggcttttctactccaggcaaacctgccccatcttgtcgcttttaggacctcccacaacctggttccccacacatccatagttctgcctccccagcttctcctccccagttgtaaatagtatttattagcttgccgaggcttcctgctagcaaccacactgaagagatcgatgcctcctttcaagctagccaagttttctgcgagccttcagagctaggagggcaccctaggctctgggatcccgtgtctttccagacaatgttttgtttcctttcctttgttttttcttttaactggaataattaccattgaaaaagaagttcctttgagcatgtatgtgtctgcctctaggatgagctcagagcgagagatgacacaatgcctcactcaggccccgggctccctggccacaagctttttctatcctgttttcatgacagagaaggggaagccctgttctgacaacagacatttcagacaaccttgctggctttccacacctgcctggccccctcctccctccacacttccactttgtcctcctcgtcccctacctcaacaaagcagggtggggtaggtgacatttgtgtatccacattcttacctttggtagtcaggtttggctactttgcagctcgcccaaagagatacaacctaatccccaacctacttttagtttttttgttttttttttatggttaaaagtaacttttgtagtttaaaaaaatctttcctctttcatataaataagaagtggaaattgcctttttattgtgtaatgtagaaaaccctcaagtgttttttccgagcttgggaaagattttgtgtaggaaatgtgcatagagtttgtattttatttttattagcagctgaaatgcctttggttttggcttctctctctccctctctctctctgtctctccttctctctctccccccaccacccacccccacacacgtcatctgcattgttattggagcctgtacttagagggattaagcccacaccctggcttccattccatatcaggtacaggatttgatgttattaacatttgtcgtcatacctcataagtcggtccctgccttgtctgtctaggcccatttggggctccctgtgagtgattcccctctctctgctatgctggagacggttccagcctggaaagcggccaagttcatcttctcactgtgagtggaagctggatcgggcccccgtagtcctggcagccctgttgtctggagggttcttgttgtccctcccattagccagggcggagactgtctgagctgtgcaggaggagggttgctagtaggttctgcttctgcttctctctgctccactgtctgcagcccagatcctgttgggcctggctggtgtctggtaaccatgggcctccactgacccatccctctcttttaaactgtcaggtcattatcaggcataggcagcctatagggcccaaagaaggcaaaaagataagatttactcaagtagcatttgggcaatgaggaaggaaaggtttcaaatttaggggcagaagtgagagaatgagccaacccatgtacctgctgcaactgaaccagactgggttttcaaggctcccagacgtagagtaggaaacgtgctcttctaaatgaggagggagaagataaaggaaacttctagcccctgtccttagtgctttgaggattttattttctcccttactacgcttgcttgacgtcactctctctcgacctccaaacagcaggactctttctctgggaaaccatccttccaaaacggaatctatgtagacaatgggacgttaggcagagagctcagatggcccttttaagggggctccaagaaccaacatcactgctcttttagataaacctctgccctccactccttgcttgagtgggttaaaggaactaacagttgtccctttaggaggacaaaatggggtcaagaggacacagaagagttgtatagcaccagattggttccaaatagttaatggatgtgtgcacattttctgttcagggattaagaccagaatatcagtggatttgttttccccaccaagtggcctcttagactagtcattaacttatgattagctctaaagatttcaaatagtggcagacagtgtcttctgaatgtaagttttgagaaatacgagtctgtcagagcggccataagccataaagagtcaatctcttaattatatttttcatcatgtaaacaagtttcccatttccctttcttagattgcaccagtgaaggagatgttttgcaaagattcagagaactaatttttcactggataagacctgagtaacccagaccccccaccgtggttcttttcacagccctcgactttgcacttaaaaagggatattgtaaatgaaaggctgcagtgccagttttaagaaagaatttctgtgaagtgtgaggactctggagtctagctcacataaagagagtgttatataaaaatccgacagctgaactaggttgctcttttttggcagggagtggggatgagatttgacaccaatatgggcaaaattagataaccttttggttaatataaatgattttgatttggaggcctaatttgtagattgtgaaagcagcttttagtttaacttattcacagaccccttataattaccatgtttttttttttcttcctaaatctcttggttcagcttgtgaatcttacgtgcccgtaaagttgggatgttgaattggctcttctttgttctggcagtgagtcaagtgtccagcattttttcataagtgttttttaaaattgttctccagcattttatggctcctccctcccatgtcctcagacccagcaaaagcgtagaggcagaattagaggcctctccaggccagctcctctgcccacatgtcatacaaggtgtgaatttgagcacagtccagaaatggagacatcccacccccagttgaataatggcccattcatgccaaccttgccaacacggagagggcagagatgcactagaagaccttcatcctccccttcctctgccccaagtcactacagttggttctattgaagccagtctttaagaaacctgggttaaagacaccagcacttctgcttgctgggctggctggacctgtgaagccatgggcaggtagtgccctcttgagagtcattttatttggccaccttcaggtgagactatccatagacacatgctaggataggccccgctgggagggcagttacaggagagagtaggtggtggtgacgtgagggctgtgaaggatccagagacaagacttagatgtttcgttcattcactcactcattcagttactcctaagacttttcagtttcataaggaagagtgttgcctgaggccctagggaatattggggaatagaagggattgaggaaacattaataatagttattcaaaagacccaaatgcttatacttctctctcccttcttctctctctgacacacacacacacacacacacacacacacacacacacgtgcacattcctcccttacatgctcatttgtgccttaaatgtgccttataggtaaatccaggatgactgaggaatccctcgtcactgggagattttgtatatattcttttattattagattgagttgggtgtggggaaaaatttttttctgaaggctcaaaagtggtttcctaaaagtgagccactatcagatttgcacatcaggagaaaagaaatagggttacgtccattaggaaaatcccagtttgcaggagtgcaatcacatcaaaaaaacaaccagccaggattaaaggtattataaatcctcatagcggaacatttctcagggcaaaggaacctggctcatttgaagattaatgttccatgcctttgtggtcaaagggtcagcacttaacacaggaaaaaactaggtgttgttttgttttgttattttggacaacataaaattcaggaatgttttatttagccttggtttctagaaggaagggaaataatatttcttgagcatttactagggtgttgcgtgctgtgctaagtaaattttaagtctttcagttttatagatacggaaaacaagggtgactctttaccacaggatgaataaagaactaagtaatatgggaaatgcagcaatttctggactagctgagccgattccttcctgtgagcacactgtaagctttcaagttctctgggcaggaattacagcacctgtcccctgcaatggccctgctgtgtgatgctcatcgcttcccttcgtgctggagcagtcccccaggtgtccatctcctatctttttgttccaatcttctgtgagttccagctagcaggctttacatctggggaaaggaaaaccaggggttttagctctgttctctgctcccatccttcgctcaccagctgagtgagaacatgaactttttgcaccatgtacccatggcttacactacttagaaaatcaccttttcagataaaacagtttatgagttcatagagaacaccagcactctttgacaaaactgtgagtgaccctttttaaacaatgctgagcaggccctgagctataatcaacggtgagctttaatgtctatgctgacagttaggttttgctctcttttgtaacaggttacgtagaccagcagtgtttaaatctaaatacgttgtgagtctgttatctgtcctatcgcgttttttaaatgactttttattctttatcatagctaagtaaataccaaaaaaaaaaaaaagctttgtaggacacttgtacttagtgggggcaacaacacaaacttacactctgcgacattgcgtcaggccttgggattttcccatttcctggccaattaactttttctttcctaaaattggttacacaaaaacaaacaacaacaaacaacaccacacgaaaaacacacaacacctacaatcacacacaaacacaaaacaaccacaaacaaagaacacccgtgttgcggcggcgccgcgcgggcccgccaggagagagctttcttagagaacaacacggtggggaggcgcggggccgcccccagaggggtgacgacaaccaacgagccagcaccgagcgtcgctcctcaagagaagaaactgtcccgcgcgacagcatagcgggggggacgagtgaccccccgcacaagaaaaagaagcgccgggcgggggacaacgacgcgcgccgtcgcgacacaacacccgcagaggggactcgatggggaggcataccgcggcggactaccccagagggagtctctgcgcgggcgcgagaatataaaaccgcgg

SEQ ID NO: 344292 - DNA, 5897 bp, Homo sapiens
gactctccttcagcaactccagaagcttcagactttggtgatgggcaaggtttctcgaacctgcaagttagctggcacgcagactggcacctgcctcatggttgtggtgctgtgctttgccgttgcattcggcagcttctttcaaggctacgggccctatccttctgccaccaagatggctctgcccagccagcattccctgcaggagccctacacagcctccgtggtgagatccagaaacctgctgatctacgaggaacattctcccccagaggagtcatccagcccgggctcggctggggagctggggggctgggatagaggttcctccctgctcagggtgtcagggctggagtccaggccggatgtggatcttccccatttcattatctcgaatgagaccagcctggagaagtcagtgcttttggagctgcagcagcacctggtcagcgccaaactggaggggaatgaaacactaaaagttgtagaactcgacagaagagtgaacaccactttctaaagaggctgcctgcaccccctccctttcccttaactctacttttacatccccaaaccacctttgtcatcagcttttcctctttgccactggatcttcatggagacatgggcaagcattagtggcttcagattggagaccagcctgggacttccctgcagtgagagagcatctccccctggtccatgcccctcctgtgcagaagggagcctgcatccctcccttcctttctcttactgccataggaaattattttaggggttggaggtgggacaagcaggcttgtttccaccaatagtgccaaaaagatattgcctaatgtgcacctgtgaggtgtaaccccccgctttggagacgagatggctcttgttcagtcaagaccccagactctggccacaaaaatgccataatgcctgttggtatttggcaaagcactgacccgtgtcctccgttgctcgcactggggtctctggtgtgaacacccccgacagcagccctccgcccactctgccccctgggagccctcgctggatcgtctcgtctcctgcagcagcactggcaggcgagggctctcgttcatattctcaggccgcaagtgcaatgcctgaggggatcaggcttttctactccaggcaaacctgccccatcttgtcgcttttaggacctcccacaacctggttccccacacatccatagttctgcctccccagcttctcctccccagttgtaaatagtatttattagcttgccgaggcttcctgctagcaaccacactgaagagatcgatgcctcctttcaagctagccaagttttctgcgagccttcagagctaggagggcaccctaggctctgggatcccgtgtctttccagacaatgttttgtttcctttcctttgttttttcttttaactggaataattaccattgaaaaagaagttcctttgagcatgtatgtgtctgcctctaggatgagctcagagcgagagatgacacaatgcctcactcaggccccgggctccctggccacaagctttttctatcctgttttcatgacagagaaggggaagccctgttctgacaacagacatttcagacaaccttgctggctttccacacctgcctggccccctcctccctccacacttccactttgtcctcctcgtcccctacctcaacaaagcagggtggggtaggtgacatttgtgtatccacattcttacctttggtagtcaggtttggctactttgcagctcgcccaaagagatacaacctaatccccaacctacttttagtttttttgttttttttttatggttaaaagtaacttttgtagtttaaaaaaatctttcctctttcatataaataagaagtggaaattgcctttttattgtgtaatgtagaaaaccctcaagtgttttttccgagcttgggaaagattttgtgtaggaaatgtgcatagagtttgtattttatttttattagcagctgaaatgcctttggttttggcttctctctctccctctctctctctgtctctccttctctctctccccccaccacccacccccacacacgtcatctgcattgttattggagcctgtacttagagggattaagcccacaccctggcttccattccatatcaggtacaggatttgatgttattaacatttgtcgtcatacctcataagtcggtccctgccttgtctgtctaggcccatttggggctccctgtgagtgattcccctctctctgctatgctggagacggttccagcctggaaagcggccaagttcatcttctcactgtgagtggaagctggatcgggcccccgtagtcctggcagccctgttgtctggagggttcttgttgtccctcccattagccagggcggagactgtctgagctgtgcaggaggagggttgctagtaggttctgcttctgcttctctctgctccactgtctgcagcccagatcctgttgggcctggctggtgtctggtaaccatgggcctccactgacccatccctctcttttaaactgtcaggtcattatcaggcataggcagcctatagggcccaaagaaggcaaaaagataagatttactcaagtagcatttgggcaatgaggaaggaaaggtttcaaatttaggggcagaagtgagagaatgagccaacccatgtacctgctgcaactgaaccagactgggttttcaaggctcccagacgtagagtaggaaacgtgctcttctaaatgaggagggagaagataaaggaaacttctagcccctgtccttagtgctttgaggattttattttctcccttactacgcttgcttgacgtcactctctctcgacctccaaacagcaggactctttctctgggaaaccatccttccaaaacggaatctatgtagacaatgggacgttaggcagagagctcagatggcccttttaagggggctccaagaaccaacatcactgctcttttagataaacctctgccctccactccttgcttgagtgggttaaaggaactaacagttgtccctttaggaggacaaaatggggtcaagaggacacagaagagttgtatagcaccagattggttccaaatagttaatggatgtgtgcacattttctgttcagggattaagaccagaatatcagtggatttgttttccccaccaagtggcctcttagactagtcattaacttatgattagctctaaagatttcaaatagtggcagacagtgtcttctgaatgtaagttttgagaaatacgagtctgtcagagcggccataagccataaagagtcaatctcttaattatatttttcatcatgtaaacaagtttcccatttccctttcttagattgcaccagtgaaggagatgttttgcaaagattcagagaactaatttttcactggataagacctgagtaacccagaccccccaccgtggttcttttcacagccctcgactttgcacttaaaaagggatattgtaaatgaaaggctgcagtgccagttttaagaaagaatttctgtgaagtgtgaggactctggagtctagctcacataaagagagtgttatataaaaatccgacagctgaactaggttgctcttttttggcagggagtggggatgagatttgacaccaatatgggcaaaattagataaccttttggttaatataaatgattttgatttggaggcctaatttgtagattgtgaaagcagcttttagtttaacttattcacagaccccttataattaccatgtttttttttttcttcctaaatctcttggttcagcttgtgaatcttacgtgcccgtaaagttgggatgttgaattggctcttctttgttctggcagtgagtcaagtgtccagcattttttcataagtgttttttaaaattgttctccagcattttatggctcctccctcccatgtcctcagacccagcaaaagcgtagaggcagaattagaggcctctccaggccagctcctctgcccacatgtcatacaaggtgtgaatttgagcacagtccagaaatggagacatcccacccccagttgaataatggcccattcatgccaaccttgccaacacggagagggcagagatgcactagaagaccttcatcctccccttcctctgccccaagtcactacagttggttctattgaagccagtctttaagaaacctgggttaaagacaccagcacttctgcttgctgggctggctggacctgtgaagccatgggcaggtagtgccctcttgagagtcattttatttggccaccttcaggtgagactatccatagacacatgctaggataggccccgctgggagggcagttacaggagagagtaggtggtggtgacgtgagggctgtgaaggatccagagacaagacttagatgtttcgttcattcactcactcattcagttactcctaagacttttcagtttcataaggaagagtgttgcctgaggccctagggaatattggggaatagaagggattgaggaaacattaataatagttattcaaaagacccaaatgcttatacttctctctcccttcttctctctctgacacacacacacacacacacacacacacacacacacacgtgcacattcctcccttacatgctcatttgtgccttaaatgtgccttataggtaaatccaggatgactgaggaatccctcgtcactgggagattttgtatatattcttttattattagattgagttgggtgtggggaaaaatttttttctgaaggctcaaaagtggtttcctaaaagtgagccactatcagatttgcacatcaggagaaaagaaatagggttacgtccattaggaaaatcccagtttgcaggagtgcaatcacatcaaaaaaacaaccagccaggattaaaggtattataaatcctcatagcggaacatttctcagggcaaaggaacctggctcatttgaagattaatgttccatgcctttgtggtcaaagggtcagcacttaacacaggaaaaaactaggtgttgttttgttttgttattttggacaacataaaattcaggaatgttttatttagccttggtttctagaaggaagggaaataatatttcttgagcatttactagggtgttgcgtgctgtgctaagtaaattttaagtctttcagttttatagatacggaaaacaagggtgactctttaccacaggatgaataaagaactaagtaatatgggaaatgcagcaatttctggactagctgagccgattccttcctgtgagcacactgtaagctttcaagttctctgggcaggaattacagcacctgtcccctgcaatggccctgctgtgtgatgctcatcgcttcccttcgtgctggagcagtcccccaggtgtccatctcctatctttttgttccaatcttctgtgagttccagctagcaggctttacatctggggaaaggaaaaccaggggttttagctctgttctctgctcccatccttcgctcaccagctgagtgagaacatgaactttttgcaccatgtacccatggcttacactacttagaaaatcaccttttcagataaaacagtttatgagttcatagagaacaccagcactctttgacaaaagccgcggtccctccttcagcgcagcgcgtaccagtggctcagcaagaacaggcgtggacatccaggtaccaagctcgcacacaggtatccgctcagccgtgcactaggaatttgatcgcaccaggccatatatgggtcagcggcaaaagcctgtcttcgtcctccgggacgtcattcagcagtagcgcaagtcgataacacactcgttatcgcc

SEQ ID NO: 344293 - DNA, 480 bp, Homo sapiens
gcggccgcctactactactactgctcgaattcaagcttctaacgatgtacggggacatgtacccatggcttacactacttagaaaatcaccttttcagataaaacagtttatgagttcatagagaacaccagcactctttgacaaaactgtgagtgaccctttttaaacaatgctgagcaggccctgagctataatcaacggtgagctttaatgtctatgctgacagttaggttttgctctcttttgtaacaggttacgtagaccagcagtgtttaaatctaaatacgttgtgagtctgttatctgtcctatcgcgttttttaaatgactttttattctttatcatagctaagtaaataccaaaaaaaaaaaaaagctttgtaggacacttgtacttagtttgggaaaaaaaaataaattgaaattgttatgcttttgtatttccatttcttgcaaataaatattttttcttaaatagta

SEQ ID NO: 344294 - DNA, 1188 bp, Homo sapiens
  misc_feature (350)..(350): n is a, c, g, or t
gactctccttcagcaactccagaagcttcagactttggtgatgggcaaggtttctcgaacctgcaagttagctggcacgcagactggcacctgcctcatggtgagcttcccagcagggtagcacagtgaccgcccctgcctggcccctgtctcccctctccctccacttgccaaggccaagtgctgtgctgtaggagaaaccacatggaggaactccactctgaggctgttcctcggtgaggcactctggtgatgtgactggtgggtgcagtccactggcctgaagaggagagtctgtgtccctgggtataaagctgtgctgtccagaggctgaagtccacagcccctcngtgttctctctcccctctttctctcccacaagttgtggtgctgtgctttgccgttgcattcggcagcttctttcaaggctacgggccctatccttctgccaccaagatggctctgcccagccagcattccctgcaggagccctacacagcctccgtggtgagatccagaaacctgctgatctacgaggaacattctcccccagaggagtcatccagcccgggctcggctggggagctggggggctgggatagaggttcctccctgctcagggtgtcagggctggagtccaggccggatgtggatcttccccatttcattatctcgaatgagaccagcctggagaagtcagtgcttttggagctgcagcagcacctgtgagtcatagagacacagagccaactcctctagtgcactgatggtgggttatgagtcagcaacctgagatgtgaggttgagactctccataggcctggttcagtccctcagctctctcaggacctatttccaggacctgggactgcagagagtctgttgctggccaacagttgccctgagcagagatgaggaaaaaaaccagcgtgagctcccctatgtctgctgcatcagcggggagctggcgtggtggcacaaagaagtgcttgaatcccttcccccactgtctccatcctcccttccaagccacacgagtgaatgcacagcccaggtaaccacagtgtgtttgctgtgcaaatccaactttaagacatgtttcatggcttcaactagggagtagatatatattgtgctatatgtcaatatatgtttatgatttatatgtaaatacacatgtgttaatta

SEQ ID NO: 344295 - DNA, 3303 bp, Homo sapiens
gactctccttcagcaactccagaagcttcagactttggtgatgggcaaggtttctcgaacctgcaagttagctggcacgcagactggcacctgcctcatggttgtggtgctgtgctttgccgttgcattcggcagcttctttcaaggctacgggccctatccttctgccaccaagatggctctgcccagccagcattccctgcaggagccctacacagcctccgtggtgagatccagaaacctgctgatctacgaggaacattctcccccagaggagtcatccagcccgggctcggctggggagctggggggctgggatagaggttcctccctgctcagggtgtcagggctggagtccaggccggatgtggatcttccccatttcattatctcgaatgagaccagcctggagaagtcagtgcttttggagctgcagcagcacctggtcagcgccaaactggaggggaatgaaacactaaaagttgtagaactcgacagaagagtgaacaccactttctaaagaggctgcctgcaccccctccctttcccttaactctacttttacatccccaaaccacctttgtcatcagcttttcctctttgccactggatcttcatggagacatgggcaagcattagtggcttcagattggagaccagcctgggacttccctgcagtgagagagcatctccccctggtccatgcccctcctgtgcagaagggagcctgcatccctcccttcctttctcttactgccataggaaattattttaggggttggaggtgggacaagcaggcttgtttccaccaatagtgccaaaaagatattgcctaatgtgcacctgtgaggtgtaaccccccgctttggagacgagatggctcttgttcagtcaagaccccagactctggccacaaaaatgccataatgcctgttggtatttggcaaagcactgacccgtgtcctccgttgctcgcactggggtctctggtgtgaacacccccgacagcagccctccgcccactctgccccctgggagccctcgctggatcgtctcgtctcctgcagcagcactggcaggcgagggctctcgttcatattctcaggccgcaagtgcaatgcctgaggggatcaggcttttctactccaggcaaacctgccccatcttgtcgcttttaggacctcccacaacctggttccccacacatccatagttctgcctccccagcttctcctccccagttgtaaatagtatttattagcttgccgaggcttcctgctagcaaccacactgaagagatcgatgcctcctttcaagctagccaagttttctgcgagccttcagagctaggagggcaccctaggctctgggatcccgtgtctttccagacaatgttttgtttcctttcctttgttttttcttttaactggaataattaccattgaaaaagaagttcctttgagcatgtatgtgtctgcctctaggatgagctcagagcgagagatgacacaatgcctcactcaggccccgggctccctggccacaagctttttctatcctgttttcatgacagagaaggggaagccctgttctgacaacagacatttcagacaaccttgctggctttccacacctgcctggccccctcctccctccacacttccactttgtcctcctcgtcccctacctcaacaaagcagggtggggtaggtgacatttgtgtatccacattcttacctttggtagtcaggtttggctactttgcagctcgcccaaagagatacaacctaatccccaacctacttttagtttttttgttttttttttatggttaaaagtaacttttgtagtttaaaaaaatctttcctctttcatataaataagaagtggaaattgcctttttattgtgtaatgtagaaaaccctcaagtgttttttccgagcttgggaaagattttgtgtaggaaatgtgcatagagtttgtattttatttttattagcagctgaaatgcctttggttttggcttctctctctccctctctctctctgtctctccttctctctctccccccaccacccacccccacacacgtcatctgcattgttattggagcctgtacttagagggattaagcccacaccctggcttccattccatatcaggtacaggatttgatgttattaacatttgtcgtcatacctcataagtcggtccctgccttgtctgtctaggcccatttggggctccctgtgagtgattcccctctctctgctatgctggagacggttccagcctggaaagcggccaagttcatcttctcactgtgagtggaagctggatcgggcccccgtagtcctggcagccctgttgtctggagggttcttgttgtccctcccattagccagggcggagactgtctgagctgtgcaggaggagggttgctagtaggttctgcttctgcttctctctgctccactgtctgcagcccagatcctgttgggcctggctggtgtctggtaaccatgggcctccactgacccatccctctcttttaaactgtcaggtcattatcaggcataggcagcctatagggcccaaagaaggcaaaaagataagatttactcaagtagcatttgggcaatgaggaaggaaaggtttcaaatttaggggcagaagtgagagaatgagccaacccatgtacctgctgcaactgaaccagactgggttttcaaggctcccagacgtagagtaggaaacgtgctcttctaaatgaggagggagaagataaaggaaacttctagcccctgtccttagtgctttgaggattttattttctcccttactacgcttgcttgacgtcactctctctcgacctccaaacagcaggactctttctctgggaaaccatccttccaaaacggaatctatgtagacaatgggacgttaggcagagagctcagatggcccttttaagggggctccaagaaccaacatcactgctcttttagataaacctctgccctccactccttgcttgagtgggttaaaggaactaacagttgtccctttaggaggacaaaatggggtcaagaggacacagaagagttgtatagcaccagattggttccaaatagttaatggatgtgtgcacattttctgttcagggattaagaccagaatatcagtggatttgttttccccaccaagtggcctcttagactaggctacgttctaaagcatcagtgtctggagattgcggatactatgttacatcaagaataactatgagccgagtacgatcg

SEQ ID NO: 344296 - DNA, 520 bp, Homo sapiens
gtctgtgagaacatgtctgtagtcatctaaaccattaaagttagaatggaataggaaaaattccagggtttaccttgatttccattgtcaataaaaatttagttctctggaagtagttttgtggttgtggtgggagacataggaagatgatatatggagggcaggtgttagctttcatattttgtgcgttttgtgtttctttcagtaagtgagacagattatttaaaagtatactgaatttacatagctttttgtgggggagggggtaaaggaattcaaatcacttcacttatatcatctcatccattcttaaaagatgagtgtgaaaacaggtgaggtgcattcacgatggttcttttcaagacagttacaaaccatgagcattctaaagaaatccagaggaaaggtaggccataagaactcaggactttaggtgttgtggcctaggaggttctatcctgacctgatcactcacctcttctcacctattcttcagatactctgtgaagatttactccta

SEQ ID NO: 344297 - DNA, 645 bp, Homo sapiens
gcccggacatgaccttggacaagtcgctgaactcggggacctctgtttccttatctgtcagctgaggccacaaggactgcatgatctcgcagctgccttccagaaacaacattccagaatgctctgttccccccttccagcccaagagactgtgcagaataggcctcttctcagtcagcaggcacttttgtctcccatggtctaggcaggagtcatttttttttgctacagtggtggaaatgggtcaggctggagaatgctgaggtttccaggctagtggtttcttcctctgaccacagtaagaggaaaggaagctttccctccacctctactcctctgtgactcctgccccagccccatcctcagcttccacctaagaggtagtgcaggaaagtggtgataagcagatgtctgcagctgtgtgacgtgtgtcccagcccagttctgtggcctgctacctggggagcctctggttgtcattgggcctcctgttgcctctcagcttgcctccctctgtaaaatggggacagtaggccaggggctgtggctcacacctgtaatctcaacactttgggaggccaaggcaggtggatctcctgaggtcaggagttcaagaccagcctgaccaatatggtgaaaccccat

SEQ ID NO: 344298 - DNA, 246 bp, Homo sapiens
cgtatggtataagtgaaataattcctaattgcagaatactcttttgtgagcttcattaagaaagtagggatcttggctgggtgcagtggcccacgcctgtaatcccagcactttaggaggccaagtctggcggatcacctgaggtcaggagtttcagaccagcctgaccaatgtggaggaaccccgtctctactaaaaatacaaaattagccggatgtagtggtgcatgcctgtaatcgtagctac

SEQ ID NO: 344299 - DNA, 639 bp, Homo sapiens
gtaataaaccacacagctcatgcacccagaaggtcatgataagtgaacagaatgtagaggaggggtcagcccctaaaaggggagaaagtttcattattgggaaatcgaaactgaagtggggaaagggaccacggtataaccttataagggggataataaaacttaggcaatgtccaggaagattgtaaccccatagtactcaaccaatgaggagctgggggagggacttgcgtgctaggagataaattacctgttgtaactgtccccggtgtgactgcctaccagacaccagatcttgcaagaccgccaataaaagtcttgcttccgctgttcttcatgtctccaagtccattctttgggtttggatgagtaaatgagtgtttctcacaggcgtgaaccaacatcccaccagaacgttattggtagtaacccgtcatggtttctttgagccccaggaacaattattatagcctagaatttcagatgacaacaaatcacagctccatacatacggctgcacacatacagcccctcagggcatattttccttatggactgtacccctagttcagttttaagcaatctggagactgctccaacattcactagagagttaaagactaacgtgttgaaattttg

SEQ ID NO: 344300 - DNA, 913 bp, Homo sapiens
agagtctcactctgccacccaggttgaagtgctgtgatgcgatcatagctcactgtagcctcaatctcccaggctcaagtgatcctccagcatcagccttttgagtagctgggactgcaggatgaacctaaccagttggcagtgcctcgtactctgtgatggattttccgaagaccaaatgtaccattttcttgtcttttcaaagagagccacacaggaaggaaaacaagaaattcaacttttaagctgggctattcatggcctttgctaaatcctggcagaatttcacagttcttcattacaattcatctcactgatttcctaatgcaatgaactggccttttcattaaggccatagggaatgaagctgagttacccaatcattaagtgttgttatctgatgagtgaaaaatggattacttttcaatgtgcatttggggagccgtgtgtgtgtgtgtgttgtgtttccactagattccattttgcgaaaattggttcaagtggaaggagaaggttaatctttcatgttctgttctgctagaacactatatggctttctgctctgtgagcaggcaaagaaaaattggtgggctcaggaatcagaaatgcagggccaacagtcctgtttctcactttcgataaaggccaacattttacctgctcaagaacactctattcctttaaccaacgggagtgttatttaattagttccttagtttttcagctaaagcagacacatgcgcacatcacacacacatgcatgcgctgtggtgttttttcttctatcacccctccctccacagagatatcaatttgcataagaggagaaaataaattcatttaaaccccattctaaattcagtattagaaatgtaatgatctctaacactgacctttttaaaatactttgtgg

SEQ ID NO: 344301 - DNA, 893 bp, Homo sapiens
agagatgagaagatgggaacctagaaggagatgtgagcagcccaaggtcaccagctcacgtggagcagtgctagggcttgagcagagctctgctgctgattctgggcttctgtgaagagtgattcatgctcagtgagcctgtaaatatgatcttacctgaacaagagagtttttctcatgacccacgaggaaacacttccttgttactcacagtagagacctggttagaaagtgctggagagggctaggtgtggtggctcacgcctgtaatcccagcattttaggaggctgaggtgggcagatcatttgaggtcaggagttcgagaccagcctgggcaatgtggtgaaagtgaaaacccatctctgctaacaatacaaacattagccaggcgtggtagcacgcacctgtaatcccagctactcgagaggctgtggcaggagaattgtgaacctgggatgcagagtttgtagtgagctaagatagccccagtgcactccagcctgggcgacagagcaagactgtttcaaaaaaaaaaaagaaagtgccagaaagataagcatatacaagaaccacttacctttgcttggggctgcactgtggccccagttgctgggagaggcttctgtgaaggccgttgatagctgcaggcagtgacattctcaggggcccctagcagacaactcatccgggctcagggacacacctgggagccagtggcaggaatgtggagacactgcttggtggtggccaagcagcccagcctcgtagctgctgcctgtcacttctgagaatgtaagaaactgtgccctggtgtgtgatgttccccttcctgtatacctatgtaactaacctgcacattgtgcacatatatcctaaaacttaaagtataatt

SEQ ID NO: 344302 - DNA, 87 bp, Homo sapiens
acttcctgttttggattacagattgaatgttttggaccacctgttttaagtggcaggtgtctgtggtcaaacctactttggttaatg

SEQ ID NO: 344303 - DNA, 449 bp, Homo sapiens
gttgttctagaacagcacagtttttctagaaatcaagagaataaaaatttacacgtgcccatagtcttagctactctggatgtctgaggtgggaggatggctgagcccagtagttagagaccagcttgggcagcatagcaagactctgtctcaaaacattttttttttgaaaaaggaaatagaggtttatgtagaaaatattccaagtctgaattatgtaatggttctccatggacatgctacatgcgtatagcagggatccctgaacaaatgttcatggacctgtttttatattcccttcgtaatgggattgggaagggaaaggccttgcctctcatccccattagaagccagtctcatcctacgtgatcagtctctgctgcccttgctcagaccacttgtagttgcctcccttttcctctgtcaaccctgggccctcactgctgctc

SEQ ID NO: 344304 - DNA, 488 bp, Homo sapiens
agcgaacttcgaagaaaacgagaggagttagaggaagctccggtttcttcccacagttttgattcatcaaacgtgaggaagcctttggaaaccgggcaccgttgttccagctcctcttccctccctgtcatccatgacccttctgtgtttctcctcggtccccaactctaccttccccaaccacagttcctgtccccagatgtcctgatgcccaccatggcaggggagcccaatagactcccaggaacttcaaggagtgtccagcagtttctggctatgtgtgacaggggtgaaacttcccaaggggccaagtacacaggaaggactttgaactaccagagcctcccccatcgctccagaacagacaactcctgggcaccctggtcagagaccaaccagcatattgggaccagattcctgactactccagggtgcaatcctcaactaacctacactgccacactaccagaaagaagcaagggccttca

SEQ ID NO: 344305 - DNA, 557 bp, Homo sapiens
acactcaaagtccactgcctccatgaccagtgcatctccaggtttgcctaaggaatatagtccttgtgacctgactgtcactcatatgtattcagggccccaggccactttggtcagctggtggcagaaccagctgggactcaggtctgtcccactctacctgaggattctcctctggcccagagctgatctaaatgtgtcctctgtgggtgccagcagaattctgctcagtgtagtgctgtgctgtgacagggcagcagtgagttccaatgcaaaatcccacactcctctcgctccaccacatgcacagattctctctccaagctgttgtgccagaggtgagggaggggggcataggcgatgcaggaccgtctttcccaccctcttcagtgcctcttcttgatacgatgtgaaaaccaggtactgtgatcactcacctgattttttgtttcttatgaagatgctttttttttttttttaaataaggagtctcactctgtcacccaggctggagcgcagtggcaccatttcgtctcactgcaacctctgcttcccag

SEQ ID NO: 344306 - DNA, 402 bp, Homo sapiens
cactgtcccagtcctcatggcatttatagatgagcctgtgtgtgttttatttcattataccaacctttgtctatatgcctaagctctctatgccttggtttcagtccctagacaaaaggctaacatattaggaattctgttttgcacccttcacaaaaaggtagctaaacatgaaacatttggttaatcaaaattaagtcattcatatgtataggtctccctgcccatattcctgtgttacctggtgatagccttttgcccagcagacaggtgagcatggtcatcttaatgccacagtaaaaaaagcctctctactactcctaacttgatgatcacaaagcaggccctattatagtatgttcttcccgctcccccctcgccccccgagatggagtcttgctg

SEQ ID NO: 344307 - DNA, 403 bp, Homo sapiens
ggttgtttccttttatttattttcagaggcagggtctcactctgtcatccaggatgaagtgctgaagtgcagtggtgcactcccagctcaccgtaaactcgaactcctaggctcaaggggatcctcccactttggcctctcaaagtgctggattacactgcgcatggcctatagcagttagtcgacccttaaattacactagcaatgtcattggcagcctcctgattccctcccaaagtgctgggattacaggcgtgagccacagcacccggcctgtccttttccttttattcagttgtattaaatatatatatggttttttttttttcttttttgagaaggagtctcgctgttgcccagactggaatacagtggcacaatctcggtttactgcaaccccgag

SEQ ID NO: 344308 - DNA, 461 bp, Homo sapiens
ttttactgtgtaccagcactgagtcaggcgaactgaagacttcaacctcggtttcaaccggtagtctgtcataggatttacagattcatgtaacgctcttgacagggatggttatagtttttacctggcttaaaggggggcgggggttccctttttttaaaatcaatttcaatcttatttggaagctcagtgtatcaaacacattcaaaatagaggtgctttgcttaggaaagagcatggcttgtttgggatcccccatccttatcctgcctctgactgcctctggaaacctttgccctaaataatgatggtctgctttctaaggctattgggtgagagaccaacttggaatgcttaataagcaagcatggaagtaacttgcagaagaaaaaagacttcagccttttaatgtcaaaaatatcaaatagggaataatttcaagtggtgatgtcagggacagc

SEQ ID NO: 344309 - DNA, 633 bp, Homo sapiens
cgctcccccccgatctctatttaaaaaaaaaagaaaagaaaaaagaaaaattagtccagaagttccaggctgcagtgagctatgatcataccactgtactccagcctgggtaatggagcaagaccctgtctctaaaaaaataagaaaaatataaaaataaaacacgtcttattaggcagggtgtttaataatttttaaaaacaaggataacagactggccgcagtggctcacacctgtaatcccagcactttggaaggctgaggcagatggactgtttgagtccaggagtctaagaccagcctgggcaacatggcaaaaccccatctctacaaaaaatacaaaaaatagctgggctggtcgcagtggctcacgcctgtaatcccagcactttgggaggccaagacaagtggatcacgaggtcaggagtttgagaccagcctgaccaacatggtgaaacccccgtctctactaaaaatacaaaaattagccaggcatggtggttgcatgcctgtaatcccagctactcaggaggcagaggcaggagaatcacttgaacccgggaggcagaggttgcagtgagccgagatcacgccaccgcactccagcctaggtgacagagtgagactccatct

SEQ ID NO: 344310 - DNA, 857 bp, Homo sapiens
tggtgaacgggtgatggggttggtgactctggatggtgatggtgatggggctggtgactttggatggtgatagtgaagggctgggtgactctggatggtgatggtgatgggtctgggtgactttgctagtgatggtgatgggctgggtgactgcggatggtgcttaaggcaggtggctgggctggcacctagcggataagcagaagctggttctgcagagctgggaaggcaggatcctgtgggctgggcatggtgcgggcgtgggtacaggggtaagttggagaagttggtgaggcataagttggcagggcccagattgggaggccaccatggagaagaaggtgtcttaccaggttgaacctggcagccgtgtgggagaggcaggctggaggcagggaggtcagagctcagtgaggcctggacctaacagtggcagagggaatggaagaaggcacaaaggagacgggggtgcaggaggcgcaggcaccagcctgggggacaaatacagccacatctcagcacgtgccgcccccagccacgatcagtttgtcatgagagaggagagtctattctctcctcttcaccatgtctatgcctatatccacacccacgatcatagatagagcatctgaagctctttctacgtccagagccacattatctagatcacatccacatcgctgtctagatccgtttccacatcgctgtctagatccgtttccacatcacccgtacccggttagatccacaccctatgcatctatctatatcctcatccgcgtctaacttcctcttctccacctgtgtcctcatccgcgtctaaccccatcttctccacctgtatcctcatccgcgtc

SEQ ID NO: 344311 - DNA, 507 bp, Homo sapiens
  misc_feature (14)..(14): n is a, c, g, or t
  misc_feature (16)..(17): n is a, c, g, or t
ctactactactaantnngcggccggtcgacgtcacccaccccgataccatcaccatccaaagtcacccagacctatcaccatcatcatccagagtcaccagccccttcaccatcaccatccaaagtcaccagcccctttaccatcaccatccgcgtctacctccatcttctccacctgtatcctcatccgcgtctacctccatcttctccacctgtatcctcacccgcgtctacctccatcttctccacctgtatcctcacccgcgtctacctccatcttctccatctgtatcctcatccgcgtctgtctccaccttcttcacctgtatcctcatccgcgtgtgtctccatcttcttcacctgtatcctcatccgcgtgtgtctccatcttcttcgcctgtatcctcatccgcgtgtgtctccatcttcttcgcctgtatcctcaactgcgtgtgtctccatcttctccatctccactgctcccctgtccacgtccactgccatgtc

SEQ ID NO: 344312 - DNA, 422 bp, Homo sapiens
ttcaggatccatgtcttctgcttgcttgtttgttgtatttcctagaggaaaacagtctggtgttaaccttgggttttactggctacctcaccccatagaaacacaacaataacaacgaatgcttctttgaacaccatttttcactattctaagcattttatatgcattaattatcagttacatttgctgttaggcaaatgctaccacatcctctttttacagataatgaggcagacagagaggttatgtgactcacttggggccgcccagctggttagtgacgggcccagagcaccctccagagacactgtcctgaaccatcgtgctgtgctgccacccactgagcttggagcaccacggggagggggtggggaaaggcgaaacgtcaggagagggtgagaaatgggaatttggaggcataa

SEQ ID NO: 344313 - DNA, 850 bp, Homo sapiens
gatctcgagtagtccagtgaccaatactgatatatgctctttaaggatcatggatatcctgcattcctgaagagctttcatttggtaggacttggtgcaaccctgtgtgctataaacatcactgaaatcccacttataaagatctcagaattcagggtggtagtggccagaattgggaccctgctctgcagcacacatgtcttagccgagtttaagaggaaggctgaagttgtgtttggggatcccactgagtggaccagttctgtcttgcaggagcttgggaccattgcagctggattaactaaggcagagctccggatgcttgacaaggatttgatgccatatttccagccatcagcaataaaatgccttcctgatgagatattcaaagagctgtccgcggagcagatcgcctccctgggtccggagaacgccgcggcggtgacccacgcccagcgccggcggctcagtccactgcagctgcagagcctccagcaggcgctagatggcgccaagactcactcctggcaggacgcgcccgctagcgccggtcccactagaacctcatcctcgcgttctcccgcaggagctctccagtcgtggggtctttggcttggttgtcccctgctggttctaatggccaagctcctgtggtgagtggcctgagcgcatcgtcctgtgttgccccaagcagctggccaacatgtgtagagacaggatgctccagatggtgggacacccttccctggatccagaccctcatctagggcagggaaaccctggggccttgatggtgaaaatgcaccccaaatgaaaaataattattaaaaatgatcttgcaaattaaaat

SEQ ID NO: 344314 - DNA, 891 bp, Homo sapiens
tttctcttccccccaccatcagcggcgactaacgacaaaaacaaccaactcaggctgaatccttttgcaaggtgtacctggatgattcaggatacagtatccaggacctgaagagctttcatttggtaggacttggtgcaaccctgtgtgctataaacatcactgaaatcccacttataaagatctcagaattcagggtggtagtggccagaattgggaccctgctctgcagcacacatgtcttagccgagtttaagaggaaggctgaagttgtgtttggggatcccactgagtggaccagttctgtcttgcaggagcttgggaccattgcagctggattaactaaggcagagctccggatgcttgacaaggatttgatgccatatttccagccatcagcaataaaatgccttcctgatgagatattcaaagagctgtccgcggagcagatcgcctccctgggtccggagaacgccgcggcggtgacccacgcccagcgccggcggctcagtccactgcagctgcagagcctccagcaggcgctagatggcgccaagactcactcctggcaggacgcgcccgctagcgccggtcccactagaacctcatcctcgcgttctcccgcaggagctctccagtcgtggggtctttggcttggttgtcccctgctggttctaatggccaagctcctgtggtgagtggcctgagcgcatcgtcctgtgttgccccaagcagctggccaacatgtgtagagacaggatgctccagatggtgggacacccttccctggatccagaccctcatctagggcagggaaaccctggggccttgatggtgaaaatgcaccccaaatgaaaaataattattaaaaatgatcttgcaaattaaaat

SEQ ID NO: 344315 - DNA, 296 bp, Homo sapiens
cttgtgtatgtcgtgcatagaatctagctgctttcctctattgagcgcagagtatactatgtctctatgtgaatatggacagttagcatttaccaacatctccttgtctactgtgtcttttttttttggaaatggagtctcgctctttcgcccaggtgggagtgcagtgccgtgatctcggctcactgcaagctccgcctccggggttcatgccattctccggcctcagcctcccaagtagctggaactacaggtgccgtgccaccacgcccggcataattttttttttttttttt

SEQ ID NO: 344316 - DNA, 279 bp, Homo sapiens
tcaatccaatatgatacaatgtacttttccttgtcatagacttcactcaacattggtctccaagtatgtacccttctacggtggtatagaaaaaggaaaaacttgtccaaacagggcagagacagtaggagatgatttggacaggaactgtagctgtttgaagagagataagtttgtgtaatcaagggaaaggagacagttgactgagatttaaaagatgtttataattttaaatgtctttttaccctctagcagttggtctctatttaagcagaattt

SEQ ID NO: 344317 - DNA, 421 bp, Homo sapiens
  misc_feature (58)..(58): n is a, c, g, or t
tggtagccacatcagcacacgagaaaaaactcctatgtgacttggctgcttcttaggngacctggttgcttcctctcgtggtcattgtgaacgctgctgcaatgaacatggtggtacaaatatctcttagagaccctgcttttcaatgctttgggatacatacccagacatgggattactggataataggcctgccattcccatatcctgcgcccataaaaggaccagctgacagagcaatatgaatggctaagtgttggggatacaagaagagactacagatagctgcggccaacttcagatggtgcgacttcagggaaagatcaccttcttcccccaccatcccctttcctattccccattccactgagagccacatccattgcccaataaaatcctccacatatactacccttcaaag

SEQ ID NO: 344318 - DNA, 360 bp, Homo sapiens
ttcctgacctcgggagatccacccaccttggcctcccaaagtgctgggattacaggcgtgagccatcatgcccagctaccatcgttctactttctgttactatgagcttgactacttcagatacattatcctgccattcccatatcctgcgcccataaaaggaccagctgacagagcaatatgaatggctaagtgttggggatacaagaagagactacagatagctgcggccaacttcagatggtgcgacttcagggaaagatcaccttcttcccccaccatcccctttcctattccccattccactgagagccacatccattgcccaataaaatcctccacatatactacccttcaaag

SEQ ID NO: 344319 - DNA, 597 bp, Homo sapiens
acactaacggcgtccgaaccgacccaggggcctgctgggcccccaccttcgtccccaacgctcctcagaggtggctccagcctcgctagcgaccccctcacccccagggaagaaacacattctggtgcttagcgagctgcgcgccgaggacgccggtgaagtccgcttccaggcggggcccgcccagtccctggctctactggaagtggaggcattgcctctccagatgtgccgccacccccctcgcgagaagaccgttctggtgggccgccgggcggtgctggaggtgactgtgtcccgctcggggggccacgtgtgctggctgcgggagggggccgagctgtgcccgggagataagtatgagatgcgcagccacggccccacccacagcctggtcatccatgacgttcgacctgaggaccaaggcacttactgctgccaggccggccaggacagcacccacacacggctgctggtagagggcaactaggagaacctaaccaggccaggcgggtgcccttggacagcttggaaggcgtttgcccttaccctgggcaggggtagagagacaaggaacaataaaagtgctacagctca

SEQ ID NO: 344320 - DNA, 233 bp, Homo sapiens
ggctgggaagagaggctcctaagagcaggaagccaggcagcgggcaggggaggctgcggggccactcgctggagaggcaaacaggaaggactgccccctgagcgccaggcttcgggcccgggaatcgccgccgccgccgccgcagagctgcagctcggggccgagggtaaggaggcgagccgggagcgggaggcccgggagagctccgcgggtccccgcgcccagtccccagc

SEQ ID NO: 344321 - DNA, 259 bp, Homo sapiens
ctgggttcaagcaatccttctgcctcagcctccctagtaactaccatgcccggcattccagcctgggtgacagcaagaccctgtctcaaattttaaaaatggggttgatccccgtctcaagtgtctctgggaacattaactgagataacatgaaaattcttacacagagcttggtgaatggttgtcattggtgacacatctcttctaacttatttcattcaagaaatcatcacaataaacctgtgtcccaatgttaaaa

SEQ ID NO: 344322 - DNA, 3057 bp, Homo sapiens
gccccgggcctcggctcgcctctccgcacccccccctgcccccccaccgttcgccgctgcaggcggtcggccgccgcgatgaaggcgagctcgggggatcaggggagccccccgtgcttcctgcgcttcccgcggcctgtgcgggtggtaagtggcgccgaggccgagctcaagtgcgtggtcctgggggagccgccgcctgtagtggtgtgggagaagggcgggcagcagctggcggcctcggaacgcctgagcttcccggcggacggcgcggagcacggcctgctgctgaccgccgcactgcccaccgacgcgggggtctacgtgtgccgcgcccgcaacgcggccggcgaggcctacgcggcggccgccgtcaccgtgctggagccgccggcctccgaccccgagctgcagcccgccgagcgcccgctgccatcgccggggtccggggagggcgccccggtcttcctcacggggccccgagagcccgcccgcggaccccgacgaggcccccgcgccggtggtggagccgctcaagtgcgcgcctaagaccttctgggtgaacgagggcaagcacgccaagttccgctgctacgtgatgggcaagcccgagcccgagatcgaatggcactgggagggccgcccgctgctcccggaccgccgccgcctcatgtaccgcgaccgcgacggcggcttcgtgctcaaggtgctctactgccaggccaaggatcgtgggctctacgtctgcgccgcgcgcaactcggcgggccagacgctcagtgccgtgcagctgcacgtgaaagagccccgcctccggttcacacggcccctgcaggacgtggagggccgtgagcacgggattgccgtgctggaatgtaaagtacccaactcccgcatccccacggcctggttccgtgaggaccagcggctgctgccctgccgcaagtacgagcagatcgaagagggcactgtccggcgcctcatcatccacaggctgaaggcagacgatgatggtatctacctgtgcgagatgcggggccgggtgcgcaccgtggccaacgtcacagtcaaagggcccatcctgaagcgcctgccccggaagctcgacgtcctggaaggagagaatgctgtgctgctagtggaaactctagaggccggggtcgagggacgctggagccgtgatggggaggagctgccggtcatctgccagagcagctcaggccacatgcatgccctggtccttccaggggtcacccgagaggatgctggcgaggtcacctttagcctgggcaactcccgtaccactacgcttctcagagtaaaatgtgtcaagcacagtcccccaggaccccccatattggcagagatgttcaagggccacaagaacacggtcctgttgacctggaagcctcccgagccagctcccgagaccccattcatctaccggctggagcggcaggaagtgggctctgaagactggattcagtgcttcagcatcgagaaagccggagccgtggaggtgccgggcgactgtgtgccctccgagggtgactaccgcttccgcatctgcacagtcagcggacatggccgtagtccccacgtggtgttccacggttctgctcaccttgtgcccacagctcgcctggtggcaggtctggaggatgtgcaggtatacgacggggaagatgccgtcttctccctcgatctctccaccatcatccagggtacctggttccttaatggggaagagctcaagagtaacgagccggagggccaggtggaacctggggccctgcggtaccgtatagagcagaagggtctgcagcacagactcatcctgcatgccgtcaagcaccaggacagcggtgccctggtcggcttcagctgccccggcgtgcaggactcagctgccctcacaatccaagagagcccggtgcacatcctgagcccccaggacaaggtgtcgttgaccttcacaacctcagagcgggtggtgctgacttgtgagctctcaagggtggacttcccggcaacctggtacaaggatgggcagaaggtggaggagagcgagttgctggtggtgaagatggatgggcgcaaacaccgtctgatcctgcctgaggccaaagtccaggacagtggcgagtttgagtgcaggacagaaggggtctcggccttcttcggcgtcactgtccaagatcctcccgtgcacatcgtggacccccgagaacatgtgttcgtgcatgccataacttccgagtgtgtcatgctggcctgtgaggtggaccgagaggacgcccctgtgcgttggtacaaggacgggcaggaggtggaggagagtgacttcgtggtgctggagaatgaggggccccatcgccgcctggtgctgcccgccacccagccctcagacgggggcgagtttcagtgcgtcgctggagatgagtgtgcctacttcactgtcaccatcacagacgtctcctcgtggatcgtgtatcccagcggcaaggtgtatgtggcagccgtgcgcctggagcgtgtggtgctgacctgtgagctatgccggccctgggcagaggtgcgctggaccaaggatggagaggaggtggtggagagccccgcgctgctcctgcagaaggaagacactgtccgccgcctggtgctgcccgctgtccagctcgaggactccggcgagtacttgtgtgaaattgacgatgagtcggcctccttcactgtcaccgtcacagagtcttaccaaagtcaggacagttcaaataacaatccggagttatgcgtcctcttgaaaaagccgaagacccggcggctctggtcccgcttccccccatggcgacgaacagctggcactgagtagcagctgcccccatagtttggggcccacattcctctgtcccacctccctgccattgctttttgcctctccccagactgcttcagccgctaacctaacctggcccctgtgggcatttgagtttgcgacccctgtgttaaaccaataaacatgcaaataaatgtacagtgacacctggtgataagtactgt

SEQ ID NO: 344323 - DNA, 3486 bp, Homo sapiens
gccccgggcctcggctcgcctctccgcacccccccctgcccccccaccgttcgccgctgcaggcggtcggccgccgcgatgaaggcgagctcgggggatcaggggagccccccgtgcttcctgcgcttcccgcggcctgtgcgggtggtaagtggcgccgaggccgagctcaagtgcgtggtcctgggggagccgccgcctgtagtggtgtgggagaagggcgggcagcagctggcggcctcggaacgcctgagcttcccggcggacggcgcggagcacggcctgctgctgaccgccgcactgcccaccgacgcgggggtctacgtgtgccgcgcccgcaacgcggccggcgaggcctacgcggcggccgccgtcaccgtgctggagccgccggcctccgaccccgagctgcagcccgccgagcgcccgctgccatcgccggggtccggggagggcgccccggtcttcctcacggggcctcgatcccagtgggtgctgcggggggcggaggtggtgctgacgtgccgggcggggggcctccccgagcccacactgtactgggagaaggacgggatggccctggacgaagtgtgggacagcagccacttcgcgctccagccgggccgcgccgaggacggccccggcgcgagcctggcactgcgcatcctggcggctcggctgccggattccggcgtctacgtgtgccacgcccgcaacgcgcacggccacgcgcaggcgggggcgctgctccaggtgcaccagccccccgagagcccgcccgcggaccccgacgaggcccccgcgccggtggtggagccgctcaagtgcgcgcctaagaccttctgggtgaacgagggcaagcacgccaagttccgctgctacgtgatgggcaagcccgagcccgagatcgaatggcactgggagggccgcccgctgctcccggaccgccgccgcctcatgtaccgcgaccgcgacggcggcttcgtgctcaaggtgctctactgccaggccaaggatcgtgggctctacgtctgcgccgcgcgcaactcggcgggccagacgctcagtgccgtgcagctgcacgtgaaagagccccgcctccggttcacacggcccctgcaggacgtggagggccgtgagcacgggattgccgtgctggaatgtaaagtacccaactcccgcatccccacggcctggttccgtgaggaccagcggctgctgccctgccgcaagtacgagcagatcgaagagggcactgtccggcgcctcatcatccacaggctgaaggcagacgatgatggtatctacctgtgcgagatgcggggccgggtgcgcaccgtggccaacgtcacagtcaaagggcccatcctgaagcgcctgccccggaagctcgacgtcctggaaggagagaatgctgtgctgctagtggaaactctagaggccggggtcgagggacgctggagccgtgatggggaggagctgccggtcatctgccagagcagctcaggccacatgcatgccctggtccttccaggggtcacccgagaggatgctggcgaggtcacctttagcctgggcaactcccgtaccactacgcttctcagagtaaaatgtgagggcaggaaggcctctggacaggcgaggcagggcaggaggttggccagatgccggagctgggttggtgaagtagatttaaggtggaagggctgtggaggcccaagcaaggccggaacacatccctgccttggtctcaggtgtcaagcacagtcccccaggaccccccatattggcagagatgttcaagggccacaagaacacggtcctgttgacctggaagcctcccgagccagctcccgagaccccattcatctaccggctggagcggcaggaagtgggctctgaagactggattcagtgcttcagcatcgagaaagccggagccgtggaggtgccgggcgactgtgtgccctccgagggtgactaccgcttccgcatctgcacagtcagcggacatggccgtagtccccacgtggtgttccacggttctgctcaccttgtgcccacagctcgcctggtggcaggtctggaggatgtgcaggtatacgacggggaagatgccgtcttctccctcgatctctccaccatcatccagggtacctggttccttaatggggaagagctcaagagtaacgagccggagggccaggtggaacctggggccctgcggtaccgtatagagcagaagggtctgcagcacagactcatcctgcatgccgtcaagcaccaggacagcggtgccctggtcggcttcagctgccccggcgtgcaggactcagctgccctcacaatccaagagagcccggtgcacatcctgagcccccaggacaaggtgtcgttgaccttcacaacctcagagcgggtggtgctgacttgtgagctctcaagggtggacttcccggcaacctggtacaaggatgggcagaaggtggaggagagcgagttgctggtggtgaagatggatgggcgcaaacaccgtctgatcctgcctgaggccaaagtccaggacagtggcgagtttgagtgcaggacagaaggggtctcggccttcttcggcgtcactgtccaagatcctcccgtgcacatcgtggacccccgagaacatgtgttcgtgcatgccataacttccgagtgtgtcatgctggcctgtgaggtggaccgagaggacgcccctgtgcgttggtacaaggacgggcaggaggtggaggagagtgacttcgtggtgctggagaatgaggggccccatcgccgcctggtgctgcccgccacccagccctcagacgggggcgagtttcagtgcgtcgctggagatgagtgtgcctacttcactgtcaccatcacagacgtctcctcgtggatcgtgtatcccagcggcaaggtgtatgtggcagccgtgcgcctggagcgtgtggtgctgacctgtgagctatgccggccctgggcagaggtgcgctggaccaaggatggagaggaggtggtggagagccccgcgctgctcctgcagaaggaagacactgtccgccgcctggtgctgcccgctgtccagctcgaggactccggcgagtacttgtgtgaaattgacgatgagtcggcctccttcactgtcaccgtcacagagtcttaccaaagtcaggacagttcaaataacaatccggagttatgcgtcctcttgaaaaagccgaagacccggcggctctggtcccgcttccccccatggcgacgaacagctggcactgagtagcagctgcccccatagtttggggcccacattcctctgtcccacctccctgccattgctttttgcctctccccagactgcttcagccgctaacctaacctggcccctgtgggcatttgagtttgcgacccctgtgttaaaccaataaacatgcaaataaatgtacagtgacacctggtgataagtactgt

SEQ ID NO: 344324 - DNA, 5284 bp, Homo sapiens
  misc_feature (4600)..(4600): n is a, c, g, or t
gccccgggcctcggctcgcctctccgcacccccccctgcccccccaccgttcgccgctgcaggcggtcggccgccgcgatgaaggcgagctcgggggatcaggggagccccccgtgcttcctgcgcttcccgcggcctgtgcgggtggtaagtggcgccgaggccgagctcaagtgcgtggtcctgggggagccgccgcctgtagtggtgtgggagaagggcgggcagcagctggcggcctcggaacgcctgagcttcccggcggacggcgcggagcacggcctgctgctgaccgccgcactgcccaccgacgcgggggtctacgtgtgccgcgcccgcaacgcggccggcgaggcctacgcggcggccgccgtcaccgtgctggagccgccggcctccgaccccgagctgcagcccgccgagcgcccgctgccatcgccggggtccggggagggcgccccggtcttcctcacggggcctcgatcccagtgggtgctgcggggggcggaggtggtgctgacgtgccgggcggggggcctccccgagcccacactgtactgggagaaggacgggatggccctggacgaagtgtgggacagcagccacttcgcgctccagccgggccgcgccgaggacggccccggcgcgagcctggcactgcgcatcctggcggctcggctgccggattccggcgtctacgtgtgccacgcccgcaacgcgcacggccacgcgcaggcgggggcgctgctccaggtgcaccagccccccgagagcccgcccgcggaccccgacgaggcccccgcgccggtggtggagccgctcaagtgcgcgcctaagaccttctgggtgaacgagggcaagcacgccaagttccgctgctacgtgatgggcaagcccgagcccgagatcgaatggcactgggagggccgcccgctgctcccggaccgccgccgcctcatgtaccgcgaccgcgacggcggcttcgtgctcaaggtgctctactgccaggccaaggatcgtgggctctacgtctgcgccgcgcgcaactcggcgggccagacgctcagtgccgtgcagctgcacgtgaaagagccccgcctccggttcacacggcccctgcaggacgtggagggccgtgagcacgggattgccgtgctggaatgtaaagtacccaactcccgcatccccacggcctggttccgtgaggaccagcggctgctgccctgccgcaagtacgagcagatcgaagagggcactgtccggcgcctcatcatccacaggctgaaggcagacgatgatggtatctacctgtgcgagatgcggggccgggtgcgcaccgtggccaacgtcacagtcaaagggcccatcctgaagcgcctgccccggaagctcgacgtcctggaaggagagaatgctgtgctgctagtggaaactctagaggccggggtcgagggacgctggagccgtgatggggaggagctgccggtcatctgccagagcagctcaggccacatgcatgccctggtccttccaggggtcacccgagaggatgctggcgaggtcacctttagcctgggcaactcccgtaccactacgcttctcagagtaaaatgtgtcaagcacagtcccccaggaccccccatattggcagagatgttcaagggccacaagaacacggtcctgttgacctggaagcctcccgagccagctcccgagaccccattcatctaccggctggagcggcaggaagtgggctctgaagactggattcagtgcttcagcatcgagaaagccggagccgtggaggtgccgggcgactgtgtgccctccgagggtgactaccgcttccgcatctgcacagtcagcggacatggccgtagtccccacgtggtgttccacggttctgctcaccttgtgcccacagctcgcctggtggcaggtctggaggatgtgcaggtatacgacggggaagatgccgtcttctccctcgatctctccaccatcatccagggtacctggttccttaatggggaagagctcaagagtaacgagccggagggccaggtggaacctggggccctgcggtaccgtatagagcagaagggtctgcagcacagactcatcctgcatgccgtcaagcaccaggacagcggtgccctggtcggcttcagctgccccggcgtgcaggactcagctgccctcacaatccaagagagcccggtgcacatcctgagcccccaggacaaggtgtcgttgaccttcacaacctcagagcgggtggtgctgacttgtgagctctcaagggtggacttcccggcaacctggtacaaggatgggcagaaggtggaggagagcgagttgctggtggtgaagatggatgggcgcaaacaccgtctgatcctgcctgaggccaaagtccaggacagtggcgagtttgagtgcaggacagaaggggtctcggccttcttcggcgtcactgtccaagatcctcccgtgcacatcgtggacccccgagaacatgtgttcgtgcatgccataacttccgagtgtgtcatgctggcctgtgaggtggaccgagaggacgcccctgtgcgttggtacaaggacgggcaggaggtggaggagagtgacttcgtggtgctggagaatgaggggccccatcgccgcctggtgctgcccgccacccagccctcagacgggggcgagtttcagtgcgtcgctggagatgagtgtgcctacttcactgtcaccatcacagacgtctcctcgtggatcgtgtatcccagcggcaaggtgtatgtggcagccgtgcgcctggagcgtgtggtgctgacctgtgagctatgccggccctgggcagaggtgcgctggaccaaggatggagaggaggtggtggagagccccgcgctgctcctgcagaaggaagacactgtccgccgcctggtgctgcccgctgtccagctcgaggactccggcgagtacttgtgtgaaattgacgatgagtcggcctccttcactgtcaccgtcacagaacccccagtgcggatcatataccctcgcgatgaggtgaccttgatcgccgtgaccttggagtgtgtggtgctgatgtgtgaactgtctcgggaggatgcccctgtgcgctggtacaaggatgggctggaagtggaggagagcgaggccctggtgctggagagggatgggccacgctgccgcctggtgctacctgctgctcagcccgaggacgggggcgagtttgtatgtgatgctggagatgactcggccttcttcactgtcactgtcacagccccaccagagaggattgtgcacccggcagcccgctccctggatctgcattttggggctccagggcgcgtggagctgcgctgtgaggtggccccagctgggtctcaggtgcgctggtacaaggacgggctggaagtggaggcatcagatgccctgcagctgggtgccgaggggcccacccgcaccctgaccctgccccacgcccagcctgaggacgccggggagtatgtgtgtgagacccggcatgaggccatcaccttcaatgtcatcctggctgagcctccagtgcagttccttgctctagagacaactccaagcccgctctgtgtggcccctggggagccagtggtgctgagctgtgaactgtcccgggctggcgcccccgtggtctggagccacaatgggaggcccgtgcaggagggcgagggcctagagctccatgccgagggcccccgccgagtcctctgcatccaggctgcaggcccagcccatgcagggctctacacctgccagtctggagcagcccccggagccccaagcctcagcttcaccgtccaggtggctgagccactgctggtgaagctggtctcggacctgacaccactcactgtccacgagggcgatgatgccacgttccggtgtgaagtctccccaccagatgccgatgtcacctggctgcgcaatggggccgtcgtcactccagggccccaggtggagatggcccagaatggttcaagccgcatcttaaccttgcgaggctgccaactgggggatgcagggaccgtgactttgcgggcagggagcacggccacaagtgcccggctccatgttcgagagacagagctgctgttcctacggcggttgcaggatgtgcgggcagaggaaggccaggacgtgtgtctcgaagtggagacaggccgagtgggtgcagcgggggccgtgcgctgggtgcgaggtgggcagcccctgccccacgactctcgcctgtccatggcccaggatgggcacatccaccgcctcttcatccatggtgtcatactggccgaccagggcacctacggctgcgagagccaccacgatcgcaccctggccaggctcagcgtgaggcgtgagtgccccgtcctctcttaatgcattacccaccctacaccacagccttttctggctgtcctggagtccctcaggcccccaccaaagtgcccctcatcgctgagaaaagtcacccatggccgtcccagcagcagcttgcccaaagcaaaacttttctttttctaatattttttatttaccttagaantccatgtggattttgcattccattgcatatttccaagtcggctttgctataaacacaaatattctccagaaagacttgccatgggcatccttcaggcatgtattctagggatacacatacccacttaagtagcagggatggctgtcaaacagcaccccacacctcccacccaaagctggagccctctgtttcctatgtgacctcatgcaagttaacctctttgagccaagtctccttaaaaatggggctgagaccaggtgcagtggctcacgcctataatcctaacactttgggaggccaaggcaggaggatcccttgaggccaggagttcgaggccatcctgggcaacatagcaagaacccatctccacaaaaaaaataaaaattagccgggcatggtagttactagggaggctgaggcagaaggattgcttgaacccaggaggttgaggctatagtgagctatgatcatgtcacggcattccagcctgggtgacagcaagaccctgtctcaaattttaaaaatggggttgatccccgtctcaagtgtctctgggaacattaactgagataacatgaaaattcttacacagagcttggtgaatggttgtcattggtgacacatctcttctaacttatttcattcaagaaatcatcacaataaacctgtgtcccaatgttaaaa

SEQ ID NO: 344325 - DNA, 5952 bp, Homo sapiens
gccccgggcctcggctcgcctctccgcacccccccctgcccccccaccgttcgccgctgcaggcggtcggccgccgcgatgaaggcgagctcgggggatcaggggagccccccgtgcttcctgcgcttcccgcggcctgtgcgggtggtaagtggcgccgaggccgagctcaagtgcgtggtcctgggggagccgccgcctgtagtggtgtgggagaagggcgggcagcagctggcggcctcggaacgcctgagcttcccggcggacggcgcggagcacggcctgctgctgaccgccgcactgcccaccgacgcgggggtctacgtgtgccgcgcccgcaacgcggccggcgaggcctacgcggcggccgccgtcaccgtgctggagccgccggcctccgaccccgagctgcagcccgccgagcgcccgctgccatcgccggggtccggggagggcgccccggtcttcctcacggggcctcgatcccagtgggtgctgcggggggcggaggtggtgctgacgtgccgggcggggggcctccccgagcccacactgtactgggagaaggacgggatggccctggacgaagtgtgggacagcagccacttcgcgctccagccgggccgcgccgaggacggccccggcgcgagcctggcactgcgcatcctggcggctcggctgccggattccggcgtctacgtgtgccacgcccgcaacgcgcacggccacgcgcaggcgggggcgctgctccaggtgcaccagccccccgagagcccgcccgcggaccccgacgaggcccccgcgccggtggtggagccgctcaagtgcgcgcctaagaccttctgggtgaacgagggcaagcacgccaagttccgctgctacgtgatgggcaagcccgagcccgagatcgaatggcactgggagggccgcccgctgctcccggaccgccgccgcctcatgtaccgcgaccgcgacggcggcttcgtgctcaaggtgctctactgccaggccaaggatcgtgggctctacgtctgcgccgcgcgcaactcggcgggccagacgctcagtgccgtgcagctgcacgtgaaagagccccgcctccggttcacacggcccctgcaggacgtggagggccgtgagcacgggattgccgtgctggaatgtaaagtacccaactcccgcatccccacggcctggttccgtgaggaccagcggctgctgccctgccgcaagtacgagcagatcgaagagggcactgtccggcgcctcatcatccacaggctgaaggcagacgatgatggtatctacctgtgcgagatgcggggccgggtgcgcaccgtggccaacgtcacagtcaaagggcccatcctgaagcgcctgccccggaagctcgacgtcctggaaggagagaatgctgtgctgctagtggaaactctagaggccggggtcgagggacgctggagccgtgatggggaggagctgccggtcatctgccagagcagctcaggccacatgcatgccctggtccttccaggggtcacccgagaggatgctggcgaggtcacctttagcctgggcaactcccgtaccactacgcttctcagagtaaaatgtgtcaagcacagtcccccaggaccccccatattggcagagatgttcaagggccacaagaacacggtcctgttgacctggaagcctcccgagccagctcccgagaccccattcatctaccggctggagcggcaggaagtgggctctgaagactggattcagtgcttcagcatcgagaaagccggagccgtggaggtgccgggcgactgtgtgccctccgagggtgactaccgcttccgcatctgcacagtcagcggacatggccgtagtccccacgtggtgttccacggttctgctcaccttgtgcccacagctcgcctggtggcaggtctggaggatgtgcaggtatacgacggggaagatgccgtcttctccctcgatctctccaccatcatccagggtacctggttccttaatggggaagagctcaagagtaacgagccggagggccaggtggaacctggggccctgcggtaccgtatagagcagaagggtctgcagcacagactcatcctgcatgccgtcaagcaccaggacagcggtgccctggtcggcttcagctgccccggcgtgcaggactcagctgccctcacaatccaagagagcccggtgcacatcctgagcccccaggacaaggtgtcgttgaccttcacaacctcagagcgggtggtgctgacttgtgagctctcaagggtggacttcccggcaacctggtacaaggatgggcagaaggtggaggagagcgagttgctggtggtgaagatggatgggcgcaaacaccgtctgatcctgcctgaggccaaagtccaggacagtggcgagtttgagtgcaggacagaaggggtctcggccttcttcggcgtcactgtccaagatcctcccgtgcacatcgtggacccccgagaacatgtgttcgtgcatgccataacttccgagtgtgtcatgctggcctgtgaggtggaccgagaggacgcccctgtgcgttggtacaaggacgggcaggaggtggaggagagtgacttcgtggtgctggagaatgaggggccccatcgccgcctggtgctgcccgccacccagccctcagacgggggcgagtttcagtgcgtcgctggagatgagtgtgcctacttcactgtcaccatcacagacgtctcctcgtggatcgtgtatcccagcggcaaggtgtatgtggcagccgtgcgcctggagcgtgtggtgctgacctgtgagctatgccggccctgggcagaggtgcgctggaccaaggatggagaggaggtggtggagagccccgcgctgctcctgcagaaggaagacactgtccgccgcctggtgctgcccgctgtccagctcgaggactccggcgagtacttgtgtgaaattgacgatgagtcggcctccttcactgtcaccgtcacagaacccccagtgcggatcatataccctcgcgatgaggtgaccttgatcgccgtgaccttggagtgtgtggtgctgatgtgtgaactgtctcgggaggatgcccctgtgcgctggtacaaggatgggctggaagtggaggagagcgaggccctggtgctggagagggatgggccacgctgccgcctggtgctacctgctgctcagcccgaggacgggggcgagtttgtatgtgatgctggagatgactcggccttcttcactgtcactgtcacagagcctccagtgcagttccttgctctagagacaactccaagcccgctctgtgtggcccctggggagccagtggtgctgagctgtgaactgtcccgggctggcgcccccgtggtctggagccacaatgggaggcccgtgcaggagggcgagggcctagagctccatgccgagggcccccgccgagtcctctgcatccaggctgcaggcccagcccatgcagggctctacacctgccagtctggagcagcccccggagccccaagcctcagcttcaccgtccaggtggctgagccccctgtgcgggtggtagctcccgaggcagcccagacgagggttcggagcaccccaggcggggacctagagctggtggtgcacctctccgggccagggggccctgtacgctggtacaaggacggggagcgactggcaagccaggggcgggtgcagctggagcaggccggggccaggcaggtgctgcgggtgcagggggcacggagcggggacgctggggagtacctgtgcgatgcgccccaggacagccgcatcttccttgtcagcgtggaagagccactgctggtgaagctggtctcggacctgacaccactcactgtccacgagggcgatgatgccacgttccggtgtgaagtctccccaccagatgccgatgtcacctggctgcgcaatggggccgtcgtcactccagggccccagagacagagctgctgttcctacggcggttgcaggatgtgcgggcagaggaaggccaggacgtgtgtctcgaagtggagacaggccgagtgggtgcagcgggggccgtgcgctgggtgcgaggtgggcagcccctgccccacgactctcgcctgtccatggcccaggatgggcacatccaccgcctcttcatccatggtgtcatactggccgaccagggcacctacggctgcgagagccaccacgatcgcaccctggccaggctcagcgtgaggcgacgggaacgcgcttacgcctagcccgcggctccggctccaggccctcggcacgcgccgccttctccagctgcgacgctgcggcccctcggacgccgggacctacagctgcgcggtggggacggcccgcgccggaccggtccgcctgaccgtgcgcggtgggtacggggtgatgtggaggctgggcactgctttgggcgcgagacttgcggagctgtcttccccggaccctgatgaccgcgcgtgcttctagaaagggggcgtggagggggcgtgaccggtaactgccctctgccccgccccgctcacgccccgggctccgccccagagcgtactgtggcggtactctccgagctgcggtcggtgagcgcccgcgaaggcgacggcgctacgttcgagtgcaccgtgtcggaggtcgagaccacggggcgctgggagctcggaggccgcccgctgagacccggagcccgcgtccgcatccaacaggaagggaagaaacacattctggtgcttagcgagctgcgcgccgaggacgccggtgaagtccgcttccaggcggggcccgcccagtccctggctctactggaagtggaggcattgcctctccagatgtgccgccacccccctcgcgagaagaccgttctggtgggccgccgggcggtgctggaggtgactgtgtcccgctcggggggccacgtgtgctggctgcgggagggggccgagctgtgcccgggagataagtatgagatgcgcagccacggccccacccacagcctggtcatccatgacgttcgacctgaggaccaaggcacttactgctgccaggccggccaggacagcacccacacacggctgctggtagagggtgagtaaagccaactgggcagcggcaggagggtgagggcgcctgggagctgatgggttaagccacacctatgggaggctttccaggacttggggtggcaacgggtcctgggatacgtaggaggtggggatgggggaggggaggggtagagcacacccagggctggaaagccctggaactgcttggctcagatcagctgctcctggtcagctgttcccacctttctacgccccttcttgccaggcttctcctctctcctgccactggaccatgtttgtctctcttgaacagccctgtttctaccagttcctttcctccccacttcaccaacactgccttcctccagcctgtccctcctccttcctgccctctgcccagcttgcctctgcccatctcagcaagttccatgtcagcctcggcagaagcctctttctttcctcttccccataagagacatcccaccttctatcccaaatcccagcattcccttcaggtgccacgctgtgccccacccctagctgacccccaccttcctgccgccaagacagccctaaccaaggcccagaaagggtagggcagaacctgggggcccagctctttgtgtactggtgtccaggctctgccaggggagaggaaggtggtacccccttctctccccagccccatgtggagtcattcctctgcaggcaactaggagaacctaaccaggccaggcgggtgcccttggacagcttggaaggcgtttgcccttaccctgggcaggggtagagagacaaggaacaataaaagtgctacagctca

SEQ ID NO: 344326 - DNA, 5120 bp, Homo sapiens
gccccgggcctcggctcgcctctccgcacccccccctgcccccccaccgttcgccgctgcaggcggtcggccgccgcgatgaaggcgagctcgggggatcaggggagccccccgtgcttcctgcgcttcccgcggcctgtgcgggtggtaagtggcgccgaggccgagctcaagtgcgtggtcctgggggagccgccgcctgtagtggtgtgggagaagggcgggcagcagctggcggcctcggaacgcctgagcttcccggcggacggcgcggagcacggcctgctgctgaccgccgcactgcccaccgacgcgggggtctacgtgtgccgcgcccgcaacgcggccggcgaggcctacgcggcggccgccgtcaccgtgctggagccgccggcctccgaccccgagctgcagcccgccgagcgcccgctgccatcgccggggtccggggagggcgccccggtcttcctcacggggcctcgatcccagtgggtgctgcggggggcggaggtggtgctgacgtgccgggcggggggcctccccgagcccacactgtactgggagaaggacgggatggccctggacgaagtgtgggacagcagccacttcgcgctccagccgggccgcgccgaggacggccccggcgcgagcctggcactgcgcatcctggcggctcggctgccggattccggcgtctacgtgtgccacgcccgcaacgcgcacggccacgcgcaggcgggggcgctgctccaggtgcaccagccccccgagagcccgcccgcggaccccgacgaggcccccgcgccggtggtggagccgctcaagtgcgcgcctaagaccttctgggtgaacgagggcaagcacgccaagttccgctgctacgtgatgggcaagcccgagcccgagatcgaatggcactgggagggccgcccgctgctcccggaccgccgccgcctcatgtaccgcgaccgcgacggcggcttcgtgctcaaggtgctctactgccaggccaaggatcgtgggctctacgtctgcgccgcgcgcaactcggcgggccagacgctcagtgccgtgcagctgcacgtgaaagagccccgcctccggttcacacggcccctgcaggacgtggagggccgtgagcacgggattgccgtgctggaatgtaaagtacccaactcccgcatccccacggcctggttccgtgaggaccagcggctgctgccctgccgcaagtacgagcagatcgaagagggcactgtccggcgcctcatcatccacaggctgaaggcagacgatgatggtatctacctgtgcgagatgcggggccgggtgcgcaccgtggccaacgtcacagtcaaagggcccatcctgaagcgcctgccccggaagctcgacgtcctggaaggagagaatgctgtgctgctagtggaaactctagaggccggggtcgagggacgctggagccgtgatggggaggagctgccggtcatctgccagagcagctcaggccacatgcatgccctggtccttccaggggtcacccgagaggatgctggcgaggtcacctttagcctgggcaactcccgtaccactacgcttctcagagtaaaatgtgtcaagcacagtcccccaggaccccccatattggcagagatgttcaagggccacaagaacacggtcctgttgacctggaagcctcccgagccagctcccgagaccccattcatctaccggctggagcggcaggaagtgggctctgaagactggattcagtgcttcagcatcgagaaagccggagccgtggaggtgccgggcgactgtgtgccctccgagggtgactaccgcttccgcatctgcacagtcagcggacatggccgtagtccccacgtggtgttccacggttctgctcaccttgtgcccacagctcgcctggtggcaggtctggaggatgtgcaggtatacgacggggaagatgccgtcttctccctcgatctctccaccatcatccagggtacctggttccttaatggggaagagctcaagagtaacgagccggagggccaggtggaacctggggccctgcggtaccgtatagagcagaagggtctgcagcacagactcatcctgcatgccgtcaagcaccaggacagcggtgccctggtcggcttcagctgccccggcgtgcaggactcagctgccctcacaatccaagagagcccggtgcacatcctgagcccccaggacaaggtgtcgttgaccttcacaacctcagagcgggtggtgctgacttgtgagctctcaagggtggacttcccggcaacctggtacaaggatgggcagaaggtggaggagagcgagttgctggtggtgaagatggatgggcgcaaacaccgtctgatcctgcctgaggccaaagtccaggacagtggcgagtttgagtgcaggacagaaggggtctcggccttcttcggcgtcactgtccaagatcctcccgtgcacatcgtggacccccgagaacatgtgttcgtgcatgccataacttccgagtgtgtcatgctggcctgtgaggtggaccgagaggacgcccctgtgcgttggtacaaggacgggcaggaggtggaggagagtgacttcgtggtgctggagaatgaggggccccatcgccgcctggtgctgcccgccacccagccctcagacgggggcgagtttcagtgcgtcgctggagatgagtgtgcctacttcactgtcaccatcacagacgtctcctcgtggatcgtgtatcccagcggcaaggtgtatgtggcagccgtgcgcctggagcgtgtggtgctgacctgtgagctatgccggccctgggcagaggtgcgctggaccaaggatggagaggaggtggtggagagccccgcgctgctcctgcagaaggaagacactgtccgccgcctggtgctgcccgctgtccagctcgaggactccggcgagtacttgtgtgaaattgacgatgagtcggcctccttcactgtcaccgtcacagaacccccagtgcggatcatataccctcgcgatgaggtgaccttgatcgccgtgaccttggagtgtgtggtgctgatgtgtgaactgtctcgggaggatgcccctgtgcgctggtacaaggatgggctggaagtggaggagagcgaggccctggtgctggagagggatgggccacgctgccgcctggtgctacctgctgctcagcccgaggacgggggcgagtttgtatgtgatgctggagatgactcggccttcttcactgtcactgtcacagccccaccagagaggattgtgcacccggcagcccgctccctggatctgcattttggggctccagggcgcgtggagctgcgctgtgaggtggccccagctgggtctcaggtgcgctggtacaaggacgggctggaagtggaggcatcagatgccctgcagctgggtgccgaggggcccacccgcaccctgaccctgccccacgcccagcctgaggacgccggggagtatgtgtgtgagacccggcatgaggccatcaccttcaatgtcatcctggctgagcctccagtgcagttccttgctctagagacaactccaagcccgctctgtgtggcccctggggagccagtggtgctgagctgtgaactgtcccgggctggcgcccccgtggtctggagccacaatgggaggcccgtgcaggagggcgagggcctagagctccatgccgagggcccccgccgagtcctctgcatccaggctgcaggcccagcccatgcagggctctacacctgccagtctggagcagcccccggagccccaagcctcagcttcaccgtccaggtggctgagacagagctgctgttcctacggcggttgcaggatgtgcgggcagaggaaggccaggacgtgtgtctcgaagtggagacaggccgagtgggtgcagcgggggccgtgcgctgggtgcgaggtgggcagcccctgccccacgactctcgcctgtccatggcccaggatgggcacatccaccgcctcttcatccatggtgtcatactggccgaccagggcacctacggctgcgagagccaccacgatcgcaccctggccaggctcagcgtgaggcgacgggaacgcgcttacgcctagcccgcggctccggctccaggccctcggcacgcgccgccttctccagctgcgacgctgcggcccctcggacgccgggacctacagctgcgcggtggggacggcccgcgccggaccggtccgcctgaccgtgcgcggtgggtacggggtgatgtggaggctgggcactgctttgggcgcgagacttgcggagctgtcttccccggaccctgatgaccgcgcgtgcttctagaaagggggcgtggagggggcgtgaccggtaactgccctctgccccgccccgctcacgccccgggctccgccccagagcgtactgtggcggtactctccgagctgcggtcggtgagcgcccgcgaaggcgacggcgctacgttcgagtgcaccgtgtcggaggtcgagaccacggggcgctgggagctcggaggccgcccgctgagacccggagcccgcgtccgcatccaacaggaagggaagaaacacattctggtgcttagcgagctgcgcgccgaggacgccggtgaagtccgcttccaggcggggcccgcccagtccctggctctactggaagtggaggcattgcctctccagatgtgccgccacccccctcgcgagaagaccgttctggtgggccgccgggcggtgctggaggtgactgtgtcccgctcggggggccacgtgtgctggctgcgggagggggccgagctgtgcccgggagataagtatgagatgcgcagccacggccccacccacagcctggtcatccatgacgttcgacctgaggaccaaggcacttactgctgccaggccggccaggacagcacccacacacggctgctggtagagggcaactaggagaacctaaccaggccaggcgggtgcccttggacagcttggaaggcgtttgcccttaccctgggcaggggtagagagacaaggaacaataaaagtgctacagctca

SEQ ID NO: 344327 - DNA, 5363 bp, Homo sapiens
gccccgggcctcggctcgcctctccgcacccccccctgcccccccaccgttcgccgctgcaggcggtcggccgccgcgatgaaggcgagctcgggggatcaggggagccccccgtgcttcctgcgcttcccgcggcctgtgcgggtggtaagtggcgccgaggccgagctcaagtgcgtggtcctgggggagccgccgcctgtagtggtgtgggagaagggcgggcagcagctggcggcctcggaacgcctgagcttcccggcggacggcgcggagcacggcctgctgctgaccgccgcactgcccaccgacgcgggggtctacgtgtgccgcgcccgcaacgcggccggcgaggcctacgcggcggccgccgtcaccgtgctggagccgccggcctccgaccccgagctgcagcccgccgagcgcccgctgccatcgccggggtccggggagggcgccccggtcttcctcacggggcctcgatcccagtgggtgctgcggggggcggaggtggtgctgacgtgccgggcggggggcctccccgagcccacactgtactgggagaaggacgggatggccctggacgaagtgtgggacagcagccacttcgcgctccagccgggccgcgccgaggacggccccggcgcgagcctggcactgcgcatcctggcggctcggctgccggattccggcgtctacgtgtgccacgcccgcaacgcgcacggccacgcgcaggcgggggcgctgctccaggtgcaccagccccccgagagcccgcccgcggaccccgacgaggcccccgcgccggtggtggagccgctcaagtgcgcgcctaagaccttctgggtgaacgagggcaagcacgccaagttccgctgctacgtgatgggcaagcccgagcccgagatcgaatggcactgggagggccgcccgctgctcccggaccgccgccgcctcatgtaccgcgaccgcgacggcggcttcgtgctcaaggtgctctactgccaggccaaggatcgtgggctctacgtctgcgccgcgcgcaactcggcgggccagacgctcagtgccgtgcagctgcacgtgaaagagccccgcctccggttcacacggcccctgcaggacgtggagggccgtgagcacgggattgccgtgctggaatgtaaagtacccaactcccgcatccccacggcctggttccgtgaggaccagcggctgctgccctgccgcaagtacgagcagatcgaagagggcactgtccggcgcctcatcatccacaggctgaaggcagacgatgatggtatctacctgtgcgagatgcggggccgggtgcgcaccgtggccaacgtcacagtcaaagggcccatcctgaagcgcctgccccggaagctcgacgtcctggaaggagagaatgctgtgctgctagtggaaactctagaggccggggtcgagggacgctggagccgtgatggggaggagctgccggtcatctgccagagcagctcaggccacatgcatgccctggtccttccaggggtcacccgagaggatgctggcgaggtcacctttagcctgggcaactcccgtaccactacgcttctcagagtaaaatgtgtcaagcacagtcccccaggaccccccatattggcagagatgttcaagggccacaagaacacggtcctgttgacctggaagcctcccgagccagctcccgagaccccattcatctaccggctggagcggcaggaagtgggctctgaagactggattcagtgcttcagcatcgagaaagccggagccgtggaggtgccgggcgactgtgtgccctccgagggtgactaccgcttccgcatctgcacagtcagcggacatggccgtagtccccacgtggtgttccacggttctgctcaccttgtgcccacagctcgcctggtggcaggtctggaggatgtgcaggtatacgacggggaagatgccgtcttctccctcgatctctccaccatcatccagggtacctggttccttaatggggaagagctcaagagtaacgagccggagggccaggtggaacctggggccctgcggtaccgtatagagcagaagggtctgcagcacagactcatcctgcatgccgtcaagcaccaggacagcggtgccctggtcggcttcagctgccccggcgtgcaggactcagctgccctcacaatccaagagagcccggtgcacatcctgagcccccaggacaaggtgtcgttgaccttcacaacctcagagcgggtggtgctgacttgtgagctctcaagggtggacttcccggcaacctggtacaaggatgggcagaaggtggaggagagcgagttgctggtggtgaagatggatgggcgcaaacaccgtctgatcctgcctgaggccaaagtccaggacagtggcgagtttgagtgcaggacagaaggggtctcggccttcttcggcgtcactgtccaagatcctcccgtgcacatcgtggacccccgagaacatgtgttcgtgcatgccataacttccgagtgtgtcatgctggcctgtgaggtggaccgagaggacgcccctgtgcgttggtacaaggacgggcaggaggtggaggagagtgacttcgtggtgctggagaatgaggggccccatcgccgcctggtgctgcccgccacccagccctcagacgggggcgagtttcagtgcgtcgctggagatgagtgtgcctacttcactgtcaccatcacagacgtctcctcgtggatcgtgtatcccagcggcaaggtgtatgtggcagccgtgcgcctggagcgtgtggtgctgacctgtgagctatgccggccctgggcagaggtgcgctggaccaaggatggagaggaggtggtggagagccccgcgctgctcctgcagaaggaagacactgtccgccgcctggtgctgcccgctgtccagctcgaggactccggcgagtacttgtgtgaaattgacgatgagtcggcctccttcactgtcaccgtcacagaacccccagtgcggatcatataccctcgcgatgaggtgaccttgatcgccgtgaccttggagtgtgtggtgctgatgtgtgaactgtctcgggaggatgcccctgtgcgctggtacaaggatgggctggaagtggaggagagcgaggccctggtgctggagagggatgggccacgctgccgcctggtgctacctgctgctcagcccgaggacgggggcgagtttgtatgtgatgctggagatgactcggccttcttcactgtcactgtcacagagacaactccaagcccgctctgtgtggcccctggggagccagtggtgctgagctgtgaactgtcccgggctggcgcccccgtggtctggagccacaatgggaggcccgtgcaggagggcgagggcctagagctccatgccgagggcccccgccgagtcctctgcatccaggctgcaggcccagcccatgcagggctctacacctgccagtctggagcagcccccggagccccaagcctcagcttcaccgtccaggtggctgagccccctgtgcgggtggtagctcccgaggcagcccagacgagggttcggagcaccccaggcggggacctagagctggtggtgcacctctccgggccagggggccctgtacgctggtacaaggacggggagcgactggcaagccaggggcgggtgcagctggagcaggccggggccaggcaggtgctgcgggtgcagggggcacggagcggggacgctggggagtacctgtgcgatgcgccccaggacagccgcatcttccttgtcagcgtggaagagccactgctggtgaagctggtctcggacctgacaccactcactgtccacgagggcgatgatgccacgttccggtgtgaagtctccccaccagatgccgatgtcacctggctgcgcaatggggccgtcgtcactccagggccccaggtggagatggcccagaatggttcaagccgcatcttaaccttgcgaggctgccaactgggggatgcagggaccgtgactttgcgggcagggagcacggccacaagtgcccggctccatgttcgagagacagagctgctgttcctacggcggttgcaggatgtgcgggcagaggaaggccaggacgtgtgtctcgaagtggagacaggccgagtgggtgcagcgggggccgtgcgctgggtgcgaggtgggcagcccctgccccacgactctcgcctgtccatggcccaggatgggcacatccaccgcctcttcatccatggtgtcatactggccgaccagggcacctacggctgcgagagccaccacgatcgcaccctggccaggctcagcgtgaggcgacgggaacgcgcttacgcctagcccgcggctccggctccaggccctcggcacgcgccgccttctccagctgcgacgctgcggcccctcggacgccgggacctacagctgcgcggtggggacggcccgcgccggaccggtccgcctgaccgtgcgcggtgggtacggggtgatgtggaggctgggcactgctttgggcgcgagacttgcggagctgtcttccccggaccctgatgaccgcgcgtgcttctagaaagggggcgtggagggggcgtgaccggtaactgccctctgccccgccccgctcacgccccgggctccgccccagagcgtactgtggcggtactctccgagctgcggtcggtgagcgcccgcgaaggcgacggcgctacgttcgagtgcaccgtgtcggaggtcgagaccacggggcgctgggagctcggaggccgcccgctgagacccggagcccgcgtccgcatccaacaggaagggaagaaacacattctggtgcttagcgagctgcgcgccgaggacgccggtgaagtccgcttccaggcggggcccgcccagtccctggctctactggaagtggaggcattgcctctccagatgtgccgccacccccctcgcgagaagaccgttctggtgggccgccgggcggtgctggaggtgactgtgtcccgctcggggggccacgtgtgctggctgcgggagggggccgagctgtgcccgggagataagtatgagatgcgcagccacggccccacccacagcctggtcatccatgacgttcgacctgaggaccaaggcacttactgctgccaggccggccaggacagcacccacacacggctgctggtagagggcaactaggagaacctaaccaggccaggcgggtgcccttggacagcttggaaggcgtttgcccttaccctgggcaggggtagagagacaaggaacaataaaagtgctacagctca

SEQ ID NO: 344328 - DNA, 4946 bp, Homo sapiens
  misc_feature (4876)..(4876): n is a, c, g, or t
gccccgggcctcggctcgcctctccgcacccccccctgcccccccaccgttcgccgctgcaggcggtcggccgccgcgatgaaggcgagctcgggggatcaggggagccccccgtgcttcctgcgcttcccgcggcctgtgcgggtggtaagtggcgccgaggccgagctcaagtgcgtggtcctgggggagccgccgcctgtagtggtgtgggagaagggcgggcagcagctggcggcctcggaacgcctgagcttcccggcggacggcgcggagcacggcctgctgctgaccgccgcactgcccaccgacgcgggggtctacgtgtgccgcgcccgcaacgcggccggcgaggcctacgcggcggccgccgtcaccgtgctggagccgccggcctccgaccccgagctgcagcccgccgagcgcccgctgccatcgccggggtccggggagggcgccccggtcttcctcacggggcctcgatcccagtgggtgctgcggggggcggaggtggtgctgacgtgccgggcggggggcctccccgagcccacactgtactgggagaaggacgggatggccctggacgaagtgtgggacagcagccacttcgcgctccagccgggccgcgccgaggacggccccggcgcgagcctggcactgcgcatcctggcggctcggctgccggattccggcgtctacgtgtgccacgcccgcaacgcgcacggccacgcgcaggcgggggcgctgctccaggtgcaccagccccccgagagcccgcccgcggaccccgacgaggcccccgcgccggtggtggagccgctcaagtgcgcgcctaagaccttctgggtgaacgagggcaagcacgccaagttccgctgctacgtgatgggcaagcccgagcccgagatcgaatggcactgggagggccgcccgctgctcccggaccgccgccgcctcatgtaccgcgaccgcgacggcggcttcgtgctcaaggtgctctactgccaggccaaggatcgtgggctctacgtctgcgccgcgcgcaactcggcgggccagacgctcagtgccgtgcagctgcacgtgaaagagccccgcctccggttcacacggcccctgcaggacgtggagggccgtgagcacgggattgccgtgctggaatgtaaagtacccaactcccgcatccccacggcctggttccgtgaggaccagcggctgctgccctgccgcaagtacgagcagatcgaagagggcactgtccggcgcctcatcatccacaggctgaaggcagacgatgatggtatctacctgtgcgagatgcggggccgggtgcgcaccgtggccaacgtcacagtcaaagggcccatcctgaagcgcctgccccggaagctcgacgtcctggaaggagagaatgctgtgctgctagtggaaactctagaggccggggtcgagggacgctggagccgtgatggggaggagctgccggtcatctgccagagcagctcaggccacatgcatgccctggtccttccaggggtcacccgagaggatgctggcgaggtcacctttagcctgggcaactcccgtaccactacgcttctcagagtaaaatgtgtcaagcacagtcccccaggaccccccatattggcagagatgttcaagggccacaagaacacggtcctgttgacctggaagcctcccgagccagctcccgagaccccattcatctaccggctggagcggcaggaagtgggctctgaagactggattcagtgcttcagcatcgagaaagccggagccgtggaggtgccgggcgactgtgtgccctccgagggtgactaccgcttccgcatctgcacagtcagcggacatggccgtagtccccacgtggtgttccacggttctgctcaccttgtgcccacagctcgcctggtggcaggtctggaggatgtgcaggtatacgacggggaagatgccgtcttctccctcgatctctccaccatcatccagggtacctggttccttaatggggaagagctcaagagtaacgagccggagggccaggtggaacctggggccctgcggtaccgtatagagcagaagggtctgcagcacagactcatcctgcatgccgtcaagcaccaggacagcggtgccctggtcggcttcagctgccccggcgtgcaggactcagctgccctcacaatccaagagagcccggtgcacatcctgagcccccaggacaaggtgtcgttgaccttcacaacctcagagcgggtggtgctgacttgtgagctctcaagggtggacttcccggcaacctggtacaaggatgggcagaaggtggaggagagcgagttgctggtggtgaagatggatgggcgcaaacaccgtctgatcctgcctgaggccaaagtccaggacagtggcgagtttgagtgcaggacagaaggggtctcggccttcttcggcgtcactgtccaagatcctcccgtgcacatcgtggacccccgagaacatgtgttcgtgcatgccataacttccgagtgtgtcatgctggcctgtgaggtggaccgagaggacgcccctgtgcgttggtacaaggacgggcaggaggtggaggagagtgacttcgtggtgctggagaatgaggggccccatcgccgcctggtgctgcccgccacccagccctcagacgggggcgagtttcagtgcgtcgctggagatgagtgtgcctacttcactgtcaccatcacagacgtctcctcgtggatcgtgtatcccagcggcaaggtgtatgtggcagccgtgcgcctggagcgtgtggtgctgacctgtgagctatgccggccctgggcagaggtgcgctggaccaaggatggagaggaggtggtggagagccccgcgctgctcctgcagaaggaagacactgtccgccgcctggtgctgcccgctgtccagctcgaggactccggcgagtacttgtgtgaaattgacgatgagtcggcctccttcactgtcaccgtcacagaacccccagtgcggatcatataccctcgcgatgaggtgaccttgatcgccgtgaccttggagtgtgtggtgctgatgtgtgaactgtctcgggaggatgcccctgtgcgctggtacaaggatgggctggaagtggaggagagcgaggccctggtgctggagagggatgggccacgctgccgcctggtgctacctgctgctcagcccgaggacgggggcgagtttgtatgtgatgctggagatgactcggccttcttcactgtcactgtcacagccccaccagagaggattgtgcacccggcagcccgctccctggatctgcattttggggctccagggcgcgtggagctgcgctgtgaggtggccccagctgggtctcaggtgcgctggtacaaggacgggctggaagtggaggcatcagatgccctgcagctgggtgccgaggggcccacccgcaccctgaccctgccccacgcccagcctgaggacgccggggagtatgtgtgtgagacccggcatgaggccatcaccttcaatgtcatcctggctgagcctccagtgcagttccttgctctagagacaactccaagcccgctctgtgtggcccctggggagccagtggtgctgagctgtgaactgtcccgggctggcgcccccgtggtctggagccacaatgggaggcccgtgcaggagggcgagggcctagagctccatgccgagggcccccgccgagtcctctgcatccaggctgcaggcccagcccatgcagggctctacacctgccagtctggagcagcccccggagccccaagcctcagcttcaccgtccaggtggctgagccccctgtgcgggtggtagctcccgaggcagcccagacgagggttcggagcaccccaggcggggacctagagctggtggtgcacctctccgggccagggggccctgtacgctggtacaaggacggggagcgactggcaagccaggggcgggtgcagctggagcaggccggggccaggcaggtgctgcgggtgcagggggcacggagcggggacgctggggagtacctgtgcgatgcgccccaggacagccgcatcttccttgtcagcgtggaagagccactgctggtgaagctggtctcggacctgacaccactcactgtccacgagggcgatgatgccacgttccggtgtgaagtctccccaccagatgccgatgtcacctggctgcgcaatggggccgtcgtcactccagggccccaggtggagatggcccagaatggttcaagccgcatcttaaccttgcgaggctgccaactgggggatgcagggaccgtgactttgcgggcagggagcacggccacaagtgcccggctccatgttcgagagacagagctgctgttcctacggcggttgcaggatgtgcgggcagaggaaggccaggacgtgtgtctcgaagtggagacaggccgagtgggtgcagcgggggccgtgcgctgggtgcgaggtgggcagcccctgccccacgactctcgcctgtccatggcccaggatgggcacatccaccgcctcttcatccatggtgtcatactggccgaccagggcacctacggctgcgagagccaccacgatcgcaccctggccaggctcagcgtgaggcgtgagtgccccgtcctctcttaatgcattacccaccctacaccacagccttttctggctgtcctggagtccctcaggcccccaccaaagtgcccctcatcgctgagaaaagtcacccatggccgtcccagcagcagcttgcccaaagcaaaacttttctttttctaatattttttatttaccttagaantccatgtggattttgcattccattgcatatttccaagtcggctttgctataaacacaaatattctccaga

SEQ ID NO: 344329 - DNA, 5692 bp, Homo sapiens
gccccgggcctcggctcgcctctccgcacccccccctgcccccccaccgttcgccgctgcaggcggtcggccgccgcgatgaaggcgagctcgggggatcaggggagccccccgtgcttcctgcgcttcccgcggcctgtgcgggtggtaagtggcgccgaggccgagctcaagtgcgtggtcctgggggagccgccgcctgtagtggtgtgggagaagggcgggcagcagctggcggcctcggaacgcctgagcttcccggcggacggcgcggagcacggcctgctgctgaccgccgcactgcccaccgacgcgggggtctacgtgtgccgcgcccgcaacgcggccggcgaggcctacgcggcggccgccgtcaccgtgctggagccgccggcctccgaccccgagctgcagcccgccgagcgcccgctgccatcgccggggtccggggagggcgccccggtcttcctcacggggcctcgatcccagtgggtgctgcggggggcggaggtggtgctgacgtgccgggcggggggcctccccgagcccacactgtactgggagaaggacgggatggccctggacgaagtgtgggacagcagccacttcgcgctccagccgggccgcgccgaggacggccccggcgcgagcctggcactgcgcatcctggcggctcggctgccggattccggcgtctacgtgtgccacgcccgcaacgcgcacggccacgcgcaggcgggggcgctgctccaggtgcaccagccccccgagagcccgcccgcggaccccgacgaggcccccgcgccggtggtggagccgctcaagtgcgcgcctaagaccttctgggtgaacgagggcaagcacgccaagttccgctgctacgtgatgggcaagcccgagcccgagatcgaatggcactgggagggccgcccgctgctcccggaccgccgccgcctcatgtaccgcgaccgcgacggcggcttcgtgctcaaggtgctctactgccaggccaaggatcgtgggctctacgtctgcgccgcgcgcaactcggcgggccagacgctcagtgccgtgcagctgcacgtgaaagagccccgcctccggttcacacggcccctgcaggacgtggagggccgtgagcacgggattgccgtgctggaatgtaaagtacccaactcccgcatccccacggcctggttccgtgaggaccagcggctgctgccctgccgcaagtacgagcagatcgaagagggcactgtccggcgcctcatcatccacaggctgaaggcagacgatgatggtatctacctgtgcgagatgcggggccgggtgcgcaccgtggccaacgtcacagtcaaagggcccatcctgaagcgcctgccccggaagctcgacgtcctggaaggagagaatgctgtgctgctagtggaaactctagaggccggggtcgagggacgctggagccgtgatggggaggagctgccggtcatctgccagagcagctcaggccacatgcatgccctggtccttccaggggtcacccgagaggatgctggcgaggtcacctttagcctgggcaactcccgtaccactacgcttctcagagtaaaatgtgtcaagcacagtcccccaggaccccccatattggcagagatgttcaagggccacaagaacacggtcctgttgacctggaagcctcccgagccagctcccgagaccccattcatctaccggctggagcggcaggaagtgggctctgaagactggattcagtgcttcagcatcgagaaagccggagccgtggaggtgccgggcgactgtgtgccctccgagggtgactaccgcttccgcatctgcacagtcagcggacatggccgtagtccccacgtggtgttccacggttctgctcaccttgtgcccacagctcgcctggtggcaggtctggaggatgtgcaggtatacgacggggaagatgccgtcttctccctcgatctctccaccatcatccagggtacctggttccttaatggggaagagctcaagagtaacgagccggagggccaggtggaacctggggccctgcggtaccgtatagagcagaagggtctgcagcacagactcatcctgcatgccgtcaagcaccaggacagcggtgccctggtcggcttcagctgccccggcgtgcaggactcagctgccctcacaatccaagagagcccggtgcacatcctgagcccccaggacaaggtgtcgttgaccttcacaacctcagagcgggtggtgctgacttgtgagctctcaagggtggacttcccggcaacctggtacaaggatgggcagaaggtggaggagagcgagttgctggtggtgaagatggatgggcgcaaacaccgtctgatcctgcctgaggccaaagtccaggacagtggcgagtttgagtgcaggacagaaggggtctcggccttcttcggcgtcactgtccaagatcctcccgtgcacatcgtggacccccgagaacatgtgttcgtgcatgccataacttccgagtgtgtcatgctggcctgtgaggtggaccgagaggacgcccctgtgcgttggtacaaggacgggcaggaggtggaggagagtgacttcgtggtgctggagaatgaggggccccatcgccgcctggtgctgcccgccacccagccctcagacgggggcgagtttcagtgcgtcgctggagatgagtgtgcctacttcactgtcaccatcacagacgtctcctcgtggatcgtgtatcccagcggcaaggtgtatgtggcagccgtgcgcctggagcgtgtggtgctgacctgtgagctatgccggccctgggcagaggtgcgctggaccaaggatggagaggaggtggtggagagccccgcgctgctcctgcagaaggaagacactgtccgccgcctggtgctgcccgctgtccagctcgaggactccggcgagtacttgtgtgaaattgacgatgagtcggcctccttcactgtcaccgtcacagaacccccagtgcggatcatataccctcgcgatgaggtgaccttgatcgccgtgaccttggagtgtgtggtgctgatgtgtgaactgtctcgggaggatgcccctgtgcgctggtacaaggatgggctggaagtggaggagagcgaggccctggtgctggagagggatgggccacgctgccgcctggtgctacctgctgctcagcccgaggacgggggcgagtttgtatgtgatgctggagatgactcggccttcttcactgtcactgtcacagccccaccagagaggattgtgcacccggcagcccgctccctggatctgcattttggggctccagggcgcgtggagctgcgctgtgaggtggccccagctgggtctcaggtgcgctggtacaaggacgggctggaagtggaggcatcagatgccctgcagctgggtgccgaggggcccacccgcaccctgaccctgccccacgcccagcctgaggacgccggggagtatgtgtgtgagacccggcatgaggccatcaccttcaatgtcatcctggctgagcctccagtgcagttccttgctctagagacaactccaagcccgctctgtgtggcccctggggagccagtggtgctgagctgtgaactgtcccgggctggcgcccccgtggtctggagccacaatgggaggcccgtgcaggagggcgagggcctagagctccatgccgagggcccccgccgagtcctctgcatccaggctgcaggcccagcccatgcagggctctacacctgccagtctggagcagcccccggagccccaagcctcagcttcaccgtccaggtggctgagccccctgtgcgggtggtagctcccgaggcagcccagacgagggttcggagcaccccaggcggggacctagagctggtggtgcacctctccgggccagggggccctgtacgctggtacaaggacggggagcgactggcaagccaggggcgggtgcagctggagcaggccggggccaggcaggtgctgcgggtgcagggggcacggagcggggacgctggggagtacctgtgcgatgcgccccaggacagccgcatcttccttgtcagcgtggaagagccactgctggtgaagctggtctcggacctgacaccactcactgtccacgagggcgatgatgccacgttccggtgtgaagtctccccaccagatgccgatgtcacctggctgcgcaatggggccgtcgtcactccagggccccaggtggagatggcccagaatggttcaagccgcatcttaaccttgcgaggctgccaactgggggatgcagggaccgtgactttgcgggcagggagcacggccacaagtgcccggctccatgttcgagagacagagctgctgttcctacggcggttgcaggatgtgcgggcagaggaaggccaggacgtgtgtctcgaagtggagacaggccgagtgggtgcagcgggggccgtgcgctgggtgcgaggtgggcagcccctgccccacgactctcgcctgtccatggcccaggatgggcacatccaccgcctcttcatccatggtgtcatactggccgaccagggcacctacggctgcgagagccaccacgatcgcaccctggccaggctcagcgtgaggcgacgggaacgcgcttacgcctagcccgcggctccggctccaggccctcggcacgcgccgccttctccagctgcgacgctgcggcccctcggacgccgggacctacagctgcgcggtggggacggcccgcgccggaccggtccgcctgaccgtgcgcggtgggtacggggtgatgtggaggctgggcactgctttgggcgcgagacttgcggagctgtcttccccggaccctgatgaccgcgcgtgcttctagaaagggggcgtggagggggcgtgaccggtaactgccctctgccccgccccgctcacgccccgggctccgccccagagcgtactgtggcggtactctccgagctgcggtcggtgagcgcccgcgaaggcgacggcgctacgttcgagtgcaccgtgtcggaggtcgagaccacggggcgctgggagctcggaggccgcccgctgagacccggagcccgcgtccgcatccaacaggaagggaagaaacacattctggtgcttagcgagctgcgcgccgaggacgccggtgaagtccgcttccaggcggggcccgcccagtccctggctctactggaagtggaggcattgcctctccagatgtgccgccacccccctcgcgagaagaccgttctggtgggccgccgggcggtgctggaggtgactgtgtcccgctcggggggccacgtgtgctggctgcgggagggggccgagctgtgcccgggagataagtatgagatgcgcagccacggccccacccacagcctggtcatccatgacgttcgacctgaggaccaaggcacttactgctgccaggccggccaggacagcacccacacacggctgctggtagaggccccatgtggagtcattcctctgcaggcaactaggagaacctaaccaggccaggcgggtgcccttggacagcttggaaggcgtttgcccttaccctgggcaggggtagagagacaaggaacaataaaagtgctacagctca

SEQ ID NO: 344330 - DNA, 4898 bp, Homo sapiens
gccccgggcctcggctcgcctctccgcacccccccctgcccccccaccgttcgccgctgcaggcggtcggccgccgcgatgaaggcgagctcgggggatcaggggagccccccgtgcttcctgcgcttcccgcggcctgtgcgggtggtaagtggcgccgaggccgagctcaagtgcgtggtcctgggggagccgccgcctgtagtggtgtgggagaagggcgggcagcagctggcggcctcggaacgcctgagcttcccggcggacggcgcggagcacggcctgctgctgaccgccgcactgcccaccgacgcgggggtctacgtgtgccgcgcccgcaacgcggccggcgaggcctacgcggcggccgccgtcaccgtgctggagccgccggcctccgaccccgagctgcagcccgccgagcgcccgctgccatcgccggggtccggggagggcgccccggtcttcctcacggggcctcgatcccagtgggtgctgcggggggcggaggtggtgctgacgtgccgggcggggggcctccccgagcccacactgtactgggagaaggacgggatggccctggacgaagtgtgggacagcagccacttcgcgctccagccgggccgcgccgaggacggccccggcgcgagcctggcactgcgcatcctggcggctcggctgccggattccggcgtctacgtgtgccacgcccgcaacgcgcacggccacgcgcaggcgggggcgctgctccaggtgcaccagccccccgagagcccgcccgcggaccccgacgaggcccccgcgccggtggtggagccgctcaagtgcgcgcctaagaccttctgggtgaacgagggcaagcacgccaagttccgctgctacgtgatgggcaagcccgagcccgagatcgaatggcactgggagggccgcccgctgctcccggaccgccgccgcctcatgtaccgcgaccgcgacggcggcttcgtgctcaaggtgctctactgccaggccaaggatcgtgggctctacgtctgcgccgcgcgcaactcggcgggccagacgctcagtgccgtgcagctgcacgtgaaagagccccgcctccggttcacacggcccctgcaggacgtggagggccgtgagcacgggattgccgtgctggaatgtaaagtacccaactcccgcatccccacggcctggttccgtgaggaccagcggctgctgccctgccgcaagtacgagcagatcgaagagggcactgtccggcgcctcatcatccacaggctgaaggcagacgatgatggtatctacctgtgcgagatgcggggccgggtgcgcaccgtggccaacgtcacagtcaaagggcccatcctgaagcgcctgccccggaagctcgacgtcctggaaggagagaatgctgtgctgctagtggaaactctagaggccggggtcgagggacgctggagccgtgatggggaggagctgccggtcatctgccagagcagctcaggccacatgcatgccctggtccttccaggggtcacccgagaggatgctggcgaggtcacctttagcctgggcaactcccgtaccactacgcttctcagagtaaaatgtgtcaagcacagtcccccaggaccccccatattggcagagatgttcaagggccacaagaacacggtcctgttgacctggaagcctcccgagccagctcccgagaccccattcatctaccggctggagcggcaggaagtgggctctgaagactggattcagtgcttcagcatcgagaaagccggagccgtggaggtgccgggcgactgtgtgccctccgagggtgactaccgcttccgcatctgcacagtcagcggacatggccgtagtccccacgtggtgttccacggttctgctcaccttgtgcccacagctcgcctggtggcaggtctggaggatgtgcaggtatacgacggggaagatgccgtcttctccctcgatctctccaccatcatccagggtacctggttccttaatggggaagagctcaagagtaacgagccggagggccaggtggaacctggggccctgcggtaccgtatagagcagaagggtctgcagcacagactcatcctgcatgccgtcaagcaccaggacagcggtgccctggtcggcttcagctgccccggcgtgcaggactcagctgccctcacaatccaagagagcccggtgcacatcctgagcccccaggacaaggtgtcgttgaccttcacaacctcagagcgggtggtgctgacttgtgagctctcaagggtggacttcccggcaacctggtacaaggatgggcagaaggtggaggagagcgagttgctggtggtgaagatggatgggcgcaaacaccgtctgatcctgcctgaggccaaagtccaggacagtggcgagtttgagtgcaggacagaaggggtctcggccttcttcggcgtcactgtccaagatcctcccgtgcacatcgtggacccccgagaacatgtgttcgtgcatgccataacttccgagtgtgtcatgctggcctgtgaggtggaccgagaggacgcccctgtgcgttggtacaaggacgggcaggaggtggaggagagtgacttcgtggtgctggagaatgaggggccccatcgccgcctggtgctgcccgccacccagccctcagacgggggcgagtttcagtgcgtcgctggagatgagtgtgcctacttcactgtcaccatcacagacgtctcctcgtggatcgtgtatcccagcggcaaggtgtatgtggcagccgtgcgcctggagcgtgtggtgctgacctgtgagctatgccggccctgggcagaggtgcgctggaccaaggatggagaggaggtggtggagagccccgcgctgctcctgcagaaggaagacactgtccgccgcctggtgctgcccgctgtccagctcgaggactccggcgagtacttgtgtgaaattgacgatgagtcggcctccttcactgtcaccgtcacagaacccccagtgcggatcatataccctcgcgatgaggtgaccttgatcgccgtgaccttggagtgtgtggtgctgatgtgtgaactgtctcgggaggatgcccctgtgcgctggtacaaggatgggctggaagtggaggagagcgaggccctggtgctggagagggatgggccacgctgccgcctggtgctacctgctgctcagcccgaggacgggggcgagtttgtatgtgatgctggagatgactcggccttcttcactgtcactgtcacagccccaccagagaggattgtgcacccggcagcccgctccctggatctgcattttggggctccagggcgcgtggagctgcgctgtgaggtggccccagctgggtctcaggtgcgctggtacaaggacgggctggaagtggaggcatcagatgccctgcagctgggtgccgaggggcccacccgcaccctgaccctgccccacgcccagcctgaggacgccggggagtatgtgtgtgagacccggcatgaggccatcaccttcaatgtcatcctggctgagcctccagtgcagttccttgctctagagacaactccaagcccgctctgtgtggcccctggggagccagtggtgctgagctgtgaactgtcccgggctggcgcccccgtggtctggagccacaatgggaggcccgtgcaggagggcgagggcctagagctccatgccgagggcccccgccgagtcctctgcatccaggctgcaggcccagcccatgcagggctctacacctgccagtctggagcagcccccggagccccaagcctcagcttcaccgtccaggtggctgagccccctgtgcgggtggtagctcccgaggcagcccagacgagggttcggagcaccccaggcggggacctagagctggtggtgcacctctccgggccagggggccctgtacgctggtacaaggacggggagcgactggcaagccaggggcgggtgcagctggagcaggccggggccaggcaggtgctgcgggtgcagggggcacggagcggggacgctggggagtacctgtgcgatgcgccccaggacagccgcatcttccttgtcagcgtggaagagccactgctggtgaagctggtctcggacctgacaccactcactgtccacgagggcgatgatgccacgttccggtgtgaagtctccccaccagatgccgatgtcacctggctgcgcaatggggccgtcgtcactccagggccccaggtggagatggcccagaatggttcaagccgcatcttaaccttgcgaggctgccaactgggggatgcagggaccgtgactttgcgggcagggagcacggccacaagtgcccggctccatgttcgagagacagagctgctgttcctacggcggttgcaggatgtgcgggcagaggaaggccaggacgtgtgtctcgaagtggagacaggccgagtgggtgcagcgggggccgtgcgctgggtgcgaggtgggcagcccctgccccacgactctcgcctgtccatggcccaggatgggcacatccaccgcctcttcatccatggtgtcatactggccgaccagggcacctacggctgcgagagccaccacgatcgcaccctggccaggctcagcgtgaggccgaggcagctgagggtgctgcggcctctggaggacgtgaccatcagtgaggggggcagtgccaccttccagctggagctgtcccaggaaggtgtgaccggggagtgggcccggggtggagtacggctgtatccaggacccaagtgtcacatccactcggacggccaccgtcaccgactggtactcaatggcctgggcctggccgactcagg

SEQ ID NO: 344331 - DNA, 3652 bp, Homo sapiens
gccccgggcctcggctcgcctctccgcacccccccctgcccccccaccgttcgccgctgcaggcggtcggccgccgcgatgaaggcgagctcgggggatcaggggagccccccgtgcttcctgcgcttcccgcggcctgtgcgggtggtaagtggcgccgaggccgagctcaagtgcgtggtcctgggggagccgccgcctgtagtggtgtgggagaagggcgggcagcagctggcggcctcggaacgcctgagcttcccggcggacggcgcggagcacggcctgctgctgaccgccgcactgcccaccgacgcgggggtctacgtgtgccgcgcccgcaacgcggccggcgaggcctacgcggcggccgccgtcaccgtgctggagccgccggcctccgaccccgagctgcagcccgccgagcgcccgctgccatcgccggggtccggggagggcgccccggtcttcctcacggggcctcgatcccagtgggtgctgcggggggcggaggtggtgctgacgtgccgggcggggggcctccccgagcccacactgtactgggagaaggacgggatggccctggacgaagtgtgggacagcagccacttcgcgctccagccgggccgcgccgaggacggccccggcgcgagcctggcactgcgcatcctggcggctcggctgccggattccggcgtctacgtgtgccacgcccgcaacgcgcacggccacgcgcaggcgggggcgctgctccaggtgcaccagccccccgagagcccgcccgcggaccccgacgaggcccccgcgccggtggtggagccgctcaagtgcgcgcctaagaccttctgggtgaacgagggcaagcacgccaagttccgctgctacgtgatgggcaagcccgagcccgagatcgaatggcactgggagggccgcccgctgctcccggaccgccgccgcctcatgtaccgcgaccgcgacggcggcttcgtgctcaaggtgctctactgccaggccaaggatcgtgggctctacgtctgcgccgcgcgcaactcggcgggccagacgctcagtgccgtgcagctgcacgtgaaagagccccgcctccggttcacacggcccctgcaggacgtggagggccgtgagcacgggattgccgtgctggaatgtaaagtacccaactcccgcatccccacggcctggttccgtgaggaccagcggctgctgccctgccgcaagtacgagcagatcgaagagggcactgtccggcgcctcatcatccacaggctgaaggcagacgatgatggtatctacctgtgcgagatgcggggccgggtgcgcaccgtggccaacgtcacagtcaaagggcccatcctgaagcgcctgccccggaagctcgacgtcctggaaggagagaatgctgtgctgctagtggaaactctagaggccggggtcgagggacgctggagccgtgatggggaggagctgccggtcatctgccagagcagctcaggccacatgcatgccctggtccttccaggggtcacccgagaggatgctggcgaggtcacctttagcctgggcaactcccgtaccactacgcttctcagagtaaaatgtgtcaagcacagtcccccaggaccccccatattggcagagatgttcaagggccacaagaacacggtcctgttgacctggaagcctcccgagccagctcccgagaccccattcatctaccggctggagcggcaggaagtgggctctgaagactggattcagtgcttcagcatcgagaaagccggagccgtggaggtgccgggcgactgtgtgccctccgagggtgactaccgcttccgcatctgcacagtcagcggacatggccgtagtccccacgtggtgttccacggttctgctcaccttgtgcccacagctcgcctggtggcaggtctggaggatgtgcaggtatacgacggggaagatgccgtcttctccctcgatctctccaccatcatccagggtacctggttccttaatggggaagagctcaagagtaacgagccggagggccaggtggaacctggggccctgcggtaccgtatagagcagaagggtctgcagcacagactcatcctgcatgccgtcaagcaccaggacagcggtgccctggtcggcttcagctgccccggcgtgcaggactcagctgccctcacaatccaagagagcccggtgcacatcctgagcccccaggacaaggtgtcgttgaccttcacaacctcagagcgggtggtgctgacttgtgagctctcaagggtggacttcccggcaacctggtacaaggatgggcagaaggtggaggagagcgagttgctggtggtgaagatggatgggcgcaaacaccgtctgatcctgcctgaggccaaagtccaggacagtggcgagtttgagtgcaggacagaaggggtctcggccttcttcggcgtcactgtccaagatcctcccgtgcacatcgtggacccccgagaacatgtgttcgtgcatgccataacttccgagtgtgtcatgctggcctgtgaggtggaccgagaggacgcccctgtgcgttggtacaaggacgggcaggaggtggaggagagtgacttcgtggtgctggagaatgaggggccccatcgccgcctggtgctgcccgccacccagccctcagacgggggcgagtttcagtgcgtcgctggagatgagtgtgcctacttcactgtcaccatcacagacgtctcctcgtggatcgtgtatcccagcggcaaggtgtatgtggcagccgtgcgcctggagcgtgtggtgctgacctgtgagctatgccggccctgggcagaggtgcgctggaccaaggatggagaggaggtggtggagagccccgcgctgctcctgcagaaggaagacactgtccgccgcctggtgctgcccgctgtccagctcgaggactccggcgagtacttgtgtgaaattgacgatgagtcggcctccttcactgtcaccgtcacagaacccccagtgcggatcatataccctcgcgatgaggtgaccttgatcgccgtgaccttggagtgtgtggtgctgatgtgtgaactgtctcgggaggatgcccctgtgcgctggtacaaggatgggctggaagtggaggagagcgaggccctggtgctggagagggatgggccacgctgccgcctggtgctacctgctgctcagcccgaggacgggggcgagtttgtatgtgatgctggagatgactcggccttcttcactgtcactgtcacaggtgggcagtctctgcagcacagagaggaggtagagaggtagggggctaagggacagacacccacctagccccacctcccccaccccatccccagccttccccttatccagcttcctcatgtttggccatcagaatcctgcttagccacatcaggtcaggaccagaggcctggtgggagggtgcccagcaattagaaccattcgttcattcatccattcgttcaatactcattgagcaactactatgtgcttggcactgttttagatgctggggatacagcagtgaaccaataagactaaacctcttgtcttcacagagtttaaactctggtgagggtggacagacaaa

SEQ ID NO: 344332 - DNA, 2574 bp, Homo sapiens
ctgtgcacctcttgagggtggtcagagtaactgattgaaaaaacacagggttcttaggacagtgcctggcacacagcagctgctccatggactgcagctggcactgttctcaagagctgtgctgccagtggggagggctgaggatctggcgggtgaggcaggagaggcctgctggccaagcctatgtgcccctctccatgcccacccaccagccccaccagagaggattgtgcacccggcagcccgctccctggatctgcattttggggctccagggcgcgtggagctgcgctgtgaggtggccccagctgggtctcaggtgcgctggtacaaggacgggctggaagtggaggcatcagatgccctgcagctgggtgccgaggggcccacccgcaccctgaccctgccccacgcccagcctgaggacgccggggagtatgtgtgtgagacccggcatgaggccatcaccttcaatgtcatcctggctgagcctccagtgcagttccttgctctagagacaactccaagcccgctctgtgtggcccctggggagccagtggtgctgagctgtgaactgtcccgggctggcgcccccgtggtctggagccacaatgggaggcccgtgcaggagggcgagggcctagagctccatgccgagggcccccgccgagtcctctgcatccaggctgcaggcccagcccatgcagggctctacacctgccagtctggagcagcccccggagccccaagcctcagcttcaccgtccaggtggctgagccccctgtgcgggtggtagctcccgaggcagcccagacgagggttcggagcaccccaggcggggacctagagctggtggtgcacctctccgggccagggggccctgtacgctggtacaaggacggggagcgactggcaagccaggggcgggtgcagctggagcaggccggggccaggcaggtgctgcgggtgcagggggcacggagcggggacgctggggagtacctgtgcgatgcgccccaggacagccgcatcttccttgtcagcgtggaagagccactgctggtgaagctggtctcggacctgacaccactcactgtccacgagggcgatgatgccacgttccggtgtgaagtctccccaccagatgccgatgtcacctggctgcgcaatggggccgtcgtcactccagggccccaggtggagatggcccagaatggttcaagccgcatcttaaccttgcgaggctgccaactgggggatgcagggaccgtgactttgcgggcagggagcacggccacaagtgcccggctccatgttcgagagacagagctgctgttcctacggcggttgcaggatgtgcgggcagaggaaggccaggacgtgtgtctcgaagtggagacaggccgagtgggtgcagcgggggccgtgcgctgggtgcgaggtgggcagcccctgccccacgactctcgcctgtccatggcccaggatgggcacatccaccgcctcttcatccatggtgtcatactggccgaccagggcacctacggctgcgagagccaccacgatcgcaccctggccaggctcagcgtgaggcgacgggaacgcgcttacgcctagcccgcggctccggctccaggccctcggcacgcgccgccttctccagctgcgacgctgcggcccctcggacgccgggacctacagctgcgcggtggggacggcccgcgccggaccggtccgcctgaccgtgcgcggtgggtacggggtgatgtggaggctgggcactgctttgggcgcgagacttgcggagctgtcttccccggaccctgatgaccgcgcgtgcttctagaaagggggcgtggagggggcgtgaccggtaactgccctctgccccgccccgctcacgccccgggctccgccccagagcgtactgtggcggtactctccgagctgcggtcggtgagcgcccgcgaaggcgacggcgctacgttcgagtgcaccgtgtcggaggtcgagaccacggggcgctgggagctcggaggccgcccgctgagacccggagcccgcgtccgcatccaacaggaagggaagaaacacattctggtgcttagcgagctgcgcgccgaggacgccggtgaagtccgcttccaggcggggcccgcccagtccctggctctactggaagtggaggcattgcctctccagatgtgccgccacccccctcgcgagaagaccgttctggtgggccgccgggcggtgctggaggtgactgtgtcccgctcggggggccacgtgtgctggctgcgggagggggccgagctgtgcccgggagataagtatgagatgcgcagccacggccccacccacagcctggtcatccatgacgttcgacctgaggaccaaggcacttactgctgccaggccggccaggacagcacccacacacggctgctggtagagggcaactaggagaacctaaccaggccaggcgggtgcccttggacagcttggaaggcgtttgcccttaccctgggcaggggtagagagacaaggaacaataaaagtgctacagctca

SEQ ID NO: 344333 - DNA, 733 bp, Homo sapiens
ggtcggtcttcataggtcgcaggcagagctgaaacagatctaggccaaacttctcatctataaaatcaggaaattgaggcccaaggaggttgattgtttctcagagaaacagagctggttaatggtgaacccaggctttttgcataccagtttagtcataataagtagttggtttttgggaatatccttttcataaatgatagtataaaagctgactgctaatacaactttacagaaggggataatcataggtgcgctggaccaaggatggagaggaggtggtggagagccccgcgctgctcctgcagaaggaagacactgtccgccgcctggtgctgcccgctgtccagctcgaggactccggcgagtacttgtgtgaaattgacgatgagtcggcctccttcactgtcaccgtcacagagtcttaccaaagtcaggacagttcaaataacaatccggagttatgcgtcctcttgaaaaagccgaagacccggcggctctggtcccgcttccccccatggcgacgaacagctggcactgagtagcagctgcccccatagtttggggcccacattcctctgtcccacctccctgccattgctttttgcctctccccagactgcttcagccgctaacctaacctggcccctgtgggcatttgagtttgcgacccctgtgttaaaccaataaacatgcaaataaatgtacagtgacacctggtgataagtactgt

SEQ ID NO: 344334 - DNA, 1412 bp, Homo sapiens
ttaggtcctgatgaggatgagatactctgtgtcccgtgcctgtactcccaaccaggattccagcagccttgcctctccacctagggacagaccagtgggatggagcaaggggccagcctccaaccccaccagactccatggcctccttcttccccaccagagacagagctgctgttcctacggcggttgcaggatgtgcgggcagaggaaggccaggacgtgtgtctcgaagtggagacaggccgagtgggtgcagcgggggccgtgcgctgggtgcgaggtgggcagcccctgccccacgactctcgcctgtccatggcccaggatgggcacatccaccgcctcttcatccatggtgtcatactggccgaccagggcacctacggctgcgagagccaccacgatcgcaccctggccaggctcagcgtgaggcgacgggaacgcgcttacgcctagcccgcggctccggctccaggccctcggcacgcgccgccttctccagctgcgacgctgcggcccctcggacgccgggacctacagctgcgcggtggggacggcccgcgccggaccggtccgcctgaccgtgcgcggtgggtacggggtgatgtggaggctgggcactgctttgggcgcgagacttgcggagctgtcttccccggaccctgatgaccgcgcgtgcttctagaaagggggcgtggagggggcgtgaccggtaactgccctctgccccgccccgctcacgccccgggctccgccccagagcgtactgtggcggtactctccgagctgcggtcggtgagcgcccgcgaaggcgacggcgctacgttcgagtgcaccgtgtcggaggtcgagaccacggggcgctgggagctcggaggccgcccgctgagacccggagcccgcgtccgcatccaacaggaagggaagaaacacattctggtgcttagcgagctgcgcgccgaggacgccggtgaagtccgcttccaggcggggcccgcccagtccctggctctactggaagtggaggcattgcctctccagatgtgccgccacccccctcgcgagaagaccgttctggtgggccgccgggcggtgctggaggtgactgtgtcccgctcggggggccacgtgtgctggctgcgggagggggccgagctgtgcccgggagataagtatgagatgcgcagccacggccccacccacagcctggtcatccatgacgttcgacctgaggaccaaggcacttactgctgccaggccggccaggacagcacccacacacggctgctggtagagggcaactaggagaacctaaccaggccaggcgggtgcccttggacagcttggaaggcgtttgcccttaccctgggcaggggtagagagacaaggaacaataaaagtgctacagctca

SEQ ID NO: 344335 - DNA, 338 bp, Homo sapiens
tttttagcaggctccctaggaattcttatgcacagccaaagcactgctcttaagggttggtgtggaagcctaagcctatttttaaaaaccccaacaacagcagttgttccctctgatgcatccgacactgagcccatgcaccggagggaggggtgcttatctgtacttctccccacacagagagcccggtgcacatcctgagcccccaggacaaggtgtcgttgaccttcacaacctcagagcgggtggtgctgacttgtgagctctcaagggtggacttcccggcaacctggtacaaggatgggcagaaggtggaggagagcgagttgctggtggtg

SEQ ID NO: 344336 - DNA, 269 bp, Homo sapiens
cacacccctcatgcccggcagtggctgtccctgtcctccagacgtctcctcgtggatcgtgtatcccagcggcaaggtgtatgtggcagccgtgcgcctggagcgtgtggtgctgacctgtgagctatgccggccctgggcagaggtgcgctggaccaaggatggagaggaggtggtggagagccccgcgctgctcctgcagaaggaagacactgtccgccgcctggtgctgcccgctgtccagctcgaggactccggcgagtacttgt

SEQ ID NO: 344337 - DNA, 3344 bp, Homo sapiens
gccccgggcctcggctcgcctctccgcacccccccctgcccccccaccgttcgccgctgcaggcggtcggccgccgcgatgaaggcgagctcgggggatcaggggagccccccgtgcttcctgcgcttcccgcggcctgtgcgggtggtaagtggcgccgaggccgagctcaagtgcgtggtcctgggggagccgccgcctgtagtggtgtgggagaagggcgggcagcagctggcggcctcggaacgcctgagcttcccggcggacggcgcggagcacggcctgctgctgaccgccgcactgcccaccgacgcgggggtctacgtgtgccgcgcccgcaacgcggccggcgaggcctacgcggcggccgccgtcaccgtgctggagccgccggcctccgaccccgagctgcagcccgccgagcgcccgctgccatcgccggggtccggggagggcgccccggtcttcctcacggggcctcgatcccagtgggtgctgcggggggcggaggtggtgctgacgtgccgggcggggggcctccccgagcccacactgtactgggagaaggacgggatggccctggacgaagtgtgggacagcagccacttcgcgctccagccgggccgcgccgaggacggccccggcgcgagcctggcactgcgcatcctggcggctcggctgccggattccggcgtctacgtgtgccacgcccgcaacgcgcacggccacgcgcaggcgggggcgctgctccaggtgcaccagccccccgagagcccgcccgcggaccccgacgaggcccccgcgccggtggtggagccgctcaagtgcgcgcctaagaccttctgggtgaacgagggcaagcacgccaagttccgctgctacgtgatgggcaagcccgagcccgagatcgaatggcactgggagggccgcccgctgctcccggaccgccgccgcctcatgtaccgcgaccgcgacggcggcttcgtgctcaaggtgctctactgccaggccaaggatcgtgggctctacgtctgcgccgcgcgcaactcggcgggccagacgctcagtgccgtgcagctgcacgtgaaagagccccgcctccggttcacacggcccctgcaggacgtggagggccgtgagcacgggattgccgtgctggaatgtaaagtacccaactcccgcatccccacggcctggttccgtgaggaccagcggctgctgccctgccgcaagtacgagcagatcgaagagggcactgtccggcgcctcatcatccacaggctgaaggcagacgatgatggtatctacctgtgcgagatgcggggccgggtgcgcaccgtggccaacgtcacagtcaaagggcccatcctgaagcgcctgccccggaagctcgacgtcctggaaggagagaatgctgtgctgctagtggaaactctagaggccggggtcgagggacgctggagccgtgatggggaggagctgccggtcatctgccagagcagctcaggccacatgcatgccctggtccttccaggggtcacccgagaggatgctggcgaggtcacctttagcctgggcaactcccgtaccactacgcttctcagagtaaaatgtgtcaagcacagtcccccaggaccccccatattggcagagatgttcaagggccacaagaacacggtcctgttgacctggaagcctcccgagccagctcccgagaccccattcatctaccggctggagcggcaggaagtgggctctgaagactggattcagtgcttcagcatcgagaaagccggagccgtggaggtgccgggcgactgtgtgccctccgagggtgactaccgcttccgcatctgcacagtcagcggacatggccgtagtccccacgtggtgttccacggttctgctcaccttgtgcccacagctcgcctggtggcaggtctggaggatgtgcaggtatacgacggggaagatgccgtcttctccctcgatctctccaccatcatccagggtacctggttccttaatggggaagagctcaagagtaacgagccggagggccaggtggaacctggggccctgcggtaccgtatagagcagaagggtctgcagcacagactcatcctgcatgccgtcaagcaccaggacagcggtgccctggtcggcttcagctgccccggcgtgcaggactcagctgccctcacaatccaagagagcccggtgcacatcctgagcccccaggacaaggtgtcgttgaccttcacaacctcagagcgggtggtgctgacttgtgagctctcaagggtggacttcccggcaacctggtacaaggatgggcagaaggtggaggagagcgagttgctggtggtgaagatggatgggcgcaaacaccgtctgatcctgcctgaggccaaagtccaggacagtggcgagtttgagtgcaggacagaaggggtctcggccttcttcggcgtcactgtccaagatcctcccgtgcacatcgtggacccccgagaacatgtgttcgtgcatgccataacttccgagtgtgtcatgctggcctgtgaggtggaccgagaggacgcccctgtgcgttggtacaaggacgggcaggaggtggaggagagtgacttcgtggtgctggagaatgaggggccccatcgccgcctggtgctgcccgccacccagccctcagacgggggcgagtttcagtgcgtcgctggagatgagtgtgcctacttcactgtcaccatcacagacgtctcctcgtggatcgtgtatcccagcggcaaggtgtatgtggcagccgtgcgcctggagcgtgtggtgctgacctgtgagctatgccggccctgggcagaggtgcgctggaccaaggatggagaggaggtggtggagagccccgcgctgctcctgcagaaggaagacactgtccgccgcctggtgctgcccgctgtccagctcgaggactccggcgagtacttgtgtgaaattgacgatgagtcggcctccttcactgtcaccgtcacagagtcttaccaaagtcaggacagttcaaataacaatccggagttatgcgtcctcttgaaaaagccgaagacccggcggctctggtcccgcttccccccatggcgacgaacagctggcactgagtagcagctgcccccatagtttggggcccacattcctctgtcccacctccctgccattgctttttgcctctccccagactgcttcagccgctaacctaacctggcccctgtgggcatttgagtttgcgacccctgtgttaaaccaataaacatgcaaataaatgtacagtgacacctggtgataagtactgt

SEQ ID NO: 344338 - DNA, 724 bp, Homo sapiens
tattctcattattatgtgggtgatagggacttcatgctgccgaatggctccagagaggctgacggtgagcttgtgacaggctgtggttgtccccaccctgcagaacccccagtgcggatcatataccctcgcgatgaggtgaccttgatcgccgtgaccttggagtgtgtggtgctgatgtgtgaactgtctcgggaggatgcccctgtgcgctggtacaaggatgggctggaagtggaggagagcgaggccctggtgctggagagggatgggccacgctgccgcctggtgctacctgctgctcagcccgaggacgggggcgagtttgtatgtgatgctggagatgactcggccttcttcactgtcactgtcacaggtgggcagtctctgcagcacagagaggaggtagagaggtagggggctaagggacagacacccacctagccccacctcccccaccccatccccagccttccccttatccagcttcctcatgtttggccatcagaatcctgcttagccacatcaggtcaggaccagaggcctggtgggagggtgcccagcaattagaaccattcgttcattcatccattcgttcaatactcattgagcaactactatgtgcttggcactgttttagatgctggggatacagcagtgaaccaataagactaaacctcttgtcttcacagagtttaaactctggtgagggtggacagacaaa

SEQ ID NO: 344339 - DNA, 2892 bp, Homo sapiens
ggctgggaagagaggctcctaagagcaggaagccaggcagcgggcaggggaggctgcggggccactcgctggagaggcaaacaggaaggactgccccctgagcgccaggcttcgggcccgggaatcgccgccgccgccgccgcagagctgcagctcggggccgaggccgggccgcgccgaggacggccccggcgcgagcctggcactgcgcatcctggcggctcggctgccggattccggcgtctacgtgtgccacgcccgcaacgcgcacggccacgcgcaggcgggggcgctgctccaggtgcaccagccccccgagagcccgcccgcggaccccgacgaggcccccgcgccggtggtggagccgctcaagtgcgcgcctaagaccttctgggtgaacgagggcaagcacgccaagttccgctgctacgtgatgggcaagcccgagcccgagatcgaatggcactgggagggccgcccgctgctcccggaccgccgccgcctcatgtaccgcgaccgcgacggcggcttcgtgctcaaggtgctctactgccaggccaaggatcgtgggctctacgtctgcgccgcgcgcaactcggcgggccagacgctcagtgccgtgcagctgcacgtgaaagagccccgcctccggttcacacggcccctgcaggacgtggagggccgtgagcacgggattgccgtgctggaatgtaaagtacccaactcccgcatccccacggcctggttccgtgaggaccagcggctgctgccctgccgcaagtacgagcagatcgaagagggcactgtccggcgcctcatcatccacaggctgaaggcagacgatgatggtatctacctgtgcgagatgcggggccgggtgcgcaccgtggccaacgtcacagtcaaagggcccatcctgaagcgcctgccccggaagctcgacgtcctggaaggagagaatgctgtgctgctagtggaaactctagaggccggggtcgagggacgctggagccgtgatggggaggagctgccggtcatctgccagagcagctcaggccacatgcatgccctggtccttccaggggtcacccgagaggatgctggcgaggtcacctttagcctgggcaactcccgtaccactacgcttctcagagtaaaatgtgtcaagcacagtcccccaggaccccccatattggcagagatgttcaagggccacaagaacacggtcctgttgacctggaagcctcccgagccagctcccgagaccccattcatctaccggctggagcggcaggaagtgggctctgaagactggattcagtgcttcagcatcgagaaagccggagccgtggaggtgccgggcgactgtgtgccctccgagggtgactaccgcttccgcatctgcacagtcagcggacatggccgtagtccccacgtggtgttccacggttctgctcaccttgtgcccacagctcgcctggtggcaggtctggaggatgtgcaggtatacgacggggaagatgccgtcttctccctcgatctctccaccatcatccagggtacctggttccttaatggggaagagctcaagagtaacgagccggagggccaggtggaacctggggccctgcggtaccgtatagagcagaagggtctgcagcacagactcatcctgcatgccgtcaagcaccaggacagcggtgccctggtcggcttcagctgccccggcgtgcaggactcagctgccctcacaatccaagagagcccggtgcacatcctgagcccccaggacaaggtgtcgttgaccttcacaacctcagagcgggtggtgctgacttgtgagctctcaagggtggacttcccggcaacctggtacaaggatgggcagaaggtggaggagagcgagttgctggtggtgaagatggatgggcgcaaacaccgtctgatcctgcctgaggccaaagtccaggacagtggcgagtttgagtgcaggacagaaggggtctcggccttcttcggcgtcactgtccaagatcctcccgtgcacatcgtggacccccgagaacatgtgttcgtgcatgccataacttccgagtgtgtcatgctggcctgtgaggtggaccgagaggacgcccctgtgcgttggtacaaggacgggcaggaggtggaggagagtgacttcgtggtgctggagaatgaggggccccatcgccgcctggtgctgcccgccacccagccctcagacgggggcgagtttcagtgcgtcgctggagatgagtgtgcctacttcactgtcaccatcacagacgtctcctcgtggatcgtgtatcccagcggcaaggtgtatgtggcagccgtgcgcctggagcgtgtggtgctgacctgtgagctatgccggccctgggcagaggtgcgctggaccaaggatggagaggaggtggtggagagccccgcgctgctcctgcagaaggaagacactgtccgccgcctggtgctgcccgctgtccagctcgaggactccggcgagtacttgtgtgaaattgacgatgagtcggcctccttcactgtcaccgtcacagagtcttaccaaagtcaggacagttcaaataacaatccggagttatgcgtcctcttgaaaaagccgaagacccggcggctctggtcccgcttccccccatggcgacgaacagctggcactgagtagcagctgcccccatagtttggggcccacattcctctgtcccacctccctgccattgctttttgcctctccccagactgcttcagccgctaacctaacctggcccctgtgggcatttgagtttgcgacccctgtgttaaaccaataaacatgcaaataaatgtacagtgacacctggtgataagtactgt

SEQ ID NO: 344340 - DNA, 1829 bp, Homo sapiens
agacgggcacgtaacttataagtggtccttaacggtcacgcgatgggcgctggtgttgtgcgtaacttcttggcgaccgaaggggctacatacatctgtgtcaagcacagtcccccaggaccccccatattggcagagatgttcaagggccacaagaacacggtcctgttgacctggaagcctcccgagccagctcccgagaccccattcatctaccggctggagcggcaggaagtgggctctgaagactggattcagtgcttcagcatcgagaaagccggagccgtggaggtgccgggcgactgtgtgccctccgagggtgactaccgcttccgcatctgcacagtcagcggacatggccgtagtccccacgtggtgttccacggttctgctcaccttgtgcccacagctcgcctggtggcaggtctggaggatgtgcaggtatacgacggggaagatgccgtcttctccctcgatctctccaccatcatccagggtacctggttccttaatggggaagagctcaagagtaacgagccggagggccaggtggaacctggggccctgcggtaccgtatagagcagaagggtctgcagcacagactcatcctgcatgccgtcaagcaccaggacagcggtgccctggtcggcttcagctgccccggcgtgcaggactcagctgccctcacaatccaagagagcccggtgcacatcctgagcccccaggacaaggtgtcgttgaccttcacaacctcagagcgggtggtgctgacttgtgagctctcaagggtggacttcccggcaacctggtacaaggatgggcagaaggtggaggagagcgagttgctggtggtgaagatggatgggcgcaaacaccgtctgatcctgcctgaggccaaagtccaggacagtggcgagtttgagtgcaggacagaaggggtctcggccttcttcggcgtcactgtccaagatcctcccgtgcacatcgtggacccccgagaacatgtgttcgtgcatgccataacttccgagtgtgtcatgctggcctgtgaggtggaccgagaggacgcccctgtgcgttggtacaaggacgggcaggaggtggaggagagtgacttcgtggtgctggagaatgaggggccccatcgccgcctggtgctgcccgccacccagccctcagacgggggcgagtttcagtgcgtcgctggagatgagtgtgcctacttcactgtcaccatcacagacgtctcctcgtggatcgtgtatcccagcggcaaggtgtatgtggcagccgtgcgcctggagcgtgtggtgctgacctgtgagctatgccggccctgggcagaggtgcgctggaccaaggatggagaggaggtggtggagagccccgcgctgctcctgcagaaggaagacactgtccgccgcctggtgctgcccgctgtccagctcgaggactccggcgagtacttgtgtgaaattgacgatgagtcggcctccttcactgtcaccgtcacagagtcttaccaaagtcaggacagttcaaataacaatccggagttatgcgtcctcttgaaaaagccgaagacccggcggctctggtcccgcttccccccatggcgacgaacagctggcactgagtagcagctgcccccatagtttggggcccacattcctctgtcccacctccctgccattgctttttgcctctccccagactgcttcagccgctaacctaacctggcccctgtgggcatttgagtttgcgacccctgtgttaaaccaataaacatgcaaataaatgtacagtgacacctggtgataagtactgt

SEQ ID NO: 344341 - DNA, 5666 bp, Homo sapiens
gccccgggcctcggctcgcctctccgcacccccccctgcccccccaccgttcgccgctgcaggcggtcggccgccgcgatgaaggcgagctcgggggatcaggggagccccccgtgcttcctgcgcttcccgcggcctgtgcgggtggtaagtggcgccgaggccgagctcaagtgcgtggtcctgggggagccgccgcctgtagtggtgtgggagaagggcgggcagcagctggcggcctcggaacgcctgagcttcccggcggacggcgcggagcacggcctgctgctgaccgccgcactgcccaccgacgcgggggtctacgtgtgccgcgcccgcaacgcggccggcgaggcctacgcggcggccgccgtcaccgtgctggagccgccggcctccgaccccgagctgcagcccgccgagcgcccgctgccatcgccggggtccggggagggcgccccggtcttcctcacggggcctcgatcccagtgggtgctgcggggggcggaggtggtgctgacgtgccgggcggggggcctccccgagcccacactgtactgggagaaggacgggatggccctggacgaagtgtgggacagcagccacttcgcgctccagccgggccgcgccgaggacggccccggcgcgagcctggcactgcgcatcctggcggctcggctgccggattccggcgtctacgtgtgccacgcccgcaacgcgcacggccacgcgcaggcgggggcgctgctccaggtgcaccagccccccgagagcccgcccgcggaccccgacgaggcccccgcgccggtggtggagccgctcaagtgcgcgcctaagaccttctgggtgaacgagggcaagcacgccaagttccgctgctacgtgatgggcaagcccgagcccgagatcgaatggcactgggagggccgcccgctgctcccggaccgccgccgcctcatgtaccgcgaccgcgacggcggcttcgtgctcaaggtgctctactgccaggccaaggatcgtgggctctacgtctgcgccgcgcgcaactcggcgggccagacgctcagtgccgtgcagctgcacgtgaaagagccccgcctccggttcacacggcccctgcaggacgtggagggccgtgagcacgggattgccgtgctggaatgtaaagtacccaactcccgcatccccacggcctggttccgtgaggaccagcggctgctgccctgccgcaagtacgagcagatcgaagagggcactgtccggcgcctcatcatccacaggctgaaggcagacgatgatggtatctacctgtgcgagatgcggggccgggtgcgcaccgtggccaacgtcacagtcaaagggcccatcctgaagcgcctgccccggaagctcgacgtcctggaaggagagaatgctgtgctgctagtggaaactctagaggccggggtcgagggacgctggagccgtgatggggaggagctgccggtcatctgccagagcagctcaggccacatgcatgccctggtccttccaggggtcacccgagaggatgctggcgaggtcacctttagcctgggcaactcccgtaccactacgcttctcagagtaaaatgtgtcaagcacagtcccccaggaccccccatattggcagagatgttcaagggccacaagaacacggtcctgttgacctggaagcctcccgagccagctcccgagaccccattcatctaccggctggagcggcaggaagtgggctctgaagactggattcagtgcttcagcatcgagaaagccggagccgtggaggtgccgggcgactgtgtgccctccgagggtgactaccgcttccgcatctgcacagtcagcggacatggccgtagtccccacgtggtgttccacggttctgctcaccttgtgcccacagctcgcctggtggcaggtctggaggatgtgcaggtatacgacggggaagatgccgtcttctccctcgatctctccaccatcatccagggtacctggttccttaatggggaagagctcaagagtaacgagccggagggccaggtggaacctggggccctgcggtaccgtatagagcagaagggtctgcagcacagactcatcctgcatgccgtcaagcaccaggacagcggtgccctggtcggcttcagctgccccggcgtgcaggactcagctgccctcacaatccaagagagcccggtgcacatcctgagcccccaggacaaggtgtcgttgaccttcacaacctcagagcgggtggtgctgacttgtgagctctcaagggtggacttcccggcaacctggtacaaggatgggcagaaggtggaggagagcgagttgctggtggtgaagatggatgggcgcaaacaccgtctgatcctgcctgaggccaaagtccaggacagtggcgagtttgagtgcaggacagaaggggtctcggccttcttcggcgtcactgtccaagatcctcccgtgcacatcgtggacccccgagaacatgtgttcgtgcatgccataacttccgagtgtgtcatgctggcctgtgaggtggaccgagaggacgcccctgtgcgttggtacaaggacgggcaggaggtggaggagagtgacttcgtggtgctggagaatgaggggccccatcgccgcctggtgctgcccgccacccagccctcagacgggggcgagtttcagtgcgtcgctggagatgagtgtgcctacttcactgtcaccatcacagacgtctcctcgtggatcgtgtatcccagcggcaaggtgtatgtggcagccgtgcgcctggagcgtgtggtgctgacctgtgagctatgccggccctgggcagaggtgcgctggaccaaggatggagaggaggtggtggagagccccgcgctgctcctgcagaaggaagacactgtccgccgcctggtgctgcccgctgtccagctcgaggactccggcgagtacttgtgtgaaattgacgatgagtcggcctccttcactgtcaccgtcacagaacccccagtgcggatcatataccctcgcgatgaggtgaccttgatcgccgtgaccttggagtgtgtggtgctgatgtgtgaactgtctcgggaggatgcccctgtgcgctggtacaaggatgggctggaagtggaggagagcgaggccctggtgctggagagggatgggccacgctgccgcctggtgctacctgctgctcagcccgaggacgggggcgagtttgtatgtgatgctggagatgactcggccttcttcactgtcactgtcacagccccaccagagaggattgtgcacccggcagcccgctccctggatctgcattttggggctccagggcgcgtggagctgcgctgtgaggtggccccagctgggtctcaggtgcgctggtacaaggacgggctggaagtggaggcatcagatgccctgcagctgggtgccgaggggcccacccgcaccctgaccctgccccacgcccagcctgaggacgccggggagtatgtgtgtgagacccggcatgaggccatcaccttcaatgtcatcctggctgagcctccagtgcagttccttgctctagagacaactccaagcccgctctgtgtggcccctggggagccagtggtgctgagctgtgaactgtcccgggctggcgcccccgtggtctggagccacaatgggaggcccgtgcaggagggcgagggcctagagctccatgccgagggcccccgccgagtcctctgcatccaggctgcaggcccagcccatgcagggctctacacctgccagtctggagcagcccccggagccccaagcctcagcttcaccgtccaggtggctgagccccctgtgcgggtggtagctcccgaggcagcccagacgagggttcggagcaccccaggcggggacctagagctggtggtgcacctctccgggccagggggccctgtacgctggtacaaggacggggagcgactggcaagccaggggcgggtgcagctggagcaggccggggccaggcaggtgctgcgggtgcagggggcacggagcggggacgctggggagtacctgtgcgatgcgccccaggacagccgcatcttccttgtcagcgtggaagagccactgctggtgaagctggtctcggacctgacaccactcactgtccacgagggcgatgatgccacgttccggtgtgaagtctccccaccagatgccgatgtcacctggctgcgcaatggggccgtcgtcactccagggccccaggtggagatggcccagaatggttcaagccgcatcttaaccttgcgaggctgccaactgggggatgcagggaccgtgactttgcgggcagggagcacggccacaagtgcccggctccatgttcgagagacagagctgctgttcctacggcggttgcaggatgtgcgggcagaggaaggccaggacgtgtgtctcgaagtggagacaggccgagtgggtgcagcgggggccgtgcgctgggtgcgaggtgggcagcccctgccccacgactctcgcctgtccatggcccaggatgggcacatccaccgcctcttcatccatggtgtcatactggccgaccagggcacctacggctgcgagagccaccacgatcgcaccctggccaggctcagcgtgaggcgacgggaacgcgcttacgcctagcccgcggctccggctccaggccctcggcacgcgccgccttctccagctgcgacgctgcggcccctcggacgccgggacctacagctgcgcggtggggacggcccgcgccggaccggtccgcctgaccgtgcgcggtgggtacggggtgatgtggaggctgggcactgctttgggcgcgagacttgcggagctgtcttccccggaccctgatgaccgcgcgtgcttctagaaagggggcgtggagggggcgtgaccggtaactgccctctgccccgccccgctcacgccccgggctccgccccagagcgtactgtggcggtactctccgagctgcggtcggtgagcgcccgcgaaggcgacggcgctacgttcgagtgcaccgtgtcggaggtcgagaccacggggcgctgggagctcggaggccgcccgctgagacccggagcccgcgtccgcatccaacaggaagggaagaaacacattctggtgcttagcgagctgcgcgccgaggacgccggtgaagtccgcttccaggcggggcccgcccagtccctggctctactggaagtggaggcattgcctctccagatgtgccgccacccccctcgcgagaagaccgttctggtgggccgccgggcggtgctggaggtgactgtgtcccgctcggggggccacgtgtgctggctgcgggagggggccgagctgtgcccgggagataagtatgagatgcgcagccacggccccacccacagcctggtcatccatgacgttcgacctgaggaccaaggcacttactgctgccaggccggccaggacagcacccacacacggctgctggtagagggcaactaggagaacctaaccaggccaggcgggtgcccttggacagcttggaaggcgtttgcccttaccctgggcaggggtagagagacaaggaacaataaaagtgctacagctca

SEQ ID NO: 344342 - DNA, 5087 bp, Homo sapiens
gccccgggcctcggctcgcctctccgcacccccccctgcccccccaccgttcgccgctgcaggcggtcggccgccgcgatgaaggcgagctcgggggatcaggggagccccccgtgcttcctgcgcttcccgcggcctgtgcgggtggtaagtggcgccgaggccgagctcaagtgcgtggtcctgggggagccgccgcctgtagtggtgtgggagaagggcgggcagcagctggcggcctcggaacgcctgagcttcccggcggacggcgcggagcacggcctgctgctgaccgccgcactgcccaccgacgcgggggtctacgtgtgccgcgcccgcaacgcggccggcgaggcctacgcggcggccgccgtcaccgtgctggagccgccggcctccgaccccgagctgcagcccgccgagcgcccgctgccatcgccggggtccggggagggcgccccggtcttcctcacggggcctcgatcccagtgggtgctgcggggggcggaggtggtgctgacgtgccgggcggggggcctccccgagcccacactgtactgggagaaggacgggatggccctggacgaagtgtgggacagcagccacttcgcgctccagccgggccgcgccgaggacggccccggcgcgagcctggcactgcgcatcctggcggctcggctgccggattccggcgtctacgtgtgccacgcccgcaacgcgcacggccacgcgcaggcgggggcgctgctccaggtgcaccagccccccgagagcccgcccgcggaccccgacgaggcccccgcgccggtggtggagccgctcaagtgcgcgcctaagaccttctgggtgaacgagggcaagcacgccaagttccgctgctacgtgatgggcaagcccgagcccgagatcgaatggcactgggagggccgcccgctgctcccggaccgccgccgcctcatgtaccgcgaccgcgacggcggcttcgtgctcaaggtgctctactgccaggccaaggatcgtgggctctacgtctgcgccgcgcgcaactcggcgggccagacgctcagtgccgtgcagctgcacgtgaaagagccccgcctccggttcacacggcccctgcaggacgtggagggccgtgagcacgggattgccgtgctggaatgtaaagtacccaactcccgcatccccacggcctggttccgtgaggaccagcggctgctgccctgccgcaagtacgagcagatcgaagagggcactgtccggcgcctcatcatccacaggctgaaggcagacgatgatggtatctacctgtgcgagatgcggggccgggtgcgcaccgtggccaacgtcacagtcaaagggcccatcctgaagcgcctgccccggaagctcgacgtcctggaaggagagaatgctgtgctgctagtggaaactctagaggccggggtcgagggacgctggagccgtgatggggaggagctgccggtcatctgccagagcagctcaggccacatgcatgccctggtccttccaggggtcacccgagaggatgctggcgaggtcacctttagcctgggcaactcccgtaccactacgcttctcagagtaaaatgtgtcaagcacagtcccccaggaccccccatattggcagagatgttcaagggccacaagaacacggtcctgttgacctggaagcctcccgagccagctcccgagaccccattcatctaccggctggagcggcaggaagtgggctctgaagactggattcagtgcttcagcatcgagaaagccggagccgtggaggtgccgggcgactgtgtgccctccgagggtgactaccgcttccgcatctgcacagtcagcggacatggccgtagtccccacgtggtgttccacggttctgctcaccttgtgcccacagctcgcctggtggcaggtctggaggatgtgcaggtatacgacggggaagatgccgtcttctccctcgatctctccaccatcatccagggtacctggttccttaatggggaagagctcaagagtaacgagccggagggccaggtggaacctggggccctgcggtaccgtatagagcagaagggtctgcagcacagactcatcctgcatgccgtcaagcaccaggacagcggtgccctggtcggcttcagctgccccggcgtgcaggactcagctgccctcacaatccaagagagcccggtgcacatcctgagcccccaggacaaggtgtcgttgaccttcacaacctcagagcgggtggtgctgacttgtgagctctcaagggtggacttcccggcaacctggtacaaggatgggcagaaggtggaggagagcgagttgctggtggtgaagatggatgggcgcaaacaccgtctgatcctgcctgaggccaaagtccaggacagtggcgagtttgagtgcaggacagaaggggtctcggccttcttcggcgtcactgtccaagatcctcccgtgcacatcgtggacccccgagaacatgtgttcgtgcatgccataacttccgagtgtgtcatgctggcctgtgaggtggaccgagaggacgcccctgtgcgttggtacaaggacgggcaggaggtggaggagagtgacttcgtggtgctggagaatgaggggccccatcgccgcctggtgctgcccgccacccagccctcagacgggggcgagtttcagtgcgtcgctggagatgagtgtgcctacttcactgtcaccatcacagacgtctcctcgtggatcgtgtatcccagcggcaaggtgtatgtggcagccgtgcgcctggagcgtgtggtgctgacctgtgagctatgccggccctgggcagaggtgcgctggaccaaggatggagaggaggtggtggagagccccgcgctgctcctgcagaaggaagacactgtccgccgcctggtgctgcccgctgtccagctcgaggactccggcgagtacttgtgtgaaattgacgatgagtcggcctccttcactgtcaccgtcacagaacccccagtgcggatcatataccctcgcgatgaggtgaccttgatcgccgtgaccttggagtgtgtggtgctgatgtgtgaactgtctcgggaggatgcccctgtgcgctggtacaaggatgggctggaagtggaggagagcgaggccctggtgctggagagggatgggccacgctgccgcctggtgctacctgctgctcagcccgaggacgggggcgagtttgtatgtgatgctggagatgactcggccttcttcactgtcactgtcacagagacaactccaagcccgctctgtgtggcccctggggagccagtggtgctgagctgtgaactgtcccgggctggcgcccccgtggtctggagccacaatgggaggcccgtgcaggagggcgagggcctagagctccatgccgagggcccccgccgagtcctctgcatccaggctgcaggcccagcccatgcagggctctacacctgccagtctggagcagcccccggagccccaagcctcagcttcaccgtccaggtggctgagccactgctggtgaagctggtctcggacctgacaccactcactgtccacgagggcgatgatgccacgttccggtgtgaagtctccccaccagatgccgatgtcacctggctgcgcaatggggccgtcgtcactccagggccccaggtggagatggcccagaatggttcaagccgcatcttaaccttgcgaggctgccaactgggggatgcagggaccgtgactttgcgggcagggagcacggccacaagtgcccggctccatgttcgagagacagagctgctgttcctacggcggttgcaggatgtgcgggcagaggaaggccaggacgtgtgtctcgaagtggagacaggccgagtgggtgcagcgggggccgtgcgctgggtgcgaggtgggcagcccctgccccacgactctcgcctgtccatggcccaggatgggcacatccaccgcctcttcatccatggtgtcatactggccgaccagggcacctacggctgcgagagccaccacgatcgcaccctggccaggctcagcgtgaggcgacgggaacgcgcttacgcctagcccgcggctccggctccaggccctcggcacgcgccgccttctccagctgcgacgctgcggcccctcggacgccgggacctacagctgcgcggtggggacggcccgcgccggaccggtccgcctgaccgtgcgcggtgggtacggggtgatgtggaggctgggcactgctttgggcgcgagacttgcggagctgtcttccccggaccctgatgaccgcgcgtgcttctagaaagggggcgtggagggggcgtgaccggtaactgccctctgccccgccccgctcacgccccgggctccgccccagagcgtactgtggcggtactctccgagctgcggtcggtgagcgcccgcgaaggcgacggcgctacgttcgagtgcaccgtgtcggaggtcgagaccacggggcgctgggagctcggaggccgcccgctgagacccggagcccgcgtccgcatccaacaggaagggaagaaacacattctggtgcttagcgagctgcgcgccgaggacgccggtgaagtccgcttccaggcggggcccgcccagtccctggctctactggaagtggaggcattgcctctccagatgtgccgccacccccctcgcgagaagaccgttctggtgggccgccgggcggtgctggaggtgactgtgtcccgctcggggggccacgtgtgctggctgcgggagggggccgagctgtgcccgggagataagtatgagatgcgcagccacggccccacccacagcctggtcatccatgacgttcgacctgaggaccaaggcacttactgctgccaggccggccaggacagcacccacacacggctgctggtagagggcaactaggagaacctaaccaggccaggcgggtgcccttggacagcttggaaggcgtttgcccttaccctgggcaggggtagagagacaaggaacaataaaagtgctacagctca

SEQ ID NO: 344343 - DNA, 3571 bp, Homo sapiens
gccccgggcctcggctcgcctctccgcacccccccctgcccccccaccgttcgccgctgcaggcggtcggccgccgcgatgaaggcgagctcgggggatcaggggagccccccgtgcttcctgcgcttcccgcggcctgtgcgggtggtaagtggcgccgaggccgagctcaagtgcgtggtcctgggggagccgccgcctgtagtggtgtgggagaagggcgggcagcagctggcggcctcggaacgcctgagcttcccggcggacggcgcggagcacggcctgctgctgaccgccgcactgcccaccgacgcgggggtctacgtgtgccgcgcccgcaacgcggccggcgaggcctacgcggcggccgccgtcaccgtgctggagccgccggcctccgaccccgagctgcagcccgccgagcgcccgctgccatcgccggggtccggggagggcgccccggtcttcctcacggggcctcgatcccagtgggtgctgcggggggcggaggtggtgctgacgtgccgggcggggggcctccccgagcccacactgtactgggagaaggacgggatggccctggacgaagtgtgggacagcagccacttcgcgctccagccgggccgcgccgaggacggccccggcgcgagcctggcactgcgcatcctggcggctcggctgccggattccggcgtctacgtgtgccacgcccgcaacgcgcacggccacgcgcaggcgggggcgctgctccaggtgcaccagccccccgagagcccgcccgcggaccccgacgaggcccccgcgccggtggtggagccgctcaagtgcgcgcctaagaccttctgggtgaacgagggcaagcacgccaagttccgctgctacgtgatgggcaagcccgagcccgagatcgaatggcactgggagggccgcccgctgctcccggaccgccgccgcctcatgtaccgcgaccgcgacggcggcttcgtgctcaaggtgctctactgccaggccaaggatcgtgggctctacgtctgcgccgcgcgcaactcggcgggccagacgctcagtgccgtgcagctgcacgtgaaagagccccgcctccggttcacacggcccctgcaggacgtggagggccgtgagcacgggattgccgtgctggaatgtaaagtacccaactcccgcatccccacggcctggttccgtgaggaccagcggctgctgccctgccgcaagtacgagcagatcgaagagggcactgtccggcgcctcatcatccacaggctgaaggcagacgatgatggtatctacctgtgcgagatgcggggccgggtgcgcaccgtggccaacgtcacagtcaaagggcccatcctgaagcgcctgccccggaagctcgacgtcctggaaggagagaatgctgtgctgctagtggaaactctagaggccggggtcgagggacgctggagccgtgatggggaggagctgccggtcatctgccagagcagctcaggccacatgcatgccctggtccttccaggggtcacccgagaggatgctggcgaggtcacctttagcctgggcaactcccgtaccactacgcttctcagagtaaaatgtgtcaagcacagtcccccaggaccccccatattggcagagatgttcaagggccacaagaacacggtcctgttgacctggaagcctcccgagccagctcccgagaccccattcatctaccggctggagcggcaggaagtgggctctgaagactggattcagtgcttcagcatcgagaaagccggagccgtggaggtgccgggcgactgtgtgccctccgagggtgactaccgcttccgcatctgcacagtcagcggacatggccgtagtccccacgtggtgttccacggttctgctcaccttgtgcccacagctcgcctggtggcaggtctggaggatgtgcaggtatacgacggggaagatgccgtcttctccctcgatctctccaccatcatccagggtacctggttccttaatggggaagagctcaagagtaacgagccggagggccaggtggaacctggggccctgcggtaccgtatagagcagaagggtctgcagcacagactcatcctgcatgccgtcaagcaccaggacagcggtgccctggtcggcttcagctgccccggcgtgcaggactcagctgccctcacaatccaagagagcccggtgcacatcctgagcccccaggacaaggtgtcgttgaccttcacaacctcagagcgggtggtgctgacttgtgagctctcaagggtggacttcccggcaacctggtacaaggatgggcagaaggtggaggagagcgagttgctggtggtgaagatggatgggcgcaaacaccgtctgatcctgcctgaggccaaagtccaggacagtggcgagtttgagtgcaggacagaaggggtctcggccttcttcggcgtcactgtccaagatcctcccgtgcacatcgtggacccccgagaacatgtgttcgtgcatgccataacttccgagtgtgtcatgctggcctgtgaggtggaccgagaggacgcccctgtgcgttggtacaaggacgggcaggaggtggaggagagtgacttcgtggtgctggagaatgaggggccccatcgccgcctggtgctgcccgccacccagccctcagacgggggcgagtttcagtgcgtcgctggagatgagtgtgcctacttcactgtcaccatcacagacgtctcctcgtggatcgtgtatcccagcggcaaggtgtatgtggcagccgtgcgcctggagcgtgtggtgctgacctgtgagctatgccggccctgggcagaggtgcgctggaccaaggatggagaggaggtggtggagagccccgcgctgctcctgcagaaggaagacactgtccgccgcctggtgctgcccgctgtccagctcgaggactccggcgagtacttgtgtgaaattgacgatgagtcggcctccttcactgtcaccgtcacagagtcttaccaaagtcaggacagttcaaataacaatccggagttatgcgtcctcttgaaaaagccgaagacccggcggctctggtcccgcttccccccatggcgacgaacagctggcactgagtagcagctgcccccatagtttggggcccacatccggactggcccacgggacagtacaggatgtggaggatgggcacgggcagcagcgggacaccctacctcaaggagatgaacatccgcacctacctggtcatcgacccccgggaccccacggtggaggaggcagttcacactgccactggccaggtggggcccgccttggcctgtctgctgcccagaaactggcctgcattcagggagtcacggcacgtcatggccacattctcatgtgaatctatccatgaggcattgctcaagaatgtcaggcccaaccagcgagtggctcctttcactctggtcctcgctatgccttggggctggcccgactgccagacctgggggacacaagggctggccttgactccactacacatctactg

SEQ ID NO: 344344 - DNA, 2356 bp, Homo sapiens
  misc_feature (1672)..(1672): n is a, c, g, or t
tattctcattattatgtgggtgatagggacttcatgctgccgaatggctccagagaggctgacggtgagcttgtgacaggctgtggttgtccccaccctgcagaacccccagtgcggatcatataccctcgcgatgaggtgaccttgatcgccgtgaccttggagtgtgtggtgctgatgtgtgaactgtctcgggaggatgcccctgtgcgctggtacaaggatgggctggaagtggaggagagcgaggccctggtgctggagagggatgggccacgctgccgcctggtgctacctgctgctcagcccgaggacgggggcgagtttgtatgtgatgctggagatgactcggccttcttcactgtcactgtcacagccccaccagagaggattgtgcacccggcagcccgctccctggatctgcattttggggctccagggcgcgtggagctgcgctgtgaggtggccccagctgggtctcaggtgcgctggtacaaggacgggctggaagtggaggcatcagatgccctgcagctgggtgccgaggggcccacccgcaccctgaccctgccccacgcccagcctgaggacgccggggagtatgtgtgtgagacccggcatgaggccatcaccttcaatgtcatcctggctgagcctccagtgcagttccttgctctagagacaactccaagcccgctctgtgtggcccctggggagccagtggtgctgagctgtgaactgtcccgggctggcgcccccgtggtctggagccacaatgggaggcccgtgcaggagggcgagggcctagagctccatgccgagggcccccgccgagtcctctgcatccaggctgcaggcccagcccatgcagggctctacacctgccagtctggagcagcccccggagccccaagcctcagcttcaccgtccaggtggctgagccactgctggtgaagctggtctcggacctgacaccactcactgtccacgagggcgatgatgccacgttccggtgtgaagtctccccaccagatgccgatgtcacctggctgcgcaatggggccgtcgtcactccagggccccaggtggagatggcccagaatggttcaagccgcatcttaaccttgcgaggctgccaactgggggatgcagggaccgtgactttgcgggcagggagcacggccacaagtgcccggctccatgttcgagagacagagctgctgttcctacggcggttgcaggatgtgcgggcagaggaaggccaggacgtgtgtctcgaagtggagacaggccgagtgggtgcagcgggggccgtgcgctgggtgcgaggtgggcagcccctgccccacgactctcgcctgtccatggcccaggatgggcacatccaccgcctcttcatccatggtgtcatactggccgaccagggcacctacggctgcgagagccaccacgatcgcaccctggccaggctcagcgtgaggcgtgagtgccccgtcctctcttaatgcattacccaccctacaccacagccttttctggctgtcctggagtccctcaggcccccaccaaagtgcccctcatcgctgagaaaagtcacccatggccgtcccagcagcagcttgcccaaagcaaaacttttctttttctaatattttttatttaccttagaantccatgtggattttgcattccattgcatatttccaagtcggctttgctataaacacaaatattctccagaaagacttgccatgggcatccttcaggcatgtattctagggatacacatacccacttaagtagcagggatggctgtcaaacagcaccccacacctcccacccaaagctggagccctctgtttcctatgtgacctcatgcaagttaacctctttgagccaagtctccttaaaaatggggctgagaccaggtgcagtggctcacgcctataatcctaacactttgggaggccaaggcaggaggatcccttgaggccaggagttcgaggccatcctgggcaacatagcaagaacccatctccacaaaaaaaataaaaattagccgggcatggtagttactagggaggctgaggcagaaggattgcttgaacccaggaggttgaggctatagtgagctatgatcatgtcacggcattccagcctgggtgacagcaagaccctgtctcaaattttaaaaatggggttgatccccgtctcaagtgtctctgggaacattaactgagataacatgaaaattcttacacagagcttggtgaatggttgtcattggtgacacatctcttctaacttatttcattcaagaaatcatcacaataaacctgtgtcccaatgttaaaa

SEQ ID NO: 344345 - DNA, 2022 bp, Homo sapiens
catgaccatcacttggataggggctcagggctcctctttccagaaaccctcatgttgagagcagcataaaccagtggttaaaagcaggggctctagagtccacccagccaggttccagcctagattctgtgccccagtagctgtgtgacattggccaagttgttcaacctgtctgagccccggctctgaaaagaggggatagtgcttttcttataggcctgttgtgacaagtaaatgctgtaaatagggtccctggtaaatgatattattagggtgccaccaaggtggggtgctaggctaggattacgaggaactgactaaaaggagtggcagggagctggcatcttgtcctttgggccatcggtgtggtcgatacatagtaggtcctcacagaaggtctgttaaatgactggggacgagggcctgcatcctgaggaggggatgaaaaggagagagaagaaaagactcagcccagctcactgccttaccgtgccccttagagccactgctggtgaagctggtctcggacctgacaccactcactgtccacgagggcgatgatgccacgttccggtgtgaagtctccccaccagatgccgatgtcacctggctgcgcaatggggccgtcgtcactccagggccccaggtggagatggcccagaatggttcaagccgcatcttaaccttgcgaggctgccaactgggggatgcagggaccgtgactttgcgggcagggagcacggccacaagtgcccggctccatgttcgagagacagagctgctgttcctacggcggttgcaggatgtgcgggcagaggaaggccaggacgtgtgtctcgaagtggagacaggccgagtgggtgcagcgggggccgtgcgctgggtgcgaggtgggcagcccctgccccacgactctcgcctgtccatggcccaggatgggcacatccaccgcctcttcatccatggtgtcatactggccgaccagggcacctacggctgcgagagccaccacgatcgcaccctggccaggctcagcgtgaggcgacgggaacgcgcttacgcctagcccgcggctccggctccaggccctcggcacgcgccgccttctccagctgcgacgctgcggcccctcggacgccgggacctacagctgcgcggtggggacggcccgcgccggaccggtccgcctgaccgtgcgcggtgggtacggggtgatgtggaggctgggcactgctttgggcgcgagacttgcggagctgtcttccccggaccctgatgaccgcgcgtgcttctagaaagggggcgtggagggggcgtgaccggtaactgccctctgccccgccccgctcacgccccgggctccgccccagagcgtactgtggcggtactctccgagctgcggtcggtgagcgcccgcgaaggcgacggcgctacgttcgagtgcaccgtgtcggaggtcgagaccacggggcgctgggagctcggaggccgcccgctgagacccggagcccgcgtccgcatccaacaggaagggaagaaacacattctggtgcttagcgagctgcgcgccgaggacgccggtgaagtccgcttccaggcggggcccgcccagtccctggctctactggaagtggaggcattgcctctccagatgtgccgccacccccctcgcgagaagaccgttctggtgggccgccgggcggtgctggaggtgactgtgtcccgctcggggggccacgtgtgctggctgcgggagggggccgagctgtgcccgggagataagtatgagatgcgcagccacggccccacccacagcctggtcatccatgacgttcgacctgaggaccaaggcacttactgctgccaggccggccaggacagcacccacacacggctgctggtagagggcaactaggagaacctaaccaggccaggcgggtgcccttggacagcttggaaggcgtttgcccttaccctgggcaggggtagagagacaaggaacaataaaagtgctacagctca

SEQ ID NO: 344346 - DNA, 1306 bp, Homo sapiens
  misc_feature (622)..(622): n is a, c, g, or t
ttaggtcctgatgaggatgagatactctgtgtcccgtgcctgtactcccaaccaggattccagcagccttgcctctccacctagggacagaccagtgggatggagcaaggggccagcctccaaccccaccagactccatggcctccttcttccccaccagagacagagctgctgttcctacggcggttgcaggatgtgcgggcagaggaaggccaggacgtgtgtctcgaagtggagacaggccgagtgggtgcagcgggggccgtgcgctgggtgcgaggtgggcagcccctgccccacgactctcgcctgtccatggcccaggatgggcacatccaccgcctcttcatccatggtgtcatactggccgaccagggcacctacggctgcgagagccaccacgatcgcaccctggccaggctcagcgtgaggcgtgagtgccccgtcctctcttaatgcattacccaccctacaccacagccttttctggctgtcctggagtccctcaggcccccaccaaagtgcccctcatcgctgagaaaagtcacccatggccgtcccagcagcagcttgcccaaagcaaaacttttctttttctaatattttttatttaccttagaantccatgtggattttgcattccattgcatatttccaagtcggctttgctataaacacaaatattctccagaaagacttgccatgggcatccttcaggcatgtattctagggatacacatacccacttaagtagcagggatggctgtcaaacagcaccccacacctcccacccaaagctggagccctctgtttcctatgtgacctcatgcaagttaacctctttgagccaagtctccttaaaaatggggctgagaccaggtgcagtggctcacgcctataatcctaacactttgggaggccaaggcaggaggatcccttgaggccaggagttcgaggccatcctgggcaacatagcaagaacccatctccacaaaaaaaataaaaattagccgggcatggtagttactagggaggctgaggcagaaggattgcttgaacccaggaggttgaggctatagtgagctatgatcatgtcacggcattccagcctgggtgacagcaagaccctgtctcaaattttaaaaatggggttgatccccgtctcaagtgtctctgggaacattaactgagataacatgaaaattcttacacagagcttggtgaatggttgtcattggtgacacatctcttctaacttatttcattcaagaaatcatcacaataaacctgtgtcccaatgttaaaa

SEQ ID NO: 344347 - DNA, 445 bp, Homo sapiens
tgcggactgcagtggcgcaatctcggctcaccgcaagctccgcttcccgggttcacgccattctcctgcctcagcctcctgagtagctgggactacaggcacccgccaccgcgcccggctaattttttgtatttttagtagagacggggtttcaccgttttagccaggatggtctcgatctcctgacctcatgatccacccgcctcggcctcccaaagtgctgggattacagacgtgagccaccgcgcccggccttgattgaccagttttgaaacactctctgtagaatctgcaaatggacatttggagggctttgcaactgatggtgcaaaaggaaatatcttcacataaaaactattctgaaacattctgacaaactcctttgtgatgtgtgcattcatctcatggagttgaaacttcctttgcattgaacagttttgaaaaa

SEQ ID NO: 344348 - DNA, 2939 bp, Homo sapiens
tgctcggagtgctgcctggcgctggctaggaggcaaacgcacgcgggaagagctgctacccattccagggaccctgccgctgcccctctgaggggtctgcacctcctgggagcaggtgggtctctgggacgagggtccatggtggatggctctggagacgctcccgaggctgtgccgtccccctgctgcacaggtcggagggtcaccgcagaggctactcgggctggggctggggccgagggagcccgcactggagccccatgtggaacccaaggatgcagctgctctgctaacacggcagcccatccttcgagactgtgacctcgccacagtggccctcagccctccacctccggcgggggcgagggccacccacctccaagtctccagccatgacgacctccgcactccggcgccaggtgaagaacatcgtgcacaactactccgaggcagaaatcaaggtgcgcgaggccaccagcaatgacccctggggcccccctagttcgctcatgtccgagatcgctgacctgaccttcaacacagtggccttcaccgaagtcatgggcatgctgtggcggcggctcaatgacagcggcaagaactggcggcacgtgtacaaggctctaacattgctggactacctgctcaagacgggctccgagcgggtggcccaccagtgccgcgagaacctctacaccatccagacactcaaggacttccagtacatcgaccgcgacggcaaggaccagggcgtcaacgtgcgcgagaaggtcaagcaggtgatggccctgctcaaggatgaggagcggctgcggcaggagcgaacccacgccctcaagaccaaggagcgcatggcactggagggcatcggcattggcagtgggcagctgggcttcagccgccgctacggcgaggactacagccgctcccggggctccccgtcctcctacaactcctcctcttcgtcaccccgctatacctccgacctggagcaggcccggcctcagacgtcaggggaagaggaactgcagctgcagctggccctcgccatgagccgtgaggaggcagagaagcctgtccccccagcctcccacagggacgaggacctgcagctgcagctggctctgcgcctgagccggcaggagcacgagaaggaggtgaggtcctggcagggtgatggctcccccatggccaatggtgcaggggccgtggtccaccatcagcgggacagagagcctgagagagaagagagaaaggaggaggagaagctaaaaaccagccagtcctccatcctggacttggctgacatcttcgtacctgccctggccccgccctccacacactgctctgctgacccatgggacatcccaggttttaggccgaacacagaggccagtggatcctcctgggggccttctgcagacccctggtctccgatcccctcaggaaccgtcctgtcccgaagccagccctgggatctgactcccatgctctcctcctctgagccctggggcaggaccccagtgctgcctgctgggccccccaccacagacccctgggccctgaactctccccaccacaaactccccagcactggggctgacccttggggagcctccctggagacctccgacacacctggtggtgcctcgacctttgacccatttgccaaacctccagaatccacagagaccaaggaggggctggagcaggccctgccctctgggaagcccagcagccctgtggagctggacctgtttggagaccccagccccagttccaagcaaaatggcacgaaggagccagatgccctggacctgggcatactaggggaagcactaacccagccaagcaaagaggcccgagcttgccggactcccgagtccttcctgggtccctcagcttcctccttggtcaaccttgactcgttggtcaaggcaccccaggttgcaaagacccggaaccccttcctgacaggtctcagcgctccgtcccccaccaacccgttcggcgcgggcgagacgggcaggccgacgctaaaccagatgcgcaccggctcgccggcgctgggcctggcaggcgggcctgtgggggcgcccctgggctccatgacctacagcgcctctctgcccctcccgctcagcagcgtgccagctggcttgaccctccccgcctcggttagcgtcttcccgcaggccggagccttcgcaccgcagccgctgctgcccacgccgagctcagccgggccgcggcccccgcccccgcagaccggcaccaaccccttcctctgagccccgccccgtcccataccggcctgcgcctgcgccggacgctccgcggccccgcctccggacccggggctgggcggggcgccggtgctagtggaacgccgagccagtggcggctggtatcccgcggcggctctggaagctggacgcggaccacggcccgggagctagaaactgaacgcccgcataataaagactggaaccctcgttctcagctctcaccaagtggactttttgcggggtgtggcggccgggtctcgaccacagcgtggatcaccggctgtttaggaaactgcagctgcacaacgtggggtgcaaaactgccccgcttcctttacagctcttctcaaccctcacctccatcccccgtcacccaggcaccttcgcttccagatgctgccaggctgtcactcaattcggtcatttcattcatttatcacacatgggcactggggttgggctaacagcaagagacaataggcctttgttcctatttattgggtactgcttacgtgctaagcagatcagtttatttaatgcttgcaacgactctctgaggtagaaaatattgttaattccgttcaggatcccggctacataatctgtggggctcaatacaaaataaaaatgtaggggctccttgttcaaaat

SEQ ID NO: 344349 - DNA, 848 bp, Homo sapiens
tgctcggagtgctgcctggcgctggctaggaggcaaacgcacgcgggaagagctgctacccattccagggaccctgccgctgcccctctgaggggtctgcacctcctgggagcaggtgggtctctgggacgagggtccatggtggatggctctggagacgctcccgaggctgtgccgtccccctgctgcacaggtcggagggtcaccgcagaggctactcgggctggggctggggccgagggagcccgcactggagccccatgtggaacccaaggatgcagctgctctgctaacacggcagcccatccttcgagactgtgacctcgccacagtggccctcagccctccacctccggcgggggcgagggccacccacctccaagtctccagccatgacgacctccgcactccggcgccaggtgaagaacatcgtgcacaactactccgaggcagaaatcaaggtgcgcgaggccaccagcaatgacccctggggcccccctagttcgctcatgtccgagatcgctgacctgaccttcaacacagtggccttcaccgaagtcatgggcatgctgtggcggcggctcaatgacagcggcaagaactggcggcacgtgtacaaggctctaacattgctggactacctgctcaagacgggctccgagcgggtggcccaccagtgccgcgagaacctctacaccatccagacactcaaggacttccagtacatcgaccgcgacggaggcaaggcacgcgcgaaaggacaaggaagccccagagaagaggcggggagaaccccccaaaacgggcagcaaaaggggagcacaaaaaaacgcccacacaaaaagtag

SEQ ID NO: 344350 - DNA, 2498 bp, Homo sapiens
tgctcggagtgctgcctggcgctggctaggaggcaaacgcacgcgggaagagctgctacccattccagggaccctgccgctgcccctctgaggggtctgcacctcctgggagcaggtgggtctctgggacgagggtccatggtggatggctctggagacgctcccgaggctgtgccgtccccctgctgcacaggtcggagggtcaccgcagaggctactcgggctggggctggggccgagggagcccgcactggagccccatgtggaacccaaggatgcagctgctctgctaacacggcagcccatccttcgagactgtgacctcgccacagtggccctcagccctccacctccggcgggggcgagggccacccacctccaagtctccagccatgacgacctccgcactccggcgccaggtgaagaacatcgtgcacaactactccgaggcagaaatcaaggtgcgcgaggccaccagcaatgacccctggggcccccctagttcgctcatgtccgagatcgctgacctgaccttcaacacagtggccttcaccgaagtcatgggcatgctgtggcggcggctcaatgacagcggcaagaactggcggcacgtgtacaaggctctaacattgctggactacctgctcaagacgggctccgagcgggtggcccaccagtgccgcgagaacctctacaccatccagacactcaaggacttccagtacatcgaccgcgacggcaaggaccagggcgtcaacgtgcgcgagaaggtcaagcaggtgatggccctgctcaaggatgaggagcggctgcggcaggagcgaacccacgccctcaagaccaaggagcgcatggcactggagggcatcggcattggcagtgggcagctgggcttcagccgccgctacggcgaggactacagccgctcccggggctccccgtcctcctacaactcctcctcttcgtcaccccgctatacctccgacctggagcaggcccggcctcagacgtcaggggaagaggaactgcagctgcagctggccctcgccatgagccgtgaggaggcagagaagcctgtccccccagcctcccacagggacgaggacctgcagctgcagctggctctgcgcctgagccggcaggagcacgagaaggaggtgaggtcctggcagggtgatggctcccccatggccaatggtgcaggggccgtggtccaccatcagcgggacagagagcctgagagagaagagagaaaggaggaggagaagctaaaaaccagccagtcctccatcctggacttggctgacatcttcgtacctgccctggccccgccctccacacactgctctgctgacccatgggacatcccaggttttaggccgaacacagaggccagtggatcctcctgggggccttctgcagacccctggtctccgatcccctcaggaaccgtcctgtcccgaagccagccctgggatctgactcccatgctctcctcctctgagccctggggcaggaccccagtgctgcctgctgggccccccaccacagacccctgggccctgaactctccccaccacaaactccccagcactggggctgacccttggggagcctccctggagacctccgacacacctggtggtgcctcgacctttgacccatttgccaaacctccagaatccacagagaccaaggaggggctggagcaggccctgccctctgggaagcccagcagccctgtggagctggacctgtttggagaccccagccccagttccaagcaaaatggcacgaaggagccagatgccctggacctgggcatactaggggaagcactaacccagccaagcaaagaggcccgagcttgccggactcccgagtccttcctgggtccctcagcttcctccttggtcaaccttgactcgttggtcaaggcaccccaggttgcaaagacccggaaccccttcctgacaggtctcagcgctccgtcccccaccaacccgttcggcgcgggcgagacgggcaggccgacgctaaaccagatgcgcaccggctcgccggcgctgggcctggcaggcgggcctgtgggggcgcccctgggctccatgacctacagcgcctctctgcccctcccgctcagcagcgtgccagctggcttgaccctccccgcctcggttagcgtcttcccgcaggccggagccttcgcaccgcagccgctgctgcccacgccgagctcagccgggccgcggcccccgcccccgcagaccggcaccaaccccttcctctgagccccgccccgtcccataccggcctgcgcctgcgccggacgctccgcggccccgcctccggacccggggctgggcggggcgccggtgctagtggaacgccgagccagtggcggctggtatcccgcggcggctctggaagctggacgcggaccacggcccgggagctagaaactgaacgcccgcataataaagactggaaccctcgtt

SEQ ID NO: 344351 - DNA, 2288 bp, Homo sapiens
tgctcggagtgctgcctggcgctggctaggaggcaaacgcacgcgggaagagctgctacccattccagggaccctgccgctgcccctctgaggggtctgcacctcctgggagcaggtgggtctctgggacgagggtccatggtggatggctctggagacgctcccgaggctgtgccgtccccctgctgcacaggtcggagggtcaccgcagaggctactcgggctggggctggggccgagggagcccgcactggagccccatgtggaacccaaggatgcagctgctctgctaacacggcagcccatccttcgagactgtgacctcgccacagtggccctcagccctccacctccggcgggggcgagggccacccacctccaagtctccagccatgacgacctccgcactccggcgccaggtgaagaacatcgtgcacaactactccgaggcagaaatcaaggtgcgcgaggccaccagcaatgacccctggggcccccctagttcgctcatgtccgagatcgctgacctgaccttcaacacagtggccttcaccgaagtcatgggcatgctgtggcggcggctcaatgacagcggcaagaactggcggcacgtgtacaaggctctaacattgctggactacctgctcaagacgggctccgagcgggtggcccaccagtgccgcgagaacctctacaccatccagacactcaaggacttccagtacatcgaccgcgacggcaaggaccagggcgtcaacgtgcgcgagaaggtcaagcaggtgatggccctgctcaaggatgaggagcggctgcggcaggagcgaacccacgccctcaagaccaaggagcgcatggcactggagggcatcggcattggcagtgggcagctgggcttcagccgccgctacggcgaggactacagccgctcccggggctccccgtcctcctacaactgcccggcctcagacgtcaggggaagaggaactgcagctgcagctggccctcgccatgagccgtgaggaggcagagaaggaggtgaggtcctggcagggtgatggctcccccatggccaatggtgcaggggccgtggtccaccatcagcgggacagagagcctgagagagaagagagaaaggaggaggagaagctaaaaaccagccaggttttaggccgaacacagaggccagtggatcctcctgggggccttctgcagacccctggtctccgatcccctcaggaaccgtcctgtcccgaagccagccctgggatctgactcccatgctctcctcctctgagccctggggcaggaccccagtgctgcctgctgggccccccaccacagacccctgggccctgaactctccccaccacaaactccccagcactggggctgacccttggggagcctccctggagacctccgacacacctggtggtgcctcgacctttgacccatttgccaaacctccagaatccacagagaccaaggaggggctggagcaggccctgccctctgggaagcccagcagccctgtggagctggacctgtttggagaccccagccccagttccaagcaaaatggcacgaaggagccagatgccctggacctgggcatactaggggaagcactaacccagccaagcaaagaggcccgagcttgccggactcccgagtccttcctgggtccctcagcttcctccttggtcaaccttgactcgttggtcaaggcaccccaggttgcaaagacccggaaccccttcctgacaggtctcagcgctccgtcccccaccaacccgttcggcgcgggcgagacgggcaggccgacgctaaaccagatgcgcaccggctcgccggcgctgggcctggcaggcgggcctgtgggggcgcccctgggctccatgacctacagcgcctctctgcccctcccgctcagcagcgtgccagctggcttgaccctccccgcctcggttagcgtcttcccgcaggccggagccttcgcaccgcagccgctgctgcccacgccgagctcagccgggccgcggcccccgcccccgcagaccggcaccaaccccttcctctgagccccgccccgtcccataccggcctgcgcctgcgccggacgctccgcggccccgcctccggacccggggctgggcggggcgccggtgctagtggaacgccgagccagtggcggctggtatcccgcggcggctctggaagctggacgcggaccacggcccgggagctagaaactgaacgcccgcataataaagactggaaccctcgtt

SEQ ID NO: 344352 - DNA, 340 bp, Homo sapiens
gatggggtcctgctacattgcccaggctggcatcaagcagtctttctgccttagagtaagttttaatgctagtgtccctcagtttacttagctcttttcttatcagtgaagtttatttagtaagggaagagaacaaaaatatgtgagagaatttatatgtagaaaacaatatgtatttttagccaaatatatatttggtagtttacatatatatgacacagagtatcagagccatagaccatttaaaattatagccaggtgcggtggctcacgcctgtaatcccagcactttgggaggccgaggtgggtggatcacctgaagtcaggagtttgagaccag

SEQ ID NO: 344353 - DNA, 837 bp, Homo sapiens
tctatgtagttatgtgaaccgtttgcagtggtggtgtttaccttttttattgacacaaaccaaaaatgtaatcagaatgttacctttatatgttacaaaaaagtatgatttttctttcattttaatttttctaaagcttgcaaataaacgtattcagaatatgcaacacctaaagaaagagaagaggagactgaataaaaggttttcaaggccttctcctattccagaaccaggactcctatggtcatcttgataaagcaggagtctatttgaaggaaaccatgctccagacagaaatatgtggattgtgaacatcaagtgacatatcatgaattgatcatccacaaaataaatgcaatactccaccatttcggaaaaataaacacagtgcaagtatttaatatccaagctacaggctctagaattttattaaatgccatctctcactaccatatttttctttcctgtggtaaacttgaaatttgctgcttttcaacaaataataatgaatatgtataggtagacttttgaaaaatattattctcatttaaatttttgcaaatgttttatgacatatttagatgtttagaagtatgttataataatagaacaccagatttcctctgctgtatatttataatgacttccatttaaacaaaatgtttaaatactttaaacagtcctaggagactgttattataactaactcctgtattttgtgttgctattgcagataagccatagtgtaattaaaatttccatttaaggtaaaatttgaatattgaattaaaattttacttttaggtatgaaataaattataattattgctgactctc

SEQ ID NO: 344354 - DNA, 893 bp, Homo sapiens
tctatgtagttatgtgaaccgtttgcagtggtggtgtttaccttttttattgacacaaaccaaaaatgtaatcagaatgttacctttatatgttacaaaaaagtatgatttttctttcattttaatttttctaaagcttgcaaataaacgtattcagaatatgcaacacctaaagaaagagaagaggagactgaataaaaggttttcaaggccttctcctattccagaaccaggactcctatggtcatcttgataaagcaggagtctatttgaaggaaaccatgctccagacagaaatatgtggattgtgaacatcaagtgacatatcatgaattgatcatccacaaaataaatgcaatactccaccatttcggaaaaataaacacagtgcaagtatttaatatccaagctacaggctctagaattttattaaatgccatctctcactaccatatttttctttcctgtggtaaacttgaaatttgctgcttttcaacaaataataatgaatatgtataggtagacttttgaaaaatattattctcatttaaatttttgcaaatgttttatgacatatttagatgtttagaagtatgttataataatagaacaccagatttcctctgctgtatatttataatgacttccatttaaacaaaatgtttaaatactttaaacagtcctaggagactgttattataactaactcctgtattttgtgttgctattgcagataagccatagtgtaattaaaatttccatttaaggtaaaatttgaatattgaattaaaattttacttttaggtatgaaataaattataattattgctgactctcaaaagccgttatttgtaggatgaaatggataaacaaattggccttgctggcctcaa

SEQ ID NO: 344355 - DNA, 796 bp, Homo sapiens
acggcatgtgcctgtattgctgggacatcgagccttcccaagtcaaccctgaaggaccaagacaacatcatccttcagaggtcactgagcggcagcttgcaaataaacgtattcagaatatgcaacacctaaagaaagagaagaggagactgaataaaaggttttcaaggccttctcctattccagaaccaggactcctatggtcatcttgataaagcaggagtctatttgaaggaaaccatgctccagacagaaatatgtggattgtgaacatcaagtgacatatcatgaattgatcatccacaaaataaatgcaatactccaccatttcggaaaaataaacacagtgcaagtatttaatatccaagctacaggctctagaattttattaaatgccatctctcactaccatatttttctttcctgtggtaaacttgaaatttgctgcttttcaacaaataataatgaatatgtataggtagacttttgaaaaatattattctcatttaaatttttgcaaatgttttatgacatatttagatgtttagaagtatgttataataatagaacaccagatttcctctgctgtatatttataatgacttccatttaaacaaaatgtttaaatactttaaacagtcctaggagactgttattataactaactcctgtattttgtgttgctattgcagataagccatagtgtaattaaaatttccatttaaggtaaaatttgaatattgaattaaaattttacttttaggtatgaaataaattataattattgctgactctc

SEQ ID NO: 344356 - DNA, 3217 bp, Homo sapiens
agcggggcggccgggccagcgcggggcgcccgcgggcaggggcggcgagtgcgcgggcgctcgccgccgcccttctcggcgggcagcgcgcgaggaccaggccgaggaggaagtggcggcggcggcggcgggactgcgcgccccagctccgatccccgttccgcgtccccgccgccgggaggaggtgcccactcgctcgcggcgcgcgccggccgccagactcggcctgtgggcgatttcctccggacccaggctccccgcccgaggaggaagatgcagacctttctgaaagggaagagagttggctactggctgagcgagaagaaaatcaagaagctgaatttccaggccttcgccgagctgtgcaggaagcgagggatggaggttgtgcagctgaaccttagccggccgatcgaggagcagggccccctggacgtcatcatccacaagctgactgacgtcatccttgaagccgaccagaatgatagccagtccctggagctggtgcacaggttccaggagtacatcgatgcccaccctgagaccatcgtcctggacccgctccctgccatcagaaccctgcttgaccgctccaagtcctatgagctcatccggaagattgaggcctacatggaagacgacaggatctgctcgccacccttcatggagctcacgagcctgtgcggggatgacaccatgcggctgctggagaagaacggcttgactttcccattcatttgcaaaaccagagtggctcatggcaccaactctcacgagatggctatcgtgttcaaccaggagggcctgaacgccatccagccaccctgcgtggtccagaatttcatcaaccacaacgccgtcctgtacaaggtgttcgtggttggcgagtcctacaccgtggtccagaggccctcactcaagaacttctccgcaggcacatcagaccgtgagtccatcttcttcaacagccacaacgtgtcaaagccggagtcgtcatcggtcctgacggagctggacaagatcgagggcgtgttcgagcggccgagcgacgaggtcatccgggagctctcccgggccctgcggcaggcactgggcgtgtcactcttcggcatcgacatcatcatcaacaaccagacagggcagcacgccgtcattgacatcaatgccttcccaggctacgagggcgtgagcgagttcttcacagacctcctgaaccacatcgccactgtcctgcagggccagagcacagccatggcagccacaggggacgtggccctgctgaggcacagcaagcttctggccgagccggcgggcggcctggtgggcgagcggacatgcagcgccagccccggctgctgcggcagcatgatgggccaggacgcgccctggaaggctgaggccgacgcgggcggcaccgccaagctgccgcaccagagactcggctgcaacgccggcgtgtcgcccagcttccagcagcattgtgtggcctccctggccaccaaggcctcctcccagtagccacggagccgggacccagaggggcagcgcagggcgcagagcacacccgctgggccagcagctcccaacggcgatgctactactaagaatccccagtgatctgattcttctgttttttaatttttaacctgattttctgatgtcatgatctaaatgaggggtagtgggggatggaagagagtaccaggtggtccaccgttggggagtggggccgtccgcctgctctctactgtgcagacctcctaactgagtttacacacgcttgtgtttgcaacactaggtctggatgggaggtgaggggtgtgcgtatggctgccatgccagtgtctgtgcacatccctgtctgttggtctccatggccactgtggaccgggacccttgggggaagcctgcccatgtcgggctgtgggaggctgatcggtgcgtgtgagagtggcttcccttctgcctgactccccactccctgacctgccccttccttgtttttcctcctactggtctccaccaaggctttgttagcccccaccctgcctggtgtgcagctaacccctccctccccacagccagaggaggccacagacccctcaggggagttccgcgctggtgtctgggctgtgctccctcactaaagggaaggaaaggaagctgggcgtcctccgggccccccaacacacgtcccatttagccctgcacagcggtctccttcccctaagccagcactgctgctccctggagcccgggaaggaggctgcctggctggaggcccgagccgatggcgcctgtgctgaggatttgtgctgtgatttgggcaaatcattccaggtctttgggcctccaccccctcgtctctagtggacatttgagatcagagagcaccacagggctggctttgtgccctaacccctgggatgcagcctgcctttccataaagtcacctaggtgaggataggcgcgggagcctcggcatgacaccatggagatcggggccctcttcccagtgggttcactccttttcacacctgctgggtccctcctcacccagcaggcctggtccacctctcattgcaagccccaagcactgagccagcaggtgccagggagccacccgccccccatcgcttctgcacacctcagactcaccccatcaccttggcagcaaagcactggctctgccgtctgacccctgatccaggcagccccctccgcagagaaaagggttggggagaagcctctgcagtcctggaagatgtggggtgctgggtgagaggcatcagcccccacaagtatgtttttgtgtcttaagatagcagtttactttgaaaaagtgaaaaaggcttccgggctgtcctctgcccagtgagatggaggacgctagagaaagtgctgagtgtcccgagagaggcccccgagccagtgcatggaggtccttcggcctggctcagctgggctgcaggatgcccactttgaggagggaggcacagggcttgggcgaggggcagaggccatcagaactgcccggcttttttggaaactgaggacccaacaactaaccacgtttacacgacttgagttttgaaccccgattaatgtctgtacgtcacctttcctagttctgaccctgagccctggggaacaggaaagcgtggctggcctcttgcactgctttgtctccaaaataaactactgaaatcaaaccgca

SEQ ID NO: 344357 - DNA, 3185 bp, Homo sapiens
agcggggcggccgggccagcgcggggcgcccgcgggcaggggcggcgagtgcgcgggcgctcgccgccgcccttctcggcgggcagcgcgcgaggaccaggccgaggaggaagtggcggcggcggcggcgggctccccgcccgaggaggaagatgcagacctttctgaaagggaagagagttggctactggctgagcgagaagaaaatcaagaagctgaatttccaggccttcgccgagctgtgcaggaagcgagggatggaggttgtgcagctgaaccttagccggccgatcgaggagcagggccccctggacgtcatcatccacaagctgactgacgtcatccttgaagccgaccagaatgatagccagtccctggagctggtgcacaggttccaggagtacatcgatgcccaccctgagaccatcgtcctggacccgctccctgccatcagaaccctgcttgaccgctccaagtcctatgagctcatccggaagattgaggcctacatggaagacgacaggatctgctcgccacccttcatggagctcacgagcctgtgcggggatgacaccatgcggctgctggagaagaacggcttgactttcccattcatttgcaaaaccagagtggctcatggcaccaactctcacgagatggctatcgtgttcaaccaggagggcctgaacgccatccagccaccctgcgtggtccagaatttcatcaaccacaacgccgtcctgtacaaggtgttcgtggttggcgagtcctacaccgtggtccagaggccctcactcaagaacttctccgcaggcacatcagaccgtgagtccatcttcttcaacagccacaacgtgtcaaagccggagtcgtcatcggtcctgacggagctggacaagatcgagggcgtgttcgagcggccgagcgacgaggtcatccgggagctctcccgggccctgcggcaggcactgggcgtgtcactcttcggcatcgacatcatcatcaacaaccagacagggcagcacgccgtcattgacatcaatgccttcccaggctacgagggcgtgagcgagttcttcacagacctcctgaaccacatcgccactgtcctgcagggccagagcacagccatggcagccacaggggacgtggccctgctgaggcacagcaagcttctggccgagccggcgggcggcctggtgggcgagcggacatgcagcgccagccccggctgctgcggcagcatgatgggccaggacgcgccctggaaggctgaggccgacgcgggcggcaccgccaagctgccgcaccagagactcggctgcaacgccggcgtgtcgcccagcttccagcagcattgtgtggcctccctggccaccaaggcctcctcccagtagccacggagccgggacccagaggggcagcgcagggcgcagagcacacccgctgggccagcagctcccaacggcgatgctactactaagaatccccagtgatctgattcttctgttttttaatttttaacctgattttctgatgtcatgatctaaatgaggggtagtgggggatggaagagagtaccaggtggtccaccgttggggagtggggccgtccgcctgctctctactgtgcagacctcctaactgagtttacacacgcttgtgtttgcaacactaggtctggatgggaggtgaggggtgtgcgtatggctgccatgccagtgtctgtgcacatccctgtctgttggtctccatggccactgtggaccgggacccttgggggaagcctgcccatgtcgggctgtgggaggctgatcggtgcgtgtgagagtggcttcccttctgcctgactccccactccctgacctgccccttccttgtttttcctcctactggtctccaccaaggctttgttagcccccaccctgcctggtgtgcagctaacccctccctccccacagccagaggaggccacagacccctcaggggagttccgcgctggtgtctgggctgtgctccctcactaaagggaaggaaaggaagctgggcgtcctccgggccccccaacacacgtcccatttagccctgcacagcggtctccttcccctaagccagcactgctgctccctggagcccgggaaggaggctgcctggctggaggcccgagccgatggcgcctgtgctgaggatttgtgctgtgatttgggcaaatcattccaggtctttgggcctccaccccctcgtctctagtggacatttgagatcagagagcaccacagggctggctttgtgccctaacccctgggatgcagcctgcctttccataaagtcacctaggtgaggataggcgcgggagcctcggcatgacaccatggagatcggggccctcttcccagtgggttcactccttttcacacctgctgggtccctcctcacccagcaggcctggtccacctctcattgcaagccccaagcactgagccagcaggtgccagggagccacccgccccccatcgcttctgcacacctcagactcaccccatcaccttggcagcaaagcactggctctgccgtctgacccctgatccaggcagccccctccgcagagaaaagggttggggagaagcctctgcagtcctggaagatgtggggtgctgggtgagaggcatcagcccccacaagtatgtttttgtgtcttaagatagcagtttactttgaaaaagtgaaaaaggcttccgggctgtcctctgcccagtgagatggaggacgctagagaaagtgctgagtgtcccgagagaggcccccgagccagtgcatggaggtccttcggcctggctcagctgggctgcaggatgcccactttgaggagggaggcacagggcttgggcgaggggcagaggccatcagaactgcccggcttttttggaaactgaggacccaacaactaaccacgtttacacgacttgagttttgaaccccgattaatgtctgtacgtcacctttcctagttctgaccctgagccctggggaacaggaaagcgtggctggcctcttgcactgctttgtctccaaaataaactactgaaatcaaaccgcatttcacacgtgtttacacatgttgctcaagtttgttatgtcatactcccagtccttaaaagacgtttaataaaacagctttacctttta

SEQ ID NO: 344358 - DNA, 3003 bp, Homo sapiens
agcagacgcctctgccccctacacacacacacacacacacatacacacacacacatgcacgcgcacacacgcacgcacaccaagctgagctgcctgttggtgtgtcctcctgaggctgggacttgctggtctctgaggagcacgtggtctggccctgatgtgcgctgtgtctactggagctgaaccttagccggccgatcgaggagcagggccccctggacgtcatcatccacaagctgactgacgtcatccttgaagccgaccagaatgatagccagtccctggagctggtgcacaggttccaggagtacatcgatgcccaccctgagaccatcgtcctggacccgctccctgccatcagaaccctgcttgaccgctccaagtcctatgagctcatccggaagattgaggcctacatggaagacgacaggatctgctcgccacccttcatggagctcacgagcctgtgcggggatgacaccatgcggctgctggagaagaacggcttgactttcccattcatttgcaaaaccagagtggctcatggcaccaactctcacgagatggctatcgtgttcaaccaggagggcctgaacgccatccagccaccctgcgtggtccagaatttcatcaaccacaacgccgtcctgtacaaggtgttcgtggttggcgagtcctacaccgtggtccagaggccctcactcaagaacttctccgcaggcacatcagaccgtgagtccatcttcttcaacagccacaacgtgtcaaagccggagtcgtcatcggtcctgacggagctggacaagatcgagggcgtgttcgagcggccgagcgacgaggtcatccgggagctctcccgggccctgcggcaggcactgggcgtgtcactcttcggcatcgacatcatcatcaacaaccagacagggcagcacgccgtcattgacatcaatgccttcccaggctacgagggcgtgagcgagttcttcacagacctcctgaaccacatcgccactgtcctgcagggccagagcacagccatggcagccacaggggacgtggccctgctgaggcacagcaagcttctggccgagccggcgggcggcctggtgggcgagcggacatgcagcgccagccccggctgctgcggcagcatgatgggccaggacgcgccctggaaggctgaggccgacgcgggcggcaccgccaagctgccgcaccagagactcggctgcaacgccggcgtgtcgcccagcttccagcagcattgtgtggcctccctggccaccaaggcctcctcccagtagccacggagccgggacccagaggggcagcgcagggcgcagagcacacccgctgggccagcagctcccaacggcgatgctactactaagaatccccagtgatctgattcttctgttttttaatttttaacctgattttctgatgtcatgatctaaatgaggggtagtgggggatggaagagagtaccaggtggtccaccgttggggagtggggccgtccgcctgctctctactgtgcagacctcctaactgagtttacacacgcttgtgtttgcaacactaggtctggatgggaggtgaggggtgtgcgtatggctgccatgccagtgtctgtgcacatccctgtctgttggtctccatggccactgtggaccgggacccttgggggaagcctgcccatgtcgggctgtgggaggctgatcggtgcgtgtgagagtggcttcccttctgcctgactccccactccctgacctgccccttccttgtttttcctcctactggtctccaccaaggctttgttagcccccaccctgcctggtgtgcagctaacccctccctccccacagccagaggaggccacagacccctcaggggagttccgcgctggtgtctgggctgtgctccctcactaaagggaaggaaaggaagctgggcgtcctccgggccccccaacacacgtcccatttagccctgcacagcggtctccttcccctaagccagcactgctgctccctggagcccgggaaggaggctgcctggctggaggcccgagccgatggcgcctgtgctgaggatttgtgctgtgatttgggcaaatcattccaggtctttgggcctccaccccctcgtctctagtggacatttgagatcagagagcaccacagggctggctttgtgccctaacccctgggatgcagcctgcctttccataaagtcacctaggtgaggataggcgcgggagcctcggcatgacaccatggagatcggggccctcttcccagtgggttcactccttttcacacctgctgggtccctcctcacccagcaggcctggtccacctctcattgcaagccccaagcactgagccagcaggtgccagggagccacccgccccccatcgcttctgcacacctcagactcaccccatcaccttggcagcaaagcactggctctgccgtctgacccctgatccaggcagccccctccgcagagaaaagggttggggagaagcctctgcagtcctggaagatgtggggtgctgggtgagaggcatcagcccccacaagtatgtttttgtgtcttaagatagcagtttactttgaaaaagtgaaaaaggcttccgggctgtcctctgcccagtgagatggaggacgctagagaaagtgctgagtgtcccgagagaggcccccgagccagtgcatggaggtccttcggcctggctcagctgggctgcaggatgcccactttgaggagggaggcacagggcttgggcgaggggcagaggccatcagaactgcccggcttttttggaaactgaggacccaacaactaaccacgtttacacgacttgagttttgaaccccgattaatgtctgtacgtcacctttcctagttctgaccctgagccctggggaacaggaaagcgtggctggcctcttgcactgctttgtctccaaaataaactactgaaatcaaaccgca

SEQ ID NO: 344359 - DNA, 3235 bp, Homo sapiens
agcggggcggccgggccagcgcggggcgcccgcgggcaggggcggcgagtgcgcgggcgctcgccgccgcccttctcggcgggcagcgcgcgaggaccaggccgaggaggaagtggcggcggcggcggcgggactgcgcgccccagctccgatccccgttccgcgtccccgccgccgggaggaggtgcccactcgctcgcggcgcgcgccggccgccagactcggcctgtgggcgatttcctccggacccaggctccccgcccgaggaggaagatgcagacctttctgaaagggaagagagttggctactggctgagcgagaagaaaatcaagaagctgaatttccaggccttcgccgagctgtgcaggaagcgagggatggaggttgtgcagctgaaccttagccggccgatcgaggagcagggccccctggacgtcatcatccacaagctgactgacgtcatccttgaagccgaccagaatgatagccagtccctggagctggtgcacaggttccaggagtacatcgatgcccaccctgagaccatcgtcctggacccgctccctgccatcagaaccctgcttgaccgctccaagtcctatgagctcatccggaagattgaggcctacatggaaggcctcccttctgccctagacgacaggatctgctcgccacccttcatggagctcacgagcctgtgcggggatgacaccatgcggctgctggagaagaacggcttgactttcccattcatttgcaaaaccagagtggctcatggcaccaactctcacgagatggctatcgtgttcaaccaggagggcctgaacgccatccagccaccctgcgtggtccagaatttcatcaaccacaacgccgtcctgtacaaggtgttcgtggttggcgagtcctacaccgtggtccagaggccctcactcaagaacttctccgcaggcacatcagaccgtgagtccatcttcttcaacagccacaacgtgtcaaagccggagtcgtcatcggtcctgacggagctggacaagatcgagggcgtgttcgagcggccgagcgacgaggtcatccgggagctctcccgggccctgcggcaggcactgggcgtgtcactcttcggcatcgacatcatcatcaacaaccagacagggcagcacgccgtcattgacatcaatgccttcccaggctacgagggcgtgagcgagttcttcacagacctcctgaaccacatcgccactgtcctgcagggccagagcacagccatggcagccacaggggacgtggccctgctgaggcacagcaagcttctggccgagccggcgggcggcctggtgggcgagcggacatgcagcgccagccccggctgctgcggcagcatgatgggccaggacgcgccctggaaggctgaggccgacgcgggcggcaccgccaagctgccgcaccagagactcggctgcaacgccggcgtgtcgcccagcttccagcagcattgtgtggcctccctggccaccaaggcctcctcccagtagccacggagccgggacccagaggggcagcgcagggcgcagagcacacccgctgggccagcagctcccaacggcgatgctactactaagaatccccagtgatctgattcttctgttttttaatttttaacctgattttctgatgtcatgatctaaatgaggggtagtgggggatggaagagagtaccaggtggtccaccgttggggagtggggccgtccgcctgctctctactgtgcagacctcctaactgagtttacacacgcttgtgtttgcaacactaggtctggatgggaggtgaggggtgtgcgtatggctgccatgccagtgtctgtgcacatccctgtctgttggtctccatggccactgtggaccgggacccttgggggaagcctgcccatgtcgggctgtgggaggctgatcggtgcgtgtgagagtggcttcccttctgcctgactccccactccctgacctgccccttccttgtttttcctcctactggtctccaccaaggctttgttagcccccaccctgcctggtgtgcagctaacccctccctccccacagccagaggaggccacagacccctcaggggagttccgcgctggtgtctgggctgtgctccctcactaaagggaaggaaaggaagctgggcgtcctccgggccccccaacacacgtcccatttagccctgcacagcggtctccttcccctaagccagcactgctgctccctggagcccgggaaggaggctgcctggctggaggcccgagccgatggcgcctgtgctgaggatttgtgctgtgatttgggcaaatcattccaggtctttgggcctccaccccctcgtctctagtggacatttgagatcagagagcaccacagggctggctttgtgccctaacccctgggatgcagcctgcctttccataaagtcacctaggtgaggataggcgcgggagcctcggcatgacaccatggagatcggggccctcttcccagtgggttcactccttttcacacctgctgggtccctcctcacccagcaggcctggtccacctctcattgcaagccccaagcactgagccagcaggtgccagggagccacccgccccccatcgcttctgcacacctcagactcaccccatcaccttggcagcaaagcactggctctgccgtctgacccctgatccaggcagccccctccgcagagaaaagggttggggagaagcctctgcagtcctggaagatgtggggtgctgggtgagaggcatcagcccccacaagtatgtttttgtgtcttaagatagcagtttactttgaaaaagtgaaaaaggcttccgggctgtcctctgcccagtgagatggaggacgctagagaaagtgctgagtgtcccgagagaggcccccgagccagtgcatggaggtccttcggcctggctcagctgggctgcaggatgcccactttgaggagggaggcacagggcttgggcgaggggcagaggccatcagaactgcccggcttttttggaaactgaggacccaacaactaaccacgtttacacgacttgagttttgaaccccgattaatgtctgtacgtcacctttcctagttctgaccctgagccctggggaacaggaaagcgtggctggcctcttgcactgctttgtctccaaaataaactactgaaatcaaaccgca

SEQ ID NO: 344360 - DNA, 2742 bp, Homo sapiens
actgaggtttggggcttccaccccttgacagcagagctgaaccttagccggccgatcgaggagcagggccccctggacgtcatcatccacaagctgactgacgtcatccttgaagccgaccagaatgatagccagtccctggagctggtgcacaggttccagacgacaggatctgctcgccacccttcatggagctcacgagcctgtgcggggatgacaccatgcggctgctggagaagaacggcttgactttcccattcatttgcaaaaccagagtggctcatggcaccaactctcacgagatggctatcgtgttcaaccaggagggcctgaacgccatccagccaccctgcgtggtccagaatttcatcaaccacaacgccgtcctgtacaaggtgttcgtggttggcgagtcctacaccgtggtccagaggccctcactcaagaacttctccgcaggcacatcagaccgtgagtccatcttcttcaacagccacaacgtgtcaaagccggagtcgtcatcggtcctgacggagctggacaagatcgagggcgtgttcgagcggccgagcgacgaggtcatccgggagctctcccgggccctgcggcaggcactgggcgtgtcactcttcggcatcgacatcatcatcaacaaccagacagggcagcacgccgtcattgacatcaatgccttcccaggctacgagggcgtgagcgagttcttcacagacctcctgaaccacatcgccactgtcctgcagggccagagcacagccatggcagccacaggggacgtggccctgctgaggcacagcaagcttctggccgagccggcgggcggcctggtgggcgagcggacatgcagcgccagccccggctgctgcggcagcatgatgggccaggacgcgccctggaaggctgaggccgacgcgggcggcaccgccaagctgccgcaccagagactcggctgcaacgccggcgtgtcgcccagcttccagcagcattgtgtggcctccctggccaccaaggcctcctcccagtagccacggagccgggacccagaggggcagcgcagggcgcagagcacacccgctgggccagcagctcccaacggcgatgctactactaagaatccccagtgatctgattcttctgttttttaatttttaacctgattttctgatgtcatgatctaaatgaggggtagtgggggatggaagagagtaccaggtggtccaccgttggggagtggggccgtccgcctgctctctactgtgcagacctcctaactgagtttacacacgcttgtgtttgcaacactaggtctggatgggaggtgaggggtgtgcgtatggctgccatgccagtgtctgtgcacatccctgtctgttggtctccatggccactgtggaccgggacccttgggggaagcctgcccatgtcgggctgtgggaggctgatcggtgcgtgtgagagtggcttcccttctgcctgactccccactccctgacctgccccttccttgtttttcctcctactggtctccaccaaggctttgttagcccccaccctgcctggtgtgcagctaacccctccctccccacagccagaggaggccacagacccctcaggggagttccgcgctggtgtctgggctgtgctccctcactaaagggaaggaaaggaagctgggcgtcctccgggccccccaacacacgtcccatttagccctgcacagcggtctccttcccctaagccagcactgctgctccctggagcccgggaaggaggctgcctggctggaggcccgagccgatggcgcctgtgctgaggatttgtgctgtgatttgggcaaatcattccaggtctttgggcctccaccccctcgtctctagtggacatttgagatcagagagcaccacagggctggctttgtgccctaacccctgggatgcagcctgcctttccataaagtcacctaggtgaggataggcgcgggagcctcggcatgacaccatggagatcggggccctcttcccagtgggttcactccttttcacacctgctgggtccctcctcacccagcaggcctggtccacctctcattgcaagccccaagcactgagccagcaggtgccagggagccacccgccccccatcgcttctgcacacctcagactcaccccatcaccttggcagcaaagcactggctctgccgtctgacccctgatccaggcagccccctccgcagagaaaagggttggggagaagcctctgcagtcctggaagatgtggggtgctgggtgagaggcatcagcccccacaagtatgtttttgtgtcttaagatagcagtttactttgaaaaagtgaaaaaggcttccgggctgtcctctgcccagtgagatggaggacgctagagaaagtgctgagtgtcccgagagaggcccccgagccagtgcatggaggtccttcggcctggctcagctgggctgcaggatgcccactttgaggagggaggcacagggcttgggcgaggggcagaggccatcagaactgcccggcttttttggaaactgaggacccaacaactaaccacgtttacacgacttgagttttgaaccccgattaatgtctgtacgtcacctttcctagttctgaccctgagccctggggaacaggaaagcgtggctggcctcttgcactgctttgtctccaaaataaactactgaaatcaaaccgca

SEQ ID NO: 344361 - DNA, 2557 bp, Homo sapiens
agcggggcggccgggccagcgcggggcgcccgcgggcaggggcggcgagtgcgcgggcgctcgccgccgcccttctcggcgggcagcgcgcgaggaccaggccgaggaggaagtggcggcggcggcggcgggactgcgcgccccagctccgatccccgttccgcgtccccgccgccgggaggaggtgcccactcgctcgcggcgcgcgccggccgccagactcggcctgtgggcgatttcctccggacccaggctccccgcccgaggaggaagatgcagacctttctgaaagggaagagagttggctactggctgagcgagaagaaaatcaagaagctgaatttccaggccttcgccgagctgtgcaggaagcgagggatggaggttgtgcagctgaaccttagccggccgatcgaggagcagggccccctggacgtcatcatccacaagctgactgacgtcatccttgaagccgaccagaatgatagccagtccctggagctggtgcacaggttccaggagtacatcgatgcccaccctgagaccatcgtcctggacccgctccctgccatcagaaccctgcttgaccgctccaagtcctatgagctcatccggaagattgaggcctacatggaagacgacaggatctgctcgccacccttcatggagctcacgagcctgtgcggggatgacaccatgcggctgctggagaagaacggcttgactttcccattcatttgcaaaaccagagtggctcatggcaccaactctcacgagatggctatcgtgttcaaccaggagggcctgaacgccatccagccaccctgcgtggtccagaatttcatcaaccacaacgccgtcctgtacaaggtgttcgtggttggcgagtcctacaccgtggtccagaggccctcactcaagaacttctccgcaggcacatcagaccgtgagtccatcttcttcaacagccacaacgtgtcaaagccggagtcgtcatcggtcctgacggagctggacaagatcgagggcgtgttcgagcggccgagcgacgaggtcatccgggagctctcccgggccctgcggcaggcactgggcgtgtcactcttcggcatcgacatcatcatcaacaaccagacagggcagcacgccgtcattgacatcaatgccttcccaggctacgagggcgtgagcgagttcttcacagacctcctgaaccacatcgccactgtcctgcagggccagagcacagccatggcagccacaggggacgtggccctgctgaggcacagcaagcttctggccgagccggcgggcggcctggtgggcgagcggacatgcagcgccagccccggctgctgcggcagcatgatgggccaggacgcgccctggaaggctgaggccgacgcgggcggcaccgccaagctgccgcaccagagactcggctgcaacgccggcgtgtcgcccagcttccagcagcattgtgtggcctccctggccaccaaggcctcctcccagtagccacggagccgggacccagaggggcagcgcagggcgcagagcacacccgctgggccagcagctcccaacggcgatgctactactaagaatccccagtgatctgattcttctgttttttaatttttaacctgattttctgatgtcatgatctaaatgaggggtagtgggggatggaagagagtaccaggtggtccaccgttggggagtggggccgtccgcctgctctctactgtgcagacctcctaactgagtttacacacgcttgtgtttgcaacactaggtctggatgggaggtgaggggtgtgcgtatggctgccatgccagtgtctgtgcacatccctgtctgttggtctccatggccactgtggaccgggacccttgggggaagcctgcccatgtcgggctgtgggaggctgatcggtgcgtgtgagagtggcttcccttctgcctgactccccactccctgacctgccccttccttgtttttcctcctactggtctccaccaaggctttgttagcccccaccctgcctggtgtgcagctaacccctccctccccacagccagaggaggccacagacccctcaggggagttccgcgctggtgtctgggctgtgctccctcactaaagggaaggaaaggaagctgggcgtcctccgggccccccaacacacgtcccatttagccctgcacagcggtctccttcccctaagccagcactgctgctccctggagcccgggaaggaggctgcctggctggaggcccgagccgatggcgcctgtgctgaggatttgtgctgtgatttgggcaaatcattccaggctccctggatggcgacgtctctgtaatgccatgttggcagaacttgctggaaatccgccctctggactttactggagatccatctttttgggtctcaaggaaagttgtctgtggcaggtatcttactgtaagcacaccgctgctacgttttcccaggggagtgctggcagaagctcctggctgttgggtcctcttgcatagcgtgttgctgtatcg

SEQ ID NO: 344362 - DNA, 2789 bp, Homo sapiens
agcggggcggccgggccagcgcggggcgcccgcgggcaggggcggcgagtgcgcgggcgctcgccgccgcccttctcggcgggcagcgcgcgaggaccaggccgaggaggaagtggcggcggcggcggcgggactgcgcgccccagctccgatccccgttccgcgtccccgccgccgggaggaggtgcccactcgctcgcggcgcgcgccggccgccagactcggcctgtgggcgatttcctccggacccaggctccccgcccgaggaggaagatgcagacctttctgaaagggaagagagttggctactggctgagcgagaagaaaatcaagaagctgaatttccaggccttcgccgagctgtgcaggaagcgagggatggaggttgtgcagctgaaccttagccggccgatcgaggagcagggccccctggacgtcatcatccacaagctgactgacgtcatccttgaagccgaccagaatgatagccagtccctggagctggtgcacaggttccaggagtacatcgatgcccaccctgagaccatcgtcctggacccgctccctgccatcagaaccctgcttgaccgctccaagtcctatgagctcatccggaagattgaggcctacatggaagacgacaggatctgctcgccacccttcatggagctcacgagcctgtgcggggatgacaccatgcggctgctggagaagaacggcttgactttcccattcatttgcaaaaccagagtggctcatggcaccaactctcacgagatggctatcgtgttcaaccaggagggcctgaacgccatccagccaccctgcgtggtccagaatttcatcaaccacaacgccgtcctgtacaaggtgttcgtggttggcgagtcctacaccgtggtccagaggccctcactcaagaacttctccgcaggcacatcagaccgtgagtccatcttcttcaacagccacaacgtgtcaaagccggagtcgtcatcggtcctgacggagctggacaagatcgagggcgtgttcgagcggccgagcgacgaggtcatccgggagctctcccgggccctgcggcaggcactgggcgtgtcactcttcggcatcgacatcatcatcaacaaccagacagggcagcacgccgtcattgacatcaatgccttcccaggggactgccaagtgtgctttatagaaggctggaagaccgactgaagtaggaagctgtcacatgtttgagccaactgagcaaagcagctgttgcctgccagacagccaccccaagaccaagggagccagcctgtcgtttgtccttctagcctggaagaccagttcttggctcttgggcactcacattggccactggccgcaactgctgaatggcttcactaatgtccctggggtctgtatctgccctctcttctattccctagaaactctggccgggcatggcggctcacgcctgtcatcccagcacttagggaggccgaggcaggtggatcacaaggtcaagagatcgacaccatcctggccaacatggtgaaaccccatctctactaaaaatacaaaaattagctggacatggtggtgggcgcctgtagtcccagctacttgggaggctgaggcaggagaattgcttgaactcgggaggcgtaggttgcagtgagccaagatcgcaccactgcactccagcctggcaacagagcaagactcctcaaaaaacaaacaaacaaacaaacaaactctgatcattcacccggtgggatccccggcagctccttctccttcccgagctgtggctcatgggccattggattcagagaccttgagctgggtgctggctgccctaaaggagcacgacccctccagcctggtgaccgggaggcagagaagtgcagctgtccttgacaaaggcccagcctctgctgcctcaggccagcctggccacaccccgatgccacagtcatctgccccgcccaggcataagcctgactcaggtgatacaggcgaggcttctcccatgggtcctccccttgtgagaaagggtctgtgctgtgtaccttctctctgcacagccattgtcagtgtggtttggagtgagtgagcctcccgcactgctcaggggagagctggtgagcatgactccatggcctcctgctggttggggtcttcttctgattctcacccgcaggagcacccagacccccccttttcagaaatgattacattttcccttcaagagtcatctgtgacctggtggtgtggagggactgtcccctcctacagcctggccgacccccttcctccagggctgtgtggaatcacctctcagaagctcactctgaaaagccactcacagggatttcaccaggatgttgctgttcctgccgacacctgggctttgtgacaaatgctgtttgcttcaagctgttcacaagcaacttcaccagaatcccaagctggttcgtacttaatttgtatacatacatatgcataatatacatgaccatgtatgagatacagacaccatggcttctgtccattggctcattcgcctggtcgcatgttcactccatgaggttaggacactgcgggtggctttgggatgggtggtttcagggacaaggtgtcgctgtgatctctgtatttgctaactagtcttgttttgatttctaacggtctagtggagtacagttaatgttgtgtttatttctgtaactgtaggggtggagtataaacctaacttttggaaacatgaagaaataaacaatagcgccagccgttag

SEQ ID NO: 344363 - DNA, 3574 bp, Homo sapiens
agcggggcggccgggccagcgcggggcgcccgcgggcaggggcggcgagtgcgcgggcgctcgccgccgcccttctcggcgggcagcgcgcgaggaccaggccgaggaggaagtggcggcggcggcggcgggctccccgcccgaggaggaagatgcagacctttctgaaagggaagagagttggctactggctgagcgagaagaaaatcaagaagctgaatttccaggccttcgccgagctgtgcaggaagcgagggatggaggttgtgcagctgaaccttagccggccgatcgaggagcagggccccctggacgtcatcatccacaagctgactgacgtcatccttgaagccgaccagaatgatagccagtccctggagctggtgcacaggttccaggagtacatcgatgcccaccctgagaccatcgtcctggacccgctccctgccatcagaaccctgcttgaccgctccaagtcctatgagctcatccggaagattgaggcctacatggaagacgacaggatctgctcgccacccttcatggagctcacgagcctgtgcggggatgacaccatgcggctgctggagaagaacggcttgactttcccattcatttgcaaaaccagagtggctcatggcaccaactctcacgagatggctatcgtgttcaaccaggagggcctgaacgccatccagccaccctgcgtggtccagaatttcatcaaccacaacgccgtcctgtacaaggtgttcgtggttggcgagtcctacaccgtggtccagaggccctcactcaagaacttctccgcaggcacatcagaccgtgagtccatcttcttcaacagccacaacgtgtcaaagccggagtcgtcatcggtcctgacggagctggacaagatcgagggcgtgttcgagcggccgagcgacgaggtcatccgggagctctcccgggccctgcggcaggcactgggcgtgtcactcttcggcatcgacatcatcatcaacaaccagacagggcagcacgccgtcattgacatcaatgccttcccaggctacgagggcgtgagcgagttcttcacagacctcctgaaccacatcgccactgtcctgcagggccagagcacagccatggcagccacaggggacgtggccctgctgaggcacagcaagcttctggccgagccggcgggcggcctggtgggcgagcggacatgcagcgccagccccggctgctgcggcagcatgatgggccaggacgcgccctggaaggctgaggccgacgcgggcggcaccgccaagctgccgcaccagagactcggctgcaacgccggcgtgtcgcccagcttccagcagcattgtgtggcctccctggccaccaaggcctcctcccagtagccacggagccgggacccagaggggcagcgcagggcgcagagcacacccgctgggccagcagctcccaacggcgatgctactactaagaatccccagtgatctgattcttctgttttttaatttttaacctgattttctgatgtcatgatctaaatgaggggtagtgggggatggaagagagtaccaggtggtccaccgttggggagtggggccgtccgcctgctctctactgtgcagacctcctaactgagtttacacacgcttgtgtttgcaacactaggtctggatgggaggtgaggggtgtgcgtatggctgccatgccagtgtctgtgcacatccctgtctgttggtctccatggccactgtggaccgggacccttgggggaagcctgcccatgtcgggctgtgggaggctgatcggtgcgtgtgagagtggcttcccttctgcctgactccccactccctgacctgccccttccttgtttttcctcctactggtctccaccaaggctttgttagcccccaccctgcctggtgtgcagctaacccctccctccccacagccagaggaggccacagacccctcaggggagttccgcgctggtgtctgggctgtgctccctcactaaagggaaggaaaggaagctgggcgtcctccgggccccccaacacacgtcccatttagccctgcacagcggtctccttcccctaagccagcactgctgctccctggagcccgggaaggaggctgcctggctggaggcccgagccgatggcgcctgtgctgaggatttgtgctgtgatttgggcaaatcattccaggtctttgggcctccaccccctcgtctctagtggacatttgagatcagagagcaccacagggctggctttgtgccctaacccctgggatgcagcctgcctttccataaagtcacctaggtgaggataggcgcgggagcctcggcatgacaccatggagatcggggccctcttcccagtgggttcactccttttcacacctgctgggtccctcctcacccagcaggcctggtccacctctcattgcaagccccaagcactgagccagcaggtgccagggagccacccgccccccatcgcttctgcacacctcagactcaccccatcaccttggcagcaaagcactggctctgccgtctgacccctgatccaggcagccccctccgcagagaaaagggttggggagaagcctctgcagtcctggaagatgtggggtgctgggtgagaggcatcagcccccacaagtatgtttttgtgtcttaagatagcagtttactttgaaaaagtgaaaaaggcttccgggctgtcctctgcccagtgagatggaggacgctagagaaagtgctgagtgtcccgagagaggcccccgagccagtgcatggaggtccttcggcctggctcagctgggctgcaggatgcccactttgaggagggaggcacagggcttgggcgaggggcagaggccatcagaactgcccggcttttttggaaactgaggacccaacaactaaccacgtttacacgacttgagttttgaaccccgattaatgtctgtacgtcacctttcctagttctgaccctgagccctggggaacaggaaagcgtggctggcctcttgcactgctttgtctccaaaataaactactgaaatcaaaccgcatttcacacgtgtttacacatgttgctcaagtttgttatgtcatactcccagtccttaaaagacgtttaataaaacagctttaccttttaaaaataaaatttcaatcccagtctgcctcaggtacgggtgggggtgtgcagcgtgactcctggctgtgttcctgtaccgtttgtggcctccggggtcttgcgcgtccagggcccagataccgagtaactgccatgtggtgtcgtggtggcgtccataggcctccgtggtggggcgggggcggggctgtgggtgtgcagggcagctgcattttccaagagtggagatggaggatggagatttgcttcgtaaaggcctgggagctacatgggaggtagggaggggccagccacacccagggctggggggccggtggactctgcccagtgaagccaggggagtgtcagcaatgaggggcctggacagcgacgcgggacccgcacctgggagc

SEQ ID NO: 344364 - DNA, 3674 bp, Homo sapiens
agcggggcggccgggccagcgcggggcgcccgcgggcaggggcggcgagtgcgcgggcgctcgccgccgcccttctcggcgggcagcgcgcgaggaccaggccgaggaggaagtggcggcggcggcggcgggactgcgcgccccagctccgatccccgttccgcgtccccgccgccgggaggaggtgcccactcgctcgcggcgcgcgccggccgccagactcggcctgtgggcgatttcctccggacccaggctccccgcccgaggaggaagatgcagacctttctgaaagggaagagagttggctactggctgagcgagaagaaaatcaagaagctgaatttccaggccttcgccgagctgtgcaggaagcgagggatggaggttgtgcagctgaaccttagccggccgatcgaggagcagggccccctggacgtcatcatccacaagctgactgacgtcatccttgaagccgaccagaatgatagccagtccctggagctggtgcacaggttccaggagtacatcgatgcccaccctgagaccatcgtcctggacccgctccctgccatcagaaccctgcttgaccgctccaagtcctatgagctcatccggaagattgaggcctacatggaagacgacaggatctgctcgccacccttcatggagctcacgagcctgtgcggggatgacaccatgcggctgctggagaagaacggcttgactttcccattcatttgcaaaaccagagtggctcatggcaccaactctcacgagatggctatcgtgttcaaccaggagggcctgaacgccatccagccaccctgcgtggtccagaatttcatcaaccacaacgccgtcctgtacaaggtgttcgtggttggcgagtcctacaccgtggtccagaggccctcactcaagaacttctccgcaggcacatcagaccgtgagtccatcttcttcaacagccacaacgtgtcaaagccggagtcgtcatcggtcctgacggagctggacaagatcgagggcgtgttcgagcggccgagcgacgaggtcatccgggagctctcccgggccctgcggcaggcactgggcgtgtcactcttcggcatcgacatcatcatcaacaaccagacagggcagcacgccgtcattgacatcaatgccttcccaggctacgagggcgtgagcgagttcttcacagacctcctgaaccacatcgccactgtcctgcagggccagagcacagccatggcagccacaggggacgtggccctgctgaggcacagcaagcttctggccgagccggcgggcggcctggtgggcgagcggacatgcagcgccagccccggctgctgcggcagcatgatgggccaggacgcgccctggaaggctgaggccgacgcgggcggcaccgccaagctgccgcaccagagactcggctgcaacgccggcgtgtcgcccagcttccagcagcattgtgtggcctccctggccaccaaggcctcctcccagtagccacggagccgggacccagaggggcagcgcagggcgcagagcacacccgctgggccagcagctcccaacggcgatgctactactaagaatccccagtgatctgattcttctgttttttaatttttaacctgattttctgatgtcatgatctaaatgaggggtagtgggggatggaagagagtaccaggtggtccaccgttggggagtggggccgtccgcctgctctctactgtgcagacctcctaactgagtttacacacgcttgtgtttgcaacactaggtctggatgggaggtgaggggtgtgcgtatggctgccatgccagtgtctgtgcacatccctgtctgttggtctccatggccactgtggaccgggacccttgggggaagcctgcccatgtcgggctgtgggaggctgatcggtgcgtgtgagagtggcttcccttctgcctgactccccactccctgacctgccccttccttgtttttcctcctactggtctccaccaaggctttgttagcccccaccctgcctggtgtgcagctaacccctccctccccacagccagaggaggccacagacccctcaggggagttccgcgctggtgtctgggctgtgctccctcactaaagggaaggaaaggaagctgggcgtcctccgggccccccaacacacgtcccatttagccctgcacagcggtctccttcccctaagccagcactgctgctccctggagcccgggaaggaggctgcctggctggaggcccgagccgatggcgcctgtgctgaggatttgtgctgtgatttgggcaaatcattccaggtctttgggcctccaccccctcgtctctagtggacatttgagatcagagagcaccacagggctggctttgtgccctaacccctgggatgcagcctgcctttccataaagtcacctaggtgaggataggcgcgggagcctcggcatgacaccatggagatcggggccctcttcccagtgggttcactccttttcacacctgctgggtccctcctcacccagcaggcctggtccacctctcattgcaagccccaagcactgagccagcaggtgccagggagccacccgccccccatcgcttctgcacacctcagactcaccccatcaccttggcagcaaagcactggctctgccgtctgacccctgatccaggcagccccctccgcagagaaaagggttggggagaagcctctgcagtcctggaagatgtggggtgctgggtgagaggcatcagcccccacaagtatgtttttgtgtcttaagatagcagtttactttgaaaaagtgaaaaaggcttccgggctgtcctctgcccagtgagatggaggacgctagagaaagtgctgagtgtcccgagagaggcccccgagccagtgcatggaggtccttcggcctggctcagctgggctgcaggatgcccactttgaggagggaggcacagggcttgggcgaggggcagaggccatcagaactgcccggcttttttggaaactgaggacccaacaactaaccacgtttacacgacttgagttttgaaccccgattaatgtctgtacgtcacctttcctagttctgaccctgagccctggggaacaggaaagcgtggctggcctcttgcactgctttgtctccaaaataaactactgaaatcaaaccgcaaaaaaaaaaaaaaaaaaaaaaaaaaaaaaaaaaaaaaaaaaaaaagaaaaaaaaaaaaaaaaaaaaaaaaaaaaccactgggtggggcgcgcagccacccgcccccatcaaaaaaatatttaagaacaacccacgtgggggggggcgcgaggccccacagtggtgatgatcagacagcaggggtacaacagggtgtccactaagaaacacccctgggggacgacacgacgcgggggggcggatccacccaacaaaaaaaaaaaacacgcgcgcggcgaggaaaccacaaggggtttttttacaacaacacaacacagaggggggaggctcacttggggaggccacgaaggcggcgagctaccaacacagggggggtcatcaagagagcgcactaataaaagttaccccaggggtgtgagtaaaacaaaaaaagagactagggacatacgaaacagcg

SEQ ID NO: 344365 - DNA, 3089 bp, Homo sapiens
agcggggcggccgggccagcgcggggcgcccgcgggcaggggcggcgagtgcgcgggcgctcgccgccgcccttctcggcgggcagcgcgcgaggaccaggccgaggaggaagtggcggcggcggcggcgggactgcgcgccccagctccgatccccgttccgcgtccccgccgccgggaggaggtgcccactcgctcgcggcgcgcgccggccgccagactcggcctgtgggcgatttcctccggacccaggctccccgcccgaggaggaagatgcagacctttctgaaagggaagagagttggctactggctgagcgagaagaaaatcaagaagctgaatttccaggccttcgccgagctgtgcaggaagcgagggatggaggttgtgcgagtacatcgatgcccaccctgagaccatcgtcctggacccgctccctgccatcagaaccctgcttgaccgctccaagtcctatgagctcatccggaagattgaggcctacatggaagacgacaggatctgctcgccacccttcatggagctcacgagcctgtgcggggatgacaccatgcggctgctggagaagaacggcttgactttcccattcatttgcaaaaccagagtggctcatggcaccaactctcacgagatggctatcgtgttcaaccaggagggcctgaacgccatccagccaccctgcgtggtccagaatttcatcaaccacaacgccgtcctgtacaaggtgttcgtggttggcgagtcctacaccgtggtccagaggccctcactcaagaacttctccgcaggcacatcagaccgtgagtccatcttcttcaacagccacaacgtgtcaaagccggagtcgtcatcggtcctgacggagctggacaagatcgagggcgtgttcgagcggccgagcgacgaggtcatccgggagctctcccgggccctgcggcaggcactgggcgtgtcactcttcggcatcgacatcatcatcaacaaccagacagggcagcacgccgtcattgacatcaatgccttcccaggctacgagggcgtgagcgagttcttcacagacctcctgaaccacatcgccactgtcctgcagggccagagcacagccatggcagccacaggggacgtggccctgctgaggcacagcaagcttctggccgagccggcgggcggcctggtgggcgagcggacatgcagcgccagccccggctgctgcggcagcatgatgggccaggacgcgccctggaaggctgaggccgacgcgggcggcaccgccaagctgccgcaccagagactcggctgcaacgccggcgtgtcgcccagcttccagcagcattgtgtggcctccctggccaccaaggcctcctcccagtagccacggagccgggacccagaggggcagcgcagggcgcagagcacacccgctgggccagcagctcccaacggcgatgctactactaagaatccccagtgatctgattcttctgttttttaatttttaacctgattttctgatgtcatgatctaaatgaggggtagtgggggatggaagagagtaccaggtggtccaccgttggggagtggggccgtccgcctgctctctactgtgcagacctcctaactgagtttacacacgcttgtgtttgcaacactaggtctggatgggaggtgaggggtgtgcgtatggctgccatgccagtgtctgtgcacatccctgtctgttggtctccatggccactgtggaccgggacccttgggggaagcctgcccatgtcgggctgtgggaggctgatcggtgcgtgtgagagtggcttcccttctgcctgactccccactccctgacctgccccttccttgtttttcctcctactggtctccaccaaggctttgttagcccccaccctgcctggtgtgcagctaacccctccctccccacagccagaggaggccacagacccctcaggggagttccgcgctggtgtctgggctgtgctccctcactaaagggaaggaaaggaagctgggcgtcctccgggccccccaacacacgtcccatttagccctgcacagcggtctccttcccctaagccagcactgctgctccctggagcccgggaaggaggctgcctggctggaggcccgagccgatggcgcctgtgctgaggatttgtgctgtgatttgggcaaatcattccaggtctttgggcctccaccccctcgtctctagtggacatttgagatcagagagcaccacagggctggctttgtgccctaacccctgggatgcagcctgcctttccataaagtcacctaggtgaggataggcgcgggagcctcggcatgacaccatggagatcggggccctcttcccagtgggttcactccttttcacacctgctgggtccctcctcacccagcaggcctggtccacctctcattgcaagccccaagcactgagccagcaggtgccagggagccacccgccccccatcgcttctgcacacctcagactcaccccatcaccttggcagcaaagcactggctctgccgtctgacccctgatccaggcagccccctccgcagagaaaagggttggggagaagcctctgcagtcctggaagatgtggggtgctgggtgagaggcatcagcccccacaagtatgtttttgtgtcttaagatagcagtttactttgaaaaagtgaaaaaggcttccgggctgtcctctgcccagtgagatggaggacgctagagaaagtgctgagtgtcccgagagaggcccccgagccagtgcatggaggtccttcggcctggctcagctgggctgcaggatgcccactttgaggagggaggcacagggcttgggcgaggggcagaggccatcagaactgcccggcttttttggaaactgaggacccaacaactaaccacgtttacacgacttgagttttgaaccccgattaatgtctgtacgtcacctttcctagttctgaccctgagccctggggaacaggaaagcgtggctggcctcttgcactgctttgtctccaaaataaactactgaaatcaaaccgca

SEQ ID NO: 344366 - DNA, 3084 bp, Homo sapiens
agcggggcggccgggccagcgcggggcgcccgcgggcaggggcggcgagtgcgcgggcgctcgccgccgcccttctcggcgggcagcgcgcgaggaccaggccgaggaggaagtggcggcggcggcggcgggactgcgcgccccagctccgatccccgttccgcgtccccgccgccgggaggaggtgcccactcgctcgcggcgcgcgccggccgccagactcggcctgtgggcgatttcctccggacccaggctccccgcccgaggaggaagatgcagacctttctgaaagggaagagagttggctactggctgagcgagaagaaaatcaagaagctgaatttccaggccttcgccgagctgtgcaggaagcgagggatggaggttgtgcagctgaaccttagccggccgatcgaggagcagggccccctggacgtcatcatccacaagctgactgacgtcatccttgaagccgaccagaatgatagccagtccctggagctggtgcacaggttccaggagtacatcgatgcccaccctgagaccatcgtcctggacccgctccctgccatcagaaccctgcttgaccgctccaagtcctatgagctcatccggaagattgaggcctacatggaagacgacaggatctgctcgccacccttcatggagctcacgagcctgtgcggggatgacaccatgcggctgctggagaagaacggcttgactttcccattcatttgcaaaaccagagtggctcatggcaccaactctcacgagatggctatcgtgttcaaccaggagggcctgaacgccatccagccaccctgcgtggtccagaatttcatcaaccacaacgccgtcctgtacaaggtgttcgtggttggcgagtcctacaccgtggtccagaggccctcactcaagaacttctccgcaggcacatcagaccgtgagtccatcttcttcaacagccacaacgtgtcaaagccggagtcgtcatcggtcctgacggagctggacaagatcgagggcgtgttcgagcggccgagcgacgaggtcatccgggagctctcccgggccctgcggcaggcactgggcgtgtcactcttcggcatcgacatcatcatcaacaaccagacagggcagcacgccgtcattgacatcaatgccttcccaggctacgagggcgtgagcgagttcttcacagacctcctgaaccacatcgccactgtcctgcagggccagagcacagccatggcagccacaggggacgtggccctgctgaggcacagcaagcttctggccgagccggcgggcggcctggtgggcgagcggacatgcagcgccagccccggctgctgcggcagcatgatgggccaggacgcgccctggaaggctgaggccgacgcgggcggcaccgccaagctgccgcaccagagactcggctgcaacgccggcgtgtcgcccagcttccagcagcattgtgtggcctccctggccaccaaggcctcctcccagtagccacggagccgggacccagaggggcagcgcagggcgcagagcacacccgctgggccagcagctcccaacggcgatgctactactaagaatccccagtgatctgattcttctgttttttaatttttaacctgattttctgatgtcatgatctaaatgaggggtagtgggggatggaagagagtaccaggtggtccaccgttggggagtggggccgtccgcctgctctctactgtgcagacctcctaactgagtttacacacgcttgtgtttgcaacactaggtctggatgggaggtgaggggtgtgcgtatggctgccatgccagtgtctgtgcacatccctgtctgttggtctccatggccactgtggaccgggacccttgggggaagcctgcccatgtcgggctgtgggaggctgatcggtgcgtgtgagagtggcttcccttctgcctgactccccactccctgacctgccccttccttgtttttcctcctactggtctccaccaaggctttgttagcccccaccctgcctggtgtgcagctaacccctccctccccacagccagaggaggccacagacccctcaggggagttccgcgctggtgtctgggctgtgctccctcactaaagggaaggaaaggaagctgggcgtcctccgggccccccaacacacgtcccatttagccctgtctttgggcctccaccccctcgtctctagtggacatttgagatcagagagcaccacagggctggctttgtgccctaacccctgggatgcagcctgcctttccataaagtcacctaggtgaggataggcgcgggagcctcggcatgacaccatggagatcggggccctcttcccagtgggttcactccttttcacacctgctgggtccctcctcacccagcaggcctggtccacctctcattgcaagccccaagcactgagccagcaggtgccagggagccacccgccccccatcgcttctgcacacctcagactcaccccatcaccttggcagcaaagcactggctctgccgtctgacccctgatccaggcagccccctccgcagagaaaagggttggggagaagcctctgcagtcctggaagatgtggggtgctgggtgagaggcatcagcccccacaagtatgtttttgtgtcttaagatagcagtttactttgaaaaagtgaaaaaggcttccgggctgtcctctgcccagtgagatggaggacgctagagaaagtgctgagtgtcccgagagaggcccccgagccagtgcatggaggtccttcggcctggctcagctgggctgcaggatgcccactttgaggagggaggcacagggcttgggcgaggggcagaggccatcagaactgcccggcttttttggaaactgaggacccaacaactaaccacgtttacacgacttgagttttgaaccccgattaatgtctgtacgtcacctttcctagttctgaccctgagccctggggaacaggaaagcgtggctggcctcttgcactgctttgtctccaaaataaactactgaaatcaaaccgca

SEQ ID NO: 344367 - DNA, 446 bp, Homo sapiens
ctcccaggttcaagcaattctcctgtctcagcctcccctgtagctgggattacaggtgtacatcaccatgcctggctaatttttgtatttttagtagagacggggtttcaccatgttggtcaggctggtcttgaactcctgacctcaggtgatccgcccatccctgcctcccaaagtgctgggatcacaggcttcagtcaccgtgcctggcctgtttagggagcaaaaaattcaatgtttttgaagccagctgcagtcggggttcctgtccgttggatctaaagggaatctattgccatgagcatcacacatcttcaagagcaaacagggcagccaggaagtgtgttcccttgctcaagcagaactcacacatcaacatcacctcctcagaaccgagggggacacagccagagtaaaattgctgagtagaaggagatgtccatttt

SEQ ID NO: 344368 - DNA, 1013 bp, Homo sapiens
gctggtcgaggcccggtgattaatcggccgaggaccgtcgtttgagtcgtcgctgccgctgccgctgccactgccactgccacctcgcggatcaggagccagcgttgttcgcccgacgcctcgctgccggtgggaggaagcgagagggaagccgcttgcgggtttgtcgccgctgctcgcccaccgcctggaagagccgagccccggcccagtcggtcgcttgccaccgctcgtagccgttacccgcgggccgccacagccgccggccgggagaggcgcgcgccatggcttctggagccgattcaaaaggtgatgacctatcaacagccattctcaaacagaagaaccgtcccaatcggttaattgttgatgaagccatcaatgaggacaacagtgtggtgtccttgtcccagcccaagatggatgaattgcagttgttccgaggtgacacagtgttgctgaaaggaaagaagagacgagaagctgtttgcatcgtcctttctgatgatacttgttctgatgagaagattcggatgaatagagttgttcggaataaccttcgtgtacgcctaggggatgtcatcagcatccagccatgccctgatgtgaagtacggcaaacgtatccatgtgctgcccattgatgacacagtggaaggcattactggtaatctcttcgaggtataccttaagccgtacttcctggaagcgtatcgacccatccggaaaacggggccttttcctggccggggggggatccgtgctgttggagtccaccgtggtggcacgatccctagcttatgcgatgtcggccagaaccagggggtccctgggaggggaccatcccacgcggtgggagccttaaaggcggtcacactggccgggacctctccaatcaggtgggcgcccgacccgcctcgggggccccccgctctcgcctccgcctggcttcaggcgctacagcctccctatcgcccagccctcctcccacgtgcgtgtagtatagttcacact

SEQ ID NO: 344369 - DNA, 1007 bp, Homo sapiens
  misc_feature (34)..(34): n is a, c, g, or t
  misc_feature (42)..(42): n is a, c, g, or t
  misc_feature (47)..(47): n is a, c, g, or t
tgacaacaaaagaaaagaaaacctcagctagtangaggctgngtttnaatcggccgaggagccagcgttgttcgcccgacgcctcgctgccggtgggaggaagcgagagggaagccgcttgcgggtttgtcgccgctgctcgcccaccgcctggaagagccgagccccggcccagtcggtcgcttgccaccgctcgtagccgttacccgcgggccgccacagccgccggccgggagaggcgcgcgccatggcttctggagccgattcaaaaggtgatgacctatcaacagccattctcaaacagaagaaccgtcccaatcggttaattgttgatgaagccatcaatgaggacaacagtgtggtgtccttgtcccagcccaagatggatgaattgcagttgttccgaggtgacacagtgttgctgaaaggaaagaagagacgagaagctgtttgcatcgtcctttctgatgatacttgttctgatgagaagattcggatgaatagagttgttcggaataaccttcgtgtacgcctaggggatgtcatcagcatccagccatgccctgatgtgaagtacggcaaacgtatccatgtgctgcccattgatgacacagtggaaggcattactggtaatctcttcgaggtataccttaagccgtacttcctggaagcgtatcgacccatccggaaaggagacatttttcttgtccgtggtgggatgcgtgctgtggagttcaaagtggtggaaacagatcctagcccttattgcattgttgctccagacacagtgatccactgcgaaggggagcctatcaaacgagaggcaaagtcttgatgaagtagggatgatgaacattgggggtgaagaaacaatagtcaaataaagggatgtgggaatggcctgtaaatctggcccttaaggatggtgaaacatccaaaagaaacggttaggggatttgagaagaaaacagttgtggcatgtgaataaatgagaatatatagaaagg

SEQ ID NO: 344370 - DNA, 5425 bp, Homo sapiens
tattaatgacgggaggaagaaaggcacaagcgctgagaaactgcaaaggctgtgggattggggttaccagagggtgcagtgacaatggggtaggagtggggtgctagtcagaaagttcagagtaggggtggttggaggcagcgttgagaaggagcaagaagtgtcagggtggtgatggcgtcttagaagatctccaggttttgggagaagatgggtgtatgggttaccacaataggactagactaatacaagggttcagtctattgtgccacgttcttccaggaggataaactccggagccaatgaactggagccaagtgggagagtccgcctctaagggattaaagggtctcctttcactaatcgatctcgccctattcctttcgttgattggctgagaattccaatccgtcgaggaagcgtagcgttgcggccaattgacgtggcgttactaggcgtgtcgcatcactgaggcgggagccaggccgcaagcgaatttcctgattggctgtgatctgcgggttgctggggagaggcgcggagaggcgggcgagagtccgcagggcaggcgctgattggctgaggtgggagcagcttcccttccgatgattcggctcttctcggctcagtctcagcgaagcgtctgcgaccgtcgtttgagtcgtcgctgccgctgccgctgccactgccactgccacctcgcggatcaggagccagcgttgttcgcccgacgcctcgctgccggtgggaggaagcgagagggaagccgcttgcgggtttgtcgccgctgctcgcccaccgcctggaagagccgagccccggcccagtcggtcgcttgccaccgctcgtagccgttacccgcgggccgccacagccgccggccgggagaggcgcgcgccatggcttctggagccgattcaaaaggtgatgacctatcaacagccattctcaaacagaagaaccgtcccaatcggttaattgttgatgaagccatcaatgaggacaacagtgtggtgtccttgtcccagcccaagatggatgaattgcagttgttccgaggtgacacagtgttgctgaaaggaaagaagagacgagaagctgtttgcatcgtcctttctgatgatacttgttctgatgagaagattcggatgaatagagttgttcggaataaccttcgtgtacgcctaggggatgtcatcagcatccagccatgccctgatgtgaagtacggcaaacgtatccatgtgctgcccattgatgacacagtggaaggcattactggtaatctcttcgaggtataccttaagccgtacttcctggaagcgtatcgacccatccggaaaggagacatttttcttgtccgtggtgggatgcgtgctgtggagttcaaagtggtggaaacagatcctagcccttattgcattgttgctccagacacagtgatccactgcgaaggggagcctatcaaacgagaggatgaggaagagtccttgaatgaagtagggtatgatgacattggtggctgcaggaagcagctagctcagataaaggagatggtggaactgcccctgagacatcctgccctctttaaggcaattggtgtgaagcctcctagaggaatcctgctttacggacctcctggaacaggaaagaccctgattgctcgagctgtagcaaatgagactggagccttcttcttcttgatcaatggtcctgagatcatgagcaaattggctggtgagtctgagagcaaccttcgtaaagcctttgaggaggctgagaagaatgctcctgccatcatcttcattgatgagctagatgccatcgctcccaaaagagagaaaactcatggcgaggtggagcggcgcattgtatcacagttgttgaccctcatggatggcctaaagcagagggcacatgtgattgttatggcagcaaccaacagacccaacagcattgacccagctctacggcgatttggtcgctttgacagggaggtagatattggaattcctgatgctacaggacgcttagagattcttcagatccataccaagaacatgaagctggcagatgatgtggacctggaacaggtagccaatgagactcacgggcatgtgggtgctgacttagcagccctgtgctcagaggctgctctgcaagccatccgcaagaagatggatctcattgacctagaggatgagaccattgatgccgaggtcatgaactctctagcagttactatggatgacttccggtgggccttgagccagagtaacccatcagcactgcgggaaaccgtggtagaggtgccacaggtaacctgggaagacatcgggggcctagaggatgtcaaacgtgagctacaggagctggtccagtatcctgtggagcacccagacaaattcctgaagtttggcatgacaccttccaagggagttctgttctatggacctcctggctgtgggaaaactttgttggccaaagccattgctaatgaatgccaggccaacttcatctccatcaagggtcctgagctgctcaccatgtggtttggggagtctgaggccaatgtcagagaaatctttgacaaggcccgccaagctgccccctgtgtgctattctttgatgagctggattcgattgccaaggctcgtggaggtaacattggagatggtggtggggctgctgaccgagtcatcaaccagatcctgacagaaatggatggcatgtccacaaaaaaaaatgtgttcatcattggcgctaccaaccggcctgacatcattgatcctgccatcctcagacctggccgtcttgatcagctcatctacatcccacttcctgatgagaagtcccgtgttgccatcctcaaggctaacctgcgcaagtccccagttgccaaggatgtggacttggagttcctggctaaaatgactaatggcttctctggagctgacctgacagagatttgccagcgtgcttgcaagctggccatccgtgaatccatcgagagtgagattaggcgagaacgagagaggcagacaaacccatcagccatggaggtagaagaggatgatccagtgcctgagatccgtcgagatcactttgaagaagccatgcgctttgcgcgccgttctgtcagtgacaatgacattcggaagtatgagatgtttgcccagacccttcagcagagtcggggctttggcagcttcagattcccttcagggaaccagggtggagctggccccagtcagggcagtggaggcggcacaggtggcagtgtatacacagaagacaatgatgatgacctgtatggctaagtggtggtggccagcgtgcagtgagctggcctgcctggaccttgttccctgggggtgggggcgcttgcccaggagagggaccaggggtgcgcccacagcctgctccattctccagtctgaacagttcagctacagtctgactctggacagggggtttctgttgcaaaaatacaaaacaaaagcgataaaataaaagcgattttcatttggtaggcggagagtgaattaccaacagggaattgggccttgggcctatgccatttctgttgtagtttggggcagtgcaggggacctgtgtggggtgtgaaccaaggcactactgccacctgccacagtaaagcatctgcacttgactcaatgctgcccgagccctcccttccccctatccaacctgggtaggtgggtaggggccacagttgctggatgtttatatagagagtaggttgatttattttacatgcttttgagttaatgttggaaaactaatcacaagcagtttctaaaccaaaaaatgacatgttgtaaaaggacaataaacgttgggtcaaaatggagcctgagtcctgggccctgtgcctgcttcttttcctgggaacagccttgggctacccaccactcccaaggcattcttccaaatgtgaaatcctggaagtaagattgcaccttcttcctctcctgatcaacatcggtatgatgtctcctgttgcctcaccctttgtctgcagtatcactggataggactggtggaaagggagcagcctgacagagctccaaatgtggagaatatggcatccctccacctatatttgatgtggacggtaaggctaggcctgcaggatcccttatcctgaccaaagactgtgttggggtgccatttgaaaatcgcagggttgcaaaagaatacaatcttacttgcaggtggatattctctatactctcttttaatgcatctaaaaatcccaaacatcccctggttggtgatcacttacagttgtgtccacctttattttatgtactttgattaaaaaaaaaaaactttttgttaatataaaaaaaaaaaaaaaaaaactcgagttttttttttttttttttgatgttgcttccaactgttttattgctaaactatcatgatacaagccgtataaaaatactttacatataggaaaaataaactacattaaactggagattaaaaacatttgcataggaatgtgatgtattcaaacgcctttaacagtcaggattttctaaacctaagcctgccagcaccaccatgttggagagacctgtttgttggagaattggttttctctcctctgagggctgtagaggccagaggggtgagtgaggttctttgacaagatgtccaggatgctaagcttgtcccaacagccatagcctcggtctgctcaggccaatcagaatgctgtgagcacctgctctaatggaaacaacatcatttgcatccattccattcaaagcttgaactcagcagggagtttattctggtcagccaacagctgcataaaggtagaatgttaataaccctttcacttccagctcccaggaccctgatggctcagggagcaactctctgttatcaaccaccagaaaagtttgtttttaaacagactgagttaaacagtgatgttggctgtaagtcaaggcactcacaaaagctgagggaaatggatgtttatgatcacaattttataggatgctgctttttcttaagcatttaattggaatgcaggaaaatacttgctatgcaattggctgctttggttccacgaaacgtaatgccctagcctcgagcctaggagacccaaggttaagatgcgctgggtcaccgagcaccttgcctccgggaaacaagttcgggaaaggttagcccagcttgtcaagaacgtcacaactccatccatgcctcttgtaaacttgaaatgaaaacattctttcaattctgagcaatagaaagcacttggaaaggtctttttttttttttttttttgacatgataaattcagcctcactgtagtccagagtgagaattagaacataccaacttccaatctgcctaaatgtgaggctgaatttatcatgtc

SEQ ID NO: 344371 - DNA, 1079 bp, Homo sapiens
tattaatgacgggaggaagaaaggcacaagcgctgagaaactgcaaaggctgtgggattggggttaccagagggtgcagtgacaatggggtaggagtggggtgctagtcagaaagttcagagtaggggtggttggaggcagcgttgagaaggagcaagaagtgtcagggtggtgatggcgtcttagaagatctccaggttttgggagaagatgggtgtatgggttaccacaataggactagactaatacaagggttcagtctattgtgccacgttcttccaggaggataaactccggagccaatgaactggagccaagtgggagagtccgcctctaagggattaaagggtctcctttcactaatcgatctcgccctattcctttcgttgattggctgagaattccaatccgtcgaggaagcgtagcgttgcggccaattgacgtggcgttactaggcgtgtcgcatcactgaggcgggagccaggccgcaagcgaatttcctgattggctgtgatctgcgggttgctggggagaggcgcggagaggcgggcgagagtccgcagggcaggcgctgattggctgaggtgggagcagcttcccttccgatgattcggctcttctcggctcagtctcagcgaagcgtctgcgaccgtcgtttgagtcgtcgctgccgctgccgctgccactgccactgccacctcgcggatcaggagccagcgttgttcgcccgacgcctcgctgccggtgggaggaagcgagagggaagccgcttgcgggtttgtcgccgctgctcgcccaccgcctggaagagccgagccccggcccagtcggtcgcttgccaccgctcgtagccgttacccgcgggccgccacagccgccggccgggagaggcgcgcgccatggcttctggagccgagtgagtgtgcgcgcgccgttcgcttgctgcggcggcgcgcaccgggaccagccgcgcagggtaggcccggcggggcctggccgtgggcgcgtcagagaggtggagaccaggaaagagggaagggaagctagggggcgagtgaggggccgtggacccggcaggc

SEQ ID NO: 344372 - DNA, 431 bp, Homo sapiens
gtgtggtagtctgaggtccctcacagcttcgggctaacctgcgcattcccagttgccaaggatgtggacttggagttcctggctaaaatgactaatggcttctctggagctgacctgacagagatttgccagcgtgcttgcaagctggccatccgtgaatccatcgagagtgagattaggcgagaacgagagaggcagacaaacccatcagccatggtgagtctgcatcctttccccagatgtgccaatcatggagagccaggcagcagccaccaccatgccctggagttgagagtagaagctgttggaaagatcatctaactgagaagaattttaatagggcatcaaagataaagaatgctgaggtgaatccattcaatttggaataaggccgagaagagatggtcaggctccattctcagtctgaacca

SEQ ID NO: 344373 - DNA, 313 bp, Homo sapiens
tacctctgctgctgcttttaggatgtggacttggagttcctggctaaaatgactaatggcttctctggagctgacctgacagagatttgccagcgtgcttgcaagctggccatccgtgaatccatcgagagtgagattaggcgagaacgagagaggcagacaaacccatcagccatggaggtagaagagagagtgtgtgattagaagctaaataggaaagttttgaacttcaagtcagtgaggaggaagaagaatttggacttgatgaagaagatgaagatgaggatgaggatgaagaggaggaagaaggtgg

SEQ ID NO: 344374 - DNA, 287 bp, Homo sapiens
agaggttaggtaacttgcccaagatcacaattaagcagtggcataattggaattcagacccaatgggtctgactatagagttcctgctcttaaccactcttctgtaagtctaagactatttttatttctctaacaactattcagcctccatttctattatgtcttcttcttaggccattattttctgaccctggggcaggatcactcacttggggccttatagctgggacactgacgctcaaaataccaggagctgctggaatgggtattgtaatatgtatggtaga

SEQ ID NO: 344375 - DNA, 626 bp, Homo sapiens
ctttggtccccggagagagcaggccccgcgagcccgaggccccagccgggcccggtgggcgtggactttgcgccatgtgaaggcctcaggagctctgccaccgaggcggagcccggggtcggggaaggcccgccgagctcagggaagctcacagccgcctttttggagccgggtcggcggggccggaggtgggcatcctctgtgtgtgacctgagtcgtgaaggactgttagggagagggcgagccctacctttcgcttctggtcttcttactttaggcctgttgttcatactagaaagtttgagccagttttccttaatgttatgactcgtgggtggggagaaaggaatttttctttaacattttaggttcttgctaaagttggaatctcagttcgtgttttgtgcgcctttccagatttccaggtttcgtggtgtgcagtttagagttgcactaactcttcaaaaacacaaacgtgcgcgcactcctttccccaaccagctatattgagaaattacccgggctctggggctttctgaccccacctccatccttaggaaagcgttagataaaacttggctacctcagcccattcaatttagaatagagagcttttagaggcaaaa

SEQ ID NO: 344376 - DNA, 3259 bp, Homo sapiens
gctggtcgaggcccggtgattaatcggccgaggaccgtcgtttgagtcgtcgctgccgctgccgctgccactgccactgccacctcgcggatcaggagccagcgttgttcgcccgacgcctcgctgccggtgggaggaagcgagagggaagccgcttgcgggtttgtcgccgctgctcgcccaccgcctggaagagccgagccccggcccagtcggtcgcttgccaccgctcgtagccgttacccgcgggccgccacagccgccggccgggagaggcgcgcgccatggcttctggagccgattcaaaaggtgatgacctatcaacagccattctcaaacagaagaaccgtcccaatcggttaattgttgatgaagccatcaatgaggacaacagtgtggtgtccttgtcccagcccaagatggatgaattgcagttgttccgaggtgacacagtgttgctgaaaggaaagaagagacgagaagctgtttgcatcgtcctttctgatgatacttgttctgatgagaagattcggatgaatagagttgttcggaataaccttcgtgtacgcctaggggatgtcatcagcatccagccatgccctgatgtgaagtacggcaaacgtatccatgtgctgcccattgatgacacagtggaaggcattactggtaatctcttcgaggtataccttaagccgtacttcctggaagcgtatcgacccatccggaaaggagacatttttcttgtccgtggtgggatgcgtgctgtggagttcaaagtggtggaaacagatcctagcccttattgcattgttgctccagacacagtgatccactgcgaaggggagcctatcaaacgagaggatgaggaagagtccttgaatgaagtagggtatgatgacattggtggctgcaggaagcagctagctcagataaaggagatggtggaactgcccctgagacatcctgccctctttaaggcaattggtgtgaagcctcctagaggaatcctgctttacggacctcctggaacaggaaagaccctgattgctcgagctgtagcaaatgagactggagccttcttcttcttgatcaatggtcctgagatcatgagcaaattggctggtgagtctgagagcaaccttcgtaaagcctttgaggaggctgagaagaatgctcctgccatcatcttcattgatgagctagatgccatcgctcccaaaagagagaaaactcatggcgaggtggagcggcgcattgtatcacagttgttgaccctcatggatggcctaaagcagagggcacatgtgattgttatggcagcaaccaacagacccaacagcattgacccagctctacggcgatttggtcgctttgacagggaggtagatattggaattcctgatgctacaggacgcttagagattcttcagatccataccaagaacatgaagctggcagatgatgtggacctggaacaggtagccaatgagactcacgggcatgtgggtgctgacttagcagccctgtgctcagaggctgctctgcaagccatccgcaagaagatggatctcattgacctagaggatgagaccattgatgccgaggtcatgaactctctagcagttactatggatgacttccggtgggccttgagccagagtaacccatcagcactgcgggaaaccgtggtagaggtgccacaggtaacctgggaagacatcgggggcctagaggatgtcaaacgtgagctacaggagctggtccagtatcctgtggagcacccagacaaattcctgaagtttggcatgacaccttccaagggagttctgttctatggacctcctggctgtgggaaaactttgttggccaaagccattgctaatgaatgccaggccaacttcatctccatcaagggtcctgagctgctcaccatgtggtttggggagtctgaggccaatgtcagagaaatctttgacaaggcccgccaagctgccccctgtgtgctattctttgatgagctggattcgattgccaaggctcgtggaggtaacattggagatggtggtggggctgctgaccgagtcatcaaccagatcctgacagaaatggatggcatgtccacaaaaaaaaatgtgttcatcattggcgctaccaaccggcctgacatcattgatcctgccatcctcagacctggccgtcttgatcagctcatctacatcccacttcctgatgagaagtcccgtgttgccatcctcaaggctaacctgcgcaagtccccagttgccaaggatgtggacttggagttcctggctaaaatgactaatggcttctctggagctgacctgacagagatttgccagcgtgcttgcaagctggccatccgtgaatccatcgagagtgagattaggcgagaacgagagaggcagacaaacccatcagccatggaggtagaagaggatgatccagtgcctgagatccgtcgagatcactttgaagaagccatgcgctttgcgcgccgttctgtcagtgacaatgacattcggaagtatgagatgtttgcccagacccttcagcagagtcggggctttggcagcttcagattcccttcagggaaccagggtggagctggccccagtcagggcagtggaggcggcacaggtggcagtgtatacacagaagacaatgatgatgacctgtatggctaagtggtggtggccagcgtgcagtgagctggcctgcctggaccttgttccctgggggtgggggcgcttgcccaggagagggaccaggggtgcgcccacagcctgctccattctccagtctgaacagttcagctacagtctgactctggacagggggtttctgttgcaaaaatacaaaacaaaagcgataaaataaaagcgattttcatttggtaggcggagagtgaattaccaacagggaattgggccttgggcctatgccatttctgttgtagtttggggcagtgcaggggacctgtgtggggtgtgaaccaaggcactactgccacctgccacagtaaagcatctgcacttgactcaatgctgcccgagccctcccttccccctatccaacctgggtaggtgggtaggggccacagttgctggatgtttatatagagagtaggttgatttattttacatgcttttgagttaatgttggaaaactaatcacaagcagtttctaaaccaaaaaatgacatgttgtaaaaggacaataaacgttgggtcaaaatgga

SEQ ID NO: 344377 - DNA, 4826 bp, Homo sapiens
ttacacaccaccacccacttacggctaggtacgaggctgggtgttgcgaaccgtcgtttgagtcgtcgctgccgctgccgctgccactgccactgccacctcgcggatcaggagccagcgttgttcgcccgacgcctcgctgccggtgggaggaagcgagagggaagccgcttgcgggtttgtcgccgctgctcgcccaccgcctggaagagccgagccccggcccagtcggtcgcttgccaccgctcgtagccgttacccgcgggccgccacagccgccggccgggagaggcgcgcgccatggcttctggagccgattcaaaaggtgatgacctatcaacagccattctcaaacagaagaaccgtcccaatcggttaattgttgatgaagccatcaatgaggacaacagtgtggtgtccttgtcccagcccaagatggatgaattgcagttgttccgaggtgacacagtgttgctgaaaggaaagaagagacgagaagctgtttgcatcgtcctttctgatgatacttgttctgatgagaagattcggatgaatagagttgttcggaataaccttcgtgtacgcctaggggatgtcatcagcatccagccatgccctgatgtgaagtacggcaaacgtatccatgtgctgcccattgatgacacagtggaaggcattactggtaatctcttcgaggtataccttaagccgtacttcctggaagcgtatcgacccatccggaaaggagacatttttcttgtccgtggtgggatgcgtgctgtggagttcaaagtggtggaaacagatcctagcccttattgcattgttgctccagacacagtgatccactgcgaaggggagcctatcaaacgagaggatgaggaagagtccttgaatgaagtagggtatgatgacattggtggctgcaggaagcagctagctcagataaaggagatggtggaactgcccctgagacatcctgccctctttaaggcaattggtgtgaagcctcctagaggaatcctgctttacggacctcctggaacaggaaagaccctgattgctcgagctgtagcaaatgagactggagccttcttcttcttgatcaatggtcctgagatcatgagcaaattggctggtgagtctgagagcaaccttcgtaaagcctttgaggaggctgagaagaatgctcctgccatcatcttcattgatgagctagatgccatcgctcccaaaagagagaaaactcatggcgaggtggagcggcgcattgtatcacagttgttgaccctcatggatggcctaaagcagagggcacatgtgattgttatggcagcaaccaacagacccaacagcattgacccagctctacggcgatttggtcgctttgacagggaggtagatattggaattcctgatgctacaggacgcttagagattcttcagatccataccaagaacatgaagctggcagatgatgtggacctggaacaggtagccaatgagactcacgggcatgtgggtgctgacttagcagccctgtgctcagaggctgctctgcaagccatccgcaagaagatggatctcattgacctagaggatgagaccattgatgccgaggtcatgaactctctagcagttactatggatgacttccggtgggccttgagccagagtaacccatcagcactgcgggaaaccgtggtagaggtgccacaggtaacctgggaagacatcgggggcctagaggatgtcaaacgtgagctacaggagctggtccagtatcctgtggagcacccagacaaattcctgaagtttggcatgacaccttccaagggagttctgttctatggacctcctggctgtgggaaaactttgttggccaaagccattgctaatgaatgccaggccaacttcatctccatcaagggtcctgagctgctcaccatgtggtttggggagtctgaggccaatgtcagagaaatctttgacaaggcccgccaagctgccccctgtgtgctattctttgatgagctggattcgattgccaaggctcgtggaggtaacattggagatggtggtggggctgctgaccgagtcatcaaccagatcctgacagaaatggatggcatgtccacaaaaaaaaatgtgttcatcattggcgctaccaaccggcctgacatcattgatcctgccatcctcagacctggccgtcttgatcagctcatctacatcccacttcctgatgagaagtcccgtgttgccatcctcaaggctaacctgcgcaagtccccagttgccaaggatgtggacttggagttcctggctaaaatgactaatggcttctctggagctgacctgacagagatttgccagcgtgcttgcaagctggccatccgtgaatccatcgagagtgagattaggcgagaacgagagaggcagacaaacccatcagccatggaggtagaagaggatgatccagtgcctgagatccgtcgagatcactttgaagaagccatgcgctttgcgcgccgttctgtcagtgacaatgacattcggaagtatgagatgtttgcccagacccttcagcagagtcggggctttggcagcttcagattcccttcagggaaccagggtggagctggccccagtcagggcagtggaggcggcacaggtggcagtgtatacacagaagacaatgatgatgacctgtatggctaagtggtggtggccagcgtgcagtgagctggcctgcctggaccttgttccctgggggtgggggcgcttgcccaggagagggaccaggggtgcgcccacagcctgctccattctccagtctgaacagttcagctacagtctgactctggacagggggtttctgttgcaaaaatacaaaacaaaagcgataaaataaaagcgattttcatttggtaggcggagagtgaattaccaacagggaattgggccttgggcctatgccatttctgttgtagtttggggcagtgcaggggacctgtgtggggtgtgaaccaaggcactactgccacctgccacagtaaagcatctgcacttgactcaatgctgcccgagccctcccttccccctatccaacctgggtaggtgggtaggggccacagttgctggatgtttatatagagagtaggttgatttattttacatgcttttgagttaatgttggaaaactaatcacaagcagtttctaaaccaaaaaatgacatgttgtaaaaggacaataaacgttgggtcaaaatggagcctgagtcctgggccctgtgcctgcttcttttcctgggaacagccttgggctacccaccactcccaaggcattcttccaaatgtgaaatcctggaagtaagattgcaccttcttcctctcctgatcaacatcggtatgatgtctcctgttgcctcaccctttgtctgcagtatcactggataggactggtggaaagggagcagcctgacagagctccaaatgtggagaatatggcatccctccacctatatttgatgtggacggtaaggctaggcctgcaggatcccttatcctgaccaaagactgtgttggggtgccatttgaaaatcgcagggttgcaaaagaatacaatcttacttgcaggtggatattctctatactctcttttaatgcatctaaaaatcccaaacatcccctggttggtgatcacttacagttgtgtccacctttattttatgtactttgattaaaaaaaaaaaactttttgttaatataaaaaaaaaaaaaaaaaaactcgagttttttttttttttttttgatgttgcttccaactgttttattgctaaactatcatgatacaagccgtataaaaatactttacatataggaaaaataaactacattaaactggagattaaaaacatttgcataggaatgtgatgtattcaaacgcctttaacagtcaggattttctaaacctaagcctgccagcaccaccatgttggagagacctgtttgttggagaattggttttctctcctctgagggctgtagaggccagaggggtgagtgaggttctttgacaagatgtccaggatgctaagcttgtcccaacagccatagcctcggtctgctcaggccaatcagaatgctgtgagcacctgctctaatggaaacaacatcatttgcatccattccattcaaagcttgaactcagcagggagtttattctggtcagccaacagctgcataaaggtagaatgttaataaccctttcacttccagctcccaggaccctgatggctcagggagcaactctctgttatcaaccaccagaaaagtttgtttttaaacagactgagttaaacagtgatgttggctgtaagtcaaggcactcacaaaagctgagggaaatggatgtttatgatcacaattttataggatgctgctttttcttaagcatttaattggaatgcaggaaaatacttgctatgcaattggctgctttggttccacgaaacgtaatgccctagcctcgagcctaggagacccaaggttaagatgcgctgggtcaccgagcaccttgcctccgggaaacaagttcgggaaaggttagcccagcttgtcaagaacgtcacaactccatccatgcctcttgtaaacttgaaatgaaaacattctttcaattctgagcaatagaaagcacttggaaaggtctttttttttttttttttttgacatgataaattcagcctcactgtagtccagagtgagaattagaacataccaacttccaatctgcctaaatgtgaggctgaatttatcatgtc

SEQ ID NO: 344378 - DNA, 3914 bp, Homo sapiens
  misc_feature (3846)..(3846): n is a, c, g, or t
  misc_feature (3852)..(3852): n is a, c, g, or t
  misc_feature (3856)..(3856): n is a, c, g, or t
ttacacaccaccacccacttacggctaggtacgaggctgggtgttgcgaaccgtcgtttgagtcgtcgctgccgctgccgctgccactgccactgccacctcgcggatcaggagccagcgttgttcgcccgacgcctcgctgccggtgggaggaagcgagagggaagccgcttgcgggtttgtcgccgctgctcgcccaccgcctggaagagccgagccccggcccagtcggtcgcttgccaccgctcgtagccgttacccgcgggccgccacagccgccggccgggagaggcgcgcgccatggcttctggagccgattcaaaaggtgatgacctatcaacagccattctcaaacagaagaaccgtcccaatcggttaattgttgatgaagccatcaatgaggacaacagtgtggtgtccttgtcccagcccaagatggatgaattgcagttgttccgaggtgacacagtgttgctgaaaggaaagaagagacgagaagctgtttgcatcgtcctttctgatgatacttgttctgatgagaagattcggatgaatagagttgttcggaataaccttcgtgtacgcctaggggatgtcatcagcatccagccatgccctgatgtgaagtacggcaaacgtatccatgtgctgcccattgatgacacagtggaaggcattactggtaatctcttcgaggtataccttaagccgtacttcctggaagcgtatcgacccatccggaaaggagacatttttcttgtccgtggtgggatgcgtgctgtggagttcaaagtggtggaaacagatcctagcccttattgcattgttgctccagacacagtgatccactgcgaaggggagcctatcaaacgagaggatgaggaagagtccttgaatgaagtagggtatgatgacattggtggctgcaggaagcagctagctcagataaaggagatggtggaactgcccctgagacatcctgccctctttaaggcaattggtgtgaagcctcctagaggaatcctgctttacggacctcctggaacaggaaagaccctgattgctcgagctgtagcaaatgagactggagccttcttcttcttgatcaatggtcctgagatcatgagcaaattggctggtgagtctgagagcaaccttcgtaaagcctttgaggaggctgagaagaatgctcctgccatcatcttcattgatgagctagatgccatcgctcccaaaagagagaaaactcatggcgaggtggagcggcgcattgtatcacagttgttgaccctcatggatggcctaaagcagagggcacatgtgattgttatggcagcaaccaacagacccaacagcattgacccagctctacggcgatttggtcgctttgacagggaggtagatattggaattcctgatgctacaggacgcttagagattcttcagatccataccaagaacatgaagctggcagatgatgtggacctggaacaggtagccaatgagactcacgggcatgtgggtgctgacttagcagccctgtgctcagaggctgctctgcaagccatccgcaagaagatggatctcattgacctagaggatgagaccattgatgccgaggtcatgaactctctagcagttactatggatgacttccggtgggccttgagccagagtaacccatcagcactgcgggaaaccgtggtagaggtgccacaggtaacctgggaagacatcgggggcctagaggatgtcaaacgtgagctacaggagctggtccagtatcctgtggagcacccagacaaattcctgaagtttggcatgacaccttccaagggagttctgttctatggacctcctggctgtgggaaaactttgttggccaaagccattgctaatgaatgccaggccaacttcatctccatcaagggtcctgagctgctcaccatgtggtttggggagtctgaggccaatgtcagagaaatctttgacaaggcccgccaagctgccccctgtgtgctattctttgatgagctggattcgattgccaaggctcgtggaggtaacattggagatggtggtggggctgctgaccgagtcatcaaccagatcctgacagaaatggatggcatgtccacaaaaaaaaatgtgttcatcattggcgctaccaaccggcctgacatcattgatcctgccatcctcagacctggccgtcttgatcagctcatctacatcccacttcctgatgagaagtcccgtgttgccatcctcaaggctaacctgcgcaagtccccagttgccaaggatgtggacttggagttcctggctaaaatgactaatggcttctctggagctgacctgacagagatttgccagcgtgcttgcaagctggccatccgtgaatccatcgagagtgagattaggcgagaacgagagaggcagacaaacccatcagccatggaggtagaagaggatgatccagtgcctgagatccgtcgagatcactttgaagaagccatgcgctttgcgcgccgttctgtcagtgacaatgacattcggaagtatgagatgtttgcccagacccttcagcagagtcggggctttggcagcttcagattcccttcagggaaccagggtggagctggccccagtcagggcagtggaggcggcacaggtggcagtgtatacacagaagacaatgatgatgacctgtatggctaagtggtggtggccagcgtgcagtgagctggcctgcctggaccttgttccctgggggtgggggcgcttgcccaggagagggaccaggggtgcgcccacagcctgctccattctccagtctgaacagttcagctacagtctgactctggacagggggtttctgttgcaaaaatacaaaacaaaagcgataaaataaaagcgattttcatttggtaggcggagagtgaattaccaacagggaattgggccttgggcctatgccatttctgttgtagtttggggcagtgcaggggacctgtgtggggtgtgaaccaaggcactactgccacctgccacagtaaagcatctgcacttgactcaatgctgcccgagccctcccttccccctatccaacctgggtaggtgggtaggggccacagttgctggatgtttatatagagagtaggttgatttattttacatgcttttgagttaatgttggaaaactaatcacaagcagtttctaaaccaaaaaatgacatgttgtaaaaggacaataaacgttgggtcaaaatggagcctgagtcctgggccctgtgcctgcttcttttcctgggaacagccttgggctacccaccactcccaaggcattcttccaaatgtgaaatcctggaagtaagattgcaccttcttcctctcctgatcaacatcggtatgatgtctcctgttgcctcaccctttgtctgcagtatcactggataggactggtggaaagggagcagcctgacagagctccaaatgtggagaatatggcatccctccacctatatttgatgtggacggtaaggctaggcctgcaggatcccttatcctgaccaaagactgtgttggggtgccatttgaaaatcgcagggttgcaaaagaatacaatcttacttgcaggtggatattctctatactctcttttaatgcatctaaaaatcccaaacatcccctggttggtgatcacttacagttgtgtccacctttattttatgtactttgattaaaaaaaaaaaactttttgttaatataaaaaaaaaaaaaaaaaaaaaaaaaaaaaaatttatatattattaaaaaaaaaaattccttgagggggggcccggnccccanttcnccctataggagaggcgattacaattaccgtggccggcttttacaacgtcgggactggg

SEQ ID NO: 344379 - DNA, 3492 bp, Homo sapiens
  misc_feature (3332)..(3333): n is a, c, g, or t
ttacacaccaccacccacttacggctaggtacgaggctgggtgttgcgaaccgtcgtttgagtcgtcgctgccgctgccgctgccactgccactgccacctcgcggatcaggagccagcgttgttcgcccgacgcctcgctgccggtgggaggaagcgagagggaagccgcttgcgggtttgtcgccgctgctcgcccaccgcctggaagagccgagccccggcccagtcggtcgcttgccaccgctcgtagccgttacccgcgggccgccacagccgccggccgggagaggcgcgcgccatggcttctggagccgattcaaaaggtgatgacctatcaacagccattctcaaacagaagaaccgtcccaatcggttaattgttgatgaagccatcaatgaggacaacagtgtggtgtccttgtcccagcccaagatggatgaattgcagttgttccgaggtgacacagtgttgctgaaaggaaagaagagacgagaagctgtttgcatcgtcctttctgatgatacttgttctgatgagaagattcggatgaatagagttgttcggaataaccttcgtgtacgcctaggggatgtcatcagcatccagccatgccctgatgtgaagtacggcaaacgtatccatgtgctgcccattgatgacacagtggaaggcattactggtaatctcttcgaggtataccttaagccgtacttcctggaagcgtatcgacccatccggaaaggagacatttttcttgtccgtggtgggatgcgtgctgtggagttcaaagtggtggaaacagatcctagcccttattgcattgttgctccagacacagtgatccactgcgaaggggagcctatcaaacgagaggatgaggaagagtccttgaatgaagtagggtatgatgacattggtggctgcaggaagcagctagctcagataaaggagatggtggaactgcccctgagacatcctgccctctttaaggcaattggtgtgaagcctcctagaggaatcctgctttacggacctcctggaacaggaaagaccctgattgctcgagctgtagcaaatgagactggagccttcttcttcttgatcaatggtcctgagatcatgagcaaattggctggtgagtctgagagcaaccttcgtaaagcctttgaggaggctgagaagaatgctcctgccatcatcttcattgatgagctagatgccatcgctcccaaaagagagaaaactcatggcgaggtggagcggcgcattgtatcacagttgttgaccctcatggatggcctaaagcagagggcacatgtgattgttatggcagcaaccaacagacccaacagcattgacccagctctacggcgatttggtcgctttgacagggaggtagatattggaattcctgatgctacaggacgcttagagattcttcagatccataccaagaacatgaagctggcagatgatgtggacctggaacaggtagccaatgagactcacgggcatgtgggtgctgacttagcagccctgtgctcagaggctgctctgcaagccatccgcaagaagatggatctcattgacctagaggatgagaccattgatgccgaggtcatgaactctctagcagttactatggatgacttccggtgggccttgagccagagtaacccatcagcactgcgggaaaccgtggtagaggtgccacaggtaacctgggaagacatcgggggcctagaggatgtcaaacgtgagctacaggagctggtccagtatcctgtggagcacccagacaaattcctgaagtttggcatgacaccttccaagggagttctgttctatggacctcctggctgtgggaaaactttgttggccaaagccattgctaatgaatgccaggccaacttcatctccatcaagggtcctgagctgctcaccatgtggtttggggagtctgaggccaatgtcagagaaatctttgacaaggcccgccaagctgccccctgtgtgctattctttgatgagctggattcgattgccaaggctcgtggaggtaacattggagatggtggtggggctgctgaccgagtcatcaaccagatcctgacagaaatggatggcatgtccacaaaaaaaaatgtgttcatcattggcgctaccaaccggcctgacatcattgatcctgccatcctcagacctggccgtcttgatcagctcatctacatcccacttcctgatgagaagtcccgtgttgccatcctcaaggctaacctgcgcaagtccccagttgccaaggatgtggacttggagttcctggctaaaatgactaatggcttctctggagctgacctgacagagatttgccagcgtgcttgcaagctggccatccgtgaatccatcgagagtgagattaggcgagaacgagagaggcagacaaacccatcagccatggaggtagaagaggatgatccagtgcctgagatccgtcgagatcactttgaagaagccatgcgctttgcgcgccgttctgtcagtgacaatgacattcggaagtatgagatgtttgcccagacccttcagcagagtcggggctttggcagcttcagattcccttcagggaaccagggtggagctggccccagtcagggcagtggaggcggcacaggtggcagtgtatacacagaagacaatgatgatgacctgtatggctaagtggtggtggccagcgtgcagtgagctggcctgcctggaccttgttccctgggggtgggggcgcttgcccaggagagggaccaggggtgcgcccacagcctgctccattctccagtctgaacagttcagctacagtctgactctggacagggggtttctgttgcaaaaatacaaaacaaaagcgataaaataaaagcgattttcatttggtaggcggagagtgaattaccaacagggaattgggccttgggcctatgccatttctgttgtagtttggggcagtgcaggggacctgtgtggggtgtgaaccaaggcactactgccacctgccacagtaaagcatctgcacttgactcaatgctgcccgagccctcccttccccctatccaacctgggtaggtgggtaggggccacagttgctggatgtttatatagagagtaggttgatttattttacatgcttttgagttaatgttggaaaactaatcacaagcagtttctaaaccaaaaaatgacatgttgtaaaaggacaataaacgttgggtcaaaatggaaaaaaaaaaaaaaaaaaaaaaaaaaaaaaaaaaaaaaaaaaaaaaaaaaaaaaaaanncaagtttatgcatgcggccgaatttagagttacttggccaatccccctatggggggtcgtataaaaatccactggccggcgtttacaccgtggaattggaaaaccttggggttcccaactattggctttgagaaattccctttcgcagctggttatacc

SEQ ID NO: 344380 - DNA, 3331 bp, Homo sapiens
ttacacaccaccacccacttacggctaggtacgaggctgggtgttgcgaaccgtcgtttgagtcgtcgctgccgctgccgctgccactgccactgccacctcgcggatcaggagccagcgttgttcgcccgacgcctcgctgccggtgggaggaagcgagagggaagccgcttgcgggtttgtcgccgctgctcgcccaccgcctggaagagccgagccccggcccagtcggtcgcttgccaccgctcgtagccgttacccgcgggccgccacagccgccggccgggagaggcgcgcgccatggcttctggagccgattcaaaaggtgatgacctatcaacagccattctcaaacagaagaaccgtcccaatcggttaattgttgatgaagccatcaatgaggacaacagtgtggtgtccttgtcccagcccaagatggatgaattgcagttgttccgaggtgacacagtgttgctgaaaggaaagaagagacgagaagctgtttgcatcgtcctttctgatgatacttgttctgatgagaagattcggatgaatagagttgttcggaataaccttcgtgtacgcctaggggatgtcatcagcatccagccatgccctgatgtgaagtacggcaaacgtatccatgtgctgcccattgatgacacagtggaaggcattactggtaatctcttcgaggtataccttaagccgtacttcctggaagcgtatcgacccatccggaaaggagacatttttcttgtccgtggtgggatgcgtgctgtggagttcaaagtggtggaaacagatcctagcccttattgcattgttgctccagacacagtgatccactgcgaaggggagcctatcaaacgagaggatgaggaagagtccttgaatgaagtagggtatgatgacattggtggctgcaggaagcagctagctcagataaaggagatggtggaactgcccctgagacatcctgccctctttaaggcaattggtgtgaagcctcctagaggaatcctgctttacggacctcctggaacaggaaagaccctgattgctcgagctgtagcaaatgagactggagccttcttcttcttgatcaatggtcctgagatcatgagcaaattggctggtgagtctgagagcaaccttcgtaaagcctttgaggaggctgagaagaatgctcctgccatcatcttcattgatgagctagatgccatcgctcccaaaagagagaaaactcatggcgaggtggagcggcgcattgtatcacagttgttgaccctcatggatggcctaaagcagagggcacatgtgattgttatggcagcaaccaacagacccaacagcattgacccagctctacggcgatttggtcgctttgacagggaggtagatattggaattcctgatgctacaggacgcttagagattcttcagatccataccaagaacatgaagctggcagatgatgtggacctggaacaggtagccaatgagactcacgggcatgtgggtgctgacttagcagccctgtgctcagaggctgctctgcaagccatccgcaagaagatggatctcattgacctagaggatgagaccattgatgccgaggtcatgaactctctagcagttactatggatgacttccggtgggccttgagccagagtaacccatcagcactgcgggaaaccgtggtagaggtgccacaggtaacctgggaagacatcgggggcctagaggatgtcaaacgtgagctacaggagctggtccagtatcctgtggagcacccagacaaattcctgaagtttggcatgacaccttccaagggagttctgttctatggacctcctggctgtgggaaaactttgttggccaaagccattgctaatgaatgccaggccaacttcatctccatcaagggtcctgagctgctcaccatgtggtttggggagtctgaggccaatgtcagagaaatctttgacaaggcccgccaagctgccccctgtgtgctattctttgatgagctggattcgattgccaaggctcgtggaggtaacattggagatggtggtggggctgctgaccgagtcatcaaccagatcctgacagaaatggatggcatgtccacaaaaaaaaatgtgttcatcattggcgctaccaaccggcctgacatcattgatcctgccatcctcagacctggccgtcttgatcagctcatctacatcccacttcctgatgagaagtcccgtgttgccatcctcaaggctaacctgcgcaagtccccagttgccaaggatgtggacttggagttcctggctaaaatgactaatggcttctctggagctgacctgacagagatttgccagcgtgcttgcaagctggccatccgtgaatccatcgagagtgagattaggcgagaacgagagaggcagacaaacccatcagccatggaggtagaagaggatgatccagtgcctgagatccgtcgagatcactttgaagaagccatgcgctttgcgcgccgttctgtcagtgacaatgacattcggaagtatgagatgtttgcccagacccttcagcagagtcggggctttggcagcttcagattcccttcagggaaccagggtggagctggccccagtcagggcagtggaggcggcacaggtggcagtgtatacacagaagacaatgatgatgacctgtatggctaagtggtggtggccagcgtgcagtgagctggcctgcctggaccttgttccctgggggtgggggcgcttgcccaggagagggaccaggggtgcgcccacagcctgctccattctccagtctgaacagttcagctacagtctgactctggacagggggtttctgttgcaaaaatacaaaacaaaagcgataaaataaaagcgattttcatttggtaggcggagagtgaattaccaacagggaattgggccttgggcctatgccatttctgttgtagtttggggcagtgcaggggacctgtgtggggtgtgaaccaaggcactactgccacctgccacagtaaagcatctgcacttgactcaatgctgcccgagccctcccttccccctatccaacctgggtaggtgggtaggggccacagttgctggatgtttatatagagagtaggttgatttattttacatgcttttgagttaatgttggaaaactaatcacaagcagtttctaaaccaaaaaatgacatgttgtaaaaggacaataaacgttgggtcaaaatggacatttccagcatggagttcccagattacgaggtacatcaaggaacagctatgccat

SEQ ID NO: 344381 - DNA, 3222 bp, Homo sapiens
  misc_feature (34)..(34): n is a, c, g, or t
  misc_feature (42)..(42): n is a, c, g, or t
  misc_feature (47)..(47): n is a, c, g, or t
tgacaacaaaagaaaagaaaacctcagctagtangaggctgngtttnaatcggccgaggagccagcgttgttcgcccgacgcctcgctgccggtgggaggaagcgagagggaagccgcttgcgggtttgtcgccgctgctcgcccaccgcctggaagagccgagccccggcccagtcggtcgcttgccaccgctcgtagccgttacccgcgggccgccacagccgccggccgggagaggcgcgcgccatggcttctggagccgattcaaaaggtgatgacctatcaacagccattctcaaacagaagaaccgtcccaatcggttaattgttgatgaagccatcaatgaggacaacagtgtggtgtccttgtcccagcccaagatggatgaattgcagttgttccgaggtgacacagtgttgctgaaaggaaagaagagacgagaagctgtttgcatcgtcctttctgatgatacttgttctgatgagaagattcggatgaatagagttgttcggaataaccttcgtgtacgcctaggggatgtcatcagcatccagccatgccctgatgtgaagtacggcaaacgtatccatgtgctgcccattgatgacacagtggaaggcattactggtaatctcttcgaggtataccttaagccgtacttcctggaagcgtatcgacccatccggaaaggagacatttttcttgtccgtggtgggatgcgtgctgtggagttcaaagtggtggaaacagatcctagcccttattgcattgttgctccagacacagtgatccactgcgaaggggagcctatcaaacgagaggatgaggaagagtccttgaatgaagtagggtatgatgacattggtggctgcaggaagcagctagctcagataaaggagatggtggaactgcccctgagacatcctgccctctttaaggcaattggtgtgaagcctcctagaggaatcctgctttacggacctcctggaacaggaaagaccctgattgctcgagctgtagcaaatgagactggagccttcttcttcttgatcaatggtcctgagatcatgagcaaattggctggtgagtctgagagcaaccttcgtaaagcctttgaggaggctgagaagaatgctcctgccatcatcttcattgatgagctagatgccatcgctcccaaaagagagaaaactcatggcgaggtggagcggcgcattgtatcacagttgttgaccctcatggatggcctaaagcagagggcacatgtgattgttatggcagcaaccaacagacccaacagcattgacccagctctacggcgatttggtcgctttgacagggaggtagatattggaattcctgatgctacaggacgcttagagattcttcagatccataccaagaacatgaagctggcagatgatgtggacctggaacaggtagccaatgagactcacgggcatgtgggtgctgacttagcagccctgtgctcagaggctgctctgcaagccatccgcaagaagatggatctcattgacctagaggatgagaccattgatgccgaggtcatgaactctctagcagttactatggatgacttccggtgggccttgagccagagtaacccatcagcactgcgggaaaccgtggtagaggtgccacaggtaacctgggaagacatcgggggcctagaggatgtcaaacgtgagctacaggagctggtccagtatcctgtggagcacccagacaaattcctgaagtttggcatgacaccttccaagggagttctgttctatggacctcctggctgtgggaaaactttgttggccaaagccattgctaatgaatgccaggccaacttcatctccatcaagggtcctgagctgctcaccatgtggtttggggagtctgaggccaatgtcagagaaatctttgacaaggcccgccaagctgccccctgtgtgctattctttgatgagctggattcgattgccaaggctcgtggaggtaacattggagatggtggtggggctgctgaccgagtcatcaaccagatcctgacagaaatggatggcatgtccacaaaaaaaaatgtgttcatcattggcgctaccaaccggcctgacatcattgatcctgccatcctcagacctggccgtcttgatcagctcatctacatcccacttcctgatgagaagtcccgtgttgccatcctcaaggctaacctgcgcaagtccccagttgccaaggatgtggacttggagttcctggctaaaatgactaatggcttctctggagctgacctgacagagatttgccagcgtgcttgcaagctggccatccgtgaatccatcgagagtgagattaggcgagaacgagagaggcagacaaacccatcagccatggaggtagaagaggatgatccagtgcctgagatccgtcgagatcactttgaagaagccatgcgctttgcgcgccgttctgtcagtgacaatgacattcggaagtatgagatgtttgcccagacccttcagcagagtcggggctttggcagcttcagattcccttcagggaaccagggtggagctggccccagtcagggcagtggaggcggcacaggtggcagtgtatacacagaagacaatgatgatgacctgtatggctaagtggtggtggccagcgtgcagtgagctggcctgcctggaccttgttccctgggggtgggggcgcttgcccaggagagggaccaggggtgcgcccacagcctgctccattctccagtctgaacagttcagctacagtctgactctggacagggggtttctgttgcaaaaatacaaaacaaaagcgataaaataaaagcgattttcatttggtaggcggagagtgaattaccaacagggaattgggccttgggcctatgccatttctgttgtagtttggggcagtgcaggggacctgtgtggggtgtgaaccaaggcactactgccacctgccacagtaaagcatctgcacttgactcaatgctgcccgagccctcccttccccctatccaacctgggtaggtgggtaggggccacagttgctggatgtttatatagagagtaggttgatttattttacatgcttttgagttaatgttggaaaactaatcacaagcagtttctaaaccaaaaaatgacatgttgtaaaaggacaataaacgttgggtcaaaatgga

SEQ ID NO: 344382 - DNA, 3146 bp, Homo sapiens
ttacacaccaccacccacttacggctaggtacgaggctgggtgttgcgaaccgtcgtttgagtcgtcgctgccgctgccgctgccactgccactgccacctcgcggatcaggagccagcgttgttcgcccgacgcctcgctgccggtgggaggaagcgagagggaagccgcttgcgggtttgtcgccgttcaaaaggtgatgacctatcaacagccattctcaaacagaagaaccgtcccaatcggttaattgttgatgaagccatcaatgaggacaacagtgtggtgtccttgtcccagcccaagatggatgaattgcagttgttccgaggtgacacagtgttgctgaaaggaaagaagagacgagaagctgtttgcatcgtcctttctgatgatacttgttctgatgagaagattcggatgaatagagttgttcggaataaccttcgtgtacgcctaggggatgtcatcagcatccagccatgccctgatgtgaagtacggcaaacgtatccatgtgctgcccattgatgacacagtggaaggcattactggtaatctcttcgaggtataccttaagccgtacttcctggaagcgtatcgacccatccggaaaggagacatttttcttgtccgtggtgggatgcgtgctgtggagttcaaagtggtggaaacagatcctagcccttattgcattgttgctccagacacagtgatccactgcgaaggggagcctatcaaacgagaggatgaggaagagtccttgaatgaagtagggtatgatgacattggtggctgcaggaagcagctagctcagataaaggagatggtggaactgcccctgagacatcctgccctctttaaggcaattggtgtgaagcctcctagaggaatcctgctttacggacctcctggaacaggaaagaccctgattgctcgagctgtagcaaatgagactggagccttcttcttcttgatcaatggtcctgagatcatgagcaaattggctggtgagtctgagagcaaccttcgtaaagcctttgaggaggctgagaagaatgctcctgccatcatcttcattgatgagctagatgccatcgctcccaaaagagagaaaactcatggcgaggtggagcggcgcattgtatcacagttgttgaccctcatggatggcctaaagcagagggcacatgtgattgttatggcagcaaccaacagacccaacagcattgacccagctctacggcgatttggtcgctttgacagggaggtagatattggaattcctgatgctacaggacgcttagagattcttcagatccataccaagaacatgaagctggcagatgatgtggacctggaacaggtagccaatgagactcacgggcatgtgggtgctgacttagcagccctgtgctcagaggctgctctgcaagccatccgcaagaagatggatctcattgacctagaggatgagaccattgatgccgaggtcatgaactctctagcagttactatggatgacttccggtgggccttgagccagagtaacccatcagcactgcgggaaaccgtggtagaggtgccacaggtaacctgggaagacatcgggggcctagaggatgtcaaacgtgagctacaggagctggtccagtatcctgtggagcacccagacaaattcctgaagtttggcatgacaccttccaagggagttctgttctatggacctcctggctgtgggaaaactttgttggccaaagccattgctaatgaatgccaggccaacttcatctccatcaagggtcctgagctgctcaccatgtggtttggggagtctgaggccaatgtcagagaaatctttgacaaggcccgccaagctgccccctgtgtgctattctttgatgagctggattcgattgccaaggctcgtggaggtaacattggagatggtggtggggctgctgaccgagtcatcaaccagatcctgacagaaatggatggcatgtccacaaaaaaaaatgtgttcatcattggcgctaccaaccggcctgacatcattgatcctgccatcctcagacctggccgtcttgatcagctcatctacatcccacttcctgatgagaagtcccgtgttgccatcctcaaggctaacctgcgcaagtccccagttgccaaggatgtggacttggagttcctggctaaaatgactaatggcttctctggagctgacctgacagagatttgccagcgtgcttgcaagctggccatccgtgaatccatcgagagtgagattaggcgagaacgagagaggcagacaaacccatcagccatggaggtagaagaggatgatccagtgcctgagatccgtcgagatcactttgaagaagccatgcgctttgcgcgccgttctgtcagtgacaatgacattcggaagtatgagatgtttgcccagacccttcagcagagtcggggctttggcagcttcagattcccttcagggaaccagggtggagctggccccagtcagggcagtggaggcggcacaggtggcagtgtatacacagaagacaatgatgatgacctgtatggctaagtggtggtggccagcgtgcagtgagctggcctgcctggaccttgttccctgggggtgggggcgcttgcccaggagagggaccaggggtgcgcccacagcctgctccattctccagtctgaacagttcagctacagtctgactctggacagggggtttctgttgcaaaaatacaaaacaaaagcgataaaataaaagcgattttcatttggtaggcggagagtgaattaccaacagggaattgggccttgggcctatgccatttctgttgtagtttggggcagtgcaggggacctgtgtggggtgtgaaccaaggcactactgccacctgccacagtaaagcatctgcacttgactcaatgctgcccgagccctcccttccccctatccaacctgggtaggtgggtaggggccacagttgctggatgtttatatagagagtaggttgatttattttacatgcttttgagttaatgttggaaaactaatcacaagcagtttctaaaccaaaaaatgacatgttgtaaaaggacaataaacgttgggtcaaaatgga

SEQ ID NO: 344383 - DNA, 3233 bp, Homo sapiens
ttacacaccaccacccacttacggctaggtacgaggctgggtgttgcgaaccgtcgtttgagtcgtcgctgccgctgccgctgccactgccactgccacctcgcggatcaggagccagcgttgttcgcccgacgcctcgctgccggtgggaggaagcgagagggaagccgcttgcgggtttgtcgccgctgctcgcccaccgcctggaagagccgagccccggcccagtcggtcgcttgccaccgctcgtagccgttacccgcgggccgccacagccgccggccgggagaggcgcgcgccatggcttctggagccgattcaaaaggtgatgacctatcaacagccattctcaaacagaagaaccgtcccaatcggttaattgttgatgaagccatcaatgaggacaacagtgtggtgtccttgtcccagcccaagatggatgaattgcagttgttccgaggtgacacagtgttgctgaaaggaaagaagagacgagaagctgtttgcatcgtcctttctgatgatacttgttctgatgagaagattcggatgaatagagttgttcggaataaccttcgtgtacgcctaggggatgtcatcagcatccagccatgccctgatgtgaagtacggcaaacgtatccatgtgctgcccattgatgacacagtggaaggcattactggtaatctcttcgaggtataccttaagccgtacttcctggaagcgtatcgacccatccggaaaggagacatttttcttgtccgtggtgggatgcgtgctgtggagttcaaagtggtggtgatccactgcgaaggggagcctatcaaacgagaggatgaggaagagtccttgaatgaagtagggtatgatgacattggtggctgcaggaagcagctagctcagataaaggagatggtggaactgcccctgagacatcctgccctctttaaggcaattggtgtgaagcctcctagaggaatcctgctttacggacctcctggaacaggaaagaccctgattgctcgagctgtagcaaatgagactggagccttcttcttcttgatcaatggtcctgagatcatgagcaaattggctggtgagtctgagagcaaccttcgtaaagcctttgaggaggctgagaagaatgctcctgccatcatcttcattgatgagctagatgccatcgctcccaaaagagagaaaactcatggcgaggtggagcggcgcattgtatcacagttgttgaccctcatggatggcctaaagcagagggcacatgtgattgttatggcagcaaccaacagacccaacagcattgacccagctctacggcgatttggtcgctttgacagggaggtagatattggaattcctgatgctacaggacgcttagagattcttcagatccataccaagaacatgaagctggcagatgatgtggacctggaacaggtagccaatgagactcacgggcatgtgggtgctgacttagcagccctgtgctcagaggctgctctgcaagccatccgcaagaagatggatctcattgacctagaggatgagaccattgatgccgaggtcatgaactctctagcagttactatggatgacttccggtgggccttgagccagagtaacccatcagcactgcgggaaaccgtggtagaggtgccacaggtaacctgggaagacatcgggggcctagaggatgtcaaacgtgagctacaggagctggtccagtatcctgtggagcacccagacaaattcctgaagtttggcatgacaccttccaagggagttctgttctatggacctcctggctgtgggaaaactttgttggccaaagccattgctaatgaatgccaggccaacttcatctccatcaagggtcctgagctgctcaccatgtggtttggggagtctgaggccaatgtcagagaaatctttgacaaggcccgccaagctgccccctgtgtgctattctttgatgagctggattcgattgccaaggctcgtggaggtaacattggagatggtggtggggctgctgaccgagtcatcaaccagatcctgacagaaatggatggcatgtccacaaaaaaaaatgtgttcatcattggcgctaccaaccggcctgacatcattgatcctgccatcctcagacctggccgtcttgatcagctcatctacatcccacttcctgatgagaagtcccgtgttgccatcctcaaggctaacctgcgcaagtccccagttgccaaggatgtggacttggagttcctggctaaaatgactaatggcttctctggagctgacctgacagagatttgccagcgtgcttgcaagctggccatccgtgaatccatcgagagtgagattaggcgagaacgagagaggcagacaaacccatcagccatggaggtagaagaggatgatccagtgcctgagatccgtcgagatcactttgaagaagccatgcgctttgcgcgccgttctgtcagtgacaatgacattcggaagtatgagatgtttgcccagacccttcagcagagtcggggctttggcagcttcagattcccttcagggaaccagggtggagctggccccagtcagggcagtggaggcggcacaggtggcagtgtatacacagaagacaatgatgatgacctgtatggctaagtggtggtggccagcgtgcagtgagctggcctgcctggaccttgttccctgggggtgggggcgcttgcccaggagagggaccaggggtgcgcccacagcctgctccattctccagtctgaacagttcagctacagtctgactctggacagggggtttctgttgcaaaaatacaaaacaaaagcgataaaataaaagcgattttcatttggtaggcggagagtgaattaccaacagggaattgggccttgggcctatgccatttctgttgtagtttggggcagtgcaggggacctgtgtggggtgtgaaccaaggcactactgccacctgccacagtaaagcatctgcacttgactcaatgctgcccgagccctcccttccccctatccaacctgggtaggtgggtaggggccacagttgctggatgtttatatagagagtaggttgatttattttacatgcttttgagttaatgttggaaaactaatcacaagcagtttctaaaccaaaaaatgacatgttgtaaaaggacaataaacgttgggtcaaaatgga

SEQ ID NO: 344384 - DNA, 3337 bp, Homo sapiens
  misc_feature (390)..(390): n is a, c, g, or t
cagataacacaaatacagttaaaggactgaacctagcctttcattgccatcaaccagctgaaaccagtctgtaaccctccatttaaccactctccccaagtcagcaaatgaaatctaaagatggacaagagctctttattggccaggcatggtggctcacgcctgtaatcccaacaccctgggaggctgaggtgggtggatcacttgaggccaggagttcgagaccagcctagccaacatggcaaaaccccacctctaccaaaaaagcaaaacgaaaacgaaacattcaacgggcatggtggcagacacccgtaatcccagctactcgggaggctgaggcacaagaatcctaagaacccaggaagtagaagttgcaatgaaccacgaccntgccactgtacaacagagcaagactgcgcatcttgcgtcccaatcggttaattgttgatgaagccatcaatgaggacaacagtgtggtgtccttgtcccagcccaagatggatgaattgcagttgttccgaggtgacacagtgttgctgaaaggaaagaagagacgagaagctgtttgcatcgtcctttctgatgatacttgttctgatgagaagattcggatgaatagagttgttcggaataaccttcgtgtacgcctaggggatgtcatcagcatccagccatgccctgatgtgaagtacggcaaacgtatccatgtgctgcccattgatgacacagtggaaggcattactggtaatctcttcgaggtataccttaagccgtacttcctggaagcgtatcgacccatccggaaaggagacatttttcttgtccgtggtgggatgcgtgctgtggagttcaaagtggtggaaacagatcctagcccttattgcattgttgctccagacacagtgatccactgcgaaggggagcctatcaaacgagaggatgaggaagagtccttgaatgaagtagggtatgatgacattggtggctgcaggaagcagctagctcagataaaggagatggtggaactgcccctgagacatcctgccctctttaaggcaattggtgtgaagcctcctagaggaatcctgctttacggacctcctggaacaggaaagaccctgattgctcgagctgtagcaaatgagactggagccttcttcttcttgatcaatggtcctgagatcatgagcaaattggctggtgagtctgagagcaaccttcgtaaagcctttgaggaggctgagaagaatgctcctgccatcatcttcattgatgagctagatgccatcgctcccaaaagagagaaaactcatggcgaggtggagcggcgcattgtatcacagttgttgaccctcatggatggcctaaagcagagggcacatgtgattgttatggcagcaaccaacagacccaacagcattgacccagctctacggcgatttggtcgctttgacagggaggtagatattggaattcctgatgctacaggacgcttagagattcttcagatccataccaagaacatgaagctggcagatgatgtggacctggaacaggtagccaatgagactcacgggcatgtgggtgctgacttagcagccctgtgctcagaggctgctctgcaagccatccgcaagaagatggatctcattgacctagaggatgagaccattgatgccgaggtcatgaactctctagcagttactatggatgacttccggtgggccttgagccagagtaacccatcagcactgcgggaaaccgtggtagaggtgccacaggtaacctgggaagacatcgggggcctagaggatgtcaaacgtgagctacaggagctggtccagtatcctgtggagcacccagacaaattcctgaagtttggcatgacaccttccaagggagttctgttctatggacctcctggctgtgggaaaactttgttggccaaagccattgctaatgaatgccaggccaacttcatctccatcaagggtcctgagctgctcaccatgtggtttggggagtctgaggccaatgtcagagaaatctttgacaaggcccgccaagctgccccctgtgtgctattctttgatgagctggattcgattgccaaggctcgtggaggtaacattggagatggtggtggggctgctgaccgagtcatcaaccagatcctgacagaaatggatggcatgtccacaaaaaaaaatgtgttcatcattggcgctaccaaccggcctgacatcattgatcctgccatcctcagacctggccgtcttgatcagctcatctacatcccacttcctgatgagaagtcccgtgttgccatcctcaaggctaacctgcgcaagtccccagttgccaaggatgtggacttggagttcctggctaaaatgactaatggcttctctggagctgacctgacagagatttgccagcgtgcttgcaagctggccatccgtgaatccatcgagagtgagattaggcgagaacgagagaggcagacaaacccatcagccatggaggtagaagaggatgatccagtgcctgagatccgtcgagatcactttgaagaagccatgcgctttgcgcgccgttctgtcagtgacaatgacattcggaagtatgagatgtttgcccagacccttcagcagagtcggggctttggcagcttcagattcccttcagggaaccagggtggagctggccccagtcagggcagtggaggcggcacaggtggcagtgtatacacagaagacaatgatgatgacctgtatggctaagtggtggtggccagcgtgcagtgagctggcctgcctggaccttgttccctgggggtgggggcgcttgcccaggagagggaccaggggtgcgcccacagcctgctccattctccagtctgaacagttcagctacagtctgactctggacagggggtttctgttgcaaaaatacaaaacaaaagcgataaaataaaagcgattttcatttggtaggcggagagtgaattaccaacagggaattgggccttgggcctatgccatttctgttgtagtttggggcagtgcaggggacctgtgtggggtgtgaaccaaggcactactgccacctgccacagtaaagcatctgcacttgactcaatgctgcccgagccctcccttccccctatccaacctgggtaggtgggtaggggccacagttgctggatgtttatatagagagtaggttgatttattttacatgcttttgagttaatgttggaaaactaatcacaagcagtttctaaaccaaaaaatgacatgttgtaaaaggacaataaacgttgggtcaaaatgga

SEQ ID NO: 344385 - DNA, 2605 bp, Homo sapiens
agggactgggtgcttaaggttgtaacattaacatggcccgttgtctttacaatttataacgacccatccggaaaggagacatttttcttgtccgtggtgggatgcgtgctgtggagttcaaagtggtggaaacagatcctagcccttattgcattgttgctccagacacagtgatccactgcgaaggggagcctatcaaacgagaggatgaggaagagtccttgaatgaagtagggtatgatgacattggtggctgcaggaagcagctagctcagataaaggagatggtggaactgcccctgagacatcctgccctctttaaggcaattggtgtgaagcctcctagaggaatcctgctttacggacctcctggaacaggaaagaccctgattgctcgagctgtagcaaatgagactggagccttcttcttcttgatcaatggtcctgagatcatgagcaaattggctggtgagtctgagagcaaccttcgtaaagcctttgaggaggctgagaagaatgctcctgccatcatcttcattgatgagctagatgccatcgctcccaaaagagagaaaactcatggcgaggtggagcggcgcattgtatcacagttgttgaccctcatggatggcctaaagcagagggcacatgtgattgttatggcagcaaccaacagacccaacagcattgacccagctctacggcgatttggtcgctttgacagggaggtagatattggaattcctgatgctacaggacgcttagagattcttcagatccataccaagaacatgaagctggcagatgatgtggacctggaacaggtagccaatgagactcacgggcatgtgggtgctgacttagcagccctgtgctcagaggctgctctgcaagccatccgcaagaagatggatctcattgacctagaggatgagaccattgatgccgaggtcatgaactctctagcagttactatggatgacttccggtgggccttgagccagagtaacccatcagcactgcgggaaaccgtggtagaggtgccacaggtaacctgggaagacatcgggggcctagaggatgtcaaacgtgagctacaggagctggtccagtatcctgtggagcacccagacaaattcctgaagtttggcatgacaccttccaagggagttctgttctatggacctcctggctgtgggaaaactttgttggccaaagccattgctaatgaatgccaggccaacttcatctccatcaagggtcctgagctgctcaccatgtggtttggggagtctgaggccaatgtcagagaaatctttgacaaggcccgccaagctgccccctgtgtgctattctttgatgagctggattcgattgccaaggctcgtggaggtaacattggagatggtggtggggctgctgaccgagtcatcaaccagatcctgacagaaatggatggcatgtccacaaaaaaaaatgtgttcatcattggcgctaccaaccggcctgacatcattgatcctgccatcctcagacctggccgtcttgatcagctcatctacatcccacttcctgatgagaagtcccgtgttgccatcctcaaggctaacctgcgcaagtccccagttgccaaggatgtggacttggagttcctggctaaaatgactaatggcttctctggagctgacctgacagagatttgccagcgtgcttgcaagctggccatccgtgaatccatcgagagtgagattaggcgagaacgagagaggcagacaaacccatcagccatggaggtagaagaggatgatccagtgcctgagatccgtcgagatcactttgaagaagccatgcgctttgcgcgccgttctgtcagtgacaatgacattcggaagtatgagatgtttgcccagacccttcagcagagtcggggctttggcagcttcagattcccttcagggaaccagggtggagctggccccagtcagggcagtggaggcggcacaggtggcagtgtatacacagaagacaatgatgatgacctgtatggctaagtggtggtggccagcgtgcagtgagctggcctgcctggaccttgttccctgggggtgggggcgcttgcccaggagagggaccaggggtgcgcccacagcctgctccattctccagtctgaacagttcagctacagtctgactctggacagggggtttctgttgcaaaaatacaaaacaaaagcgataaaataaaagcgattttcatttggtaggcggagagtgaattaccaacagggaattgggccttgggcctatgccatttctgttgtagtttggggcagtgcaggggacctgtgtggggtgtgaaccaaggcactactgccacctgccacagtaaagcatctgcacttgactcaatgctgcccgagccctcccttccccctatccaacctgggtaggtgggtaggggccacagttgctggatgtttatatagagagtaggttgatttattttacatgcttttgagttaatgttggaaaactaatcacaagcagtttctaaaccaaaaaatgacatgttgtaaaaggacaataaacgttgggtcaaaatgga

SEQ ID NO: 344386 - DNA, 2687 bp, Homo sapiens
  misc_feature (2620)..(2620): n is a, c, g, or t
  misc_feature (2633)..(2633): n is a, c, g, or t
ttacacaccaccacccacttacggctaggtacgaggctgggtgttgcgaaccgtcgtttgagtcgtcgctgccgctgccgctgccactgccactgccacctcgcggatcaggagccagcgttgttcgcccgacgcctcgctgccggtgggaggaagcgagagggaagccgcttgcgggtttgtcgccgctgctcgcccaccgcctggaagagccgagccccggcccagtcggtcgcttgccaccgctcgtagccgttacccgcgggccgccacagccgccggccgggagaggcgcgcgccatggcttctggagccgattcaaaaggtgatgacctatcaacagccattctcaaacagaagaaccgtcccaatcggttaattgttgatgaagccatcaatgaggacaacagtgtggtgtccttgtcccagcccaagatggatgaattgcagttgttccgaggtgacacagtgttgctgaaaggaaagaagagacgagaagctgtttgcatcgtcctttctgatgatacttgttctgatgagaagattcggatgaatagagttgttcggaataaccttcgtgtacgcctaggggatgtcatcagcatccagccatgccctgatgtgaagtacggcaaacgtatccatgtgctgcccattgatgacacagtggaaggcattactggtaatctcttcgaggtataccttaagccgtacttcctggaagcgtatcgacccatccggaaaggagacatttttcttgtccgtggtgggatgcgtgctgtggagttcaaagtggtggaaacagatcctagcccttattgcattgttgctccagacacagtgatccactgcgaaggggagcctatcaaacgagaggatgaggaagagtccttgaatgaagtagggtatgatgacattggtggctgcaggaagcagctagctcagataaaggagatggtggaactgcccctgagacatcctgccctctttaaggcaattggtgtgaagcctcctagaggaatcctgctttacggacctcctggaacaggaaagaccctgattgctcgagctgtagcaaatgagactggagccttcttcttcttgatcaatggtcctgagatcatgagcaaattggctggtgagtctgagagcaaccttcgtaaagcctttgaggaggctgagaagaatgctcctgccatcatcttcattgatgagctagatgccatcgctcccaaaagagagaaaactcatggcgaggtggagcggcgcattgtatcacagttgttgaccctcatggatggcctaaagcagagggcacatgtgattgttatggcagcaaccaacagacccaacagcattgacccagctctacggcgatttggtcgctttgacagggaggtagatattggaattcctgatgctacaggacgcttagagattcttcagatccataccaagaacatgaagctggcagatgatgtggacctggaacaggtagccaatgagactcacgggcatgtgggtgctgacttagcagccctgtgctcagaggctgctctgcaagccatccgcaagaagatggatctcattgacctagaggatgagaccattgatgccgaggtcatgaactctctagcagttactatggatgacttccggtgggccttgagccagagtaacccatcagcactgcgggaaaccgtggtagaggtgccacaggtaacctgggaagacatcgggggcctagaggatgtcaaacgtgagctacaggagctggtccagtatcctgtggagcacccagacaaattcctgaagtttggcatgacaccttccaagggagttctgttctatggacctcctggctgtgggaaaactttgttggccaaagccattgctaatgaatgccaggccaacttcatctccatcaagggtcctgagctgctcaccatgtggtttggggagtctgaggccaatgtcagagaaatctttgacaaggcccgccaagctgccccctgtgtgctattctttgatgagctggattcgattgccaaggctcgtggaggtaacattggagatggtggtggggctgctgaccgagtcatcaaccagatcctgacagaaatggatggcatgtccacaaaaaaaaatgtgttcatcattggcgctaccaaccggcctgacatcattgatcctgccatcctcagacctggccgtcttgatcagctcatctacatcccacttcctgatgagaagtcccgtgttgccatcctcaaggctaacctgcgcaagtccccagttgccaaggatgtggacttggagttcctggctaaaatgactaatggcttctctggagctgacctgacagagatttgccagcgtgcttgcaagctggccatccgtgaatccatcgagagtgagattaggcgagaacgagagaggcagacaaacccatcagccatggaggtagaagaggatgatccagtgcctgagatccgtcgagatcactttgaagaagccatgcgctttgcgcgccgttctgtcagtgacaatgacattcggaagtatgagatgtttgcccagacccttcagcagagtcggggctttggcagcttcagattcncttcaggaacagntggactgccctgtcgggctagtcggggggtaccagctcgattctatcatgtata

SEQ ID NO: 344387 - DNA, 2972 bp, Homo sapiens
ttacacaccaccacccacttacggctaggtacgaggctgggtgttgcgaaccgtcgtttgagtcgtcgctgccgctgccgctgccactgccactgccacctcgcggatcaggagccagcgttgttcgcccgacgcctcgctgccggtgggaggaagcgagagggaagccgcttgcgggtttgtcgccgctgctcgcccaccgcctggaagagccgagccccggcccagtcggtcgcttgccaccgctcgtagccgttacccgcgggccgccacagccgccggccgggagaggcgcgcgccatggcttctggagccgattcaaaaggtgatgacctatcaacagccattctcaaacagaagaaccgtcccaatcggttaattgttgatgaagccatcaatgaggacaacagtgtggtgtccttgtcccagcccaagatggatgaattgcagttgttccgaggtgacacagtgttgctgaaaggaaagaagagacgagaagctgtttgcatcgtcctttctgatgatacttgttctgatgagaagattcggatgaatagagttgttcggaataaccttcgtgtacgcctaggggatgtcatcagcatccagccatgccctgatgtgaagtacggcaaacgtatccatgtgctgcccattgatgacacagtggaaggcattactggtaatctcttcgaggtataccttaagccgtacttcctggaagcgtatcgacccatccggaaaggagacatttttcttgtccgtggtgggatgcgtgctgtggagttcaaagtggtggaaacagatcctagcccttattgcattgttgctccagacacagtgatccactgcgaaggggagcctatcaaacgagaggatgaggaagagtccttgaatgaagtagggtatgatgacattggtggctgcaggaagcagctagctcagataaaggagatggtggaactgcccctgagacatcctgccctctttaaggcaattggtgtgaagcctcctagaggaatcctgctttacggacctcctggaacaggaaagaccctgattgctcgagctgtagcaaatgagactggagccttcttcttcttgatcaatggtcctgagatcatgagcaaattggctggtgagtctgagagcaaccttcgtaaagcctttgaggaggctgagaagaatgctcctgccatcatcttcattgatgagctagatgccatcgctcccaaaagagagaaaactcatggcgaggtggagcggcgcattgtatcacagttgttgaccctcatggatggcctaaagcagagggcacatgtgattgttatggcagcaaccaacagacccaacagcattgacccagctctacggcgatttggtcgctttgacagggaggtagatattggaattcctgatgctacaggacgcttagagattcttcagatccataccaagaacatgaagctggcagatgatgtggacctggaacaggtagccaatgagactcacgggcatgtgggtgctgacttagcagccctgtgctcagaggctgctctgcaagccatccgcaagaagatggatctcattgacctagaggatgagaccattgatgccgaggtcatgaactctctagcagttactatggatgacttccggtgggccttgagccagagtaacccatcagcactgcgggaaaccgtggtagaggtgccacaggtaacctgggaagacatcgggggcctagaggatgtcaaacgtgagctacaggagctggtccagtatcctgtggagcacccagacaaattcctgaagtttggcatgacaccttccaagggagttctgttctatggacctcctggctgtgggaaaactttgttggccaaagccattgctaatgaatgccaggccaacttcatctccatcaagggtcctgagctgctcaccatgtggtttggggagtctgaggccaatgtcagagaaatctttgacaaggcccgccaagctgccccctgtgtgctattctttgatgagctggattcgattgccaaggctcgtggaggtaacattggagatggtggtggggctgctgaccgagtcatcaaccagatcctgacagaaatggatggcatgtccacaaaaaaaaatgtgttcatcattggcgctaccaaccggcctgacatcattgatcctgccatcctcagacctggccgtcttgatcagctcatctacatcccacttcctgatgagaagtcccgtgttgccatcctcaaggctaacctgcgcaagtccccagttgccaaggatgtggacttggagttcctggctaaaatgactaatggcttctctggagctgacctgacagagatttgccagcgtgcagtgagctggcctgcctggaccttgttccctgggggtgggggcgcttgcccaggagagggaccaggggtgcgcccacagcctgctccattctccagtctgaacagttcagctacagtctgactctggacagggggtttctgttgcaaaaatacaaaacaaaagcgataaaataaaagcgattttcatttggtaggcggagagtgaattaccaacagggaattgggccttgggcctatgccatttctgttgtagtttggggcagtgcaggggacctgtgtggggtgtgaaccaaggcactactgccacctgccacagtaaagcatctgcacttgactcaatgctgcccgagccctcccttccccctatccaacctgggtaggtgggtaggggccacagttgctggatgtttatatagagagtaggttgatttattttacatgcttttgagttaatgttggaaaactaatcacaagcagtttctaaaccaaaaaatgacatgttgtaaaaggacaataaacgttgggtcaaaatggacatttccagcatggagttcccagattacgaggtacatcaaggaacagctatgccat

SEQ ID NO: 344388 - DNA, 2119 bp, Homo sapiens
ccctgggcgtgtaatcggacgaggggaagaatgctcctgccatcatcttcattgatgagctagatgccatcgctcccaaaagagagaaaactcatggcgaggtggagcggcgcattgtatcacagttgttgaccctcatggatggcctaaagcagagggcacatgtgattgttatggcagcaaccaacagacccaacagcattgacccagctctacggcgatttggtcgctttgacagggaggtagatattggaattcctgatgctacaggacgcttagagattcttcagatccataccaagaacatgaagctggcagatgatgtggacctggaacaggtagccaatgagactcacgggcatgtgggtgctgacttagcagccctgtgctcagaggctgctctgcaagccatccgcaagaagatggatctcattgacctagaggatgagaccattgatgccgaggtcatgaactctctagcagttactatggatgacttccggtgggccttgagccagagtaacccatcagcactgcgggaaaccgtggtagaggtgccacaggtaacctgggaagacatcgggggcctagaggatgtcaaacgtgagctacaggagctggtccagtatcctgtggagcacccagacaaattcctgaagtttggcatgacaccttccaagggagttctgttctatggacctcctggctgtgggaaaactttgttggccaaagccattgctaatgaatgccaggccaacttcatctccatcaagggtcctgagctgctcaccatgtggtttggggagtctgaggccaatgtcagagaaatctttgacaaggcccgccaagctgccccctgtgtgctattctttgatgagctggattcgattgccaaggctcgtggaggtaacattggagatggtggtggggctgctgaccgagtcatcaaccagatcctgacagaaatggatggcatgtccacaaaaaaaaatgtgttcatcattggcgctaccaaccggcctgacatcattgatcctgccatcctcagacctggccgtcttgatcagctcatctacatcccacttcctgatgagaagtcccgtgttgccatcctcaaggctaacctgcgcaagtccccagttgccaaggatgtggacttggagttcctggctaaaatgactaatggcttctctggagctgacctgacagagatttgccagcgtgcttgcaagctggccatccgtgaatccatcgagagtgagattaggcgagaacgagagaggcagacaaacccatcagccatggaggtagaagaggatgatccagtgcctgagatccgtcgagatcactttgaagaagccatgcgctttgcgcgccgttctgtcagtgacaatgacattcggaagtatgagatgtttgcccagacccttcagcagagtcggggctttggcagcttcagattcccttcagggaaccagggtggagctggccccagtcagggcagtggaggcggcacaggtggcagtgtatacacagaagacaatgatgatgacctgtatggctaagtggtggtggccagcgtgcagtgagctggcctgcctggaccttgttccctgggggtgggggcgcttgcccaggagagggaccaggggtgcgcccacagcctgctccattctccagtctgaacagttcagctacagtctgactctggacagggggtttctgttgcaaaaatacaaaacaaaagcgataaaataaaagcgattttcatttggtaggcggagagtgaattaccaacagggaattgggccttgggcctatgccatttctgttgtagtttggggcagtgcaggggacctgtgtggggtgtgaaccaaggcactactgccacctgccacagtaaagcatctgcacttgactcaatgctgcccgagccctcccttccccctatccaacctgggtaggtgggtaggggccacagttgctggatgtttatatagagagtaggttgatttattttacatgcttttgagttaatgttggaaaactaatcacaagcagtttctaaaccaaaaaatgacatgttgtaaaaggacaataaacgttgggtcaaaatgga

SEQ ID NO: 344389 - DNA, 2055 bp, Homo sapiens
ttacacaccaccacccacttacggctaggtacgaggctgggtgttgcgaaccgtcgtttgagtcgtcgctgccgctgccgctgccactgccactgccacctcgcggatcaggagccagcgttgttcgcccgacgcctcgctgccggtgggaggaagcgagagggaagccgcttgcgggtttgtcgccgctgctcgcccaccgcctggaagagccgagccccggcccagtcggtcgcttgccaccgctcgtagccgttacccgcgggccgccacagccgccggccgggagaggcgcgcgccatggcttctggagccgattcaaaaggtgatgacctatcaacagccattctcaaacagaagaaccgtcccaatcggttaattgttgatgaagccatcaatgaggacaacagtgtggtgtccttgtcccagcccaagatggatgaattgcagttgttccgaggtgacacagtgttgctgaaaggaaagaagagacgagaagctgtttgcatcgtcctttctgatgatacttgttctgatgagaagattcggatgaatagagttgttcggaataaccttcgtgtacgcctaggggatgtcatcagcatccagccatgccctgatgtgaagtacggcaaacgtatccatgtgctgcccattgatgacacagtggaaggcattactggtaatctcttcgaggtataccttaagccgtacttcctggaagcgtatcgacccatccggaaaggagacatttttcttgtccgtggtgggatgcgtgctgtggagttcaaagtggtggaaacagatcctagcccttattgcattgttgctccagacacagtgatccactgcgaaggggagcctatcaaacgagaggatgaggaagagtccttgaatgaagtagggtatgatgacattggtggctgcaggaagcagctagctcagataaaggagatggtggaactgcccctgagacatcctgccctctttaaggcaattggtgtgaagcctcctagaggaatcctgctttacggacctcctggaacaggaaagaccctgattgctcgagctgtagcaaatgagactggagccttcttcttcttgatcaatggtcctgagatcatgagcaaattggctggtgagtctgagagcaaccttcgtaaagcctttgaggaggctgagaagaatgctcctgccatcatcttcattgatgagctagatgccatcgctcccaaaagagagaaaactcatggcgaggtggagcggcgcattgtatcacagttgttgaccctcatggatggcctaaagcagagggcacatgtgattgttatggcagcaaccaacagacccaacagcattgacccagctctacggcgatttggtcgctttgacagggaggtagatattggaattcctgatgctacaggacgcttagagattcttcagatccataccaagaacatgaagctggcagatgatgtggacctggaacaggtagccaatgagactcacgggcatgtgggtgctgacttagcagccctgtgctcagaggctgctctgcaagccatccgcaagaagatggatctcattgacctagaggatgagaccattgatgccgaggtcatgaactctctagcagttactatggatgacttccggtgggccttgagccagagtaacccatcagcactgcgggaaaccgtggtagaggtgccacaggtaacctgggaagacatcgggggcctagaggatgtcaaacgtgagctacaggagctggtccagtatcctgtggagcacccagacaaattcctgaagtttggcatgacaccttccaagggagttctgttctatggacctcctggctgtgggaaaactttgttggccaaagccattgctaatgaatgccaggccaacttcatctccatcaagggtcctgagctgctcaccatgtggttgatgactcggtcagcagccccaccaccatctccaatgttacctccacgagccttggcaatcgaatccagctcatcaaagaatagcacacagggggcagct

SEQ ID NO: 344390 - DNA, 1060 bp, Homo sapiens
ttacacaccaccacccacttacggctaggtacgaggctgggtgttgcgaaccgtcgtttgagtcgtcgctgccgctgccgctgccactgccactgccacctcgcggatcaggagccagcgttgttcgcccgacgcctcgctgccggtgggaggaagcgagagggaagccgcttgcgggtttgtcgccgctgctcgcccaccgcctggaagagccgagccccggcccagtcggtcgcttgccaccgctcgtagccgttacccgcgggccgccacagccgccggccgggagaggcgcgcgccatggcttctggagccgattcaaaaggtgatgacctatcaacagccattctcaaacagaagaaccgtcccaatcggttaattgttgatgaagccatcaatgaggacaacagtgtggtgtccttgtcccagcccaagatggatgaattgcagttgttccgaggtgacacagtgttgctgaaaggaaagaagagacgagaagctgtttgcatcgtcctttctgatgatacttgttctgatgagaagattcggatgaatagagttgttcggaataaccttcgtgtacgcctaggggatgtcatcagcatccagccatgccctgatgtgaagtacggcaaacgtatccatgtgctgcccattgatgacacagtggaaggcattactggtaatctcttcgaggtataccttaagccgtacttcctggaagcgtatcgacccatccggaaaggagacatttttcttgtccgtggtgggatgcgtgctgtggagttcaaagtggtggaaacagatcctagcccttattgcattgttgctccagacacagtgatccactgcgaaggggagcctatcaaacgagaggcaaagtcttgatgaagtagggatgatgaacattgggggtgaagaaacaatagtcaaataaagggatgtgggaatggcctgtaaatctggcccttaaggatggtgaaacatccaaaagaaacggttaggggatttgagaagaaaacagttgtggcatgtgaataaatgagaatatatagaaagg

SEQ ID NO: 344391 - DNA, 962 bp, Homo sapiens
aagggccctgggggtgtgcgaaaatttcgggcacggaatggcagcaagaacttttggcccatgcgtgcttgcaagctggccatccgtgaatccatcgagagtgagattaggcgagaacgagagaggcagacaaacccatcagccatggaggtagaagaggatgatccagtgcctgagatccgtcgagatcactttgaagaagccatgcgctttgcgcgccgttctgtcagtgacaatgacattcggaagtatgagatgtttgcccagacccttcagcagagtcggggctttggcagcttcagattcccttcagggaaccagggtggagctggccccagtcagggcagtggaggcggcacaggtggcagtgtatacacagaagacaatgatgatgacctgtatggctaagtggtggtggccagcgtgcagtgagctggcctgcctggaccttgttccctgggggtgggggcgcttgcccaggagagggaccaggggtgcgcccacagcctgctccattctccagtctgaacagttcagctacagtctgactctggacagggggtttctgttgcaaaaatacaaaacaaaagcgataaaataaaagcgattttcatttggtaggcggagagtgaattaccaacagggaattgggccttgggcctatgccatttctgttgtagtttggggcagtgcaggggacctgtgtggggtgtgaaccaaggcactactgccacctgccacagtaaagcatctgcacttgactcaatgctgcccgagccctcccttccccctatccaacctgggtaggtgggtaggggccacagttgctggatgtttatatagagagtaggttgatttattttacatgcttttgagttaatgttggaaaactaatcacaagcagtttctaaaccaaaaaatgacatgttgtaaaaggacaataaacgttgggtcaaaatgga

SEQ ID NO: 344392 - DNA, 1029 bp, Homo sapiens
ttacacaccaccacccacttacggctaggtacgaggctgggtgttgcgaaccgtcgtttgagtcgtcgctgccgctgccgctgccactgccactgccacctcgcggatcaggagccagcgttgttcgcccgacgcctcgctgccggtgggaggaagcgagagggaagccgcttgcgggtttgtcgccgctgctcgcccaccgcctggaagagccgagccccggcccagtcggtcgcttgccaccgctcgtagccgttacccgcgggccgccacagccgccggccgggagaggcgcgcgccatggcttctggagccgattcaaaaggtgatgacctatcaacagccattctcaaacagaagaaccgtcccaatcggttaattgttgatgaagccatcaatgaggacaacagtgtggtgtccttgtcccagcccaagatggatgaattgcagttgttccgaggtgacacagtgttgctgaaaggaaagaagagacgagaagctgtttgcatcgtcctttctgatgatacttgttctgatgagaagattcggatgaatagagttgttcggaataaccttcgtgtacgcctaggggatgtcatcagcatccagccatgccctgatgtgaagtacggcaaacgtatccatgtgctgcccattgatgacacagtggaaggcattactggtaatctcttcgaggtataccttaagccgtacttcctggaagcgtatcgacccatccggaaaacggggccttttcctggccggggggggatccgtgctgttggagtccaccgtggtggcacgatccctagcttatgcgatgtcggccagaaccagggggtccctgggaggggaccatcccacgcggtgggagccttaaaggcggtcacactggccgggacctctccaatcaggtgggcgcccgacccgcctcgggggccccccgctctcgcctccgcctggcttcaggcgctacagcctccctatcgcccagccctcctcccacgtgcgtgtagtatagttcacact

SEQ ID NO: 344393 - DNA, 629 bp, Homo sapiens
aatccgtaatatcgtattgcctttattctgatgtaacaagcgcctggcagaccttgacggtcttgtacttgtaaaacccctttccggagcgtgcagtgagctggcctgcctggaccttgttccctgggggtgggggcgcttgcccaggagagggaccaggggtgcgcccacagcctgctccattctccagtctgaacagttcagctacagtctgactctggacagggggtttctgttgcaaaaatacaaaacaaaagcgataaaataaaagcgattttcatttggtaggcggagagtgaattaccaacagggaattgggccttgggcctatgccatttctgttgtagtttggggcagtgcaggggacctgtgtggggtgtgaaccaaggcactactgccacctgccacagtaaagcatctgcacttgactcaatgctgcccgagccctcccttccccctatccaacctgggtaggtgggtaggggccacagttgctggatgtttatatagagagtaggttgatttattttacatgcttttgagttaatgttggaaaactaatcacaagcagtttctaaaccaaaaaatgacatgttgtaaaaggacaataaacgttgggtcaaaatgga

SEQ ID NO: 344394 - DNA, 306 bp, Homo sapiens
cccttgtaatattgggtcaccagtattagctagaaggggatcatccttggatatctccctgaagaccctgcatgtctttgtggggtttctaaatgtgtggctcttgattttggctcactgattaggagtgagtggggctgttccttcgccctcacttccaccctgttctccttcctctcttcgcctaaagccatcctgccttttctttttcacttactatcagctatctgtgccaggcccttttggacacccagtgcttgggcccgaagtgtggttggtaatatggagtctgcttgtcatcctcag

SEQ ID NO: 344395 - DNA, 374 bp, Homo sapiens
gcccttggtctgtctaaaattgagcccttagtgtaatggcctcttgcctttccctagtcatgtatcttcaaacgcatttggactacagtttctctgcccttagtctcctatgcaagttgcaatcataaatgttgcccactttctagcagtattttccctgctagtaatagaaatgagtgtggcctaaagtaattgtcttcttagcatttactgcggagggcttattcttaatattgtcagggttgaagcctgattctcaccctctctggagcgctagtcaagccattttagggtttgggagaaggtgggaacctaatcacactctgcattggtccaccctcctagaggaatcctgctttacggacctcctggaa

SEQ ID NO: 344396 - DNA, 193 bp, Homo sapiens
acctgggaagacatcgggggcctagaggatgtcaaacgtgagctacaggagctggtccaggtagggcaacttggtccagggtgagtcactgtctcagtacattgtaattgacctgggtgatctcagggtgtcaacacatttgctgcaagagttgtgagagcacgacttaggaacctactgttcttaggtttga

SEQ ID NO: 344397 - DNA, 404 bp, Homo sapiens
ccaggagctgctggaatgggtattgtaatatgtatggtagatactgctcctcgtgaccttggctgcctttccttcatctgagctttctggtctagggacagcttcatctattcactgtttctttcctaagtatgagttttagagactggcgaggcgcttggggcaggagtatctactgactccatttcctccttctagttcaaaaggtgatgacctatcaacagccattctcaaacagaagaaccgtcccaatcggttaattgttgatgaagccatcaatgaggacaacagtgtggtgtccttgtcccaggtaagctgtggccacagactagtctttccttactgcacttacttgagggattttcccaggtttcttttctcatttttcttgcagtgactgcaga

SEQ ID NO: 344398 - DNA, 953 bp, Homo sapiens
  misc_feature (884)..(884): n is a, c, g, or t
ttacacaccaccacccacttacggctaggtacgaggctgggtgttgcgaaccgtcgtttgagtcgtcgctgccgctgccgctgccactgccactgccacctcgcggatcaggagccagcgttgttcgcccgacgcctcgctgccggtgggaggaagcgagagggaagccgcttgcgggtttgtcgccgctgctcgcccaccgcctggaagagccgagccccggcccagtcggtcgcttgccaccgctcgtagccgttacccgcgggccgccacagccgccggccgggagaggcgcgcgccatggcttctggagccgattcaaaaggtgatgacctatcaacagccattctcaaacagaagaaccgtcccaatcggttaattgttgatgaagccatcaatgaggacaacagtgtggtgtccttgtcccagcccaagatggatgaattgcagttgttccgaggtgacacagtgttgctgaaaggaaagaagagacgagaagctgtttgcatcgtcctttctgatgatacttgttctgatgagaagattcggatgaatagagttgttcggaataaccttcgtgtacgcctaggggatgtcatcagcatccagccatgccctgatgtgaagtacggcaaacgtatccatgtgctgcccattgatgacacagtggaaggcattactggtaatctcttcgaggtataccttaagccgtacttcctggaagcgtatcgacccatccggaaaggagacatttttcttgtccgtggtgggatgcgtgctgtggagttcaaagtggtggaaacagatcctagcccttattgcattgttgctccagacacagtgatccactgcgaaggggagcctatcaaacgagagaggaaagnctgcaagaacgggataacaactggggcaggaacctactcaaaagacatggaaagcccaaaaggcctaca

SEQ ID NO: 344399 - DNA, 675 bp, Homo sapiens
aacgagatatgtcatagtacggcccgggttgcaattcagtcgcggagggctggcgtacagtcagtaagagaccgtcgtttgagtcgtcgctgccgctgccgctgccactgccactgccacctcgcggatcaggagccagcgttgttcgcccgacgcctcgctgccggtgggaggaagcgagagggaagccgcttgcgggtttgtcgccgctgctcgcccaccgcctggaagagccgagccccggcccagtcggtcgcttgccaccgctcgtagccgttacccgcgggccgccacagccgccggccgggagaggcgcgcgccatggcttctggagccgattcaaaaggtgatgacctatcaacagccattctcaaacagaagaaccgtcccaatcggttaattgttgatgaagccatcaatgaggacaacagtgtggtgtccttgtcccagcccaagatggatgaattgcagttgttccgaggtgacacagtgttgctgaaaggaaagaagagacgagaagctgtttgcatcgtcctttctgatgatacttgttctgatgagaagattcggatgaatagagttgttcggaataaccttcgtgtacgcctaggggatgtcatcagcatccagcagctatgtgaagtacggcaaacgattagagatactgtattcgtg

SEQ ID NO: 344400 - DNA, 520 bp, Homo sapiens
ctctagagtatccccccctgcaccttcctgtacgcctaggggatgtcatcagcatccagccatgccctgatgtgaagtacggcaaacgtatccatgtgctgcccattgatgacacagtggaaggcattactggtaatctcttcgaggtataccttaagccgtacttcctggaagcgtatcgacccatccggaaaggagacatttttcttgtccgtggtgggatgcgtgctgtggagttcaaagtggtggaaacagatcctagcccttattgcattgttgctccagacacagtgatccactgcgaaggggagcctatcaaacgagaggatgaggaagagtccttgaatgaagtagggtatgatgacattggtggctgcaggaagcatggggggaccatatggtggaggaaactatggtccaggaggcagtggaggaagtgggggttatggtgggaggagccgatactgagcttcttcctatttgccatgggcttcactgtataaataggagaggatgagag

SEQ ID NO: 344401 - DNA, 392 bp, Homo sapiens
aaggatcccgtgtgaagctgcactctcatacttgatttcctcatggagctggtcagactgagaatggagcctgacctgacagagatttgccagcgtgcttgcaagctggccatccgtgaatccatcgagagtgagattaggcgagaacgagagaggcagacaaacccatcagccatggtgagtctgcatcctttccccagatgtgccaatcatggagagccaggcagcagccaccaccatgccctggagttgagagtagaagctgttggaaagatcatctaactgagaagaattttaatagggcatcaaagataaagaatgctgaggtgaatccattcaatttggaataaggccgagaagagatggtcaggctccattctcagtctgaacca

SEQ ID NO: 344402 - DNA, 3275 bp, Homo sapiens
ttacacaccaccacccacttacggctaggtacgaggctgggtgttgcgaaccgtcgtttgagtcgtcgctgccgctgccgctgccactgccactgccacctcgcggatcaggagccagcgttgttcgcccgacgcctcgctgccggtgggaggaagcgagagggaagccgcttgcgggtttgtcgccgctgctcgcccaccgcctggaagagccgagccccggcccagtcggtcgcttgccaccgctcgtagccgttacccgcgggccgccacagccgccggccgggagaggcgcgcgccatggcttctggagccgattcaaaaggtgatgacctatcaacagccattctcaaacagaagaaccgtcccaatcggttaattgttgatgaagccatcaatgaggacaacagtgtggtgtccttgtcccagcccaagatggatgaattgcagttgttccgaggtgacacagtgttgctgaaaggaaagaagagacgagaagctgtttgcatcgtcctttctgatgatacttgttctgatgagaagattcggatgaatagagttgttcggaataaccttcgtgtacgcctaggggatgtcatcagcatccagccatgccctgatgtgaagtacggcaaacgtatccatgtgctgcccattgatgacacagtggaaggcattactggtaatctcttcgaggtataccttaagccgtacttcctggaagcgtatcgacccatccggaaaggagacatttttcttgtccgtggtgggatgcgtgctgtggagttcaaagtggtggaaacagatcctagcccttattgcattgttgctccagacacagtgatccactgcgaaggggagcctatcaaacgagaggatgaggaagagtccttgaatgaagtagggtatgatgacattggtggctgcaggaagcagctagctcagataaaggagatggtggaactgcccctgagacatcctgccctctttaaggcaattggtgtgaagcctcctagaggaatcctgctttacggacctcctggaacaggaaagaccctgattgctcgagctgtagcaaatgagactggagccttcttcttcttgatcaatggtcctgagatcatgagcaaattggctggtgagtctgagagcaaccttcgtaaagcctttgaggaggctgagaagaatgctcctgccatcatcttcattgatgagctagatgccatcgctcccaaaagagagaaaactcatggcgaggtggagcggcgcattgtatcacagttgttgaccctcatggatggcctaaagcagagggcacatgtgattgttatggcagcaaccaacagacccaacagcattgacccagctctacggcgatttggtcgctttgacagggaggtagatattggaattcctgatgctacaggacgcttagagattcttcagatccataccaagaacatgaagctggcagatgatgtggacctggaacaggtagccaatgagactcacgggcatgtgggtgctgacttagcagccctgtgctcagaggctgctctgcaagccatccgcaagaagatggatctcattgacctagaggatgagaccattgatgccgaggtcatgaactctctagcagttactatggatgacttccggtgggccttgagccagagtaacccatcagcactgcgggaaaccgtggtagaggtgccacaggtaacctgggaagacatcgggggcctagaggatgtcaaacgtgagctacaggagctggtccagtatcctgtggagcacccagacaaattcctgaagtttggcatgacaccttccaagggagttctgttctatggacctcctggctgtgggaaaactttgttggccaaagccattgctaatgaatgccaggccaacttcatctccatcaagggtcctgagctgctcaccatgtggtttggggagtctgaggccaatgtcagagaaatctttgacaaggcccgccaagctgccccctgtgtgctattctttgatgagctggattcgattgccaaggctcgtggaggtaacattggagatggtggtggggctgctgaccgagtcatcaaccagatcctgacagaaatggatggcatgtccacaaaaaaaaatgtgttcatcattggcgctaccaaccggcctgacatcattgatcctgccatcctcagacctggccgtcttgatcagctcatctacatcccacttcctgatgagaagtcccgtgttgccatcctcaaggctaacctgcgcaagtccccagttgccaaggatgtggacttggagttcctggctaaaatgactaatggcttctctggagctgacctgacagagatttgccagcgtgcttgcaagctggccatccgtgaatccatcgagagtgagattaggcgagaacgagagaggcagacaaacccatcagccatggaggtagaagaggatgatccagtgcctgagatccgtcgagatcactttgaagaagccatgcgctttgcgcgccgttctgtcagtgacaatgacattcggaagtatgagatgtttgcccagacccttcagcagagtcggggctttggcagcttcagattcccttcagggaaccagggtggagctggccccagtcagggcagtggaggcggcacaggtggcagtgtatacacagaagacaatgatgatgacctgtatggctaagtggtggtggccagcgtgcagtgagctggcctgcctggaccttgttccctgggggtgggggcgcttgcccaggagagggaccaggggtgcgcccacagcctgctccattctccagtctgaacagttcagctacagtctgactctggacagggggtttctgttgcaaaaatacaaaacaaaagcgataaaataaaagcgattttcatttggtaggcggagagtgaattaccaacagggaattgggccttgggcctatgccatttctgttgtagtttggggcagtgcaggggacctgtgtggggtgtgaaccaaggcactactgccacctgccacagtaaagcatctgcacttgactcaatgctgcccgagccctcccttccccctatccaacctgggtaggtgggtaggggccacagttgctggatgtttatatagagagtaggttgatttattttacatgcttttgagttaatgttggaaaactaatcacaagcagtttctaaaccaaaaaatgacatgttgtaaaaggacaataaacgttgggtcaaaatgga

SEQ ID NO: 344403 - DNA, 3265 bp, Homo sapiens
cactagctagggtataggtagcgaggctgggtggccgagaccgtcgtttgagtcgtcgctgccgctgccgctgccactgccactgccacctcgcggatcaggagccagcgttgttcgcccgacgcctcgctgccggtgggaggaagcgagagggaagccgcttgcgggtttgtcgccgctgctcgcccaccgcctggaagagccgagccccggcccagtcggtcgcttgccaccgctcgtagccgttacccgcgggccgccacagccgccggccgggagaggcgcgcgccatggcttctggagccgattcaaaaggtgatgacctatcaacagccattctcaaacagaagaaccgtcccaatcggttaattgttgatgaagccatcaatgaggacaacagtgtggtgtccttgtcccagcccaagatggatgaattgcagttgttccgaggtgacacagtgttgctgaaaggaaagaagagacgagaagctgtttgcatcgtcctttctgatgatacttgttctgatgagaagattcggatgaatagagttgttcggaataaccttcgtgtacgcctaggggatgtcatcagcatccagccatgccctgatgtgaagtacggcaaacgtatccatgtgctgcccattgatgacacagtggaaggcattactggtaatctcttcgaggtataccttaagccgtacttcctggaagcgtatcgacccatccggaaaggagacatttttcttgtccgtggtgggatgcgtgctgtggagttcaaagtggtggaaacagatcctagcccttattgcattgttgctccagacacagtgatccactgcgaaggggagcctatcaaacgagaggatgaggaagagtccttgaatgaagtagggtatgatgacattggtggctgcaggaagcagctagctcagataaaggagatggtggaactgcccctgagacatcctgccctctttaaggcaattggtgtgaagcctcctagaggaatcctgctttacggacctcctggaacaggaaagaccctgattgctcgagctgtagcaaatgagactggagccttcttcttcttgatcaatggtcctgagatcatgagcaaattggctggtgagtctgagagcaaccttcgtaaagcctttgaggaggctgagaagaatgctcctgccatcatcttcattgatgagctagatgccatcgctcccaaaagagagaaaactcatggcgaggtggagcggcgcattgtatcacagttgttgaccctcatggatggcctaaagcagagggcacatgtgattgttatggcagcaaccaacagacccaacagcattgacccagctctacggcgatttggtcgctttgacagggaggtagatattggaattcctgatgctacaggacgcttagagattcttcagatccataccaagaacatgaagctggcagatgatgtggacctggaacaggtagccaatgagactcacgggcatgtgggtgctgacttagcagccctgtgctcagaggctgctctgcaagccatccgcaagaagatggatctcattgacctagaggatgagaccattgatgccgaggtcatgaactctctagcagttactatggatgacttccggtgggccttgagccagagtaacccatcagcactgcgggaaaccgtggtagaggtgccacaggtaacctgggaagacatcgggggcctagaggatgtcaaacgtgagctacaggagctggtccagtatcctgtggagcacccagacaaattcctgaagtttggcatgacaccttccaagggagttctgttctatggacctcctggctgtgggaaaactttgttggccaaagccattgctaatgaatgccaggccaacttcatctccatcaagggtcctgagctgctcaccatgtggtttggggagtctgaggccaatgtcagagaaatctttgacaaggcccgccaagctgccccctgtgtgctattctttgatgagctggattcgattgccaaggctcgtggaggtaacattggagatggtggtggggctgctgaccgagtcatcaaccagatcctgacagaaatggatggcatgtccacaaaaaaaaatgtgttcatcattggcgctaccaaccggcctgacatcattgatcctgccatcctcagacctggccgtcttgatcagctcatctacatcccacttcctgatgagaagtcccgtgttgccatcctcaaggctaacctgcgcaagtccccagttgccaaggatgtggacttggagttcctggctaaaatgactaatggcttctctggagctgacctgacagagatttgccagcgtgcttgcaagctggccatccgtgaatccatcgagagtgagattaggcgagaacgagagaggcagacaaacccatcagccatggaggtagaagaggatgatccagtgcctgagatccgtcgagatcactttgaagaagccatgcgctttgcgcgccgttctgtcagtgacaatgacattcggaagtatgagatgtttgcccagacccttcagcagagtcggggctttggcagcttcagattcccttcagggaaccagggtggagctggccccagtcagggcagtggaggcggcacaggtggcagtgtatacacagaagacaatgatgatgacctgtatggctaagtggtggtggccagcgtgcagtgagctggcctgcctggaccttgttccctgggggtgggggcgcttgcccaggagagggaccaggggtgcgcccacagcctgctccattctccagtctgaacagttcagctacagtctgactctggacagggggtttctgttgcaaaaatacaaaacaaaagcgataaaataaaagcgattttcatttggtaggcggagagtgaattaccaacagggaattgggccttgggcctatgccatttctgttgtagtttggggcagtgcaggggacctgtgtggggtgtgaaccaaggcactactgccacctgccacagtaaagcatctgcacttgactcaatgctgcccgagccctcccttccccctatccaacctgggtaggtgggtaggggccacagttgctggatgtttatatagagagtaggttgatttattttacatgcttttgagttaatgttggaaaactaatcacaagcagtttctaaaccaaaaaatgacatgttgtaaaaggacaataaacgttgggtcaaaatgga

SEQ ID NO: 344404 - DNA, 2933 bp, Homo sapiens
ttacacaccaccacccacttacggctaggtacgaggctgggtgttgcgaaccgtcgtttgagtcgtcgctgccgctgccgctgccactgccactgccacctcgcggatcaggagccagcgttgttcgcccgacgcctcgctgccggtgggaggaagcgagagggaagccgcttgcgggtttgtcgccgctgctcgcccaccgcctggaagagccgagccccggcccagtcggtcgcttgccaccgctcgtagccgttacccgcgggccgccacagccgccggccgggagaggcgcgcgccatggcttctggagccgattcaaaaggtgatgacctatcaacagccattctcaaacagaagaaccgtcccaatcggttaattgttgatgaagccatcaatgaggacaacagtgtggtgtccttgtcccagcccaagatggatgaattgcagttgttccgaggtgacacagtgttgctgaaaggaaagaagagacgagaagctgtttgcatcgtcctttctgatgatacttgttctgatgagaagattcggatgaatagagttgttcggaataaccttcgtgtacgcctaggggatgtcatcagcatccagccatgccctgatgtgaagtacggcaaacgtatccatgtgctgcccattgatgacacagtggaaggcattactggtaatctcttcgaggtataccttaagccgtacttcctggaagcgtatcgacccatccggaaaggagacatttttcttgtccgtggtgggatgcgtgctgtggagttcaaagtggtggaaacagatcctagcccttattgcattgttgctccagacacagtgatccactgcgaaggggagcctatcaaacgagaggatgaggaagagtccttgaatgaagtagggtatgatgacattggtggctgcaggaagcagctagctcagataaaggagatggtggaactgcccctgagacatcctgccctctttaaggcaattggtgtgaagcctcctagaggaatcctgctttacggacctcctggaacaggaaagaccctgattgctcgagctgtagcaaatgagactggagccttcttcttcttgatcaatggtcctgagatcatgagcaaattggctggtgagtctgagagcaaccttcgtaaagcctttgaggaggctgagaagaatgctcctgccatcatcttcattgatgagctagatgccatcgctcccaaaagagagaaaactcatggcgaggtggagcggcgcattgtatcacagttgttgaccctcatggatggcctaaagcagagggcacatgtgattgttatggcagcaaccaacagacccaacagcattgacccagctctacggcgatttggtcgctttgacagggaggtagatattggaattcctgatgctacaggacgcttagagattcttcagatccataccaagaacatgaagctggcagatgatgtggacctggaacaggtagccaatgagactcacgggcatgtgggtgctgacttagcagccctgtgctcagaggctgctctgcaagccatccgcaagaagatggatctcattgacctagaggatgagaccattgatgccgaggtcatgaactctctagcagttactatggatgacttccggtgggccttgagccagagtaacccatcagcactgcgggaaaccgtggtagaggtgccacaggtaacctgggaagacatcgggggcctagaggatgtcaaacgtgagctacaggagctggtccagtatcctgtggagcacccagacaaattcctgaagtttggcatgacaccttccaagggagttctgttctatggacctcctggctgtgggaaaactttgttggccaaagccattgctaatgaatgccaggccaacttcatctccatcaagggtcctgagctgctcaccatgtggtttggggagtctgaggccaatgtcagagaaatctttgacaaggcccgccaagctgccccctgtgtgctattctttgatgagctggattcgattgccaaggctcgtggaggtaacattggagatggtggtggggctgctgaccgagtcatcaaccagatcctgacagaaatggatggcatgtccacaaaaaaaaatgtgttcatcattggcgctaccaaccggcctgacatcattgatcctgccatcctcagacctggccgtcttgatcagctcatctacatcccacttcctgatgagaagtcccgtgttgccatcctcaaggctaacctgcgcaagtccccagttgccaaggatgtggacttggagttcctggctaaaatgactaatggcttctctggagctgacctgacagagatttgccagcgtgcttgcaagctggccatccgtgaatccatcgagagtgagattaggcgagaacgagagaggcagacaaacccatcagccatggaggtagaagaggatgatccagtgcctgagatccgtcgagatcactttgaagaagccatgcgctttgcgcgccgttctgtcagtgacaatgacattcggaagtatgagatgtttgcccagacccttcagcagagtcggggctttggcagcttcagattcccttcagggaaccagggtggagctggccccagtcagggcagtggaggcggcacaggtggcagtgtatacacagaagacaatgatgatgacctgtatggctaagtggtggtggccagcgtgcagtgagctggcctgcctggaccttgttccctgggggtgggggcgcttgcccaggagagggaccaggggtgcgcccacagcctgctccattctccagtctgaacagttcagctacagtctgactctggacagggggtttctgttgcaaaaatacaaaacaaaagcgataaaataaaagcgattttcatttggta

SEQ ID NO: 344405 - DNA, 3976 bp, Homo sapiens
  misc_feature (3780)..(3780): n is a, c, g, or t
  misc_feature (3795)..(3795): n is a, c, g, or t
  misc_feature (3803)..(3803): n is a, c, g, or t
  misc_feature (3836)..(3836): n is a, c, g, or t
  misc_feature (3841)..(3842): n is a, c, g, or t
  misc_feature (3844)..(3844): n is a, c, g, or t
  misc_feature (3847)..(3847): n is a, c, g, or t
  misc_feature (3860)..(3860): n is a, c, g, or t
ttacacaccaccacccacttacggctaggtacgaggctgggtgttgcgaaccgtcgtttgagtcgtcgctgccgctgccgctgccactgccactgccacctcgcggatcaggagccagcgttgttcgcccgacgcctcgctgccggtgggaggaagcgagagggaagccgcttgcgggtttgtcgccgctgctcgcccaccgcctggaagagccgagccccggcccagtcggtcgcttgccaccgctcgtagccgttacccgcgggccgccacagccgccggccgggagaggcgcgcgccatggcttctggagccgattcaaaaggtgatgacctatcaacagccattctcaaacagaagaaccgtcccaatcggttaattgttgatgaagccatcaatgaggacaacagtgtggtgtccttgtcccagcccaagatggatgaattgcagttgttccgaggtgacacagtgttgctgaaaggaaagaagagacgagaagctgtttgcatcgtcctttctgatgatacttgttctgatgagaagattcggatgaatagagttgttcggaataaccttcgtgtacgcctaggggatgtcatcagcatccagccatgccctgatgtgaagtacggcaaacgtatccatgtgctgcccattgatgacacagtggaaggcattactggtaatctcttcgaggtataccttaagccgtacttcctggaagcgtatcgacccatccggaaaggagacatttttcttgtccgtggtgggatgcgtgctgtggagttcaaagtggtggaaacagatcctagcccttattgcattgttgctccagacacagtgatccactgcgaaggggagcctatcaaacgagaggatgaggaagagtccttgaatgaagtagggtatgatgacattggtggctgcaggaagcagctagctcagataaaggagatggtggaactgcccctgagacatcctgccctctttaaggcaattggtgtgaagcctcctagaggaatcctgctttacggacctcctggaacaggaaagaccctgattgctcgagctgtagcaaatgagactggagccttcttcttcttgatcaatggtcctgagatcatgagcaaattggctggtgagtctgagagcaaccttcgtaaagcctttgaggaggctgagaagaatgctcctgccatcatcttcattgatgagctagatgccatcgctcccaaaagagagaaaactcatggcgaggtggagcggcgcattgtatcacagttgttgaccctcatggatggcctaaagcagagggcacatgtgattgttatggcagcaaccaacagacccaacagcattgacccagctctacggcgatttggtcgctttgacagggaggtagatattggaattcctgatgctacaggacgcttagagattcttcagatccataccaagaacatgaagctggcagatgatgtggacctggaacaggtagccaatgagactcacgggcatgtgggtgctgacttagcagccctgtgctcagaggctgctctgcaagccatccgcaagaagatggatctcattgacctagaggatgagaccattgatgccgaggtcatgaactctctagcagttactatggatgacttccggtgggccttgagccagagtaacccatcagcactgcgggaaaccgtggtagaggtgccacaggtaacctgggaagacatcgggggcctagaggatgtcaaacgtgagctacaggagctggtccagtatcctgtggagcacccagacaaattcctgaagtttggcatgacaccttccaagggagttctgttctatggacctcctggctgtgggaaaactttgttggccaaagccattgctaatgaatgccaggccaacttcatctccatcaagggtcctgagctgctcaccatgtggtttggggagtctgaggccaatgtcagagaaatctttgacaaggcccgccaagctgccccctgtgtgctattctttgatgagctggattcgattgccaaggctcgtggaggtaacattggagatggtggtggggctgctgaccgagtcatcaaccagatcctgacagaaatggatggcatgtccacaaaaaaaaatgtgttcatcattggcgctaccaaccggcctgacatcattgatcctgccatcctcagacctggccgtcttgatcagctcatctacatcccacttcctgatgagaagtcccgtgttgccatcctcaaggctaacctgcgcaagtccccagttgccaaggatgtggacttggagttcctggctaaaatgactaatggcttctctggagctgacctgacagagatttgccagcgtgcttgcaagctggccatccgtgaatccatcgagagtgagattaggcgagaacgagagaggcagacaaacccatcagccatggaggtagaagaggatgatccagtgcctgagatccgtcgagatcactttgaagaagccatgcgctttgcgcgccgttctgtcagtgacaatgacattcggaagtatgagatgtttgcccagacccttcagcagagtcggggctttggcagcttcagattcccttcagggaaccagggtggagctggccccagtcagggcagtggaggcggcacaggtggcagtgtatacacagaagacaatgatgatgacctgtatggctaagtggtggtggccagcgtgcagtgagctggcctgcctggaccttgttccctgggggtgggggcgcttgcccaggagagggaccaggggtgcgcccacagcctgctccattctccagtctgaacagttcagctacagtctgactctggacagggggtttctgttgcaaaaatacaaaacaaaagcgataaaataaaagcgattttcatttggtaggcggagagtgaattaccaacagggaattgggccttgggcctatgccatttctgttgtagtttggggcagtgcaggggacctgtgtggggtgtgaaccaaggcactactgccacctgccacagtaaagcatctgcacttgactcaatgctgcccgagccctcccttccccctatccaacctgggtaggtgggtaggggccacagttgctggatgtttatatagagagtaggttgatttattttacatgcttttgagttaatgttggaaaactaatcacaagcagtttctaaaccaaaaaatgacatgttgtaaaaggacaataaacgttgggtcaaaatggagcctgagtcctgggccctgtgcctgcttcttttcctgggaacagccttgggctacccaccactcccaaggcattcttccaaatgtgaaatcctggaagtaagattgcaccttcttcctctcctgatcaacatcggtatgatgtctcctgttgcctcaccctttgtctgcagtatcactggataggactggtggaaagggagcagcctgacagagctccaaatgtggagaatatggcatccctccacctatatttgatgtggacggtaaggctaggcctgcaggatcccttatcctgaccaaagactgtgttggggtgccatttgaaaatcgcagggttgcaaaagaatacaatcttacttgcaggtggatattctctatactctcttttaatgcatctaaaaatcccaaacatcccctggttggtgatcacttacagttgtgtccacctttattttatgtactttgattaaaaaaaaaaaactttttgttaatataaaaaaaaanaaaaaaaaaaaaaanaacaaaanaaaaaaaaaaaaaaaaaaaaaaaaaaaaaaaanaaaannanacnagaaaaagagaanagaaagaacgagaacaagaaatgagataacaaaagaagcacacaacgaaaagaaaggaatggaggcggtgaagcgatatgtaaggtacaagatggaggacgagacgaggggcagtg

SEQ ID NO: 344406 - DNA, 3910 bp, Homo sapiens
ttacacaccaccacccacttacggctaggtacgaggctgggtgttgcgaaccgtcgtttgagtcgtcgctgccgctgccgctgccactgccactgccacctcgcggatcaggagccagcgttgttcgcccgacgcctcgctgccggtgggaggaagcgagagggaagccgcttgcgggtttgtcgccgctgctcgcccaccgcctggaagagccgagccccggcccagtcggtcgcttgccaccgctcgtagccgttacccgcgggccgccacagccgccggccgggagaggcgcgcgccatggcttctggagccgattcaaaaggtgatgacctatcaacagccattctcaaacagaagaaccgtcccaatcggttaattgttgatgaagccatcaatgaggacaacagtgtggtgtccttgtcccagcccaagatggatgaattgcagttgttccgaggtgacacagtgttgctgaaaggaaagaagagacgagaagctgtttgcatcgtcctttctgatgatacttgttctgatgagaagattcggatgaatagagttgttcggaataaccttcgtgtacgcctaggggatgtcatcagcatccagccatgccctgatgtgaagtacggcaaacgtatccatgtgctgcccattgatgacacagtggaaggcattactggtaatctcttcgaggtataccttaagccgtacttcctggaagcgtatcgacccatccggaaaggagacatttttcttgtccgtggtgggatgcgtgctgtggagttcaaagtggtggaaacagatcctagcccttattgcattgttgctccagacacagtgatccactgcgaaggggagcctatcaaacgagaggatgaggaagagtccttgaatgaagtagggtatgatgacattggtggctgcaggaagcagctagctcagataaaggagatggtggaactgcccctgagacatcctgccctctttaaggcaattggtgtgaagcctcctagaggaatcctgctttacggacctcctggaacaggaaagaccctgattgctcgagctgtagcaaatgagactggagccttcttcttcttgatcaatggtcctgagatcatgagcaaattggctggtgagtctgagagcaaccttcgtaaagcctttgaggaggctgagaagaatgctcctgccatcatcttcattgatgagctagatgccatcgctcccaaaagagagaaaactcatggcgaggtggagcggcgcattgtatcacagttgttgaccctcatggatggcctaaagcagagggcacatgtgattgttatggcagcaaccaacagacccaacagcattgacccagctctacggcgatttggtcgctttgacagggaggtagatattggaattcctgatgctacaggacgcttagagattcttcagatccataccaagaacatgaagctggcagatgatgtggacctggaacaggtagccaatgagactcacgggcatgtgggtgctgacttagcagccctgtgctcagaggctgctctgcaagccatccgcaagaagatggatctcattgacctagaggatgagaccattgatgccgaggtcatgaactctctagcagttactatggatgacttccggtgggccttgagccagagtaacccatcagcactgcgggaaaccgtggtagaggtgccacaggtaacctgggaagacatcgggggcctagaggatgtcaaacgtgagctacaggagctggtccagtatcctgtggagcacccagacaaattcctgaagtttggcatgacaccttccaagggagttctgttctatggacctcctggctgtgggaaaactttgttggccaaagccattgctaatgaatgccaggccaacttcatctccatcaagggtcctgagctgctcaccatgtggtttggggagtctgaggccaatgtcagagaaatctttgacaaggcccgccaagctgccccctgtgtgctattctttgatgagctggattcgattgccaaggctcgtggaggtaacattggagatggtggtggggctgctgaccgagtcatcaaccagatcctgacagaaatggatggcatgtccacaaaaaaaaatgtgttcatcattggcgctaccaaccggcctgacatcattgatcctgccatcctcagacctggccgtcttgatcagctcatctacatcccacttcctgatgagaagtcccgtgttgccatcctcaaggctaacctgcgcaagtccccagttgccaaggatgtggacttggagttcctggctaaaatgactaatggcttctctggagctgacctgacagagatttgccagcgtgcttgcaagctggccatccgtgaatccatcgagagtgagattaggcgagaacgagagaggcagacaaacccatcagccatggaggtagaagaggatgatccagtgcctgagatccgtcgagatcactttgaagaagccatgcgctttgcgcgccgttctgtcagtgacaatgacattcggaagtatgagatgtttgcccagacccttcagcagagtcggggctttggcagcttcagattcccttcagggaaccagggtggagctggccccagtcagggcagtggaggcggcacaggtggcagtgtatacacagaagacaatgatgatgacctgtatggctaagtggtggtggccagcgtgcagtgagctggcctgcctggaccttgttccctgggggtgggggcgcttgcccaggagagggaccaggggtgcgcccacagcctgctccattctccagtctgaacagttcagctacagtctgactctggacagggggtttctgttgcaaaaatacaaaacaaaagcgataaaataaaagcgattttcatttggtaggcggagagtgaattaccaacagggaattgggccttgggcctatgccatttctgttgtagtttggggcagtgcaggggacctgtgtggggtgtgaaccaaggcactactgccacctgccacagtaaagcatctgcacttgactcaatgctgcccgagccctcccttccccctatccaacctgggtaggtgggtaggggccacagttgctggatgtttatatagagagtaggttgatttattttacatgcttttgagttaatgttggaaaactaatcacaagcagtttctaaaccaaaaaatgacatgttgtaaaaggacaataaacgttgggtcaaaatggagcctgagtcctgggccctgtgcctgcttcttttcctgggaacagccttgggctacccaccactcccaaggcattcttccaaatgtgaaatcctggaagtaagattgcaccttcttcctctcctgatcaacatcggtatgatgtctcctgttgcctcaccctttgtctgcagtatcactggataggactggtggaaagggagcagcctgacagagctccaaatgtggagaatatggcatccctccacctatatttgatgtggacggtaaggctaggcctgcaggatcccttatcctgaccaaagactgtgttggggtgccatttgaaaatcgcagggttgcaaaagaatacaatcttacttgcaggtggatattctctatactctcttttaatgcatctaaaaatcccaaacatcccctggttggtgatcacttacagttgtgtccacctttattttatgtactttgattaaaaaaaaaaaactttttgttaatataaaatgtttccaagaagaaaatttattctattgtattattttctcattatatatttttaaaaatatccttgggggggggcccgtcaccaaattcgccctatggggagtgcgatttacaattacttgggccgcgtttttag

SEQ ID NO: 344407 - DNA, 3410 bp, Homo sapiens
  misc_feature (3342)..(3342): n is a, c, g, or t
  misc_feature (3348)..(3348): n is a, c, g, or t
  misc_feature (3352)..(3352): n is a, c, g, or t
ttacacaccaccacccacttacggctaggtacgaggctgggtgttgcgaaccgtcgtttgagtcgtcgctgccgctgccgctgccactgccactgccacctcgcggatcaggagccagcgttgttcgcccgacgcctcgctgccggtgggaggaagcgagagggaagccgcttgcgggtttgtcgccgctgctcgcccaccgcctggaagagccgagccccggcccagtcggtcgcttgccaccgctcgtagccgttacccgcgggccgccacagccgccggccgggagaggcgcgcgccatggcttctggagccgattcaaaaggtgatgacctatcaacagccattctcaaacagaagaaccgtcccaatcggttaattgttgatgaagccatcaatgaggacaacagtgtggtgtccttgtcccagcccaagatggatgaattgcagttgttccgaggtgacacagtgttgctgaaaggaaagaagagacgagaagctgtttgcatcgtcctttctgatgatacttgttctgatgagaagattcggatgaatagagttgttcggaataaccttcgtgtacgcctaggggatgtcatcagcatccagccatgccctgatgtgaagtacggcaaacgtatccatgtgctgcccattgatgacacagtggaaggcattactggtaatctcttcgaggtataccttaagccgtacttcctggaagcgtatcgacccatccggaaaggagacatttttcttgtccgtggtgggatgcgtgctgtggagttcaaagtggtggaaacagatcctagcccttattgcattgttgctccagacacagtgatccactgcgaaggggagcctatcaaacgagaggatgaggaagagtccttgaatgaagtagggtatgatgacattggtggctgcaggaagcagctagctcagataaaggagatggtggaactgcccctgagacatcctgccctctttaaggcaattggtgtgaagcctcctagaggaatcctgctttacggacctcctggaacaggaaagaccctgattgctcgagctgtagcaaatgagactggagccttcttcttcttgatcaatggtcctgagatcatgagcaaattggctggtgagtctgagagcaaccttcgtaaagcctttgaggaggctgagaagaatgctcctgccatcatcttcattgatgagctagatgccatcgctcccaaaagagagaaaactcatggcgaggtggagcggcgcattgtatcacagttgttgaccctcatggatggcctaaagcagagggcacatgtgattgttatggcagcaaccaacagacccaacagcattgacccagctctacggcgatttggtcgctttgacagggaggtagatattggaattcctgatgctacaggacgcttagagattcttcagatccataccaagaacatgaagctggcagatgatgtggacctggaacaggtagccaatgagactcacgggcatgtgggtgctgacttagcagccctgtgctcagaggctgctctgcaagccatccgcaagaagatggatctcattgacctagaggatgagaccattgatgccgaggtcatgaactctctagcagttactatggatgacttccggtgggccttgagccagagtaacccatcagcactgcgggaaaccgtggtagaggtgccacaggtaacctgggaagacatcgggggcctagaggatgtcaaacgtgagctacaggagctggtccagtatcctgtggagcacccagacaaattcctgaagtttggcatgacaccttccaagggagttctgttctatggacctcctggctgtgggaaaactttgttggccaaagccattgctaatgaatgccaggccaacttcatctccatcaagggtcctgagctgctcaccatgtggtttggggagtctgaggccaatgtcagagaaatctttgacaaggcccgccaagctgccccctgtgtgctattctttgatgagctggattcgattgccaaggctcgtggaggtaacattggagatggtggtggggctgctgaccgagtcatcaaccagatcctgacagaaatggatggcatgtccacaaaaaaaaatgtgttcatcattggcgctaccaaccggcctgacatcattgatcctgccatcctcagacctggccgtcttgatcagctcatctacatcccacttcctgatgagaagtcccgtgttgccatcctcaaggctaacctgcgcaagtccccagttgccaaggatgtggacttggagttcctggctaaaatgactaatggcttctctggagctgacctgacagagatttgccagcgtgcttgcaagctggccatccgtgaatccatcgagagtgagattaggcgagaacgagagaggcagacaaacccatcagccatggaggtagaagaggatgatccagtgcctgagatccgtcgagatcactttgaagaagccatgcgctttgcgcgccgttctgtcagtgacaatgacattcggaagtatgagatgtttgcccagacccttcagcagagtcggggctttggcagcttcagattcccttcagggaaccagggtggagctggccccagtcagggcagtggaggcggcacaggtggcagtgtatacacagaagacaatgatgatgacctgtatggctaagtggtggtggccagcgtgcagtgagctggcctgcctggaccttgttccctgggggtgggggcgcttgcccaggagagggaccaggggtgcgcccacagcctgctccattctccagtctgaacagttcagctacagtctgactctggacagggggtttctgttgcaaaaatacaaaacaaaagcgataaaataaaagcgattttcatttggtaggcggagagtgaattaccaacagggaattgggccttgggcctatgccatttctgttgtagtttggggcagtgcaggggacctgtgtggggtgtgaaccaaggcactactgccacctgccacagtaaagcatctgcacttgactcaatgctgcccgagccctcccttccccctatccaacctgggtaggtgggtaggggccacagttgctggatgtttatatagagagtaggttgatttattttacatgcttttgagttaatgttggaaaactaatcacaagcagtttctaaaccaaaaaatgacatgttgtaaaaggacaataaacgttgggtcaaaatggaaaataaaataatacatgtctactttgtaaagtgtgtgcaatgtacagaactcgagggggggcccggnccccanttcnccctataggagaggcgattacaattaccgtggccggcttttacaacgtcgggactggg

SEQ ID NO: 344408 - DNA, 3167 bp, Homo sapiens
ttacacaccaccacccacttacggctaggtacgaggctgggtgttgcgaaccgtcgtttgagtcgtcgctgccgctgccgctgccactgccactgccacctcgcggatcaggagccagcgttgttcgcccgacgcctcgctgccggtgggaggaagcgagagggaagccgcttgcgggtttgtcgccgctgctcgcccaccgcctggaagagccgagccccggcccagtcggtcgcttgccaccgctcgtagccgttacccgcgggccgccacagccgccggccgggagaggcgcgcgccatggcttctggagccgattcaaaaggtgatgacctatcaacagccattctcaaacagaagaaccgtcccaatcggttaattgttgatgaagccatcaatgaggacaacagtgtggtgtccttgtcccagcccaagatggatgaattgcagttgttccgaggtgacacagtgttgctgaaaggaaagaagagacgagaagctgtttgcatcgtcctttctgatgatacttgttctgatgagaagattcggatgaatagagttgttcggaataaccttcgtgtacgcctaggggatgtcatcagcatccagccatgccctgatgtgaagtacggcaaacgtatccatgtgctgcccattgatgacacagtggaaggcattactggtaatctcttcgaggtataccttaagccgtacttcctggaagcgtatcgacccatccggaaaggagacatttttcttgtccgtggtgggatgcgtgctgtggagttcaaagtggtggaaacagatcctagcccttattgcattgttgctccagacacagtgatccactgcgaaggggagcctatcaaacgagaggatgaggaagagtccttgaatgaacctcctagaggaatcctgctttacggacctcctggaacaggaaagaccctgattgctcgagctgtagcaaatgagactggagccttcttcttcttgatcaatggtcctgagatcatgagcaaattggctggtgagtctgagagcaaccttcgtaaagcctttgaggaggctgagaagaatgctcctgccatcatcttcattgatgagctagatgccatcgctcccaaaagagagaaaactcatggcgaggtggagcggcgcattgtatcacagttgttgaccctcatggatggcctaaagcagagggcacatgtgattgttatggcagcaaccaacagacccaacagcattgacccagctctacggcgatttggtcgctttgacagggaggtagatattggaattcctgatgctacaggacgcttagagattcttcagatccataccaagaacatgaagctggcagatgatgtggacctggaacaggtagccaatgagactcacgggcatgtgggtgctgacttagcagccctgtgctcagaggctgctctgcaagccatccgcaagaagatggatctcattgacctagaggatgagaccattgatgccgaggtcatgaactctctagcagttactatggatgacttccggtgggccttgagccagagtaacccatcagcactgcgggaaaccgtggtagaggtgccacaggtaacctgggaagacatcgggggcctagaggatgtcaaacgtgagctacaggagctggtccagtatcctgtggagcacccagacaaattcctgaagtttggcatgacaccttccaagggagttctgttctatggacctcctggctgtgggaaaactttgttggccaaagccattgctaatgaatgccaggccaacttcatctccatcaagggtcctgagctgctcaccatgtggtttggggagtctgaggccaatgtcagagaaatctttgacaaggcccgccaagctgccccctgtgtgctattctttgatgagctggattcgattgccaaggctcgtggaggtaacattggagatggtggtggggctgctgaccgagtcatcaaccagatcctgacagaaatggatggcatgtccacaaaaaaaaatgtgttcatcattggcgctaccaaccggcctgacatcattgatcctgccatcctcagacctggccgtcttgatcagctcatctacatcccacttcctgatgagaagtcccgtgttgccatcctcaaggctaacctgcgcaagtccccagttgccaaggatgtggacttggagttcctggctaaaatgactaatggcttctctggagctgacctgacagagatttgccagcgtgcttgcaagctggccatccgtgaatccatcgagagtgagattaggcgagaacgagagaggcagacaaacccatcagccatggaggtagaagaggatgatccagtgcctgagatccgtcgagatcactttgaagaagccatgcgctttgcgcgccgttctgtcagtgacaatgacattcggaagtatgagatgtttgcccagacccttcagcagagtcggggctttggcagcttcagattcccttcagggaaccagggtggagctggccccagtcagggcagtggaggcggcacaggtggcagtgtatacacagaagacaatgatgatgacctgtatggctaagtggtggtggccagcgtgcagtgagctggcctgcctggaccttgttccctgggggtgggggcgcttgcccaggagagggaccaggggtgcgcccacagcctgctccattctccagtctgaacagttcagctacagtctgactctggacagggggtttctgttgcaaaaatacaaaacaaaagcgataaaataaaagcgattttcatttggtaggcggagagtgaattaccaacagggaattgggccttgggcctatgccatttctgttgtagtttggggcagtgcaggggacctgtgtggggtgtgaaccaaggcactactgccacctgccacagtaaagcatctgcacttgactcaatgctgcccgagccctcccttccccctatccaacctgggtaggtgggtaggggccacagttgctggatgtttatatagagagtaggttgatttattttacatgcttttgagttaatgttggaaaactaatcacaagcagtttctaaaccaaaaaatgacatgttgtaaaaggacaataaacgttgggtcaaaatgga

SEQ ID NO: 344409 - DNA, 3143 bp, Homo sapiens
ttacacaccaccacccacttacggctaggtacgaggctgggtgttgcgaaccgtcgtttgagtcgtcgctgccgctgccgctgccactgccactgccacctcgcggatcaggagccagcgttgttcgcccgacgcctcgctgccggtgggaggaagcgagagggaagccgcttgcgggtttgtcgccgctgctcgcccaccgcctggaagagccgagccccggcccagtcggtcgcttgccaccgctcgtagccgttacccgcgggccgccacagccgccggccgggagaggcgcgcgccatggcttctggagccgattcaaaaggtgatgacctatcaacagccattctcaaacagaagaaccgtcccaatcggttaattgttgatgaagccatcaatgaggacaacagtgtggtgtccttgtcccagcccaagatggatgaattgcagttgttccgaggtgacacagtgttgctgaaaggaaagaagagacgagaagctgtttgcatcgtcctttctgatgatacttgttctgatgagaagattcggatgaatagagttgttcggaataaccttcgtgtacgcctaggggatgtcatcagcatccagccatgccctgatgtgaagtacggcaaacgtatccatgtgctgcccattgatgacacagtggaaggcattactggtaatctcttcgaggtataccttaagccgtacttcctggaagcgtatcgacccatccggaaaggagacatttttcttgtccgtggtgggatgcgtgctgtggagttcaaagtggtggaaacagatcctagcccttattgcattgttgctccagacacagtgatccactgcgaaggggagcctatcaaacgagagcctcctagaggaatcctgctttacggacctcctggaacaggaaagaccctgattgctcgagctgtagcaaatgagactggagccttcttcttcttgatcaatggtcctgagatcatgagcaaattggctggtgagtctgagagcaaccttcgtaaagcctttgaggaggctgagaagaatgctcctgccatcatcttcattgatgagctagatgccatcgctcccaaaagagagaaaactcatggcgaggtggagcggcgcattgtatcacagttgttgaccctcatggatggcctaaagcagagggcacatgtgattgttatggcagcaaccaacagacccaacagcattgacccagctctacggcgatttggtcgctttgacagggaggtagatattggaattcctgatgctacaggacgcttagagattcttcagatccataccaagaacatgaagctggcagatgatgtggacctggaacaggtagccaatgagactcacgggcatgtgggtgctgacttagcagccctgtgctcagaggctgctctgcaagccatccgcaagaagatggatctcattgacctagaggatgagaccattgatgccgaggtcatgaactctctagcagttactatggatgacttccggtgggccttgagccagagtaacccatcagcactgcgggaaaccgtggtagaggtgccacaggtaacctgggaagacatcgggggcctagaggatgtcaaacgtgagctacaggagctggtccagtatcctgtggagcacccagacaaattcctgaagtttggcatgacaccttccaagggagttctgttctatggacctcctggctgtgggaaaactttgttggccaaagccattgctaatgaatgccaggccaacttcatctccatcaagggtcctgagctgctcaccatgtggtttggggagtctgaggccaatgtcagagaaatctttgacaaggcccgccaagctgccccctgtgtgctattctttgatgagctggattcgattgccaaggctcgtggaggtaacattggagatggtggtggggctgctgaccgagtcatcaaccagatcctgacagaaatggatggcatgtccacaaaaaaaaatgtgttcatcattggcgctaccaaccggcctgacatcattgatcctgccatcctcagacctggccgtcttgatcagctcatctacatcccacttcctgatgagaagtcccgtgttgccatcctcaaggctaacctgcgcaagtccccagttgccaaggatgtggacttggagttcctggctaaaatgactaatggcttctctggagctgacctgacagagatttgccagcgtgcttgcaagctggccatccgtgaatccatcgagagtgagattaggcgagaacgagagaggcagacaaacccatcagccatggaggtagaagaggatgatccagtgcctgagatccgtcgagatcactttgaagaagccatgcgctttgcgcgccgttctgtcagtgacaatgacattcggaagtatgagatgtttgcccagacccttcagcagagtcggggctttggcagcttcagattcccttcagggaaccagggtggagctggccccagtcagggcagtggaggcggcacaggtggcagtgtatacacagaagacaatgatgatgacctgtatggctaagtggtggtggccagcgtgcagtgagctggcctgcctggaccttgttccctgggggtgggggcgcttgcccaggagagggaccaggggtgcgcccacagcctgctccattctccagtctgaacagttcagctacagtctgactctggacagggggtttctgttgcaaaaatacaaaacaaaagcgataaaataaaagcgattttcatttggtaggcggagagtgaattaccaacagggaattgggccttgggcctatgccatttctgttgtagtttggggcagtgcaggggacctgtgtggggtgtgaaccaaggcactactgccacctgccacagtaaagcatctgcacttgactcaatgctgcccgagccctcccttccccctatccaacctgggtaggtgggtaggggccacagttgctggatgtttatatagagagtaggttgatttattttacatgcttttgagttaatgttggaaaactaatcacaagcagtttctaaaccaaaaaatgacatgttgtaaaaggacaataaacgttgggtcaaaatgga

SEQ ID NO: 344410 - DNA, 3335 bp, Homo sapiens
ttacacaccaccacccacttacggctaggtacgaggctgggtgttgcgaaccgtcgtttgagtcgtcgctgccgctgccgctgccactgccactgccacctcgcggatcaggagccagcgttgttcgcccgacgcctcgctgccggtgggaggaagcgagagggaagccgcttgcgggtttgtcgccgctgctcgcccaccgcctggaagagccgagccccggcccagtcggtcgcttgccaccgctcgtagccgttacccgcgggccgccacagccgccggccgggagaggcgcgcgccatggcttctggagccgagtgagtgtgcgcgcgccgttcgcttgctgcggcggcgcgcaccgggaccagccgcgcaggttcaaaaggtgatgacctatcaacagccattctcaaacagaagaaccgtcccaatcggttaattgttgatgaagccatcaatgaggacaacagtgtggtgtccttgtcccagcccaagatggatgaattgcagttgttccgaggtgacacagtgttgctgaaaggaaagaagagacgagaagctgtttgcatcgtcctttctgatgatacttgttctgatgagaagattcggatgaatagagttgttcggaataaccttcgtgtacgcctaggggatgtcatcagcatccagccatgccctgatgtgaagtacggcaaacgtatccatgtgctgcccattgatgacacagtggaaggcattactggtaatctcttcgaggtataccttaagccgtacttcctggaagcgtatcgacccatccggaaaggagacatttttcttgtccgtggtgggatgcgtgctgtggagttcaaagtggtggaaacagatcctagcccttattgcattgttgctccagacacagtgatccactgcgaaggggagcctatcaaacgagaggatgaggaagagtccttgaatgaagtagggtatgatgacattggtggctgcaggaagcagctagctcagataaaggagatggtggaactgcccctgagacatcctgccctctttaaggcaattggtgtgaagcctcctagaggaatcctgctttacggacctcctggaacaggaaagaccctgattgctcgagctgtagcaaatgagactggagccttcttcttcttgatcaatggtcctgagatcatgagcaaattggctggtgagtctgagagcaaccttcgtaaagcctttgaggaggctgagaagaatgctcctgccatcatcttcattgatgagctagatgccatcgctcccaaaagagagaaaactcatggcgaggtggagcggcgcattgtatcacagttgttgaccctcatggatggcctaaagcagagggcacatgtgattgttatggcagcaaccaacagacccaacagcattgacccagctctacggcgatttggtcgctttgacagggaggtagatattggaattcctgatgctacaggacgcttagagattcttcagatccataccaagaacatgaagctggcagatgatgtggacctggaacaggtagccaatgagactcacgggcatgtgggtgctgacttagcagccctgtgctcagaggctgctctgcaagccatccgcaagaagatggatctcattgacctagaggatgagaccattgatgccgaggtcatgaactctctagcagttactatggatgacttccggtgggccttgagccagagtaacccatcagcactgcgggaaaccgtggtagaggtgccacaggtaacctgggaagacatcgggggcctagaggatgtcaaacgtgagctacaggagctggtccagtatcctgtggagcacccagacaaattcctgaagtttggcatgacaccttccaagggagttctgttctatggacctcctggctgtgggaaaactttgttggccaaagccattgctaatgaatgccaggccaacttcatctccatcaagggtcctgagctgctcaccatgtggtttggggagtctgaggccaatgtcagagaaatctttgacaaggcccgccaagctgccccctgtgtgctattctttgatgagctggattcgattgccaaggctcgtggaggtaacattggagatggtggtggggctgctgaccgagtcatcaaccagatcctgacagaaatggatggcatgtccacaaaaaaaaatgtgttcatcattggcgctaccaaccggcctgacatcattgatcctgccatcctcagacctggccgtcttgatcagctcatctacatcccacttcctgatgagaagtcccgtgttgccatcctcaaggctaacctgcgcaagtccccagttgccaaggatgtggacttggagttcctggctaaaatgactaatggcttctctggagctgacctgacagagatttgccagcgtgcttgcaagctggccatccgtgaatccatcgagagtgagattaggcgagaacgagagaggcagacaaacccatcagccatggaggtagaagaggatgatccagtgcctgagatccgtcgagatcactttgaagaagccatgcgctttgcgcgccgttctgtcagtgacaatgacattcggaagtatgagatgtttgcccagacccttcagcagagtcggggctttggcagcttcagattcccttcagggaaccagggtggagctggccccagtcagggcagtggaggcggcacaggtggcagtgtatacacagaagacaatgatgatgacctgtatggctaagtggtggtggccagcgtgcagtgagctggcctgcctggaccttgttccctgggggtgggggcgcttgcccaggagagggaccaggggtgcgcccacagcctgctccattctccagtctgaacagttcagctacagtctgactctggacagggggtttctgttgcaaaaatacaaaacaaaagcgataaaataaaagcgattttcatttggtaggcggagagtgaattaccaacagggaattgggccttgggcctatgccatttctgttgtagtttggggcagtgcaggggacctgtgtggggtgtgaaccaaggcactactgccacctgccacagtaaagcatctgcacttgactcaatgctgcccgagccctcccttccccctatccaacctgggtaggtgggtaggggccacagttgctggatgtttatatagagagtaggttgatttattttacatgcttttgagttaatgttggaaaactaatcacaagcagtttctaaaccaaaaaatgacatgttgtaaaaggacaataaacgttgggtcaaaatgga

SEQ ID NO: 344411 - DNA, 2944 bp, Homo sapiens
ttacacaccaccacccacttacggctaggtacgaggctgggtgttgcgaaccgtcgtttgagtcgtcgctgccgctgccgctgccactgccactgccacctcgcggatcaggagccagcgttgttcgcccgacgcctcgctgccggtgggaggaagcgagagggaagccgcttgcgggtttgtcgccgctgctcgcccaccgcctggaagagccgagccccggcccagtcggtcgcttgccaccgctcgtagccgttacccgcgggccgccacagccgccggccgggagaggcgcgcgccatggcttctggagccgattcaaaaggtgatgacctatcaacagccattctcaaacagaagaaccgtcccaatcggttaattgttgatgaagccatcaatgaggacaacagtgtggtgtccttgtcccagcccaagatggatgaattgcagttgttccgaggtgacacagtgttgctgaaaggaaagaagagacgagaagctgtttgcatcgtcctttctgatgatacttgttctgatgagaagattcggatgaatagagttgttcggaataaccttcgtgtacgcctaggggatgtcatcagcatccagccatgccctgatgtgaagtacggcaaacgtatccatgtgctgcccattgatgacacagtggaaggcattactggtaatctcttcgaggtataccttaagccgtacttcctggaagcgtatcgacccatccggaaaggagacatttttcttgtccgtggtgggatgcgtgctgtggagttcaaagtggtggaaacagatcctagcccttattgcattgttgctccagacacagtgatccactgcgaaggggagcctatcaaacgagaggatgaggaagagtccttgaatgaagtagggtatgatgacattggtggctgcaggaagcagctagctcagataaaggagatggtggaactgcccctgagacatcctgccctctttaaggcaattggtgtgaagcctcctagaggaatcctgctttacggacctcctggaacaggaaagaccctgattgctcgagctgtagcaaatgagactggagccttcttcttcttgatcaatggtcctgagatcatgagcaaattggctggtgagtctgagagcaaccttcgtaaagcctttgaggaggctgagaagaatgctcctgccatcatcttcattgatgagctagatgccatcgctcccaaaagagagaaaactcatggcgaggtggagcggcgcattgtatcacagttgttgaccctcatggatggcctaaagcagagggcacatgtgattgttatggcagcaaccaacagacccaacagcattgacccagctctacggcgatttggtcgctttgacagggaggtagatattggaattcctgatgctacaggacgcttagagattcttcagatccataccaagaacatgaagctggcagatgatgtggacctggaacaggtagccaatgagactcacgggcatgtgggtgctgacttagcagccctgtgctcagaggctgctctgcaagccatccgcaagaagatggatctcattgacctagaggatgagaccattgatgccgaggtcatgaactctctagcagttactatggatgacttccggtgggccttgagccagagtaacccatcagcactgcgggaaaccgtggtagaggtgccacaggtaacctgggaagacatcgggggcctagaggatgtcaaacgtgagctacaggagctggtccagtatcctgtggagcacccagacaaattcctgaagtttggcatgacaccttccaagggagttctgttctatggacctcctggctgtgggaaaactttgttggccaaagccattgctaatgaatgccaggccaacttcatctccatcaagggtcctgagctgctcaccatgtggtttggggagtctgaggccaatgtcagagaaatctttgacaaggcccgccaagctgccccctgtgtgctattctttgatgagctggattcgattgccaaggctcgtggaggtaacattggagatggtggtggggctgctgaccgagtcatcaaccagatcctgacagaaatggatggcatgtccacaaaaaaaaatgtgttcatcattggcgctaccaaccggcctgacatcattgatcctgccatcctcagacctggccgtcttgatcagctcatctacatcccacttcctgatgagaagtcccgtgttgccatcctcaaggctaacctgcgcaagtccccagttgccaaggatgtggacttggagttcctggctaaaatgactaatggcttctctggagctgacctgacagagatttgccagcgtgcttgcaagctggccatccgtgaatccatcgagagtgagattaggcgagaacgagagaggcagacaaacccatcagccatggaggtagaagaggatgatccagtgcctgagatccgtcgagatcactttgaagaagccatgcgctttgcgcgccgttctgtcagtgacaatgacattcggaagtatgagatgtttgcccagacccttcagcagagtcggggctttggcagcttcagattcccttcagggaaccagggtggagctggccccagtcagggcagtggaggcggcacaggtggcagtgtatacacagaagacaatgatgatgacctgtatggctaagtggtggtggccagcgtgcagtgagctggcctgcctggaccttgttccctgggggtgggggcgcttgcccaggagagggaccaggggtgcgcccacagcctgctccattctccagtctgaacagttcagctacagtctgactctggacagggggtttgtggggcgggagaaacaaagtttttttttttttttttaaaaacagattttcttttggaaaaaaaaa

SEQ ID NO: 344412 - DNA, 2916 bp, Homo sapiens
ttacacaccaccacccacttacggctaggtacgaggctgggtgttgcgaaccgtcgtttgagtcgtcgctgccgctgccgctgccactgccactgccacctcgcggatcaggagccagcgttgttcgcccgacgcctcgctgccggtgggaggaagcgagagggaagccgcttgcgggtttgtcgccgctgctcgcccaccgcctggaagagccgagccccggcccagtcggtcgcttgccaccgctcgtagccgttacccgcgggccgccacagccgccggccgggagaggcgcgcgccatggcttctggagccgattcaaaaggtgatgacctatcaacagccattctcaaacagaagaaccgtcccaatcggttaattgttgatgaagccatcaatgaggacaacagtgtggtgtccttgtcccagcccaagatggatgaattgcagttgttccgaggtgacacagtgttgctgaaaggaaagaagagacgagaagctgtttgcatcgtcctttctgatgatacttgttctgatgagaagattcggatgaatagagttgttcggaataaccttcgtgtacgcctaggggatgtcatcagcatccagccatgccctgatgtgaagtacggcaaacgtatccatgtgctgcccattgatgacacagtggaaggcattactggtaatctcttcgaggtataccttaagccgtacttcctggaagcgtatcgacccatccggaaaggagacatttttcttgtccgtggtgggatgcgtgctgtggagttcaaagtggtggaaacagatcctagcccttattgcattgttgctccagacacagtgatccactgcgaaggggagcctatcaaacgagaggatgaggaagagtccttgaatgaagtagggtatgatgacattggtggctgcaggaagcagctagctcagataaaggagatggtggaactgcccctgagacatcctgccctctttaaggcaattggtgtgaagcctcctagaggaatcctgctttacggacctcctggaacaggaaagaccctgattgctcgagctgtagcaaatgagactggagccttcttcttcttgatcaatggtcctgagatcatgagcaaattggctggtgagtctgagagcaaccttcgtaaagcctttgaggaggctgagaagaatgctcctgccatcatcttcattgatgagctagatgccatcgctcccaaaagagagaaaactcatggcgaggtggagcggcgcattgtatcacagttgttgaccctcatggatggcctaaagcagagggcacatgtgattgttatggcagcaaccaacagacccaacagcattgacccagctctacggcgatttggtcgctttgacagggaggtagatattggaattcctgatgctacaggacgcttagagattcttcagatccataccaagaacatgaagctggcagatgatgtggacctggaacaggtagccaatgagactcacgggcatgtgggtgctgacttagcagccctgtgctcagaggctgctctgcaagccatccgcaagaagatggatctcattgacctagaggatgagaccattgatgccgaggtcatgaactctctagcagttactatggatgacttccggtgggccttgagccagagtaacccatcagcactgcgggaaaccgtggtagaggtgccacaggtaacctgggaagacatcgggggcctagaggatgtcaaacgtgagctacaggagctggtccagtatcctgtggagcacccagacaaattcctgaagtttggcatgacaccttccaagggagttctgttctatggacctcctggctgtgggaaaactttgttggccaaagccattgctaatgaatgccaggccaacttcatctccatcaagggtcctgagctgctcaccatgtggtttggggagtctgaggccaatgtcagagaaatctttgacaaggcccgccaagctgccccctgtgtgctattctttgatgagctggattcgattgccaaggctcgtggaggtaacattggagatggtggtggggctgctgaccgagtcatcaaccagatcctgacagaaatggatggcatgtccacaaaaaaaaatgtgttcatcattggcgctaccaaccggcctgacatcattgatcctgccatcctcagacctggccgtcttgatcagctcatctacatcccacttcctgatgagaagtcccgtgttgccatcctcaaggctaacctgcgcaagtccccagttgccaaggatgtggacttggagttcctggctaaaatgactaatggcttctctggagctgacctgacagagatttgccagcgtgcagtgagctggcctgcctggaccttgttccctgggggtgggggcgcttgcccaggagagggaccaggggtgcgcccacagcctgctccattctccagtctgaacagttcagctacagtctgactctggacagggggtttctgttgcaaaaatacaaaacaaaagcgataaaataaaagcgattttcatttggtaggcggagagtgaattaccaacagggaattgggccttgggcctatgccatttctgttgtagtttggggcagtgcaggggacctgtgtggggtgtgaaccaaggcactactgccacctgccacagtaaagcatctgcacttgactcaatgctgcccgagccctcccttccccctatccaacctgggtaggtgggtaggggccacagttgctggatgtttatatagagagtaggttgatttattttacatgcttttgagttaatgttggaaaactaatcacaagcagtttctaaaccaaaaaatgacatgttgtaaaaggacaataaacgttgggtcaaaatgga

SEQ ID NO: 344413 - DNA, 2688 bp, Homo sapiens
ttacacaccaccacccacttacggctaggtacgaggctgggtgttgcgaaccgtcgtttgagtcgtcgctgccgctgccgctgccactgccactgccacctcgcggatcaggagccagcgttgttcgcccgacgcctcgctgccggtgggaggaagcgagagggaagccgcttgcgggtttgtcgccgctgctcgcccaccgcctggaagagccgagccccggcccagtcggtcgcttgccaccgctcgtagccgttacccgcgggccgccacagccgccggccgggagaggcgcgcgccatggcttctggagccgattcaaaaggtgatgacctatcaacagccattctcaaacagaagaaccgtcccaatcggttaattgttgatgaagccatcaatgaggacaacagtgtggtgtccttgtcccagcccaagatggatgaattgcagttgttccgaggtgacacagtgttgctgaaaggaaagaagagacgagaagctgtttgcatcgtcctttctgatgatacttgttctgatgagaagattcggatgaatagagttgttcggaataaccttcgtgtacgcctaggggatgtcatcagcatccagccatgccctgatgtgaagtacggcaaacgtatccatgtgctgcccattgatgacacagtggaaggcattactggtaatctcttcgaggtataccttaagccgtacttcctggaagcgtatcgacccatccggaaaggagacatttttcttgtccgtggtgggatgcgtgctgtggagttcaaagtggtggaaacagatcctagcccttattgcattgttgctccagacacagtgatccactgcgaaggggagcctatcaaacgagaggatgaggaagagtccttgaatgaagtagggtatgatgacattggtggctgcaggaagcagctagctcagataaaggagatggtggaactgcccctgagacatcctgccctctttaaggcaattggtgtgaagcctcctagaggaatcctgctttacggacctcctggaacaggaaagaccctgattgctcgagctgtagcaaatgagactggagccttcttcttcttgatcaatggtcctgagatcatgagcaaattggctggtgagtctgagagcaaccttcgtaaagcctttgaggaggctgagaagaatgctcctgccatcatcttcattgatgagctagatgccatcgctcccaaaagagagaaaactcatggcgaggtggagcggcgcattgtatcacagttgttgaccctcatggatggcctaaagcagagggcacatgtgattgttatggcagcaaccaacagacccaacagcattgacccagctctacggcgatttggtcgctttgacagggaggtagatattggaattcctgatgctacaggacgcttagagattcttcagatccataccaagaacatgaagctggcagatgatgtggacctggaacaggtagccaatgagactcacgggcatgtgggtgctgacttagcagccctgtgctcagaggctgctctgcaagccatccgcaagaagatggatctcattgacctagaggatgagaccattgatgccgaggtcatgaactctctagcagttactatggatgacttccggtgggccttgagccagagtaacccatcagcactgcgggaaaccgtggtagaggtgccacaggtaacctgggaagacatcgggggcctagaggatgtcaaacgtgagctacaggagctggtccagtatcctgtggagcacccagacaaattcctgaagtttggcatgacaccttccaagggagttctgttctatggacctcctggctgtgggaaaactttgttggccaaagccattgctaatgaatgccaggccaacttcatctccatcaagggtcctgagctgctcaccatgtggtttggggagtctgaggccaatgtcagagaaatctttgacaaggcccgccaagctgccccctgtgtgctattctttgatgagctggattcgattgccaaggctcgtggaggtaacattggagatggtggtggggctgctgaccgagtcatcaaccagatcctgacagaaatggatggcatgtccacaaaaaaaaatgtgttcatcattggcgctaccaaccggcctgacatcattgatcctgccatcctcagacctggccgtcttgatcagctcatctacatcccacttcctgatgagaagtcccgtgttgccatcctcaaggctaacctgcgcaagtccccagttgccaaggatgtggacttggagttcctggctaaaatgactaatggcttctctggagctgacctgacagagatttgccagcgtgcttgcaagctggccatccgtgaatccatcgagaatcactttgaagaagccatgcgctttgcgcgccgttctgtcagtgacaatgacattcggaacatctgcacttgactcaatgctgcccgagccctcccttccccctatccaacctgggtaggtgggtaggggccacagttgctggatgtttatatagagagtaggttgatttattttacatgcttttgagttaatgttggaaaactaatcacaagcagtttctaaaccaaaaaatgacatgttgtaaaaggacaataaacgttgggtcaaaatgga

SEQ ID NO: 344414 - DNA, 2224 bp, Homo sapiens
ttacacaccaccacccacttacggctaggtacgaggctgggtgttgcgaaccgtcgtttgagtcgtcgctgccgctgccgctgccactgccactgccacctcgcggatcaggagccagcgttgttcgcccgacgcctcgctgccggtgggaggaagcgagagggaagccgcttgcgggtttgtcgccgctgctcgcccaccgcctggaagagccgagccccggcccagtcggtcgcttgccaccgctcgtagccgttacccgcgggccgccacagccgccggccgggagaggcgcgcgccatggcttctggagccgattcaaaaggtgatgacctatcaacagccattctcaaacagaagaaccgtcccaatcggttaattgttgatgaagccatcaatgaggacaacagtgtggtgtccttgtcccagcccaagatggatgaattgcagttgttccgaggtgacacagtgttgctgaaaggaaagaagagacgagaagctgtttgcatcgtcctttctgatgatacttgttctgatgagaagattcggatgaatagagttgttcggaataaccttcgtgtacgcctaggggatgtcatcagcatccagccatgccctgatgtgaagtacggcaaacgtatccatgtgctgcccattgatgacacagtggaaggcattactggtaatctcttcgaggtataccttaagccgtacttcctggaagcgtatcgacccatccggaaaggagacatttttcttgtccgtggtgggatgcgtgctgtggagttcaaagtggtggaaacagatcctagcccttattgcattgttgctccagacacagtgatccactgcgaaggggagcctatcaaacgagaggatgaggaagagtccttgaatgaagtagggtatgatgacattggtggctgcaggaagcagctagctcagataaaggagatggtggaactgcccctgagacatcctgccctctttaaggcaattggtgtgaagcctcctagaggaatcctgctttacggacctcctggaacaggaaagaccctgattgctcgagctgtagcaaatgagactggagccttcttcttcttgatcaatggtcctgagatcatgagcaaattggctggtgagtctgagagcaaccttcgtaaagcctttgaggaggctgagaagaatgctcctgccatcatcttcattgatgagctagatgccatcgctcccaaaagagagaaaactcatggcgaggtggagcggcgcattgtatcacagttgttgaccctcatggatggcctaaagcagagggcacatgtgattgttatggcagcaaccaacagacccaacagcattgacccagctctacggcgatttggtcgctttgacagggaggtagatattggaattcctgatgctacaggacgcttagagattcttcagatccataccaagaacatgaagctggcagatgatgtggacctggaacaggtagccaatgagactcacgggcatgtgggtgctgacttagcagccctgtgctcagaggctgctctgcaagccatccgcaagaagatggatctcattgacctagaggatgagaccattgatgccgaggtcatgaactctctagcagttactatggatgacttccggtgggccttgagccagagtaacccatcagcactgcgggaaaccgtggtagaggtgccacaggtaacctgggaagacatcgggggcctagaggatgtcaaacgtgagctacaggagctggtccagtatcctgtggagcacccagacaaattcctgaagtttggcatgacaccttccaagggagttctgttctatggacctcctggctgtgggaaaactttgttggccaaagccattgctaatgaatgccaggccaacttcatctccatcaagggtcctgagctgctcaccatgtggtttggggagtctgaggccaatgtcagagaaatctttgacaaggcccgccaagctgccccctgtgtgctattctttgatgagctggattcgattgccaaggctcgtggaggtaacattggagatggtggtggggctgctgaccgagtcatcaaccagatcctgacagaaatggatggcaggatcaatgatgtcaggccggttggtagcgccaatgatgaacacattttttttttgtggacatgccatccatttctggttggatgttgattgg

SEQ ID NO: 344415 - DNA, 1845 bp, Homo sapiens
  misc_feature (1668)..(1669): n is a, c, g, or t
  misc_feature (1671)..(1671): n is a, c, g, or t
  misc_feature (1680)..(1680): n is a, c, g, or t
  misc_feature (1682)..(1682): n is a, c, g, or t
ttacacaccaccacccacttacggctaggtacgaggctgggtgttgcgaaccgtcgtttgagtcgtcgctgccgctgccgctgccactgccactgccacctcgcggatcaggagccagcgttgttcgcccgacgcctcgctgccggtgggaggaagcgagagggaagccgcttgcgggtttgtcgccgctgctcgcccaccgcctggaagagccgagccccggcccagtcggtcgcttgccaccgctcgtagccgttacccgcgggccgccacagccgccggccgggagaggcgcgcgccatggcttctggagccgattcaaaaggtgatgacctatcaacagccattctcaaacagaagaaccgtcccaatcggttaattgttgatgaagccatcaatgaggacaacagtgtggtgtccttgtcccagcccaagatggatgaattgcagttgttccgaggtgacacagtgttgctgaaaggaaagaagagacgagaagctgtttgcatcgtcctttctgatgatacttgttctgatgagaagattcggatgaatagagttgttcggaataaccttcgtgtacgcctaggggatgtcatcagcatccagccatgccctgatgtgaagtacggcaaacgtatccatgtgctgcccattgatgacacagtggaaggcattactggtaatctcttcgaggtataccttaagccgtacttcctggaagcgtatcgacccatccggaaaggagacatttttcttgtccgtggtgggatgcgtgctgtggagttcaaagtggtggaaacagatcctagcccttattgcattgttgctccagacacagtgatccactgcgaaggggagcctatcaaacgagaggatgaggaagagtccttgaatgaagtagggtatgatgacattggtggctgcaggaagcagctagctcagataaaggagatggtggaactgcccctgagacatcctgccctctttaaggcaattggtgtgaagcctcctagaggaatcctgctttacggacctcctggaacaggaaagaccctgattgctcgagctgtagcaaatgagactggagccttcttcttcttgatcaatggtcctgagatcatgagcaaattggctggtgagtctgagagcaaccttcgtaaagcctttgaggaggctgagaagaatgctcctgccatcatcttcattgatgagctagatgccatcgctcccaaaagagagaaaactcatggcgaggtggagcggcgcattgtatcacagttgttgaccctcatggatggcctaaagcagagggcacatgtgattgttatggcagcaaccaacagacccaacagcattgacccagctctacggcgatttggtcgctttgacagggaggtagatattggaattcctgatgctacaggacgcttagagattcttcagatccataccaagaacatgaagctggcagatgatgtggacctggaacaggtagccaatgagactcacgggcatgtgggtgctgacttagcagccctgtgctcagaggctgctctgcaagccatccgcaagaagatggatctcattgacctagaggatgagaccattgatgccgaggtcatgaactctctagcagttactatggatgacttccggggctgagcnnantaaccatanantggggaacgggtaagtgccaggtacctgggagactcgggggcagaggagtcaggtgagcaggcggctttttgcgggcccgaatctgagtgggatgcctgggggaattgccgttttgttgcggccctagggggcgtggggcaaatgcccgtttgaggcgcaaag

SEQ ID NO: 344416 - DNA, 806 bp, Homo sapiens
ttacacaccaccacccacttacggctaggtacgaggctgggtgttgcgaaccgtcgtttgagtcgtcgctgccgctgccgctgccactgccactgccacctcgcggatcaggagccagcgttgttcgcccgacgcctcgctgccggtgggaggaagcgagagggaagccgcttgcgggtttgtcgccgctgctcgcccaccgcctggaagagccgagccccggcccagtcggtcgcttgccaccgctcgtagccgttacccgcgggccgccacagccgccggccgggagaggcgcgcgccatggcttctggagccgattcaaaaggtgatgacctatcaacagccattctcaaacagaagaaccgtcccaatcggttaattgttgatgaagccatcaatgaggacaacagtgtggtgtccttgtcccagcccaagatggatgaattgcagttgttccgaggtgacacagtgttgctgaaaggaaagaagagacgagaagctgtttgcatcgtcctttctgatgatacttgttctgatgagaagattcggatgaatagagttgttcggaataaccttcgtgtacgcctaggggatgtcatcagcatccagccatgccctgatgtgaagtacggcaaacgtatccatgtgctgcccattgatgacacagtggaaggcattactggtaatctcttcgaggtataccttaagccgtacttcctggaagcgtatcgacccatccggaagggacttctggccggggggaggcgtggggcgtccagggggcacgatctaactttgctgtgcca

SEQ ID NO: 344417 - DNA, 1047 bp, Homo sapiens
  misc_feature (6)..(8): n is a, c, g, or t
  misc_feature (26)..(26): n is a, c, g, or t
ggagannnaagaactacggctaggtncgaggcctgggtgtcgcttccgtgctcccggcgagcgggcggagagcgggggccgcactggggagtgtgggctgggccgcagatgtcatgtggcctgtgttttggaccgtggttcgtacctatgctccttatgtcacattccctgttgccttcgtggtcggggctgtgggttaccacctggaatggttcatcaggggaaaggacccccagcccgtggaggaggaaaagagcatctcagagcgccgggaggatcgcaagctggatgagcttctaggcaaggaccacacgcaggtggtgagccttaaggacaagctagaatttgccccgaaagctgtgctgaacagaaaccgcccagagaagaattaatggaggacacagggccctatggtcctactgtgggtggtgacttgtcctgctaccatgttgacagagccccagaacccacatctaattggctttgttgcttattctggcccttcccacaccacacagccacacaaatactggctgctccttgatggccaggcagacccagcagcagccgaggggccagtgaagaggaaggccgcatctgttgtgtggtggccacaagcactcaggcatctgagtttactggtgcactgctgggaggagagttatgagatgaacattggctgtcaatctctgtgggcaggcggtttggcctctagtgggaatggctgggatttgggcgttgcctttaggagggatacctgcatgtctagttccagtctgcactggaaagaattcaaatatgcacctggctcccttcactattttgccctatcctttgtgctcattcttactgaaatctgtcttgtcagctcaggaatgggattcccccaggaaggaaagcacttttctgttctgggaagcccagactgttcactttggggcagggacgaacatgtgcctcgtgaatttgcttgaaaacagtcaccatcttctacccccatcactgtatagtgaaaaacctgattaaagtggtatctgagaaccataa

SEQ ID NO: 344418 - DNA, 2627 bp, Homo sapiens
cccaagatttcatgtaagacttaggttttactatatttgaattatttttacactaacaatagccacatttatttccctgctggctgtgtgcctgccacagtactttacaaatattatctcttccaaccctcacaccatccttgcgaaatgggtgttattacctctacacagaaggggaagggaggctcagacaggttaataatgttcccaaggtcactagaaagctagcccggatcccaagaggtcttaaagcactaaaatatactcttctaagaagagcttcttgaggtcagggatcatgtcttttgtttttgcgtgcccagacctaggtcttagaagacgcctaataaacatcagttgaaaaaaatgactggatgatctttcactttttccacgcagaaaacacgtggcgacatcactgagaaacctcccggccaacagagggcgcgacgtccatttcagcgcagtggggcccagttgcggacgcctagcttccttccgtcctttggctgaagttcagccaatccctgcgctccgagagagccggcggccagtgggcagggtcacagggcaaggtcccgcgggccgctgggtgcggcgacttccgtgctcccggcgagcgggcggagagcgggggccgcactggggagtgtgggctgggccgcaggtgagcgcgcggtcccggcgagcaggtcgggtcagcccaggccagtaacctctgagttacgggaggagtgatcgctagggtccaccccggtcccggccagatctgccagctcccctctctggcgggtgttctggtgccaagtctgggagcccaggtagccctccgcagacagggcttctcggcacctcaatgaggacggacgttgatgaggccatgaatgaggtgggctagggacaggggaccgggagactcacagaagggagaagggtagccatttggatggaccttcgccttacttgcgctcccattcctggactgcgctctagtgactgtcagggctaattcttccgccttctcaggcctcctgtgtccttgttagtagttcttgaatttgggactacggcttctggcctcgttgggcctccgggccctcgcactggggcaggtttcccagcagcccagttgacctttaccggatgcttttggcagacgtcctccatgccgggctggaaatatgcgtcacagtgtttttcagacacttttgcctctttcattgtgataccctgcctggggacgactatgatggagtctttagggttctggaatcagcaaaggcatctgttatgctcctgccaccttttgggggagagtgggtggaggatgttgtgattttacactagggagtttgggctgtcattcattcgttcagcagaccttttttgggcactctgccaggcagggtaggagaggtgcctggatggatagggcataattgggccagacagacacggttcttagccttttggagcttaaagtgtcttgagaaacgcagacagggaaaaggaacgacttttcatattgtgaaaccaggagattcatcgtagattgtgtttcatggggaaaaggtggccggctgtgctcatggagaaatttcatagagcagagaaaggcatctttttcccttcttgaaatgttggcagactaggtcctggggtcaacaataggcttgaagctctattagatgtcatgtggcctgtgttttggaccgtggttcgtacctatgctccttatgtcacattccctgttgccttcgtggtcggggctgtgggttaccacctggaatggttcatcaggggaaaggacccccagcccgtggaggaggaaaagagcatctcagagcgccgggaggatcgcaagctggatgagcttctaggcaaggaccacacgcaggtggtgagccttaaggacaagctagaatttgccccgaaagctgtgctgaacagaaaccgcccagagaagaattaatggaggacacagggccctatggtcctactgtgggtggtgacttgtcctgctaccatgttgacagagccccagaacccacatctaattggctttgttgcttattctggcccttcccacaccacacagccacacaaatactggctgctccttgatggccaggcagacccagcagcagccgaggggccagtgaagaggaaggccgcatctgttgtgtggtggccacaagcactcaggcatctgagtttactggtgcactgctgggaggagagttatgagatgaacattggctgtcaatctctgtgggcaggcggtttggcctctagtgggaatggctgggatttgggcgttgcctttaggagggatacctgcatgtctagttccagtctgcactggaaagaattcaaatatgcacctggctcccttcactattttgccctatcctttgtgctcattcttactgaaatctgtcttgtcagctcaggaatgggattcccccaggaaggaaagcacttttctgttctgggaagcccagactgttcactttggggcagggacgaacatgtgcctcgtgaatttgcttgaaaacagtcaccatcttctacccccatcactgtatagtgaaaaacctgattaaagtggtatctgagaaccataa

SEQ ID NO: 344419 - DNA, 1631 bp, Homo sapiens
cccaagatttcatgtaagacttaggttttactatatttgaattatttttacactaacaatagccacatttatttccctgctggctgtgtgcctgccacagtactttacaaatattatctcttccaaccctcacaccatccttgcgaaatgggtgttattacctctacacagaaggggaagggaggctcagacaggttaataatgttcccaaggtcactagaaagctagcccggatcccaagaggtcttaaagcactaaaatatactcttctaagaagagcttcttgaggtcagggatcatgtcttttgtttttgcgtgcccagacctaggtcttagaagacgcctaataaacatcagttgaaaaaaatgactggatgatctttcactttttccacgcagaaaacacgtggcgacatcactgagaaacctcccggccaacagagggcgcgacgtccatttcagcgcagtggggcccagttgcggacgcctagcttccttccgtcctttggctgaagttcagccaatccctgcgctccgagagagccggcggccagtgggcagggtcacagggcaaggtcccgcgggccgctgggtgcggcgacttccgtgctcccggcgagcgggcggagagcgggggccgcactggggagtgtgggctgggccgcaggtgagcgcgcggtcccggcgagcagatgtcatgtggcctgtgttttggaccgtggttcgtacctatgctccttatgtcacattccctgttgccttcgtggtcggggctgtgggttaccacctggaatggttcatcaggggaaaggacccccagcccgtggaggaggaaaagagcatctcagagcgccgggaggatcgcaagctggatgagcttctaggcaaggaccacacgcaggtggtgagccttaaggacaagctagaatttgccccgaaagctgtgctgaacagaaaccgcccagagaagaattaatggaggacacagggccctatggtcctactgtgggtggtgacttgtcctgctaccatgttgacagagccccagaacccacatctaattggctttgttgcttattctggcccttcccacaccacacagccacacaaatactggctgctccttgatggccaggcagacccagcagcagccgaggggccagtgaagaggaaggccgcatctgttgtgtggtggccacaagcactcaggcatctgagtttactggtgcactgctgggaggagagttatgagatgaacattggctgtcaatctctgtgggcaggcggtttggcctctagtgggaatggctgggatttgggcgttgcctttaggagggatacctgcatgtctagttccagtctgcactggaaagaattcaaatatgcacctggctcccttcactattttgccctatcctttgtgctcattcttactgaaatctgtcttgtcagctcaggaatgggattcccccaggaaggaaagcacttttctgttctgggaagcccagactgttcactttggggcagggacgaacatgtgcctcgtgaatttgcttgaaaacagtcaccatcttctacccccatcactgtatagtgaaaaacctgattaaagtggtatctgagaaccataa

SEQ ID NO: 344420 - DNA, 1828 bp, Homo sapiens
cccaagatttcatgtaagacttaggttttactatatttgaattatttttacactaacaatagccacatttatttccctgctggctgtgtgcctgccacagtactttacaaatattatctcttccaaccctcacaccatccttgcgaaatgggtgttattacctctacacagaaggggaagggaggctcagacaggttaataatgttcccaaggtcactagaaagctagcccggatcccaagaggtcttaaagcactaaaatatactcttctaagaagagcttcttgaggtcagggatcatgtcttttgtttttgcgtgcccagacctaggtcttagaagacgcctaataaacatcagttgaaaaaaatgactggatgatctttcactttttccacgcagaaaacacgtggcgacatcactgagaaacctcccggccaacagagggcgcgacgtccatttcagcgcagtggggcccagttgcggacgcctagcttccttccgtcctttggctgaagttcagccaatccctgcgctccgagagagccggcggccagtgggcagggtcacagggcaaggtcccgcgggccgctgggtgcggcgacttccgtgctcccggcgagcgggcggagagcgggggccgcactggggagtgtgggctgggccgcaggtgagcgcgcggtcccggcgagcaggtcgggtcagcccaggccagtaacctctgagttacgggaggagtgatcgctagggtccaccccggtcccggccagatctgccagctcccctctctggcgggtgttctggtgccaagtctgggagcccaggtagccctccgcagacagggcttctcggcacctcaatgaggacggacgttgatgaggccatgaatgagatgtcatgtggcctgtgttttggaccgtggttcgtacctatgctccttatgtcacattccctgttgccttcgtggtcggggctgtgggttaccacctggaatggttcatcaggggaaaggacccccagcccgtggaggaggaaaagagcatctcagagcgccgggaggatcgcaagctggatgagcttctaggcaaggaccacacgcaggtggtgagccttaaggacaagctagaatttgccccgaaagctgtgctgaacagaaaccgcccagagaagaattaatggaggacacagggccctatggtcctactgtgggtggtgacttgtcctgctaccatgttgacagagccccagaacccacatctaattggctttgttgcttattctggcccttcccacaccacacagccacacaaatactggctgctccttgatggccaggcagacccagcagcagccgaggggccagtgaagaggaaggccgcatctgttgtgtggtggccacaagcactcaggcatctgagtttactggtgcactgctgggaggagagttatgagatgaacattggctgtcaatctctgtgggcaggcggtttggcctctagtgggaatggctgggatttgggcgttgcctttaggagggatacctgcatgtctagttccagtctgcactggaaagaattcaaatatgcacctggctcccttcactattttgccctatcctttgtgctcattcttactgaaatctgtcttgtcagctcaggaatgggattcccccaggaaggaaagcacttttctgttctgggaagcccagactgttcactttggggcagggacgaacatgtgcctcgtgaatttgcttgaaaacagtcaccatcttctacccccatcactgtatagtgaaaaacctgattaaagtggtatctgagaaccataa

SEQ ID NO: 344421 - DNA, 1506 bp, Homo sapiens
cccaagatttcatgtaagacttaggttttactatatttgaattatttttacactaacaatagccacatttatttccctgctggctgtgtgcctgccacagtactttacaaatattatctcttccaaccctcacaccatccttgcgaaatgggtgttattacctctacacagaaggggaagggaggctcagacaggttaataatgttcccaaggtcactagaaagctagcccggatcccaagaggtcttaaagcactaaaatatactcttctaagaagagcttcttgaggtcagggatcatgtcttttgtttttgcgtgcccagacctaggtcttagaagacgcctaataaacatcagttgaaaaaaatgactggatgatctttcactttttccacgcagaaaacacgtggcgacatcactgagaaacctcccggccaacagagggcgcgacgtccatttcagcgcagtggggcccagttgcggacgcctagcttccttccgtcctttggctgaagttcagccaatccctgcgctccgagagagccggcggccagtgggcagggtcacagggcaaggtcccgcgggccgctgggtgcggcgacttccgtgctcccggcgagcgggcggagagcgggggccgcactggggagtgtgggctgggccgcagatgtcatgtggcctgtgttttggaccgtggttcgtacctatgctccttatgtcacattccctgttgccttcgtggtcggggctgtgggttaccacctggaatggttcatcaggggaaaggacccccagcccgtggaggaggaaaagagcatctcagagcgccgggaggatcgcaagctggatgagcttctaggcaaggaccacacgcaggtggtgagccttaaggacaagctagaatttgccccgaaagctgtgctgaacagaaaccgcccagagaagaattaatggaggacacagggccctatggtcctactgtgggtggtgacttgtcctgctaccatgttgacagagccccagaacccacatctaattggctttgttgcttattctggcccttcccacacccacaagcactcaggcatctgagtttactggtgcactgctgggaggagagttatgagatgaacattggctgtcaatctctgtgggcaggcggtttggcctctagtgggaatggctgggatttgggcgttgcctttaggagggatacctgcatgtctagttccagtctgcactggaaagaattcaaatatgcacctggctcccttcactattttgccctatcctttgtgctcattcttactgaaatctgtcttgtcagctcaggaatgggattcccccaggaaggaaagcacttttctgttctgggaagcccagactgttcactttggggcagggacgaacatgtgcctcgtgaatttgcttgaaaacagtcaccatcttctacccccatcactgtatagtgaaaaacctgattaaagtggtatctgagaaccataa

SEQ ID NO: 344422 - DNA, 710 bp, Homo sapiens
agcaaaggcatctgttatgctcctgccaccttttgggggagagtgggtggaggatgttgtgattttacactagggagtttgggctgtcattcattcgttcagcagaccttttttgggcactctgccaggcagggtaggagaggtgcctggatggatagggcataattgggccagacagacacggttcttagccttttggagcttaaagtgtcttgagaaacgcagacagggtaagccagcatcgtgcctgacacagagtaagtggttataagtgtcgaataaaggaatgaattgacttatttgggaatgattagaatgtgagcaggacggtagcgagagactttatgctgcatgtgagagatagttgtgaactcatgcgcgatatgttttaagacaggtttggaaatctgaacggacagttgctatttagggaagcatttacttatacagaggacttgctttaaaggtggaagtaaaatggagaagtattaggtttgggattcttcagaggtgcctcttttaactattactatgtctctgaatttcataaatccctgagtacaatctcagagtttgggaaaaggaaagctcttctaggtaatgaaatgccaggctgatgggaaaaaactgtaggaagctctccctaagtccagggtttggacagaaaccgtatacctctgcagtgtgttcttcccactagaaagagtgta

SEQ ID NO: 344423 - DNA, 1606 bp, Homo sapiens
cccaagatttcatgtaagacttaggttttactatatttgaattatttttacactaacaatagccacatttatttccctgctggctgtgtgcctgccacagtactttacaaatattatctcttccaaccctcacaccatccttgcgaaatgggtgttattacctctacacagaaggggaagggaggctcagacaggttaataatgttcccaaggtcactagaaagctagcccggatcccaagaggtcttaaagcactaaaatatactcttctaagaagagcttcttgaggtcagggatcatgtcttttgtttttgcgtgcccagacctaggtcttagaagacgcctaataaacatcagttgaaaaaaatgactggatgatctttcactttttccacgcagaaaacacgtggcgacatcactgagaaacctcccggccaacagagggcgcgacgtccatttcagcgcagtggggcccagttgcggacgcctagcttccttccgtcctttggctgaagttcagccaatccctgcgctccgagagagccggcggccagtgggcagggtcacagggcaaggtcccgcgggccgctgggtgcggcgacttccgtgctcccggcgagcgggcggagagcgggggccgcactggggagtgtgggctgggccgcagatgtcatgtggcctgtgttttggaccgtggttcgtacctatgctccttatgtcacattccctgttgccttcgtggtcggggctgtgggttaccacctggaatggttcatcaggggaaaggacccccagcccgtggaggaggaaaagagcatctcagagcgccgggaggatcgcaagctggatgagcttctaggcaaggaccacacgcaggtggtgagccttaaggacaagctagaatttgccccgaaagctgtgctgaacagaaaccgcccagagaagaattaatggaggacacagggccctatggtcctactgtgggtggtgacttgtcctgctaccatgttgacagagccccagaacccacatctaattggctttgttgcttattctggcccttcccacaccacacagccacacaaatactggctgctccttgatggccaggcagacccagcagcagccgaggggccagtgaagaggaaggccgcatctgttgtgtggtggccacaagcactcaggcatctgagtttactggtgcactgctgggaggagagttatgagatgaacattggctgtcaatctctgtgggcaggcggtttggcctctagtgggaatggctgggatttgggcgttgcctttaggagggatacctgcatgtctagttccagtctgcactggaaagaattcaaatatgcacctggctcccttcactattttgccctatcctttgtgctcattcttactgaaatctgtcttgtcagctcaggaatgggattcccccaggaaggaaagcacttttctgttctgggaagcccagactgttcactttggggcagggacgaacatgtgcctcgtgaatttgcttgaaaacagtcaccatcttctacccccatcactgtatagtgaaaaacctgattaaagtggtatctgagaaccataa

SEQ ID NO: 344424 - DNA, 1727 bp, Homo sapiens
cccaagatttcatgtaagacttaggttttactatatttgaattatttttacactaacaatagccacatttatttccctgctggctgtgtgcctgccacagtactttacaaatattatctcttccaaccctcacaccatccttgcgaaatgggtgttattacctctacacagaaggggaagggaggctcagacaggttaataatgttcccaaggtcactagaaagctagcccggatcccaagaggtcttaaagcactaaaatatactcttctaagaagagcttcttgaggtcagggatcatgtcttttgtttttgcgtgcccagacctaggtcttagaagacgcctaataaacatcagttgaaaaaaatgactggatgatctttcactttttccacgcagaaaacacgtggcgacatcactgagaaacctcccggccaacagagggcgcgacgtccatttcagcgcagtggggcccagttgcggacgcctagcttccttccgtcctttggctgaagttcagccaatccctgcgctccgagagagccggcggccagtgggcagggtcacagggcaaggtcccgcgggccgctgggtgcggcgacttccgtgctcccggcgagcgggcggagagcgggggccgcactggggagtgtgggctgggccgcagatgtcatgtggcctgtgttttggaccgtggttcgtacctatgctccttatgtcacattccctgttgccttcgtggtcggggctgtgggttaccacctggaatggttcatcaggggaaaggacccccagcccgtggaggaggaaaagagcatctcagagcgccgggaggatcgcaagctggatgagcttctaggcaaggaccacacgcaggtggtgagccttaaggacaagctagaatttgccccgaaagctgtgctgaacagaaaccgcccagagaagaattaatggaggacacagggccctatggtcctactgtgggtggtgacttgtcctgctaccatgttgacagagccccagaacccacatctaattggctttgttgcttattctggcccttcccacaccacacagccacacaaatactggctgctccttgatggccaggcagacccagcagcagccgaggggccagtgaagaggaaggccgcatctgttgtgtggtggccacaagcactcaggcatctgagtttactggtgcactgctgggaggagagttatgagatgaacattggctgtcaatctctgtgggcaggcggtttggcctctagtgggaatggctgggatttgggcgttgcctttaggagggatacctgcatgtctagttccagtctgcactggaaagaattcaaatatgcacctggctcccttcactattttgccctatcctttgtgctcattcttactgaaatctgtcttgtcagctcaggaatgggattcccccaggaaggaaagcacttttctgttctgggaagcccagactgttcactttggggcagggacgaacatgtgcctcgtgaatttgcttgaaaacagtcaccatcttctacccccatcactgtatagtgaaaaacctgattaaagtggtatctgagaaccataaaaaaaaaaaagagacacagacgaagaaagacaaagaacgacagaaggcaaacaaaaacaaaagaaagatagagacgagagggagggagacaaagagagaagagggacaccacacacaaaac

SEQ ID NO: 344425 - DNA, 2610 bp, Homo sapiens
cccaagatttcatgtaagacttaggttttactatatttgaattatttttacactaacaatagccacatttatttccctgctggctgtgtgcctgccacagtactttacaaatattatctcttccaaccctcacaccatccttgcgaaatgggtgttattacctctacacagaaggggaagggaggctcagacaggttaataatgttcccaaggtcactagaaagctagcccggatcccaagaggtcttaaagcactaaaatatactcttctaagaagagcttcttgaggtcagggatcatgtcttttgtttttgcgtgcccagacctaggtcttagaagacgcctaataaacatcagttgaaaaaaatgactggatgatctttcactttttccacgcagaaaacacgtggcgacatcactgagaaacctcccggccaacagagggcgcgacgtccatttcagcgcagtggggcccagttgcggacgcctagcttccttccgtcctttggctgaagttcagccaatccctgcgctccgagagagccggcggccagtgggcagggtcacagggcaaggtcccgcgggccgctgggtgcggcgacttccgtgctcccggcgagcgggcggagagcgggggccgcactggggagtgtgggctgggccgcagatgtcatgtggcctgtgttttggaccgtggttcgtacctatgctccttatgtcacattccctgttgccttcgtggtcggggctgtgggttaccacctggaatggttcatcaggggaaaggacccccagcccgtggaggaggaaaagagcatctcagagcgccgggaggatcgcaagctggatgagcttctaggcaaggaccacacgcaggtggtgagccttaaggacaagctagaatttgccccgaaagctgtgctgaacagaaaccgcccagagaagaattaatggaggacacagggccctatggtcctactgtgggtggtgacttgtcctgctaccatgttgacagagccccagaacccacatctaattggctttgttgcttattctggcccttcccacaccacacagccacacaaatactggctgctccttgatggccaggcagacccagcagcagccgaggggccagtgaagaggaaggccgcatctgttgtgtggtggccacaagcactcaggcatctgagtttactggtgcactgctgggaggagagttatgagatgaacattggctgtcaatctctgtgggcaggcggtttggcctctagtgggaatggctgggatttgggcgttgcctttaggagggatacctgcatgtctagttccagtctgcactggaaagaattcaaatatgcacctggctcccttcactattttgccctatcctttgtgctcattcttactgaaatctgtcttgtcagctcaggaatgggattcccccaggaaggaaagcacttttctgttctgggaagcccagactgttcactttggggcagggacgaacatgtgcctcgtgaatttgcttgaaaacagtcaccatcttctacccccatcactgtatagtgaaaaacctgattaaagtggtatctgagaaccataaataatgatcgaatcttatcatccaggtggtatttgggggtcttcttaggagttaggcaagtacaggcattttagagcaggataacattggtattaaagggtgccaaggagccctggaaactgctttactagtgcggttgcactgaaccctggaggcacagattcccaggaacctttttaccattattacaattggctgcagcaccttcaagtctaaatggaggtagacctcacatacacacacatagacgcctttccctataaaagtatatacgcacattcaagaaaatttggtagggattttaaaaaggtcacccatgttcccagctcgttaataacaaccgttaacattttgttgtcttttactaattctctgcataggttttagagatagttatcattactgtacatttaattttatatacttttctcactattatcattttcccattttacatggtcatcataattggttttttggagacagggtctcactctgtcacacaggctggagtgcagtacaattacggctcagtgcaaccttgacctcctgggctcaagtgatcctctcacttcagctcctcaagtagatgggactacaggagtatgccaccatgcccagctaatttttttatttttttgtagaaccaggtctcactatgttgcccaggctagtctcaaactcctgggctcaagtgatcctccggccttggcctgtagtttcttttttctttttttttggagatggactctcattctgtcacccgggctggagtgcagtggcgtgatcttggctgactgcaacttctgcctcctgggttcaagcgattctcctacctcagcttcctaagtagctgggattacaggcgtgcgccatcgtgcctggctagtttttgtgtttttagtaaagacaggggtttcaccatcttggccaggctggtctcgaactcctgacctcaagcgatcccatctgcctcggcctcccaaagtgctgggattacaggt

SEQ ID NO: 344426 - DNA, 2004 bp, Homo sapiens
cccaagatttcatgtaagacttaggttttactatatttgaattatttttacactaacaatagccacatttatttccctgctggctgtgtgcctgccacagtactttacaaatattatctcttccaaccctcacaccatccttgcgaaatgggtgttattacctctacacagaaggggaagggaggctcagacaggttaataatgttcccaaggtcactagaaagctagcccggatcccaagaggtcttaaagcactaaaatatactcttctaagaagagcttcttgaggtcagggatcatgtcttttgtttttgcgtgcccagacctaggtcttagaagacgcctaataaacatcagttgaaaaaaatgactggatgatctttcactttttccacgcagaaaacacgtggcgacatcactgagaaacctcccggccaacagagggcgcgacgtccatttcagcgcagtggggcccagttgcggacgcctagcttccttccgtcctttggctgaagttcagccaatccctgcgctccgagagagccggcggccagtgggcagggtcacagggcaaggtcccgcgggccgctgggtgcggcgacttccgtgctcccggcgagcgggcggagagcgggggccgcactggggagtgtgggctgggccgcagatgtcatgtggcctgtgttttggaccgtggttcgtacctatgctccttatgtcacattccctgttgccttcgtggtcggggctgtgggttaccacctggaatggttcatcaggggaaaggacccccagcccgtggaggaggaaaagagcatctcagagcgccgggaggatcgcaagctggatgagcttctaggcaaggaccacacgcaggtggtgagccttaaggacaagctagaatttgccccgaaagctgtgctgaacagaaaccgcccagagaagaattaatggaggacacagggccctatggtcctactgtgggtggtgacttgtcctgctaccatgttgacagagccccagaacccacatctaattggctttgttgcttattctggcccttcccacaccacacagccacacaaatactggctgctccttgatggccaggcagacccagcagcagccgaggggccagtgaagaggaaggccgcatctgttgtgtggtggccacaagcactcaggcatctgagtttactggtgcactgctgggaggagagttatgagatgaacattggctgtcaatctctgtgggcaggcggtttggcctctagtgggaatggctgggatttgggcgttgcctttaggagggatacctgcatgtctagttccagtctgcactggaaagaattcaaatatgcacctggctcccttcactattttgccctatcctttgtgctcattcttactgaaatctgtcttgtcagctcaggaatgggattcccccaggaaggaaagcacttttctgttctgggaagcccagactgttcactttggggcagggacgaacatgtgcctcgtgaatttgcttgaaaacagtcaccatcttctacccccatcactgtatagtgaaaaacctgattaaagtggtatctgagaaccataagaaaaaaaaaaaaaaaaaaaaaaaaaaaaacacctttttggcgccggcgccttcgggccctcctcgaaaaagcgttttttagacccaattctcgtttgggcgcgcgcggggccccatgtgggttaggggcacctgggccaaatcggcgggttccccagaggaaaaaccggcgggccacatggacacatagagggtggtcgggggtattttctccaaccaaatataaaaaaagacgccccgcgggggaaacacggagaggctttctgtgataacacatattccccagagaggggggatttttccgagggaggctccataagacggggcgatctcctttatcaaccgcaggggagttccacagaggggaaggctcgcgaattatttcacaatattagccc

SEQ ID NO: 344427 - DNA, 480 bp, Homo sapiens
ccgctattcaaacctagaagttcagatggaatactcctatcagtaaactgttttgaggtctcataaaagaaactatcacttaaggagccaggactgctgctttatttttgttctcaatcgactttacacatgtaactttgcaaccagtttgcctttccttgctgctagagctacatttgcatcttttggagagtctccttatttggtcccagttccctatggcctctgatctgccactctgccttgctggtaatccaattatcattcttcctatatgcttagaactgatctaatgcctatctgctgaattgtactatctgccagacagacaccagaagagtaggcatggggagagaggccaagaaaaagtagactgtggtatggtacacatgacatgactcatctgttctaactgttccataacctgtcctgaccaagtggctcagataatactgcctggctcactctggcagacttgtt

SEQ ID NO: 344428 - DNA, 439 bp, Homo sapiens
ctcccaaactgttgggattacaggcatgagccaccatacctagccccctttgcccatttttaaattgagttgttttccgttgctgagttttaggagttttttaaatcattctggacattaatcctttagcagataaatggcttgcaaatatttcctcccattctgtgagctgcctttttattcttttgatagtgccctttgatgcacaaaagttttaaattctcatgaagtccattttgtctatttttttcttttgttgtctgcacttttgatgtcagacccaataaatgattgccacatcgattttttttcttttttctttttcttttttttttttttcagaagaatcgcttgaactcgggagtcggaggttgtggtgacctgagatcgcatcattgcactccagcctgggaaacaagagtaagactcagtctcaaaa

SEQ ID NO: 344429 - DNA, 540 bp, Homo sapiens
agtttttattcgggggtgtagcatcatctgaattatattttaaaagatcatgctgactgctgtatgagcaaaaagaatactgggggcaagtggaagcagatacgctagtggatatgcaacagtccaggcagcagacagcaatggcttagattagcgaggtggcagtaggatagagagcagtggacatctgtgagaattttttaggtggtagaaatacgaaggcataaatagggttggatatggaacataagggaggggaaagaactcaaggatgttgctggaagttgccactattggatggttggaagaggagtggattttgggggggattgtttcgtgggagaggtaagggtgaattcagcagttccccttttgtctatcttagttctcagaagcctgtaagattgtcaagtaggcctgttagagagatctatacatcttgaggaattcagagatacttggcttagagatgtcagtttgaagattgtcactatgttagtgatacttaaggtaatgaaataattgaagaaaagattataa

SEQ ID NO: 344430 - DNA, 930 bp, Homo sapiens
tggttcatgggacggtctcctaacataatgtttatatcccgtggctcaggcatagagacccactcatggtttcccatcagaatttgggttccagttcaccactccacatacacacaccaaggctaatgattcatgctattgtcagtttttgcttctttgatattgttctgaaggtagtttttattgatacttctttctttctaaagtcaatgagtaaagttatggcaagacattggaaagacattgcagtgctcccaggctggagtgcatgactcatctcctggcccctccaggaaaccggagaaggcagaaaagggcaagaatgttgtgttgtctttgggctgtggagttcatgattatggacactttctgaattattggcactaagggcacatcctgcttagcatggaggctggacagctctgggaaagcagagattctttttagggagtccagagcatttttttcttctttcttatcccctctttccaatagagatgtcagaagggtgactgttagggttgatacattatgtggtgctctgtttttttgagcattgtctactcagagtgattaccaaggtggagctcattatgttacctggcacctgcaactacttgcctcatgttggactaaagtggaaagactcctattgggaattcactcagggaggcaccaggcattgttagaaaagcagtatcgcagagcacttaagagctgagccttgtgatcaggtggacttgggtttatgtcctcgcactgtcgcttcctagatttatgacctcagtttcctcatttctaaagtagagacagggatggagggtggggagaatatgaattaatttggattaaatggatgagaatcagaagtatttatttggaattggtgtgaacttggagcacatggggaactgaaaacaaaggtgataa

SEQ ID NO: 344431 - DNA, 719 bp, Homo sapiens
agacaaggtctcactttgtcaccaggttggagtgcagtagtatgatcacaactcactgcagactcgaactcctgggctcaagggatcctccctcctcagcctcccaagtggctgggactacaagcacgcaccaacacacctggctgatttaaaaatttttgtacaaatgggatctcactatgttgcctatgctggtcttgaacacctaggcccaacgatcctccagcctcgccttctaaagtgttgggattccaagagtgagccatggtgtctggcctcaaaaatctttaatacctttatagagttgtgcaatcatcaccacaatccagttttgagacatttccattactccaaaaagatcattcatgccatttgcagttaaccaccactcccatctccaacctcagctactgttgatcttgctgtttgcacagatttgcctttatgggaagtttcatataaaaagaatcaaacaatatgtggccttttgcatctggcttctttcacttaatgcttttgaggcgtatgcatgttgtagtgagtatcaggtgtacgtcatgtatacgcaggaatatctgtccctttgctgtcggggaggacgccatcgcatggaggtcctgcattttgtttttctgtttctcagttgacggtcatgtggattgtttacaggtctgggctattatgaataatgccactatgaacatctgtgtccaggtttc

SEQ ID NO: 344432 - DNA, 456 bp, Homo sapiens
aatcagggtttcgccatgttggccaggctggtttcggactcctgacctcaggtgatctgcccacctccacctctcagactgctgggattacaggtgtgagccactgcacctggctgaagggtcctattcttttatccacatgaaggaggtttttaggagtgatggttgctcttaaactattcatcatgatactggacttttcaaagtactcagtgggtttgcttacagctttctataggtagctgtccccactaaatggattctcagacaaaacaaacaaatctatgacattaagcccttggtaagtgtcaggcattgtgttgggtgttgaggatgaaataggatggttcttcctgctttagatgattataaacaggtaattagaataaagcatggtaggtgttctgcagttgagaataaggtatgaaggaactcaggactggcctgttgctactt

SEQ ID NO: 344433 - DNA, 402 bp, Homo sapiens
gctagaatgcccagtaggagtgcagactggaggatcggctgttttttgaactggagacatcacaggaaactggggaggctccaaattgctaacctgaggccggagcaaaaactttttttttgtcgaagggactgctttttttatttccccttcaacggatggcatcccaagtcctgctggattgcatctgtctttgttcctgcagccaagccttatagctggctcacactctgccatgctcataacctcacactagaaaggatattacaaagaggggcaaacaccctagagggttcccctttatcagaaccttccctgtcagtgggctcctcatttcccgagccctcgtctgattattagtgtactgacggaataaaaataacctcatattcctacatgaat

SEQ ID NO: 344434 - DNA, 563 bp, Homo sapiens
attaaaaaaaaaatctttactcactctttccaggcaacaaaatcctcttcccagttctgttacataataggaatgatgtttgccacttgcaaacaggcagccaaattatattttgccatttgcatgtaacctcttggacagaatggcttttattggtgtaaagttccattcagaactctctagttcctgagtttctacggtggaggggttaagggtgcatgttctagagtcacgacaaactggacttgatttccagcttcatctcaggacttgggcagcctgttttaccttttaattcctcagtttcttcatctgtaaagtggatcaggtattagaactggaatgaagttggcagggtgcagtggtttatgcctgtaatccaagcactttgggaggccgaggcaggcagatggcttgagaccgagtttgagaccagcttggccaacatatggaaatcctgtctctactaaaaatataaaaattagccaggcgtggtggcgtgtgcctgtagtcccagctactccagaggctgaggcacgagaatcacttgatcccgggaggca

SEQ ID NO: 344435 - DNA, 771 bp, Homo sapiens
tgtttagactttagaggtggcttgcaattacaattttattattaaaataagacttattaaaataagagagaaaacatgtatctttggtaatgtgaaaagaagaagaattcgcagcttattcttctcatatcataaagttttttccacctacaagataccacagtgtctcacatggaacccttacagagttactccttttggttaaaacatttgcctttatcccagcactttgggaggccgaggcaggcggatcacgaggtcaggaaatcaagaccttcctggctaacaaggtgaaacctcgtctctactaaaaatacaaaagttagccgggcgtggtggcgggcacctgtagtcccagctatccgggaagctgaggcagcagaatggcgtgaacccgggaggcggagcttgcggtgaggcggagcttgcagggaggcggagcttgcggtgaggcggagcttgcggtgaggcggagcttgcggtgagccgagattgcgccactgcactccagcctgggcgacagagtgagactccatatcaacaaaacaaaacaaaacaaaatttacctttgaatccgtctcaaaagtgaaggtccagcctagcagagtgccagacatcatgagtctttagaattctaaggagcagcatgagaattctcaggccaaagcctgatttctcaactccagcaaatgtgcatttggtgtttcacgctgagtactgtatgtgtattctgcatgtcccttccagcaaatacacatttggtgtttcatg

SEQ ID NO: 344436 - DNA, 491 bp, Homo sapiens
cttttctaaggcatattaaatggtttctttaaaatcacagtataaatgagtaaattaattgacttggatttaaaagatgttttctgttgatagtacttcccagtatgttagctcaataaatgaaagagagatgctgccaatcagagacgttcccctttaattaaataaaaggaatgtattcaagtatttctaaagatgaaataaaggaaaataaaaacataataagcattaacatggcctatgtgccctgcttcttagataggctcttaatcaaacaagaccacaataaaatatgccattacattatcatgttcagtattagaaacaagaattttcatgtacaaaacatgcttctattacggacacaataatttgttcaacagcagaaatactctgaattccccaagatcaacacaattaaaatgacaataacggtcaacaattaaaaagcacttcatgctgcacaaagatttttcatatttatgatcttg

SEQ ID NO: 344437 - DNA, 512 bp, Homo sapiens
aatttccagagggctagtagcaagaagatggctgagtatagcccttggattccaggttaagggttgggtggctctaaggtactagagatcttgaggtcaagagcaactgtattgggaataaattcggagggcagaaagttaaaaggataggggctacagtcacatagcagcagatttatccagcccttggtgccctgctgttgtccttttcttcacccaactctattgatccagccacccatcatgtccatgtctacactcaggtttctgagcaagaaggagaacattccacagtcatgtgcattggtgtccaactgtctctgtctcctcactttgtgcatgtttctcaacagcgtccccaccctttcctcaccatgacttcaccatcactttttcagttgctgtctctgctcccatccccacaaatatagacatattcatagacataaaatttctttcatagatagtgccatactgggagcattgtcctatgagttttttacttaacactc

SEQ ID NO: 344438 - DNA, 513 bp, Homo sapiens
caaaaaaaaaaaaaagaaaagaaaagaaaaaaaagaaaaagcccacactcttactaggttagcacggaggggcgggcgccttggcactcagatcttacggtcgcagagcataattgcccaaccaaccgcccaaagaaaaataacaagcggcggggggttggggagggaggagggccgacgtggaccacctctggcttagctcaaaccccctgaaatctcgcaaacgcagctagcactcaggctcgagctcctcccggttcccactgacacagagggacccccagactccggaggtggggggtccgagagtaaaaataatgggcagatgatcgtcgcatcctctgggctcctcgtggaacgtcagtgctggccagtggcttctgtccggatgctcagtagcaaactttaggcaagctcccctgagggagtggtggcggtgcaggctctctccttcccttgttcgttcgtcagacctgctgctgcagactccagagacgctttgctctctagtgg

SEQ ID NO: 344439 - DNA, 402 bp, Homo sapiens
aagaaaagaaggaacaatggtcgtgccaaaaagggccgcggccacgtgcagcctattcgctgcactaactgtgcccgatgcgtgcccaaggacaacgccattaagaaattcgtcattcgaaacatagtggaggccgcagcagtcagggacatttctgaagcgagcgtcttcgatgcctatgtgcttcccaagctgtatgtgaagctacattactgtgtgagttgtgcaattcacagcaaagtagtcaggaatcgatctcgtgaagcccgcaaggaccgaacacccccacctcgatttagacctgcgggtgctgccccacgtcccccaccaaagcccatgtaaggagctgagttcttaaagactgaagacaggctattctctggagaaaaataaaatggaaat

SEQ ID NO: 344440 - DNA, 114 bp, Homo sapiens
ccgcctactactactactgctcgaattcaagcttctaacgatgtacggggataaggagctgagttcttaaagactgaagacaggctattctctggagaaaaataaaatggaaat

SEQ ID NO: 344441 - DNA, 496 bp, Homo sapiens
ggttcaacctgcaggctcgaaaacgcaaaggtctttaaaaaagcatgagaagcgaatgtcaaaggatgaagaaagagcagtcaaagatgagcttctcagtgaaaagcctgaaatcaaacagaagtgggcatccaggctccttgccaaactgcgcaaagatattcgccaggagtatcgagaggactttgtgctcaccgtgactggcaagaagcacccgtgctgtgtcttatccaatcccgaccagaagggtaagattaggagaatcgactgcctgcgacaggcagacaaagtctggcgtctggatctagtcatggtgatcctgttcaaaggcatccccttggaaagtaccgatggagagcggctcatgaaatccccacattgcacaaacccagcactttgtgtccagccacatcatatcacagtatcagttaagtaaggagctgagttcttaaagactgaagacaggctattctctggagaaaaataaaatggaaat

SEQ ID NO: 344442 - DNA, 316 bp, Homo sapiens
ggccggtgcgtttggggtgctcagtaaacatttctggcataaattagtagtctcccgcatcatccttaccacaggccatgattcatgtatgatattgctgtttttgatatcagcatccatgtagaagccagtgggtcaaatagaaccaggcagaattgaatgattgagtcggaaatgcagagcatcaagccagcacccaccgccacacagattgtcactggtggttgtcgggctatgaacagagttgggcctttgtcttggcccctctgggctattattacttatttatttattttttagagatagggtctcactc

SEQ ID NO: 344443 - DNA, 182 bp, Homo sapiens
tgcctgtaggtacctggtgccatggggagcagtagatacaacagtggacagaggagatgtggccccgccctcatggagttgatcggccttgtccaaactacataaacaggtcactgtaaaactttaattttacttttaaaccagaggcataggctgcacgtgtacagtgtgcaaactaagtt

SEQ ID NO: 344444 - DNA, 233 bp, Homo sapiens
ctttgattatggccttttggctccagaactgtgagaaaataaatttctgttgtttttagccaccaagttcatggtactttgttactatagtcataagaaacaaacacaactactttccaatattttcattttcatttatgatttacaaattactttaccttcgacaaaagattccccttattgaatatctcttctccttcagttttatgtttttttttttttttttttttttt

SEQ ID NO: 344445 - DNA, 1664 bp, Homo sapiens
acatatgcctgtattttcctttgtaacttctgactagtacagcagagcttttgtatgtgctagttagccaataaatgctgtccactgttaatataaaattctaaaatctggcctagaattaatactaatgtaagtcacgtattcattaccaagaaattcatgaaaaacaaatggtgtgttttaaaatttcaataaataagactttcaaaggaatagtttcattcataacaagcattctgccctgaatgcagtaattctggaggccactgtcttagtctgttctcaatgctgctataaagaaatatctgagactgggtaatttataaaggaaaaaggtttaattgactcacagttctgcattgctaggtaggcctcaggaaacttataatcatggcagaaggcaaaggagaagcaggcaccttcctcacagggtggcgggatggagtgagtacaagtgggggaaatgccaaatgcttataaaaccatcagatcttgtgagactcactgactatcacgagaacagcatgggggaaattacgtccatctggccccacccttgacacgtggggattctggggattgctgttcaagatgagattttggggacacagccaaacaatatcaggcacagaaggggaccaaatcagcctggagtttagcacatttcatgtgagtctgtatcatagtttgaattaaatagaaagggattcagtgtatttttgagaacctatgttgtgtgaggaactagaaagagaaatgactacatgtaatgatgaccatcacagaggagctacagaagccagcataaggtggtggtttgtggagatggggaatagttgactcctggtgctgggaattgcaagtgcaatggcatagaggtgtgaacagcacactaggtctgggagcatagggtgacaccgagtcactggggaagagatgtgactagagaaattggccttcatgccattcaggaaaaaaattggactttatctcatagactgcatgtgtgggttgggggcaaaaggaggtggggagctttgaggctttaaagtaaggaaataatgtcaaactcacactatcttttccatggcagtggaggaggcaaaagttggagtagtgagtgggcaaggctggatacacttgcagaggtctgcgtaggagtagaggaggcccagatagtatggtggtgataggaatagagaggagagatggattcgagagcttcctgagataacaaggtatgaggggggatcaggaagagggagtgggtgggaggctcctttgggatgacctgtaagattttggcttagatgactgaggaagcagcagatgcagatgaagcagcccttgctggcctgttgagttcagggagcttcctgaagagtgaaaagaaggtcagtagacactgaggttgatgactctagacctagaggcaagagtctgggccatgatgagcctctgactggcgttaatatggagctgggaggtgaaaaccacagtgccttggagtgctctcggaaggcacatctgtctttcagaggaaagactctcactgaggccagaagcttgaaaagcgcccatttgggataagcgggagaataggggcagcagagaacgtctacagaaagggcgctcttggggagcgagctacatactgattccat

SEQ ID NO: 344446 - DNA, 1590 bp, Homo sapiens
acatatgcctgtattttcctttgtaacttctgactagtacagcagagcttttgtatgtgctagttagccaataaatgctgtccactgttaatataaaattctaaaatctggcctagaattaatactaatgtaagtcacgtattcattaccaagaaattcatgaaaaacaaatggtgtgttttaaaatttcaataaataagactttcaaaggaatagtttcattcataacaagcattctgccctgaatgcagtaattctggaggccactgtcttagtctgttctcaatgctgctataaagaaatatctgagactgggtaatttataaaggaaaaaggtttaattgactcacagttctgcattgctaggtaggcctcaggaaacttataatcatggcagaaggcaaaggagaagcaggcaccttcctcacagggtggcgggatggagtgagtacaagtgggggaaatgccaaatgcttataaaaccatcagatcttgtgagactcactgactatcacgagaacagcatgggggaaattacgtccatctggccccacccttgacacgtggggattctggggattgctgttcaagatgagattttggggacacagccaaacaatatcaggcacagaaggggaccaaatcagcctggagtttagcacatttcatgtgagtctgtatcatagtttgaattaaatagaaagggattcagtgtatttttgagaacctatgttgtgtgaggaactagaaagagaaatgactacatgtaatgatgaccatcacagaggagctacagaagccagcataaggtggtggtttgtggagatggggaatagttgactcctggtgctgggaattgcaagtgcaatggcatagaggtgtgaacagcacactaggtctgggagcatagggtgacaccgagtcactggggaagagatgtgactagagaaattggccttcatgccattcaggaaaaaaattggactttatctcatagactgcatgtgtgggttgggggcaaaaggaggtggggagctttgaggctttaaagtaaggaaataatgtcaaactcacactatcttttccatggcagtggaggaggcaaaagttggagtagtgagtgggcaaggctggatacacttgcagaggtctgcgtaggagtagaggaggcccagatagtatggtggtgataggaatagagaggagagatggattcgagagcttcctgagataacaaggtatgaggggggatcaggaagagggagtgggtgggaggctcctttgggatgacctgtaagattttggcttagatgactgaggaagcagcagatgcagatcccactccccacgctgtcctacggcgttcagggccctgcttgcagactgacaagtcgactccttaaacatctgcccttgcggacgtgagatctcgacgctagactttgcatctggatatacgtttgaccgactctaatatgtgagatgagtatggataaccacgcacccagagtattcacgacacggcacaactgtcttacaagagtaagagtatccatgaccgccagaccgtcaatagcgccctaggtgcag

SEQ ID NO: 344447 - DNA, 381 bp, Homo sapiens
  misc_feature (35)..(35): n is a, c, g, or t
taactgtatatgattatgtccctgattatgcgagngcgcccgccggttcagggtcccggagagaacaaaatcagagaggtaactatgtcaagctatctgctggagctgggacacattcttcctctcctgtccttggacaacaactccaggctccccagccttcaaactccaggacttctcccctctcctccacccttcctggcttctcaggcctttggccttgaactgagagctacaccatcagattccctgattctgaggccttcgggacttgaattgagccatactaccagcctcccagggtctccagtctgcagacgacctgttttgggacttcttgccaatttccctaataaataaactccatttcgtctttcaatc

SEQ ID NO: 344448 - DNA, 457 bp, Homo sapiens
gtctcactctgtcaccgtgtcacccaggttggagtgcaatggctcaatctcagctcactgtaacctccacctcccaggctcaagtgataactcctacctcagcctatgaagtagctagggactgcagggtcccggagagaacaaaatcagagaggtaactatgtcaagctatctgctggagctgggacacattcttcctctcctgtccttggacaacaactccaggctccccagccttcaaactccaggacttctcccctctcctccacccttcctggcttctcaggcctttggccttgaactgagagctacaccatcagattccctgattctgaggccttcgggacttgaattgagccatactaccagcctcccagggtctccagtctgcagacgacctgttttgggacttcttgccaatttccctaataaataaactccatttcgtctttcaatc

SEQ ID NO: 344449 - DNA, 370 bp, Homo sapiens
ataacttatcccaatacaccacctaactcttaactatatttctttgggtaacggaggaacaattctggtaactatgtcaagctatctgctggagctgggacacattcttcctctcctgtccttggacaacaactccaggctccccagccttcaaactccaggacttctcccctctcctccacccttcctggcttctcaggcctttggccttgaactgagagctacaccatcagattccctgattctgaggccttcgggacttgaattgagccatactaccagcctcccagggtctccagtctgcagacgacctgttttgggacttcttgccaatttccctaataaataaactccatttcgtctttcaatc

SEQ ID NO: 344450 - DNA, 620 bp, Homo sapiens
gtgtcagtgagaattgagcaactgagaagaagttagaggttagttcccttttccaagtatgatggattaaccacatgcaccccgtctttctcactgaatgcatctataaaacctaggcaaaatggatggaactcttctggactctgcagaataaataataccaggtgggatatgaatgaagactagcattcagaataccatctcactggctgtgagtttaccattttttttttcttccagcatccccagacaacttaacacaatctaaaacctaaaagtggggcaatctgaaacagaaagctctaaaagacgcctgctacttctggctcaaggaacaggaaagataactgctaagttcagaatgaaaattttgtcattttttttgtcttctccatctctcatgccctattcccaagcaaccgtgtggtaatggcagcagagactacagcaggagcccatggtcaaaactgagggatgagaactttcctctccagttgacaaatcccattgctttttctttttccttcttcatctctttgttcttccatttcttgtttccaagtcagatacagtatcagaagtgtgacccaagaagagtaccaaagatgcagcattctgga

SEQ ID NO: 344451 - DNA, 440 bp, Homo sapiens
cgcgcctggccacaaaaagatgtttttatttccctcaatccaaagaaatcttgttttattgagctgctacattaaaccatatgtacttttcctgcataccatctttcatatgcaatttgttttatcagtctcctccactagaatgaaaactccatacaggcaaggaccatgtctgttttgctcattagaacgtccctaggactgtgcttggctcatagtaggtgctcaagaatgaatcaatgtatcaaataaatatacaaggcttaatgggccatgatttaaagtggccctgaacctcaacttgccctaatgattttgaattacattgctatatatagcaacaaatatttattgagctgtgacttagagaaccagagtcaactgacttagacagtccccgctttgccgtttactagtagtgaccttgagattgtcactta

SEQ ID NO: 344452 - DNA, 379 bp, Homo sapiens
caggcatgtgccaccatgcctggctaatttttgtatttttaatagcgacagggtttcactgtattggccaggctggtctcaaactcctgacctcaagtgatccacccacctcggcctcccaaagtgctgggattacaggcatgagctaccacgccgtgccaactacatcttattcttgtttatttttcactttctctatctaactcagtgcaggatacctagtaaaattgtttcttcatcagagcgtttgagaattcagagttgcttttttttatgtgaactgatttagacatttagagacattgtacactaagaaaatgactcagaaaatagaacatctatatggctatcttgatgtatcctcattaatatgtggtgt

SEQ ID NO: 344453 - DNA, 453 bp, Homo sapiens
tgtcctcaacttctttcatcagaattttgtagttttccttgagtaggtctttcatctccttgaatacatttatttctaggtaatttttgtagctattgaaaaatgagattaccttcttcatttctttttcaaccagtttatgattagtatataacactactgatttttgtatgttggtttttgtatccttcaactttactgaatttatttatcaaatctaagagtttttggtggagtctttagctctttctgtaatagaaataagatcatgtcatctccaaacagggataattttacttccattttttcaatttggaatgccttttctttctttctcttacctgattgttctggctatgtctgccagtactgtgttgagtaggagagataaaagtggatatccttgttttgttccagttcttagagaaaagattttccagtttttcccattgt

SEQ ID NO: 344454 - DNA, 520 bp, Homo sapiens
tctttattctatactacaagccaggaaaattggttggaaatgacttactttttttccaactggtaaaaatagctttgcctaagtgctgcagaattttagtcgaagaaaaacataaactagaaatgcatgtgaatttttaaatatgaaagccaacatattgtctgtcattcattactatattagtaagaatcataggagattgttctaataatacaaatatctaacaatattaaatgattcctattcccactgaaggttaactattatatcaactttataatcatacttgacaattcattcttaagtagtgcataatcaaaatatctaaaataacatacaccaaaatactagtcaaaatcatattttaaattttagtaatatgcaattttaaaatatattaacagagtcaacagtaagtctgcattgcttggtttgaatagataacacccttagttttaataaactactataaatgcttgttattgaagggataccattttattatgaaaccagttattgt

SEQ ID NO: 344455 - DNA, 483 bp, Homo sapiens
tacatagcatctccctttttctgcttctggagtgaacatatgtatttatgcctgacagacttctaggtatatgaagatgattattctttttcttttaaattttttgttttttttttgggctgactgtacctattacttcaactgttctttaatataacatgatatctggtcccctccttccctggtctgccttctctggatatgttctattttatcccttttgaaaagcatagtatccagttctgagtgttaatctcttagtaaccatcttagcctaaaaccttctactctttactggtattaattcagccaaccccattgtcatattgattcatattgtttttgaaatttttagttctttttttaaacttacgattttattgaattaaattatttaatcatcatgtacttgttttgaatttttttgagcttgagatattctgtttattcattataaattttatcttaaagttagatttggcc

SEQ ID NO: 344456 - DNA, 244 bp, Homo sapiens
actaaccagaaccagatacagagaccagaagtatcagtaggaagaacagaacaagaatctgttcattcaacattttgtcctggctttttctggatgctgaggattcagtgataacaaagaaaaatctatgtctccactggaacttatattattgtggaatacaagaaataaaaattttatgttttcaagtaatttgttcattcatcaaacattaagaaaataaatgaatatatcctttgtgtca

SEQ ID NO: 344457 - DNA, 806 bp, Homo sapiens
gaactcctaaagaagaaatcatccattcagtgagagcaaatgaacactccaacagactgaaacaaagcatctttacaggagatgtgaatgcgagaaagcaaagagaactacagtcagggtctccgctggcatggcccaagcccaccgtggcatgatccagagagacgagtcagcagagcactatgggcagctcccatactcttcgcagatcaacaagccagcatataacccagggagatagataatagtgatgctgtgctctgtagagggtagtggcaacagtgggatttcttctggaataaatctgtagtgagccagatgtttctgctgactatattacttctgacagtgtataatccaaaattgtttccttggccttccaaaaagttttataagctccctaacggctgcaataaatccctttcttcttaaactagctagagtggatttttgttctctacaaaacagatcctgccactaagaaccccactagtatttgttgccatgattagggaataagttaaaccactgtaaggggggaaaagcagctccaagtacaagggcttaaatgtgttagaagcttctttctcatatcacaattcaagatgaatacctgggccatgctccataaagtcatctagatacccaggttgctggggcaactctgccatcttctacatttggcttttctctctaggtcaaaagtgttttctccagtgatcattaacttcactggttccacattccaggccacagaacggaacaaaagaaaatatgaagggcaaacaactttattttgaaaaacg

SEQ ID NO: 344458 - DNA, 478 bp, Homo sapiens
ctttctttttcattttctaaaaggttgatttgaagaaaccagtacctattctgaggttattattaaacatatacataccaccatataaatattcctttaaagaaagaacaagaatatgagttttgctgattggagtagttgaggtttgctaaatagcttctccaacatgatgtgctagaatcagatctttcttcttagatttatttaatctctgtgagcctcagtttcttgtttgttacattcagagaactcacaaaacatatagatgtgagaattaaatagtatgtcactaacctgcagattgcctagcacatagtaggtgcttaataaatgttaccttccttttgtttctctgtaaggatgtgcatgtcttaagatccttgagcaatgtttgttttccttaaataggcatatttgtacctaccctccattacagagatggagataaatatttattgtggaataataataaaatttt

SEQ ID NO: 344459 - DNA, 421 bp, Homo sapiens
acctaataatcatctggagacttagtacttggggggtgagctatagatagccctgtgtatcagggttttccaaacaaacagaaccaatgggatatatatagatatataaagacacttcttataggaattggctcaggagattataaaggccaagaagttccaatatgtgccccctgcaagccgaagaaccaggaaatccagtgtaattcttgcatgtgaagctgaagggctgaagagtgtctgctggtattgaaggctcaagaacctggagctctgaagtcaagggcaggagcagatgatggatgtcccagcttcagaagagagagcaaatttgccttcctccacctcttttatgattcctatgctcagttaattgaatgatgcccactcacattagtgaggatgggtttttgatacccag

SEQ ID NO: 344460 - DNA, 134 bp, Homo sapiens
ggctgaaagatgcgagggaattgaaaatagtgttataattctaggatgtgttctttggaggaaagttaagaagacacgaaatgtaattttaagatgataatgtgtaccaatccacttaacccaactgtcagctc

SEQ ID NO: 344461 - DNA, 838 bp, Homo sapiens
gacaagttcgagcatcttaaaatgattcaacaggaggagataaggaagctcgaggaagagaaaaaaaaactggaaggagaaatcatagatttttataaaatgaaagctgcctctgaagcactgcagactcagctgagcaccgatacaaagaaagacaaacatcctgatccatatgaattcctcttattaagaaaaataaagcatccaggattcaatgaagaactgactatcaccttgttaatcattcagaaacatgttgcaggcttaagccatttttgatatagatactgaaacaattacttgctaagagcaaacttgaaggtatggataaggccctgagtcatcttcctgagctgaatgatagttaagctgaattaacaatttggacaagacagcaaatgctattgtcgcaagttttctaaagaagaatctgaagtgaaatgacatcaagagacctatcaagacctgtatccaggaaaagaccaaaccaatgcagaccaaaccaatgcagaactcctatgtgctgatggtggtcttacatttccctaagtttctgccgactaaactgtgcacacgttctcaggacctcctgaagctgcgtcacaggcactaatcaaagaacacaaccaagagtttggccttttcttcagcactgggaattgtgatccaaagcttttcctgatgaagcacaaagttggagaaaaaaaagcaaactaaacaacaacaatgaaacagaacagagttaatctgctgtagctcaagagaggatgtacctgcccccaccccgcatccctgggctcgggtttgccttgctgacctctgctgccacctggtgcca

SEQ ID NO: 344462 - DNA, 3843 bp, Homo sapiens
  misc_feature (2550)..(2550): n is a, c, g, or t
  misc_feature (2602)..(2602): n is a, c, g, or t
  misc_feature (3122)..(3122): n is a, c, g, or t
  misc_feature (3171)..(3171): n is a, c, g, or t
  misc_feature (3215)..(3215): n is a, c, g, or t
gacaagttcgagcatcttaaaatgattcaacaggaggagataaggaagctcgaggaagagaaaaaaaaactggaaggagaaatcatagatttttataaaatgaaagctgcctctgaagcactgcagactcagctgagcaccgatacaaagaaagacaaacatcctgatccatatgaattcctcttattaagaaaaataaagcatccaggattcaatgaagaactgactatcaccttgttaatcattcagaaacatgttgcaggcttaagccatttttgatatagatactgaaacaattacttgctaagagcaaacttgaaggtatggataaggccctgagtcatcttcctgagctgaatgatagttaagctgaattaacaatttggacaagacagcaaatgctattgtcgcaagttttctaaagaagaatctgaagtgaaatgacatcaagagacctatcaagacctgtatccaggaaaagaccaaaccaatgcagaccaaaccaatgcagaactcctatgtgctgatggtggtcttacatttccctaagtttctgccgactaaactgtgcacacgttctcaggacctcctgaagctgcgtcacaggcactaatcaaagaacacaaccaagttgagtgtcaatcatttcaagaaatctatttgcaaggttaaggacacacctgagaaaagaacagagaaccacaggaaaaactgtggtccgtgcttttcccaaagattgtctggggacctcagtaagtaaaggggaaaagtgtgggtattggggaaaggggaagaagtggaaaaaatgggtgtgggtaaatcagaggcaaatggttgcattcttctgtctttggtcagcgttcactgaatacacattttacatgcgatggaggtagaggcagggatgtagcttttttatctttgtgtaatagctatcttatttaggaaccagatgggaagcaggtttgcataagccagttcccagcttggcttttccctttggcttagtgagtctggggtcccaggatttattttccgttctcacaggttgtggtcctcacatttggctcaaaatattcaaaattttttccagagtttggccttttcttcagcactgggaattgtgatccaaagcttttcctgagcagacctgcatgtctgcggtcaactgggttggcagagacagagtgactgtcttcctccaggaagcagcaggttaactggttggcagagacagagggacagagggactgtcttcctccaggaagcagcaggttaactggttggcagagacagagggacagagggactgtcttcctccaggaagcagcaggttggctctggttccttcgtggggcagctggtctccagggcagcaagagagaccaagcccccgtgcacattctacagcctctgtgcacatcagacttgttaatatcccattggccagtgtaagtcacatggccaagcccagattaaggagtggaaagatggacgctatctcctcctgggagaggaggcaaaggaggtgagagcattatgtggccacttatgtttgcaatctaccatacttagccctttgagaaaagaattaactgagaaacttgcttcaaatagggcattcagtaaaatgaagccccaattgaagtaaaatgcatatataaaaaatgaaactgtgaccgattttaaggacagtattggcaaatatttctgtgctcttggaggagaagacccttattggcatgacatgtcagaaaccacaatgaaagaattattttaacttgcattcataaaaattaaaattattcattaaaaacatcgtgaatgaaattaaaagtcaaaatgtaagccagaaaattatttacaatgtatgtgtcaggaaaagacaatacccttcaaactttgagagtttacatcagaaagaaaacagcaaatgacatgatccaaacttgataaaggacatgaaaaagagccagcacttagtatgttttctgaatgaataagtagccaacagcacatgaaaatgcgtgtaatccatttgtaagcagagaaatgcaaactaaaacagtaaagtgtcattttcatttcctggattggcaaagggttttatgtattttactgatagtgctcaatattagcagtaaacaacaaatggtgagtaaatatgagcttcggaacctcagggaaatgatctccttatttcaacctgtagattccttcctacaaccagtgtctacagagcacctactatgtgccaggcacagcctaagtcctgaaggtgtagtctccactgagaaggtgatatttgcacaaagacctgaaagacaggagtgaactgtgtggataactgtgggtacccctacaggcagaggagtagcaatgtgggtcccaaggtgggaccacatcagacatgttcgaggactagctgagggagagaggtgggaggtcagaggagatgggggccggctctgctggccgtcacgagcactctgggtgcagagggcgagaggtgggaggtcagaggagatgggggccggctttgctggccancacgagcactctgggtgctgagggcgagaggtgggaggtcagaggagatggnggctggctctgctggccgtcacgagcactctgggtgctgagggcaagaggtggggaggaggtcagaggagatgggggctggctctgccggccaacacgagcactctgggttttcctccaaatgctatgagagcagaggagtaacctggtctgacttgggtgtgagcagatctctctggttgttgttctggaaaaaactgaggtgcccacgtgaaagcagagatcggttaggaggctgctgcagcaattcaggcaaaaatgggtggcgggcctcgggtgtagtggaggagaagcgatcggattttggatatttgtagctcccccaatacgatttcctggagaaggagatgacttcaatcttctggcctgagtagctgaaaggatgaagctgtccttcgtggaggtggggaatccacagagaagcgggtagggagagagtatcaggagctcagtgttagccatggatgttcgaggggaggtattgagcagctgatagagacacaggcctgtggtcccagganaaggtctgggggtcactagcccatggatggagtcacaggctgcatagantgcaggaaagcgaaggtggagagagaagagcagagtaccagganggaccattgagcaccctggtgttgagagcaagtggcctctagtcagagttgggtcagggccactgtgagtgggctgcccccaacatgagtcggctgtctaggactagtttatctctgcttctcactttactggtattatggggcagctcctgctgtcttccaatttggtgtttgtaaaatgagacataaaaagcaggtgacaaggataccaggaagtgcacaggtctgagtggagtatggggctgtctccaggggagaggtggctgtttggagggaagggtgacaatggataatcagggtccatgggcatccctgcttgttttggagccatggacactcaaataatgtgattttatgaggctattggagaaaaaattggccacagggccaagagggctgggaggaccccagctctccgactggtgtttgcttctctgccatcagggtcgggaggccatgccaagcattgtgatttgcagagtccatgagacaggaacactcccaccacagtgacctgcctctgcacacagccagaatgtagctgactcctttcttctcccacttgcatgcttccaagccttcaaaacatactcatctccatgttctgtgaattagcaatttttaaaaa

SEQ ID NO: 344463 - DNA, 3425 bp, Homo sapiens
  misc_feature (2132)..(2132): n is a, c, g, or t
  misc_feature (2184)..(2184): n is a, c, g, or t
  misc_feature (2704)..(2704): n is a, c, g, or t
  misc_feature (2753)..(2753): n is a, c, g, or t
  misc_feature (2797)..(2797): n is a, c, g, or t
tgagaaagtctcgctctctctcccagtctggagtgcagtggcgtgatcttggctcactgccagctccacctcccaggttcacgccattctcctgcctcagcctcccaagtagctggggctacaggcacctgccaccaaacccggctaatttttttgtatttttagtagagacggggtttcaccgtgttagccaggatcgtcttgatctcctgaccttgtgatccacccgcctcggcctcccaaagtgctgggattacaggtgtgagccaccgcacctggtccaagaacccaagttttagatctagagtgatgtcagcatgacattgatttcctgaggcccaggggtgaaggagctgaggacagcagaggggtgaaggaagtcagctacagacagcagcagctgatgcacaggcctcccagcgcctgaagtcacccggaattgggaagtgctcagaagcttacaaagctgcctcgaggtgggaacacaacattaatccaagagcagatccctgatcctataaaaatgtactagatgcagtgggggcattttaaatgagcagggaaggacagacagataaacagaaggacaaacagtattgggattgggataaatgctcagcttttgcccaaatcttagtgacttaagcatcacttatttgctcacgattctgtggctggaccatttggtttggctcacagggcagggactgtgctggtcttacctgagcagacctgcatgtctgcggtcaactgggttggcagagacagagtgactgtcttcctccaggaagcagcaggttaactggttggcagagacagagggacagagggactgtcttcctccaggaagcagcaggttaactggttggcagagacagagggacagagggactgtcttcctccaggaagcagcaggttggctctggttccttcgtggggcagctggtctccagggcagcaagagagaccaagcccccgtgcacattctacagcctctgtgcacatcagacttgttaatatcccattggccagtgtaagtcacatggccaagcccagattaaggagtggaaagatggacgctatctcctcctgggagaggaggcaaaggaggtgagagcattatgtggccacttatgtttgcaatctaccatacttagccctttgagaaaagaattaactgagaaacttgcttcaaatagggcattcagtaaaatgaagccccaattgaagtaaaatgcatatataaaaaatgaaactgtgaccgattttaaggacagtattggcaaatatttctgtgctcttggaggagaagacccttattggcatgacatgtcagaaaccacaatgaaagaattattttaacttgcattcataaaaattaaaattattcattaaaaacatcgtgaatgaaattaaaagtcaaaatgtaagccagaaaattatttacaatgtatgtgtcaggaaaagacaatacccttcaaactttgagagtttacatcagaaagaaaacagcaaatgacatgatccaaacttgataaaggacatgaaaaagagccagcacttagtatgttttctgaatgaataagtagccaacagcacatgaaaatgcgtgtaatccatttgtaagcagagaaatgcaaactaaaacagtaaagtgtcattttcatttcctggattggcaaagggttttatgtattttactgatagtgctcaatattagcagtaaacaacaaatggtgagtaaatatgagcttcggaacctcagggaaatgatctccttatttcaacctgtagattccttcctacaaccagtgtctacagagcacctactatgtgccaggcacagcctaagtcctgaaggtgtagtctccactgagaaggtgatatttgcacaaagacctgaaagacaggagtgaactgtgtggataactgtgggtacccctacaggcagaggagtagcaatgtgggtcccaaggtgggaccacatcagacatgttcgaggactagctgagggagagaggtgggaggtcagaggagatgggggccggctctgctggccgtcacgagcactctgggtgcagagggcgagaggtgggaggtcagaggagatgggggccggctttgctggccancacgagcactctgggtgctgagggcgagaggtgggaggtcagaggagatggnggctggctctgctggccgtcacgagcactctgggtgctgagggcaagaggtggggaggaggtcagaggagatgggggctggctctgccggccaacacgagcactctgggttttcctccaaatgctatgagagcagaggagtaacctggtctgacttgggtgtgagcagatctctctggttgttgttctggaaaaaactgaggtgcccacgtgaaagcagagatcggttaggaggctgctgcagcaattcaggcaaaaatgggtggcgggcctcgggtgtagtggaggagaagcgatcggattttggatatttgtagctcccccaatacgatttcctggagaaggagatgacttcaatcttctggcctgagtagctgaaaggatgaagctgtccttcgtggaggtggggaatccacagagaagcgggtagggagagagtatcaggagctcagtgttagccatggatgttcgaggggaggtattgagcagctgatagagacacaggcctgtggtcccagganaaggtctgggggtcactagcccatggatggagtcacaggctgcatagantgcaggaaagcgaaggtggagagagaagagcagagtaccagganggaccattgagcaccctggtgttgagagcaagtggcctctagtcagagttgggtcagggccactgtgagtgggctgcccccaacatgagtcggctgtctaggactagtttatctctgcttctcactttactggtattatggggcagctcctgctgtcttccaatttggtgtttgtaaaatgagacataaaaagcaggtgacaaggataccaggaagtgcacaggtctgagtggagtatggggctgtctccaggggagaggtggctgtttggagggaagggtgacaatggataatcagggtccatgggcatccctgcttgttttggagccatggacactcaaataatgtgattttatgaggctattggagaaaaaattggccacagggccaagagggctgggaggaccccagctctccgactggtgtttgcttctctgccatcagggtcgggaggccatgccaagcattgtgatttgcagagtccatgagacaggaacactcccaccacagtgacctgcctctgcacacagccagaatgtagctgactcctttcttctcccacttgcatgcttccaagccttcaaaacatactcatctccatgttctgtgaattagcaatttttaaaaa

SEQ ID NO: 344464 - DNA, 3238 bp, Homo sapiens
  misc_feature (281)..(281): n is a, c, g, or t
  misc_feature (1945)..(1945): n is a, c, g, or t
  misc_feature (1997)..(1997): n is a, c, g, or t
  misc_feature (2517)..(2517): n is a, c, g, or t
  misc_feature (2566)..(2566): n is a, c, g, or t
  misc_feature (2610)..(2610): n is a, c, g, or t
tgagaaagtctcgctctctctcccagtctggagtgcagtggcgtgatcttggctcactgccagctccacctcccaggttcacgccattctcctgcctcagcctcccaagtagctggggctacaggcacctgccaccaaacccggctaatttttttgtatttttagtagagacggggtttcaccgtgttagccaggatcgtcttgatctcctgaccttgtgatccacccgcctcggcctcccaaagtgctgggattacaggtgtgagccaccgcgcttagcnatacctgaccttttagtaaatcaaatttgggcaggtggttctgagagcttgtgtggcatgtatttctcagtgggggcattttaaatgagcagggaaggacagacagataaacagaaggacaaacagtattgggattgggataaatgctcagcttttgcccaaatcttagtgacttaagcatcacttatttgctcacgattctgtggctggaccatttggtttggctcacagggcagggactgtgctggtcttacctgagcagacctgcatgtctgcggtcaactgggttggcagagacagagtgactgtcttcctccaggaagcagcaggttaactggttggcagagacagagggacagagggactgtcttcctccaggaagcagcaggttaactggttggcagagacagagggacagagggactgtcttcctccaggaagcagcaggttggctctggttccttcgtggggcagctggtctccagggcagcaagagagaccaagcccccgtgcacattctacagcctctgtgcacatcagacttgttaatatcccattggccagtgtaagtcacatggccaagcccagattaaggagtggaaagatggacgctatctcctcctgggagaggaggcaaaggaggtgagagcattatgtggccacttatgtttgcaatctaccatacttagccctttgagaaaagaattaactgagaaacttgcttcaaatagggcattcagtaaaatgaagccccaattgaagtaaaatgcatatataaaaaatgaaactgtgaccgattttaaggacagtattggcaaatatttctgtgctcttggaggagaagacccttattggcatgacatgtcagaaaccacaatgaaagaattattttaacttgcattcataaaaattaaaattattcattaaaaacatcgtgaatgaaattaaaagtcaaaatgtaagccagaaaattatttacaatgtatgtgtcaggaaaagacaatacccttcaaactttgagagtttacatcagaaagaaaacagcaaatgacatgatccaaacttgataaaggacatgaaaaagagccagcacttagtatgttttctgaatgaataagtagccaacagcacatgaaaatgcgtgtaatccatttgtaagcagagaaatgcaaactaaaacagtaaagtgtcattttcatttcctggattggcaaagggttttatgtattttactgatagtgctcaatattagcagtaaacaacaaatggtgagtaaatatgagcttcggaacctcagggaaatgatctccttatttcaacctgtagattccttcctacaaccagtgtctacagagcacctactatgtgccaggcacagcctaagtcctgaaggtgtagtctccactgagaaggtgatatttgcacaaagacctgaaagacaggagtgaactgtgtggataactgtgggtacccctacaggcagaggagtagcaatgtgggtcccaaggtgggaccacatcagacatgttcgaggactagctgagggagagaggtgggaggtcagaggagatgggggccggctctgctggccgtcacgagcactctgggtgcagagggcgagaggtgggaggtcagaggagatgggggccggctttgctggccancacgagcactctgggtgctgagggcgagaggtgggaggtcagaggagatggnggctggctctgctggccgtcacgagcactctgggtgctgagggcaagaggtggggaggaggtcagaggagatgggggctggctctgccggccaacacgagcactctgggttttcctccaaatgctatgagagcagaggagtaacctggtctgacttgggtgtgagcagatctctctggttgttgttctggaaaaaactgaggtgcccacgtgaaagcagagatcggttaggaggctgctgcagcaattcaggcaaaaatgggtggcgggcctcgggtgtagtggaggagaagcgatcggattttggatatttgtagctcccccaatacgatttcctggagaaggagatgacttcaatcttctggcctgagtagctgaaaggatgaagctgtccttcgtggaggtggggaatccacagagaagcgggtagggagagagtatcaggagctcagtgttagccatggatgttcgaggggaggtattgagcagctgatagagacacaggcctgtggtcccagganaaggtctgggggtcactagcccatggatggagtcacaggctgcatagantgcaggaaagcgaaggtggagagagaagagcagagtaccagganggaccattgagcaccctggtgttgagagcaagtggcctctagtcagagttgggtcagggccactgtgagtgggctgcccccaacatgagtcggctgtctaggactagtttatctctgcttctcactttactggtattatggggcagctcctgctgtcttccaatttggtgtttgtaaaatgagacataaaaagcaggtgacaaggataccaggaagtgcacaggtctgagtggagtatggggctgtctccaggggagaggtggctgtttggagggaagggtgacaatggataatcagggtccatgggcatccctgcttgttttggagccatggacactcaaataatgtgattttatgaggctattggagaaaaaattggccacagggccaagagggctgggaggaccccagctctccgactggtgtttgcttctctgccatcagggtcgggaggccatgccaagcattgtgatttgcagagtccatgagacaggaacactcccaccacagtgacctgcctctgcacacagccagaatgtagctgactcctttcttctcccacttgcatgcttccaagccttcaaaacatactcatctccatgttctgtgaattagcaatttttaaaaa

SEQ ID NO: 344465 - DNA, 1089 bp, Homo sapiens
tgagaaagtctcgctctctctcccagtctggagtgcagtggcgtgatcttggctcactgccagctccacctcccaggttcacgccattctcctgcctcagcctcccaagtagctggggctacaggcacctgccaccaaacccggctaatttttttgtatttttagtagagacggggtttcaccgtgttagccaggatcgtcttgatctcctgaccttgtgatccacccgcctcggcctcccaaagtgctgggattacaggtgtgagccaccgcacctggtccaagaacccaagttttagatctagagtgatgtcagcatgacattgatttcctgaggcccaggggtgaaggagctgaggacagcagaggggtgaaggaagtcagctacagacagcagcagctgatgcacaggcctcccagcgcctgaagtcacccggaattgggaagtgctcagaagcttacaaagctgcctcgaggaacagtaagaggaccttgtgcatgaataatttgtatccacactgcagacagaagaatcccaagacttcttagagaacccagtgacttaacgcaccttcaatctgtgaaatcctcatgctatacttctgaccgtaatccatcgtacacaacaaacattgaggcaacagatagacaacattcctgacaggaacccgagaaacttacgtctcatattatcatctcatctggacttgacaactgcaaatctcttaagaaccaaacagattcctaaccattgcaaacacgaacaaaccatgcttttgtagaggagtctcacatatcaacatacttacttgttcagaccccccacatgttctcataccataacatattcattcaaaacattacaccacacacaacacaagcaacactcaccacaacaatctcagcacaccatcatggacgtcaagcaagactacacacaccccatcggatgatgcggacgcggcgccccagaagacgaaacaggaacaccggaccaacaacggcaacaccacgaagcacgctcggtacagacgacagagacaccggagcactactaccaaataaaacacgacacgggctagccacagc

SEQ ID NO: 344466 - DNA, 3784 bp, Homo sapiens
  misc_feature (2491)..(2491): n is a, c, g, or t
  misc_feature (2543)..(2543): n is a, c, g, or t
  misc_feature (3063)..(3063): n is a, c, g, or t
  misc_feature (3112)..(3112): n is a, c, g, or t
  misc_feature (3156)..(3156): n is a, c, g, or t
gacaagttcgagcatcttaaaatgattcaacaggaggagataaggaagctcgaggaagagaaaaaaaaactggaaggagaaatcatagatttttataaaatgaaagctgcctctgaagcactgcagactcagctgagcaccgatacaaagaaagacaaacatcctgatccatatgaattcctcttattaagaaaaataaagcatccaggattcaatgaagaactgactatcaccttgttaatcattcagaaacatgttgcaggcttaagccatttttgatatagatactgaaacaattacttgctaagagcaaacttgaaggtatggataaggccctgagtcatcttcctgagctgaatgatagttaagctgaattaacaatttggacaagacagcaaatgctattgtcgcaagttttctaaagaagaatctgaagtgaaatgacatcaagagacctatcaagacctgtatccaggaaaagaccaaaccaatgcagaccaaaccaatgcagaactcctatgtgctgatggtggtcttacatttccctaagtttctgccgactaaactgtgcacacgttctcaggacctcctgaagctgcgtcacaggcactaatcaaagaacacaaccaagttgagtgtcaatcatttcaagaaatctatttgcaaggttaaggacacacctgagaaaagaacagagaaccacaggaaaaactgtggtccgtgcttttcccaaagattgtctggggacctcagtaagtaaaggggaaaagtgtgggtattggggaaaggggaagaagtggaaaaaatgggtgtgggtaaatcagaggcaaatggttgcattcttctgtctttggtcagcgttcactgaatacacattttacatgcgatggaggtagaggcagggatgtagcttttttatctttgtgtaatagctatcttatttaggaaccagatgggaagcaggtttgcataagccagttcccagcttggcttttccctttggcttagtgagtctggggtcccaggatttattttccgttctcacaggttgtggtcctcacatttggctcaaaatattcaaaattttttccagagtttggccttttcttcagcactgggaattgtgatccaaagcttttcctgagcagacctgcatgtctgcggtcaactgggttggcagagacagagtgactgtcttcctccaggaagcagcaggttaactggttggcagagacagagggacagagggactgtcttcctccaggaagcagcaggttggctctggttccttcgtggggcagctggtctccagggcagcaagagagaccaagcccccgtgcacattctacagcctctgtgcacatcagacttgttaatatcccattggccagtgtaagtcacatggccaagcccagattaaggagtggaaagatggacgctatctcctcctgggagaggaggcaaaggaggtgagagcattatgtggccacttatgtttgcaatctaccatacttagccctttgagaaaagaattaactgagaaacttgcttcaaatagggcattcagtaaaatgaagccccaattgaagtaaaatgcatatataaaaaatgaaactgtgaccgattttaaggacagtattggcaaatatttctgtgctcttggaggagaagacccttattggcatgacatgtcagaaaccacaatgaaagaattattttaacttgcattcataaaaattaaaattattcattaaaaacatcgtgaatgaaattaaaagtcaaaatgtaagccagaaaattatttacaatgtatgtgtcaggaaaagacaatacccttcaaactttgagagtttacatcagaaagaaaacagcaaatgacatgatccaaacttgataaaggacatgaaaaagagccagcacttagtatgttttctgaatgaataagtagccaacagcacatgaaaatgcgtgtaatccatttgtaagcagagaaatgcaaactaaaacagtaaagtgtcattttcatttcctggattggcaaagggttttatgtattttactgatagtgctcaatattagcagtaaacaacaaatggtgagtaaatatgagcttcggaacctcagggaaatgatctccttatttcaacctgtagattccttcctacaaccagtgtctacagagcacctactatgtgccaggcacagcctaagtcctgaaggtgtagtctccactgagaaggtgatatttgcacaaagacctgaaagacaggagtgaactgtgtggataactgtgggtacccctacaggcagaggagtagcaatgtgggtcccaaggtgggaccacatcagacatgttcgaggactagctgagggagagaggtgggaggtcagaggagatgggggccggctctgctggccgtcacgagcactctgggtgcagagggcgagaggtgggaggtcagaggagatgggggccggctttgctggccancacgagcactctgggtgctgagggcgagaggtgggaggtcagaggagatggnggctggctctgctggccgtcacgagcactctgggtgctgagggcaagaggtggggaggaggtcagaggagatgggggctggctctgccggccaacacgagcactctgggttttcctccaaatgctatgagagcagaggagtaacctggtctgacttgggtgtgagcagatctctctggttgttgttctggaaaaaactgaggtgcccacgtgaaagcagagatcggttaggaggctgctgcagcaattcaggcaaaaatgggtggcgggcctcgggtgtagtggaggagaagcgatcggattttggatatttgtagctcccccaatacgatttcctggagaaggagatgacttcaatcttctggcctgagtagctgaaaggatgaagctgtccttcgtggaggtggggaatccacagagaagcgggtagggagagagtatcaggagctcagtgttagccatggatgttcgaggggaggtattgagcagctgatagagacacaggcctgtggtcccagganaaggtctgggggtcactagcccatggatggagtcacaggctgcatagantgcaggaaagcgaaggtggagagagaagagcagagtaccagganggaccattgagcaccctggtgttgagagcaagtggcctctagtcagagttgggtcagggccactgtgagtgggctgcccccaacatgagtcggctgtctaggactagtttatctctgcttctcactttactggtattatggggcagctcctgctgtcttccaatttggtgtttgtaaaatgagacataaaaagcaggtgacaaggataccaggaagtgcacaggtctgagtggagtatggggctgtctccaggggagaggtggctgtttggagggaagggtgacaatggataatcagggtccatgggcatccctgcttgttttggagccatggacactcaaataatgtgattttatgaggctattggagaaaaaattggccacagggccaagagggctgggaggaccccagctctccgactggtgtttgcttctctgccatcagggtcgggaggccatgccaagcattgtgatttgcagagtccatgagacaggaacactcccaccacagtgacctgcctctgcacacagccagaatgtagctgactcctttcttctcccacttgcatgcttccaagccttcaaaacatactcatctccatgttctgtgaattagcaatttttaaaaa

SEQ ID NO: 344467 - DNA, 544 bp, Homo sapiens
gcacccgtctgtacgtccgactaacttttgtaaaaatagtagagacaaggtttcaccatgttggccaggctggtctcgaactcctgacttcaagtgatccacccacctcggcctcccaaagtgctgggattacaggcatgagctactgcgcccagatgccaagctagagttttaaggcaggaaatgagagaaagatattgagagaggaaaaccaggtggtaagaaaactctaaaggtggccgggcgtggtggctcacgcccatgatctcagcaggagtttgagaacagcctggccaacatggtgaaaccctgtctctactaaaaatacaaaaattaggcaggcgtggtggtgcacgcctataatcccagctatttgggaggctgaggcaggaggacgacttgagtctgggagttcgaggctgcagtgagctctgatcgcaccactgcactccagcctgagtgacacagcgagaccctgcttcaaaaaaaaatttgtggcccaattttgtggccagacccctaggttaacagtgaggatcagtgg

SEQ ID NO: 344468 - DNA, 467 bp, Homo sapiens
caaaacattaatcaaaaattataccccttgaggccatgtaatttggtttttatttagtttattgtctattcaggtccataaagcctacaactgcaacaatatatacagttcatgatgacttaatatttattgaatagtaaaattaatacatgttaagagtagatctggcttcaggtaatcagggctgaagtgatatgtgcagtggtcaaggacaaatgtcaatgtataatctgacctcctgcactcgaaacacacatcaatactttaaatgcctcagaagaaagtcacgtaggagaataaatgaaagaaaatagaaaagttgttaattagattaagaaggaattaaacctggttttaaaatagagagataaagacatacaatataaaaatactgaagaacaagtagcataggcagaggagcactaaaggtataacaggaaagaaatatatctaaaaatattagtttc

SEQ ID NO: 344469 - DNA, 405 bp, Homo sapiens
cacaccagggtttatgggatacaatccatacagtcagctcaccgacagcaactacaggctgggaggaaacccgcccaccaacagctgggtcagggcatcctccgctattaccattccaaaaccctgaaagccaccagataagctgctgatgccctacatgaggtacagcagaaaggtctgagaccaaataaaggcttccaaccctgacctaaagttgtgggagattggctagattattggtggcatgtggcaagatctcactgatgaaaaacaagaatatttaaacgaatacaaagcagaaaagatagagtacaatgaatctatgaaggcctatcataattcccccgtgtactttgcttacataaatgcaaaaagtcgtgcagaagctgttttagagggagaaag

SEQ ID NO: 344470 - DNA, 146 bp, Homo sapiens
aaaaaagaaatgaagagcaacaagagcaacatggctcaatgggctgaaaaaaatgttctgatcactagggactaactaggtaactctgagaagatgtgttgtgtgtgtgtgtgtgtgtgtgtgtgtgtgtgtgtgtgtgtgtgtgt

SEQ ID NO: 344471 - DNA, 420 bp, Homo sapiens
ggcatacttgacattctgtggttggtgtccttatatttacccagttttggttctaggtgtcctctttcacacttcctgtcattggcttatacccctacctgtgtcattggccttaacaaggacttaaagatgccgaaagttcagtataaatcgaactgtaaaccatccacatttgcatatcctgcccctctggaattaccataagaaaaagaaaaggacaaggtttctactgctgtattatctatcactgccaaggctaaaaagaaggaaaaagaaaaaaaaaaaagataagatgagtaggagggcaggtccaaaagaagtgattcagcaaaatgaaaggggtcctcagggattaaaggggatgaatttacctgtcatccctaagaatctacaaaggagatgctcaggacagaaactgta

SEQ ID NO: 344472 - DNA, 522 bp, Homo sapiens
ccagccagtaaatgtttagaagcatagtagtaattagcaggtaggagttgtggggaggaaaggaaactgacatgatgggaagcaggaccagctacaaaatcttcaggaccagctcagaatgaaaatgccggggctcgtgttaaatcttaggatttcaacatggtgacagcagagcactaaaccaagcagggggcccttctagcaggaggccccatggggacctaggaaggaggtcacatccatacaaatgtaaagaaatgtcagagtaaatttcctccattgtccaggagattcggaataggttctcctaagactgatatttcttcattttaatagagttgctcagaaatgaaaaacaatcaatgggaagaaaaagaaaaaaaaaaaagataagatgagtaggagggcaggtccaaaagaagtgattcagcaaaatgaaaggggtcctcagggattaaaggggatgaatttacctgtcatccctaagaatctacaaaggagatgctcaggacagaaactgta

SEQ ID NO: 344473 - DNA, 804 bp, Homo sapiens
catataactgagtggcttataaataacagaaatgtatttctcacagttctggaggctggaaagtccaagattaaggcactggcaaatgtggagtgtgttgagagcccatatcctcatagaccaccatcctctcactctgagctcacatggtagaagggtgaggggtctttggcctcttttataagggcaataatcccatccatgagagtactgccaagatgacctaaccacccctcaatggctccttttcctaataccacacacttgtgggtgaggatttcaacatatgaattttgggggaacataacattaaaatcttagcaaatacattgatggttgaagagtgatgtggtcaggtttttttggggggggcagtttggctgtttttatcaagaccctttttgcatactctttgacccaacaattctgtttttagaaattcatcctaagcaaacagtcatgagcatattagaagatttaactgcagtaactatcattgcattgtttaaagtagcaggaatatgaaaaataacataaatgatataaaatggaatactatgtgccattttaaaatgaagtagaaaaatagttaatgatatgggaaattttcaccaaatactacagtaaaaaagtcggttgacaatagttactgattatgattccatttttgtttaaaaaaataattcacctacatgcatataaaaagaggtatagagaatttctagaagtgtattcaccagaatgcaaacatcagtctctctgattggagggaaaatggatgacctttattttttttttaaattt

SEQ ID NO: 344474 - DNA, 655 bp, Homo sapiens
  misc_feature (581)..(581): n is a, c, g, or t
  misc_feature (631)..(631): n is a, c, g, or t
cgcttgggggcgtggccgaggagccaagcgagccgggggcggggccgcctgggggatgaagtgggggcgctcgcctttcctgcctcactcgcagctgccgggtgttggggaaagagtcgcctgcctccggaccggagtgcagacctctgaccctggagtcgctcggccgctgggaaccgtccccttgggtcgtcgcctgggccgcccgtcgttccccggccccgaggggtccggctggccgcggtgtgggtagaggtcagcatgagccaaggggtccgccgggcaggcgctgggcagggggtagcggccgcggtgcagctgctggtcaccctgagcttcctgcggagcgtcgtcgaggcgcaggtcactggagttctggatgattgcttgtgtgatattgacagcatcgataacttcaatacctacaaaatcttccccaaaataaaaaaattgcaagagagagactattttcgttattacaaggttaatctgaagcgaccttgtcctttctgggcagaagatggccactgttcaataaaagactgtcatgtggagccctgtccagagagtaaaattccggntgggatgctgggcattctaataagtacttgggagcaattaacaggacatnaagtaatcaaagcggctttcattg

SEQ ID NO: 344475 - DNA, 527 bp, Homo sapiens
cggggagggccgggcagggccgggccagaaaagaggtgatttctggcgagcagaaaacccggggagcagagacctgaccgtccagtgcgggaaacatctgcgaaccgcccgcagggtggggggacggcgacactccgggtaatggcagtcaaaagaggaagatggtgacggtccccctgagctgttttcgttttttcctctcggatgtgttaagcggctgggagtgtggcgggagatgggacgggcatgaaccacctcggctgtcttgcgaagggagcgagcgcccagagaaacggtgacgtccttcccttcaggagttagtgagggagggagactgagagttgggggcactccgcagacccccgaggccccgccaggcgcaggggattgggagggggcaagacttcactcgaactgtcggactagagctttctgggcttttactcttcctcgagcaccttcccttgctcaagattgctttatttttacccagctgagctgtgtctgccaagtggcatcgccaggta

SEQ ID NO: 344476 - DNA, 4642 bp, Homo sapiens
cgcttgggggcgtggccgaggagccaagcgagccgggggcggggccgcctgggggatgaagtgggggcgctcgcctttcctgcctcactcgcagctgccgggtgttggggaaagagtcgcctgcctccggaccggagtgcagacctctgaccctggagtcgctcggccgctgggaaccgtccccttgggtcgtcgcctgggccgcccgtcgttccccggccccgaggggtccggctggccgcggtgtgggtagaggtcagcatgagccaaggggtccgccgggcaggcgctgggcagggggtagcggccgcggtgcagctgctggtcaccctgagcttcctgcggagcgtcgtcgaggcgcaggtcactggagttctggatgattgcttgtgtgatattgacagcatcgataacttcaatacctacaaaatcttccccaaaataaaaaaattgcaagagagagactattttcgttattacaaggttaatctgaagcgaccttgtcctttctgggcagaagatggccactgttcaataaaagactgtcatgtggagccctgtccagagagtaaaattccggttggaataaaagctgggcattctaataagtacttgaaaatggcaaacaataccaaagaattagaagtttgtgagcaagctaataaactgggagcaattaacagcacattaagtaatcaaagcaaagaagctttcattgactgggcaagatatgatgattcacgggatcacttttgtgaacttgatgatgagagatctccagctgctcagtatgtagacctattgctgaacccagagcgttacactggctataaagggacctctgcatggagagtgtggaacagcatctatgaagagaactgtttcaagcctcgatctgtttatcgtcctttaaatcctctggcgcctagccgaggcgaagatgatggagaatcattctacacatggctagaaggtttgtgtctggagaaaagagtcttctataagcttatatcgggacttcatgctagcatcaatttacatctatgcgcaaattatcttttggaagaaacctggggtaagcccagttggggacctaatattaaagaattcaaacaccgctttgaccctgtggaaaccaagggagaaggtccaagaaggctcaagaatctttactttttatacttgattgagcttcgagctttgtcaaaggtggctccatattttgagcgctcaattgtcgatctttacactggaaatgcagaagaagatgctgacacaaaaactcttctactgaatatctttcaagatacaaagtcctttcccatgcactttgatgagaaatccatgtttgcaggtgacaaaaaaggggccaagtcactaaaggaggaattccgattacatttcaagaatatctcccgtataatggactgtgttggatgtgacaaatgcagattatggggaaaattacagactcagggtttaggaactgccctgaagatattattctctgaaaaagaaatccaaaagcttccagagaatagtccatctaaaggcttccaactcacccgacaggaaatagttgctcttttaaatgcttttggaaggctttctacaagtataagagacttacagaattttaaagtcttattacaacagagtaggtaataaaggcttttatgtgtctaactagagacataaagtgactgtggaaagccttttaattatggacattcatcagaaagacactaatctgacttcaagaattctgaactattaaatagaaaatttaaatgctcacttgaatatttatgattcttaatagattattatcaactagagatatttataaatgaagtatatacttttaaaacatgtaagttatactaattttgtgtttaatttcatatgttttcatgtaatgaaaattctattttttttagaattggttttgtttttattctattatcctttatttccagttgtcaaactttaaatggctatgtctgcattctaataacactgttcagtctgttatggaaaaggagaactagggaacaaatgttgctcagggctggtgtcagtgagaaaaatttatcaatgctttttaatgtgtttttacccttgcctcactgtgtgtgtgtcactttctataatataaagaaatactataatatttctagaatctggaactgtcaccatgatgaatggccctttcaatgcatagttacagaaattcctgaagattccccaggacttcaatttcattggtttttatttgcagtttttagttgctgtaattgttgctgtttccagtctaaaggacctcctttggtaaaggtgaacaagacctctcccctatgctacccagccagattttgtgtgtgtaatgggctggcccaagagtgttcttttacttagaactccttttgattttgcttttctctgcccctagaaattttagggacaaagacattttggaaattgtcagttacttttagaaagaaaacactgcagaaatatttaacagattacttcttgataaaatttaaatgggattatatgaatttataatgccaattgaaaatattatatacacaaaatttgctattttcacttaaagtaagcatttttaaaggatttattttagaatacaatctatgcaatcctcgaactcagtgtgcttttccctgacaggatatataaaaaggtagattaggtcaaccctcctttaagcttactctcccctcaccttttcttttcactgtatataaacggtactttctgtgattcataccaacagaggtactttctgtgattcataccaacagtcctaaactgtcattttctaaatctgggatttaaaatctttagacaatatttaaaatcttgattttttttaaatgtcagcagatacaatttggaagattgcatctgtgtagaagtaatgcaggtacaagatctagagtttttccttagactctttagtcttttctgaattaaagaataagtgctcttaaatccatattttatcctgtcaaagtctgaaatgtgttcattgatgatttggtgacatctaaaaaattgtatttagttggcttggctcacccctcttaaaaatacttagccatctcttggtgggatgtggtgggggtattaaggtctcagagttatttattttctcacctaatttcaaacctttataaacttggggttttgttgttgatggtggtagtattttttgttaagttgtttaaaaggctgacttgattggagcctcctctactttttcttgagggttgcaagtattgtatggtgggggaggggggccttaaggcaaactgtctaaaaagtgactatccaattaatttaactagtaaattagtaagaattattcttagtattcattcagagtttaagatgtgaaaaatctgcactttgtttatcactctaaatgtaaagaactttttgatagtgttatttcaccactccctcagttaaaggctattatttaaactgtttactggagaaaatcctcgctcatgtccatttattgtttttttctgtactgtgatttgtttcaagcttaggaaaactagtatattagagtatgttctaggaaattaaaagatctggttagagtaaaaagttctttttaaggttcttaactaattttttcacaactaagaaaataaatgaagtattcttaggctgaaattcatcttattttatcataaattagattgtaggggcagcctacatttttgtgtatgtgtttttatttcttaaatgattgtgtgagcctggtgacattttatggttcttgtgatctaaactgtttttccaattcacatcttttgtcgtgaagtgatattatactagagtactgtttgcattgtaaaaatgctttgctggtgctctggcattttgtctttatctcatcacctaatttaaaaacccagcacttgataatataactgacagaaatgattgtacccactgatgaagtaatgaaaatgaagaaaaggaaaatattccttccttcaatggcgtaagtttattttttacttaagtggcatctatgtaagttagacaaactatatattaaaattggtaaactttgaatgtttctcctgttttgattcttagattatgaggaggatcagacagaataagactccacacttttgaaatttgataagtcaaaacgttttattttgacatttttaacattgtgaattattcgatatttgtaatctctgtatgtatatgaaactctgccatgtttttcaactttgcctatgtgccactgtatataagaaaggacagctattttgatcttcatcagcattgccttcagctgaaaatttgggaacagttcacagtaaacctctcagtagtttgcaaactgaggtacctgcagaaaccatagctactcaccaaaatacacagattaggtgcatggtatcgtggaaattatttggtaaaaaaacacacacacaaatctatgtgtactgtattttaaggaatatctacaggtgcagctttgattttgaacagaattccaaataatttactgttgtacccaccagaatctagaaaatgtgaattaaagtacatgtttctgcaatcttttctgtcttgt

SEQ ID NO: 344477 - DNA, 4614 bp, Homo sapiens
cgcttgggggcgtggccgaggagccaagcgagccgggggcggggccgcctgggggatgaagtgggggcgctcgcctttcctgcctcactcgcagctgccgggtgttggggaaagagtcgcctgcctccggaccggagtgcagacctctgaccctggagtcgctcggccgctgggaaccgtccccttgggtcgtcgcctgggccgcccgtcgttccccggccccgaggggtccggctggccgcggtgtgggtagaggtcagcatgagccaaggggtccgccgggcaggcgctgggcagggggtagcggccgcggtgcagctgctggtcaccctgagcttcctgcggagcgtcgtcgaggcgcaggtcactggagttctggatgattgcttgtgtgatattgacagcatcgataacttcaatacctacaaaatcttccccaaaataaaaaaattgcaagagagagactattttcgttattacaaggttaatctgaagcgaccttgtcctttctgggcagaagatggccactgttcaataaaagactgtcatgtggagccctgtccagagagtaaaattccggttggaataaaagctgggcattctaataagtacttgaaaatggcaaacaataccaaagaattagaagtttgtgagcaagctaataaactgggagcaattaacagcacattaagtaatcaaagcaaagaagctttcattgactgggcaagatatgatgattcacgggatcacttttgtgaacttgatgatgagagatctccagctgctcagtatgtagacctattgctgaacccagagcgttacactggctataaagggacctctgcatggagagtgtggaacagcatctatgaagagaactgtttcaagcctcgatctgtttatcgtcctttaaatcctctggcgcctagccgaggcgaagatgatggagaatcattctacacatggctagaaggtttgtgtctggagaaaagagtcttctataagcttatatcgggacttcatgctagcatcaatttacatctatgcgcaaattatcttttggaagaaacctggggtaagcccagttggggacctaatattaaagaattcaaacaccgctttgaccctgtggaaaccaagggagaaggtccaagaaggctcaagaatctttactttttatacttgattgagcttcgagctttgtcaaaggtggctccatattttgagcgctcaattgtcgatctttacactggaaatgcagaagaagatgctgacacaaaaactcttctactgaatatctttcaagatacaaagtcctttcccatgcactttgatgagaaatccatgtttgcaggtgacaaaaaaggggccaagtcactaaaggaggaattccgattacatttcaagaatatctcccgtataatggactgtgttggatgtgacaaatgcagattatggggaaaattacagactcagggtttaggaactgccctgaagatattattctctgaaaaagaaatccaaaagcttccagagaatagtccatctaaaggcttccaactcacccgacaggaaatagttgctcttttaaatgcttttggaaggctttctacaagtataagagacttacagaattttaaagtcttattacaacagagtaggtaataaaggcttttatgtgtctaactagagacataaagtgactgtggaaagccttttaattatggacattcatcagaaagacactaatctgacttcaagaattctgaactattaaatagaaaatttaaatgctcacttgaatatttatgattcttaatagattattatcaactagagatatttataaatgaagtatatacttttaaaacatgtaagttatactaattttgtgtttaatttcatatgttttcatgtaatgaaaattctattttttttagaattggttttgtttttattctattatcctttatttccagttgtcaaactttaaatggctatgtctgcattctaataacactgttcagtctgttatggaaaaggagaactagggaacaaatgttgctcagggctggtgtcagtgagaaaaatttatcaatgctttttaatgtgtttttacccttgcctcactgtgtgtgtgtcactttctataatataaagaaatactataatatttctagaatctggaactgtcaccatgatgaatggccctttcaatgcatagttacagaaattcctgaagattccccaggacttcaatttcattggtttttatttgcagtttttagttgctgtaattgttgctgtttccagtctaaaggacctcctttggtaaaggtgaacaagacctctcccctatgctacccagccagattttgtgtgtgtaatgggctggcccaagagtgttcttttacttagaactccttttgattttgcttttctctgcccctagaaattttagggacaaagacattttggaaattgtcagttacttttagaaagaaaacactgcagaaatatttaacagattacttcttgataaaatttaaatgggattatatgaatttataatgccaattgaaaatattatatacacaaaatttgctattttcacttaaagtaagcatttttaaaggatttattttagaatacaatctatgcaatcctcgaactcagtgtgcttttccctgacaggatatataaaaaggtagattaggtcaaccctcctttaagcttactctcccctcaccttttcttttcactgtatataaacggtactttctgtgattcataccaacagtcctaaactgtcattttctaaatctgggatttaaaatctttagacaatatttaaaatcttgattttttttaaatgtcagcagatacaatttggaagattgcatctgtgtagaagtaatgcaggtacaagatctagagtttttccttagactctttagtcttttctgaattaaagaataagtgctcttaaatccatattttatcctgtcaaagtctgaaatgtgttcattgatgatttggtgacatctaaaaaattgtatttagttggcttggctcacccctcttaaaaatacttagccatctcttggtgggatgtggtgggggtattaaggtctcagagttatttattttctcacctaatttcaaacctttataaacttggggttttgttgttgatggtggtagtattttttgttaagttgtttaaaaggctgacttgattggagcctcctctactttttcttgagggttgcaagtattgtatggtgggggaggggggccttaaggcaaactgtctaaaaagtgactatccaattaatttaactagtaaattagtaagaattattcttagtattcattcagagtttaagatgtgaaaaatctgcactttgtttatcactctaaatgtaaagaactttttgatagtgttatttcaccactccctcagttaaaggctattatttaaactgtttactggagaaaatcctcgctcatgtccatttattgtttttttctgtactgtgatttgtttcaagcttaggaaaactagtatattagagtatgttctaggaaattaaaagatctggttagagtaaaaagttctttttaaggttcttaactaattttttcacaactaagaaaataaatgaagtattcttaggctgaaattcatcttattttatcataaattagattgtaggggcagcctacatttttgtgtatgtgtttttatttcttaaatgattgtgtgagcctggtgacattttatggttcttgtgatctaaactgtttttccaattcacatcttttgtcgtgaagtgatattatactagagtactgtttgcattgtaaaaatgctttgctggtgctctggcattttgtctttatctcatcacctaatttaaaaacccagcacttgataatataactgacagaaatgattgtacccactgatgaagtaatgaaaatgaagaaaaggaaaatattccttccttcaatggcgtaagtttattttttacttaagtggcatctatgtaagttagacaaactatatattaaaattggtaaactttgaatgtttctcctgttttgattcttagattatgaggaggatcagacagaataagactccacacttttgaaatttgataagtcaaaacgttttattttgacatttttaacattgtgaattattcgatatttgtaatctctgtatgtatatgaaactctgccatgtttttcaactttgcctatgtgccactgtatataagaaaggacagctattttgatcttcatcagcattgccttcagctgaaaatttgggaacagttcacagtaaacctctcagtagtttgcaaactgaggtacctgcagaaaccatagctactcaccaaaatacacagattaggtgcatggtatcgtggaaattatttggtaaaaaaacacacacacaaatctatgtgtactgtattttaaggaatatctacaggtgcagctttgattttgaacagaattccaaataatttactgttgtacccaccagaatctagaaaatgtgaattaaagtacatgtttctgcaatcttttctgtcttgt

SEQ ID NO: 344478 - DNA, 3310 bp, Homo sapiens
tgtaaatgatttgagattctttattaagaattattcatatcactgttcccattattaatctaatgtctgtagatagtatgaagtaacaggcttcctttgccccttctaaaccagtcttaatgagaacactaatttaaacatggaagcttcagtgtttgaggttttttattttaggttttgctttcaaattatagcttatgtaacaatatcaataatttgaaacagtatgcaacatgttagccttactaataagctttttctttcttccataggctttctacaagtataagagacttacagaattttaaagtcttattacaacagagtaggtaataaaggcttttatgtgtctaactagagacataaagtgactgtggaaagccttttaattatggacattcatcagaaagacactaatctgacttcaagaattctgaactattaaatagaaaatttaaatgctcacttgaatatttatgattcttaatagattattatcaactagagatatttataaatgaagtatatacttttaaaacatgtaagttatactaattttgtgtttaatttcatatgttttcatgtaatgaaaattctattttttttagaattggttttgtttttattctattatcctttatttccagttgtcaaactttaaatggctatgtctgcattctaataacactgttcagtctgttatggaaaaggagaactagggaacaaatgttgctcagggctggtgtcagtgagaaaaatttatcaatgctttttaatgtgtttttacccttgcctcactgtgtgtgtgtcactttctataatataaagaaatactataatatttctagaatctggaactgtcaccatgatgaatggccctttcaatgcatagttacagaaattcctgaagattccccaggacttcaatttcattggtttttatttgcagtttttagttgctgtaattgttgctgtttccagtctaaaggacctcctttggtaaaggtgaacaagacctctcccctatgctacccagccagattttgtgtgtgtaatgggctggcccaagagtgttcttttacttagaactccttttgattttgcttttctctgcccctagaaattttagggacaaagacattttggaaattgtcagttacttttagaaagaaaacactgcagaaatatttaacagattacttcttgataaaatttaaatgggattatatgaatttataatgccaattgaaaatattatatacacaaaatttgctattttcacttaaagtaagcatttttaaaggatttattttagaatacaatctatgcaatcctcgaactcagtgtgcttttccctgacaggatatataaaaaggtagattaggtcaaccctcctttaagcttactctcccctcaccttttcttttcactgtatataaacggtactttctgtgattcataccaacagaggtactttctgtgattcataccaacagtcctaaactgtcattttctaaatctgggatttaaaatctttagacaatatttaaaatcttgattttttttaaatgtcagcagatacaatttggaagattgcatctgtgtagaagtaatgcaggtacaagatctagagtttttccttagactctttagtcttttctgaattaaagaataagtgctcttaaatccatattttatcctgtcaaagtctgaaatgtgttcattgatgatttggtgacatctaaaaaattgtatttagttggcttggctcacccctcttaaaaatacttagccatctcttggtgggatgtggtgggggtattaaggtctcagagttatttattttctcacctaatttcaaacctttataaacttggggttttgttgttgatggtggtagtattttttgttaagttgtttaaaaggctgacttgattggagcctcctctactttttcttgagggttgcaagtattgtatggtgggggaggggggccttaaggcaaactgtctaaaaagtgactatccaattaatttaactagtaaattagtaagaattattcttagtattcattcagagtttaagatgtgaaaaatctgcactttgtttatcactctaaatgtaaagaactttttgatagtgttatttcaccactccctcagttaaaggctattatttaaactgtttactggagaaaatcctcgctcatgtccatttattgtttttttctgtactgtgatttgtttcaagcttaggaaaactagtatattagagtatgttctaggaaattaaaagatctggttagagtaaaaagttctttttaaggttcttaactaattttttcacaactaagaaaataaatgaagtattcttaggctgaaattcatcttattttatcataaattagattgtaggggcagcctacatttttgtgtatgtgtttttatttcttaaatgattgtgtgagcctggtgacattttatggttcttgtgatctaaactgtttttccaattcacatcttttgtcgtgaagtgatattatactagagtactgtttgcattgtaaaaatgctttgctggtgctctggcattttgtctttatctcatcacctaatttaaaaacccagcacttgataatataactgacagaaatgattgtacccactgatgaagtaatgaaaatgaagaaaaggaaaatattccttccttcaatggcgtaagtttattttttacttaagtggcatctatgtaagttagacaaactatatattaaaattggtaaactttgaatgtttctcctgttttgattcttagattatgaggaggatcagacagaataagactccacacttttgaaatttgataagtcaaaacgttttattttgacatttttaacattgtgaattattcgatatttgtaatctctgtatgtatatgaaactctgccatgtttttcaactttgcctatgtgccactgtatataagaaaggacagctattttgatcttcatcagcattgccttcagctgaaaatttgggaacagttcacagtaaacctctcagtagtttgcaaactgaggtacctgcagaaaccatagctactcaccaaaatacacagattaggtgcatggtatcgtggaaattatttggtaaaaaaacacacacacaaatctatgtgtactgtattttaaggaatatctacaggtgcagctttgattttgaacagaattccaaataatttactgttgtacccaccagaatctagaaaatgtgaattaaagtacatgtttctgcaatcttttctgtcttgt

SEQ ID NO: 344479 - DNA, 1722 bp, Homo sapiens
cgcttgggggcgtggccgaggagccaagcgagccgggggcggggccgcctgggggatgaagtgggggcgctcgcctttcctgcctcactcgcagctgccgggtgttggggaaagagtcgcctgcctccggaccggagtgcagacctctgaccctggagtcgctcggccgctgggaaccgtccccttgggtcgtcgcctgggccgcccgtcgttccccggccccgaggggtccggctggccgcggtgtgggtagaggtcagcatgagccaaggggtccgccgggcaggcgctgggcagggggtagcggccgcggtgcagctgctggtcaccctgagcttcctgcggagcgtcgtcgaggcgcaggtcactggagttctggatgattgcttgtgtgatattgacagcatcgataacttcaatacctacaaaatcttccccaaaataaaaaaattgcaagagagagactattttcgttattacaaggttaatctgaagcgaccttgtcctttctgggcagaagatggccactgttcaataaaagactgtcatgtggagccctgtccagagagtaaaattccggttggaataaaagctgggcattctaataagtacttgaaaatggcaaacaataccaaagaattagaagtttgtgagcaagctaataaactgggagcaattaacagcacattaagtaatcaaagcaaagaagctttcattgactgggcaagatatgatgattcacgggatcacttttgtgaacttgatgatgagagatctccagctgctcagtatgtagacctattgctgaacccagagcgttacactggctataaagggacctctgcatggagagtgtggaacagcatctatgaagagaactgtttcaagcctcgatctgtttatcgtcctttaaatcctctggcgcctagccgaggcgaagatgatggagaatcattctacacatggctagaaggtttgtgtctggagaaaagagtcttctataagcttatatcgggacttcatgctagcatcaatttacatctatgcgcaaattatcttttggaagaaacctggggtaagcccagttggggacctaatattaaagaattcaaacaccgctttgaccctgtggaaaccaagggagaaggtccaagaaggctcaagaatctttactttttatacttgattgagcttcgagctttgtcaaaggtggctccatattttgagcgctcaattgtcgatctttacactggaaatgcagaagaagatgctgacacaaaaactcttctactgaatatctttcaagatacaaagtcctttcccatgcactttgatgagaaatccatgtttgcaggtgacaaaaaaggggccaagtcactaaaggaggaattccgattacatttcaagaatatctcccgtataatggactgtgttggatgtgacaaatgcagattatggggaaaattacagactcagggtttaggaactgccctgaagatattattctctgaaaaagaaatccaaaagcttccagagaatagtccatctaaaggcttccaactcacccgacaggaaatagttgctcttttaaatgcttttggaaggtaagaaccattatatgttgaagatttttgatttcccattgggtttcaacaaactgcaaagataatcttctttgctaaaagtagggtttgttttgttgacaaaaaaaattttatattg

SEQ ID NO: 344480 - DNA, 1257 bp, Homo sapiens
cgcttgggggcgtggccgaggagccaagcgagccgggggcggggccgcctgggggatgaagtgggggcgctcgcctttcctgcctcactcgcagctgccgggtgttggggaaagagtcgcctgcctccggaccggagtgcagacctctgaccctggagtcgctcggccgctgggaaccgtccccttgggtcgtcgcctgggccgcccgtcgttccccggccccgaggggtccggctggccgcggtgtgggtagaggtcagcatgagccaaggggtccgccgggcaggcgctgggcagggggtagcggccgcggtgcagctgctggtcaccctgagcttcctgcggagcgtcgtcgaggcgcaggtcactggagttctggatgattgcttgtgtgatattgacagcatcgataacttcaatacctacaaaatcttccccaaaataaaaaaattgcaagagagagactattttcgttattacaaggttaatctgaagcgaccttgtcctttctgggcagaagatggccactgttcaataaaagactgtcatgtggagccctgtccagagagtaaaattccggttggaataaaagctgggcattctaataagtacttgaaaatggcaaacaataccaaagaattagaagtttgtgagcaagctaataaactgggagcaattaacagcacattaagtaatcaaagcaaagaagctttcattgactgggcaagatatgatgattcacgggatcacttttgtgaacttgatggtaatacaataaactattataattaaattattttaactttaacccttttataagacattttaatcaatgaaaatataaactgaattatagcttcagtactggattttgctatgtagaccttattattcgtaatggcatttattgagagcctgtgttccaggccctatgttaagtgccttaaatacattatttctggtctttgcagctaccttcataagtgtgtattatttcatatctgagaaaactgagtctgaaaaagactaaataacttgcccaagatcacacaatagcaagaggctgaggcaggatttgatcccatatccgaatccaaaacctgtattctttccattatgatataccatctgccatggaccttcaattgaagccacttagttataggtctgtgaacattttgtaaaaatatttacactggaatttgctagaggtcttaacaaactcatgtaaagatgctttctaatgctggggaggac

SEQ ID NO: 344481 - DNA, 1174 bp, Homo sapiens
cgcttgggggcgtggccgaggagccaagcgagccgggggcggggccgcctgggggatgaagtgggggcgctcgcctttcctgcctcactcgcagctgccgggtgttggggaaagagtcgcctgcctccggaccggagtgcagacctctgaccctggagtcgctcggccgctgggaaccgtccccttgggtcgtcgcctgggccgcccgtcgttccccggccccgaggggtccggctggccgcggtgtgggtagaggtcagcatgagccaaggggtccgccgggcaggcgctgggcagggggtagcggccgcggtgcagctgctggtcaccctgagcttcctgcggagcgtcgtcgaggcgcaggtcactggagttctggatgattgcttgtgtgatattgacagcatcgataacttcaatacctacaaaatcttccccaaaataaaaaaattgcaagagagagactattttcgttattacaaggttaatctgaagcgaccttgtcctttctgggcagaagatggccactgttcaataaaagactgtcatgtggagccctgtccagagagtaaaattccggttggaataaaagctgggcattctaataagtaatcaaagcaaagaagctttcattgactgggcaagatatgatgattcacgggatcacttttgtgaacttgatggtaatacaataaactattataattaaattattttaactttaacccttttataagacattttaatcaatgaaaatataaactgaattatagcttcagtactggattttgctatgtagaccttattattcgtaatggcatttattgagagcctgtgttccaggccctatgttaagtgccttaaatacattatttctggtctttgcagctaccttcataagtgtgtattatttcatatctgagaaaactgagtctgaaaaagactaaataacttgcccaagatcacacaatagcaagaggctgaggcaggatttgatcccatatccgaatccaaaacctgtattctttccattatgatataccatctgccatggaccttcaattgaagccacttagttataggtctgtgaacattttgtaaaaatatttacactggaatttgctagaggtcttaacaaactcatgtaaagatgctttctaatgctggggaggac

SEQ ID NO: 344482 - DNA, 556 bp, Homo sapiens
gatctccagctgctcagtatgtagacctattgctgaacccagagcgttacactggctataaagggacctctgcatggagagtgtggaacagcatctatgaagagaactgtttcaagtaactggagggggtgggggaagaaggaacgactgatagagggtcgggagaggccgggtgctgtggctcacgcctgtaatcccagcactttgggaggccaaggtgggtggatcatctgaggtcaggagttcaagaccagcctggccaacatggtgaaaccccgtgtcaactaaaaatacaaaaaaattagccgggcatgatggcaggtgcctgtaatcccagctacttgggaggctgaggcaggagaatcacttgaacccgggaggcagaggttacaatgagcagagattgcgccactgtactccagcctgggtgactaagtgaaactctgtctcaaaaaaaaaagagggtggggaggggagtatttgtttctattggaataaaattatacactataaaagttaaaacattctatgtttgggtattatgctttctttttca

SEQ ID NO: 344483 - DNA, 1866 bp, Homo sapiens
cgcttgggggcgtggccgaggagccaagcgagccgggggcggggccgcctgggggatgaagtgggggcgctcgcctttcctgcctcactcgcagctgccgggtgttggggaaagagtcgcctgcctccggaccggagtgcagacctctgaccctggagtcgctcggccgctgggaaccgtccccttgggtcgtcgcctgggccgcccgtcgttccccggccccgaggggtccggctggccgcggtgtgggtagaggtcagcatgagccaaggggtccgccgggcaggcgctgggcagggggtagcggccgcggtgcagctgctggtcaccctgagcttcctgcggagcgtcgtcgaggcgcaggtcactggagttctggatgattgcttgtgtgatattgacagcatcgataacttcaatacctacaaaatcttccccaaaataaaaaaattgcaagagagagactattttcgttattacaaggttaatctgaagcgaccttgtcctttctgggcagaagatggccactgttcaataaaagactgtcatgtggagccctgtccagagagtaaaattccggttggaataaaagctgggcattctaataagtacttgaaaatggcaaacaataccaaagaattagaagtttgtgagcaagctaataaactgggagcaattaacagcacattaagtaatcaaagcaaagaagctttcattgactgggcaagatatgatgattcacgggatcacttttgtgaacttgatgatgagagatctccagctgctcagtatgtagacctattgctgaacccagagcgttacactggctataaagggacctctgcatggagagtgtggaacagcatctatgaagagaactgtttcaagcctcgatctgtttatcgtcctttaaatcctctggcgcctagccgaggcgaagatgatggagaatcattctacacatggctagaaggtttgtgtctggagaaaagagtcttctataagcttatatcgggacttcatgctagcatcaatttacatctatgcgcaaattatcttttggaagaaacctggggtaagcccagttggggacctaatattaaagaattcaaacaccgctttgaccctgtggaaaccaagggagaaggtccaagaaggctcaagaatctttactttttatacttgattgagcttcgagctttgtcaaaggtggctccatattttgagcgctcaattgtcgatctttacactggaaatgcagaagaagatgctgacacaaaaactcttctactgaatatctttcaagatacaaagtcctttcccatgcactttgatgagaaatccatgtttgcaggtgacaaaaaaggggccaagtcactaaaggaggaattccgattacatttcaagaatatctcccgtataatggactgtgttggatgtgacaaatgcagattatggggaaaattacagactcagggtttaggaactgccctgaagatattattctctgaaaaagaaatccaaaagcttccagagaatagtccatctaaaggcttccaactcacccgacaggaaatagttgctcttttaaatgcttttggaaggctttctacaagtataagagacttacagaattttaaagtcttattacaacagagtaggtaataaaggcttttatgtgtctaactagagacataaagtgactgtggaaagccttttaattatggacattcatcagaaagacactaatctgacttcaagaattctgaactattaaatagaaaatttaaatgctcacttgaatatttatgattcttaatagattattatcaactagagatatttataaatgaagtatatactttt

SEQ ID NO: 344484 - DNA, 4417 bp, Homo sapiens
cggggagggccgggcagggccgggccagaaaagaggtgatttctggcgagcagaaaacccggggagcagagacctgaccgtccagtgcgggaaacatctgcgaaccgcccgcagggtggggggacggcgacactccgggtcactggagttctggatgattgcttgtgtgatattgacagcatcgataacttcaatacctacaaaatcttccccaaaataaaaaaattgcaagagagagactattttcgttattacaaggttaatctgaagcgaccttgtcctttctgggcagaagatggccactgttcaataaaagactgtcatgtggagccctgtccagagagtaaaattccggttggaataaaagctgggcattctaataagtacttgaaaatggcaaacaataccaaagaattagaagtttgtgagcaagctaataaactgggagcaattaacagcacattaagtaatcaaagcaaagaagctttcattgactgggcaagatatgatgattcacgggatcacttttgtgaacttgatgatgagagatctccagctgctcagtatgtagacctattgctgaacccagagcgttacactggctataaagggacctctgcatggagagtgtggaacagcatctatgaagagaactgtttcaagcctcgatctgtttatcgtcctttaaatcctctggcgcctagccgaggcgaagatgatggagaatcattctacacatggctagaaggtttgtgtctggagaaaagagtcttctataagcttatatcgggacttcatgctagcatcaatttacatctatgcgcaaattatcttttggaagaaacctggggtaagcccagttggggacctaatattaaagaattcaaacaccgctttgaccctgtggaaaccaagggagaaggtccaagaaggctcaagaatctttactttttatacttgattgagcttcgagctttgtcaaaggtggctccatattttgagcgctcaattgtcgatctttacactggaaatgcagaagaagatgctgacacaaaaactcttctactgaatatctttcaagatacaaagtcctttcccatgcactttgatgagaaatccatgtttgcaggtgacaaaaaaggggccaagtcactaaaggaggaattccgattacatttcaagaatatctcccgtataatggactgtgttggatgtgacaaatgcagattatggggaaaattacagactcagggtttaggaactgccctgaagatattattctctgaaaaagaaatccaaaagcttccagagaatagtccatctaaaggcttccaactcacccgacaggaaatagttgctcttttaaatgcttttggaaggctttctacaagtataagagacttacagaattttaaagtcttattacaacagagtaggtaataaaggcttttatgtgtctaactagagacataaagtgactgtggaaagccttttaattatggacattcatcagaaagacactaatctgacttcaagaattctgaactattaaatagaaaatttaaatgctcacttgaatatttatgattcttaatagattattatcaactagagatatttataaatgaagtatatacttttaaaacatgtaagttatactaattttgtgtttaatttcatatgttttcatgtaatgaaaattctattttttttagaattggttttgtttttattctattatcctttatttccagttgtcaaactttaaatggctatgtctgcattctaataacactgttcagtctgttatggaaaaggagaactagggaacaaatgttgctcagggctggtgtcagtgagaaaaatttatcaatgctttttaatgtgtttttacccttgcctcactgtgtgtgtgtcactttctataatataaagaaatactataatatttctagaatctggaactgtcaccatgatgaatggccctttcaatgcatagttacagaaattcctgaagattccccaggacttcaatttcattggtttttatttgcagtttttagttgctgtaattgttgctgtttccagtctaaaggacctcctttggtaaaggtgaacaagacctctcccctatgctacccagccagattttgtgtgtgtaatgggctggcccaagagtgttcttttacttagaactccttttgattttgcttttctctgcccctagaaattttagggacaaagacattttggaaattgtcagttacttttagaaagaaaacactgcagaaatatttaacagattacttcttgataaaatttaaatgggattatatgaatttataatgccaattgaaaatattatatacacaaaatttgctattttcacttaaagtaagcatttttaaaggatttattttagaatacaatctatgcaatcctcgaactcagtgtgcttttccctgacaggatatataaaaaggtagattaggtcaaccctcctttaagcttactctcccctcaccttttcttttcactgtatataaacggtactttctgtgattcataccaacagaggtactttctgtgattcataccaacagtcctaaactgtcattttctaaatctgggatttaaaatctttagacaatatttaaaatcttgattttttttaaatgtcagcagatacaatttggaagattgcatctgtgtagaagtaatgcaggtacaagatctagagtttttccttagactctttagtcttttctgaattaaagaataagtgctcttaaatccatattttatcctgtcaaagtctgaaatgtgttcattgatgatttggtgacatctaaaaaattgtatttagttggcttggctcacccctcttaaaaatacttagccatctcttggtgggatgtggtgggggtattaaggtctcagagttatttattttctcacctaatttcaaacctttataaacttggggttttgttgttgatggtggtagtattttttgttaagttgtttaaaaggctgacttgattggagcctcctctactttttcttgagggttgcaagtattgtatggtgggggaggggggccttaaggcaaactgtctaaaaagtgactatccaattaatttaactagtaaattagtaagaattattcttagtattcattcagagtttaagatgtgaaaaatctgcactttgtttatcactctaaatgtaaagaactttttgatagtgttatttcaccactccctcagttaaaggctattatttaaactgtttactggagaaaatcctcgctcatgtccatttattgtttttttctgtactgtgatttgtttcaagcttaggaaaactagtatattagagtatgttctaggaaattaaaagatctggttagagtaaaaagttctttttaaggttcttaactaattttttcacaactaagaaaataaatgaagtattcttaggctgaaattcatcttattttatcataaattagattgtaggggcagcctacatttttgtgtatgtgtttttatttcttaaatgattgtgtgagcctggtgacattttatggttcttgtgatctaaactgtttttccaattcacatcttttgtcgtgaagtgatattatactagagtactgtttgcattgtaaaaatgctttgctggtgctctggcattttgtctttatctcatcacctaatttaaaaacccagcacttgataatataactgacagaaatgattgtacccactgatgaagtaatgaaaatgaagaaaaggaaaatattccttccttcaatggcgtaagtttattttttacttaagtggcatctatgtaagttagacaaactatatattaaaattggtaaactttgaatgtttctcctgttttgattcttagattatgaggaggatcagacagaataagactccacacttttgaaatttgataagtcaaaacgttttattttgacatttttaacattgtgaattattcgatatttgtaatctctgtatgtatatgaaactctgccatgtttttcaactttgcctatgtgccactgtatataagaaaggacagctattttgatcttcatcagcattgccttcagctgaaaatttgggaacagttcacagtaaacctctcagtagtttgcaaactgaggtacctgcagaaaccatagctactcaccaaaatacacagattaggtgcatggtatcgtggaaattatttggtaaaaaaacacacacacaaatctatgtgtactgtattttaaggaatatctacaggtgcagctttgattttgaacagaattccaaataatttactgttgtacccaccagaatctagaaaatgtgaattaaagtacatgtttctgcaatcttttctgtcttgt

SEQ ID NO: 344485 - DNA, 4091 bp, Homo sapiens
cgcttgggggcgtggccgaggagccaagcgagccgggggcggggccgcctgggggatgaagtgggggcgctcgcctttcctgcctcactcgcagctgccgggtgttggggaaagagtcgcctgcctccggaccggagtgcagacctctgaccctggagtcgctcggccgctgggaaccgtccccttgggtcgtcgcctgggccgcccgtcgttccccggccccgaggggtccggctggccgcggtgtgggtagaggtcagcatgagccaaggggtccgccgggcaggcgctgggcagggggtagcggccgcggtgcagctgctggtcaccctgagcttcctgcggagcgtcgtcgaggcgcaggtcactggagttctggatgattgcttgtgtgatattgacagcatcgataacttcaatacctacaaaatcttccccaaaataaaaaaattgcaagagagagactattttcgttattacaaggttaatctgaagcgaccttgtcctttctgggcagaagatggccactgttcaataaaagactgtcatgtggagccctgtccagagagtaaaattccggttggaataaaagctgggcattctaataagtacttgaaaatggcaaacaataccaaagaattagaagtttgtgagcaagctaataaactgggagcaattaacagcacattaagtaatcaaagcaaagaagctttcattgactgggcaagatatgatgattcacgggatcacttttgtgaacttgatgatgagagatctccagctgctcagtatgtagacctattgctgaacccagagcgttacactggctataaagggacctctgcatggagagtgtggaacagcatctatgaagagaactgtttcaagcctcgatctgtttatcgtcctttaaatcctctggcgcctagccgaggcgaagatgatggagaatcattctacacatggctagaaggtttgtgtctggagaaaagagtcttctataagcttatatcgggacttcatgctagcatcaatttacatctatgcgcaaattatcttttggaagaaacctggggtaagcccagttggggacctaatattaaagaattcaaacaccgctttgaccctgtggaaaccaagggagaaggtccaagaaggctcaagaatctttactttttatacttgattgagcttcgagctttgtcaaaggtggctccatattttgagcgctcaattgtcgatctttacactggaaatgcagaagaagatgctgacacaaaaactcttctactgaatatctttcaagatacaaagtcctttcccatgcactttgatgagaaatccatgtttgcaggtgacaaaaaaggggccaagtcactaaaggaggaattccgattacatttcaagaatatctcccgtataatggactgtgttggatgtgacaaatgcagattatggggaaaattacagactcagggtttaggaactgccctgaagatattattctctgaaaaagaaatccaaaagcttccagagaatagtccatctaaaggcttccaactcacccgacaggaaatagttgctcttttaaatgcttttggaaggctttctacaagtataagagacttacagaattttaaagtcttattacaacagagtaggtaataaaggcttttatgtgtctaactagagacataaagtgactgtggaaagccttttaattatggacattcatcagaaagacactaatctgacttcaagaattctgaactattaaatagaaaatttaaatgctcacttgaatatttatgattcttaatagattattatcaactagagatatttataaatgaagtatatacttttaaaacatgtaagttatactaattttgtgtttaatttcatatgttttcatgtaatgaaaattctattttttttagaattggttttgtttttattctattatcctttatttccagttgtcaaactttaaatggctatgtctgcattctaataacactgttcagtctgttatggaaaaggagaactagggaacaaatgttgctcagggctggtgtcagtgagaaaaatttatcaatgctttttaatgtgtttttacccttgcctcactgtgtgtgtgtcactttctataatataaagaaatactataatatttctagaatctggaactgtcaccatgatgaatggccctttcaatgcatagttacagaaattcctgaagattccccaggacttcaatttcattggtttttatttgcagtttttagttgctgtaattgttgctgtttccagtctaaaggacctcctttggtaaaggtgaacaagacctctcccctatgctacccagccagattttgtgtgtgtaatgggctggcccaagagtgttcttttacttagaactccttttgattttgcttttctctgcccctagaaattttagggacaaagacattttggaaattgtcagttacttttagaaagaaaacactgcagaaatatttaacagattacttcttgataaaatttaaatgggattatatgaatttataatgccaattgaaaatattatatacacaaaatttgctattttcacttaaagtaagcatttttaaaggatttattttagaatacaatctatgcaatcctcgaactcagtgtgcttttccctgacaggatatataaaaaggtagattaggtcaaccctcctttaagcttactctcccctcaccttttcttttcactgtatataaacggtactttctgtgattcataccaacagtcctaaactgtcattttctaaatctgggatttaaaatctttagacaatatttaaaatcttgattttttttaaatgtcagcagatacaatttggaagattgcatctgtgtagaagtaatgcaggtacaagatctagagtttttccttagactctttagtcttttctgaattaaagaataagtgctcttaaatccatattttatcctgtcaaagtctgaaatgtgttcattgatgatttggtgacatctaaaaaattgtatttagttggcttggctcacccctcttaaaaatacttagccatctcttggtgggatgtggtgggggtattaaggtctcagagttatttattttctcacctaatttcaaacctttataaacttggggttttgttgttgatggtggtagtattttttgttaagttgtttaaaaggctgacttgattggagcctcctctactttttcttgagggttgcaagtattgtatggtgggggaggggggccttaaggcaaactgtctaaaaagtgactatccaattaatttaactagtaaattagtaagaattattcttagtattcattcagagtttaagatgtgaaaaatctgcactttgtttatcactctaaatgtaaagaactttttgatagtgttatttcaccactccctcagttaaaggctattatttaaactgtttactggagaaaatcctcgctcatgtccatttattgtttttttctgtactgtgatttgtttcaagcttaggaaaactagtatattagagtatgttctaggaaattaaaagatctggttagagtaaaaagttctttttaaggttcttaactaattttttcacaactaagaaaataaatgaagtattcttaggctgaaattcatcttattttatcataaattagattgtaggggcagcctacatttttgtgtatgtgtttttatttcttaaatgattgtgtgagcctggtgacattttatggttcttgtgatctaaactgtttttccaattcacatcttttgtcgtgaagtgatattatactagagtactgtttgcattgtaaaaatgctttgctggtgctctggcattttgtctttatctcatcacctaatttaaaaacccagcacttgataatataactgacagaaatgattgtacccactgatgaagtaatgaaaatgaagaaaaggaaaatattccttccttcaatggcgtaagtttattttttacttaagcggatcagcgctgatccgcttaaggcatccatcttaatcctggggcttt

SEQ ID NO: 344486 - DNA, 1800 bp, Homo sapiens
cgcttgggggcgtggccgaggagccaagcgagccgggggcggggccgcctgggggatgaagtgggggcgctcgcctttcctgcctcactcgcagctgccgggtgttggggaaagagtcgcctgcctccggaccggagtgcagacctctgaccctggagtcgctcggccgctgggaaccgtccccttgggtcgtcgcctgggccgcccgtcgttccccggccccgaggggtccggctggccgcggtgtgggtagaggtcagcatgagccaaggggtccgccgggcaggcgctgggcagggggtagcggccgcggtgcagctgctggtcaccctgagcttcctgcggagcgtcgtcgaggcgcaggtcactggagttctggatgattgcttgtgtgatattgacagcatcgataacttcaatacctacaaaatcttccccaaaataaaaaaattgcaagagagagactattttcgttattacaaggttaatctgaagcgaccttgtcctttctgggcagaagatggccactgttcaataaaagactgtcatgtggagccctgtccagagagtaaaattccggttggaataaaagctgggcattctaataagtacttgaaaatggcaaacaataccaaagaattagaagtttgtgagcaagctaataaactgggagcaattaacagcacattaagtaatcaaagcaaagaagctttcattgactgggcaagatatgatgattcacgggatcacttttgtgaacttgatgatgagagatctccagctgctcagtatgtagacctattgctgaacccagagcgttacactggctataaagggacctctgcatggagagtgtggaacagcatctatgaagagaactgtttcaagcctcgatctgtttatcgtcctttaaatcctctggcgcctagccgaggcgaagatgatggagaatcattctacacatggctagaaggtttgtgtctggagaaaagagtcttctataagcttatatcgggacttcatgctagcatcaatttacatctatgcgcaaattatcttttggaagaaacctggggtaagcccagttggggacctaatattaaagaattcaaacaccgctttgaccctgtggaaaccaagggagaaggtccaagaaggctcaagaatctttactttttatacttgattgagcttcgagctttgtcaaaggtggctccatattttgagcgctcaattgtcgatctttacactggaaatgcagaagaagatgctgacacaaaaactcttctactgaatatctttcaagatacaaagtcctttcccatgcactttgatgagaaatccatgtttgcaggtgacaaaaaaggggccaagtcactaaaggaggaattccgattacatttcaagaatatctcccgtataatggactgtgttggatgtgacaaatgcagattatggggaaaattacagactcagggtttaggaactgccctgaagatattattctctgaaaaagaaatccaaaagcttccagagaatagtccatctaaaggcttccaactcacccgacaggaaatagttgctcttttaaatgcttttggaaggctttctacaagtataagagacttacagaattttaaagtcttattacaacagagtaggtaataaaggcttttatgtgtctaactagagacataaagtgactgtggaaagccttttaattatggacattcatcagaaggccaaacctgatacagcgtgaaagtctccctccccagtcgttaggttagttgctagtgg

SEQ ID NO: 344487 - DNA, 335 bp, Homo sapiens
gcagcacattctttgaactgtttgactctttaaaaattcttccttctctgaaagcaacattctgttccccagcagcctttcctcattagctttctctcttggggcctccaaagcaagtcttgtcccttttctacatagcagctttcctcagacttaaagacagcttcctaagaagaagggggtgggggggacctggggctaaggacacagcctggttaagctggaccggggcctttttatttttctgtcacacagcccagagccaaggggcttgttcaggcagctactttatgctgggaattcattttattttattatttttatttgtttcggga

SEQ ID NO: 344488 - DNA, 1044 bp, Homo sapiens
caaaagatttgaaaatgcagtcatcctactaccatcatgaaggacaaatatccaagggtaacagaaggcagaatgaaaggcctgagtccttgatgacattgttgaatcaccaaagcaacaccaggagaccctgcctccaaccatcttaagtaagatctacacaatatcttatcacacttaaactatgagcattgaaggagaatgcctttccacatgcagtgcaagaaacagaaaaagaatagccactggatcctatgtcatatgagctgcatttcagaggcggtcctgtgccataccatggagaaaggaatgctgcacagaggccaagatgaaatctccaccgacagaccttgctggattttcccactcagtctgtgactattagattatacccctttgtccaattgcatttgtacacagttgttcatgcttcagtcatgcctattcaatgaaatttccatagaaggcccaagaggaaagagtttgaagagcttccagaaaacggaacatgtggaggttcctggaagatagcaaggccggagagaacattgaagctttgtgagccttccctcatacctttccctatgcatctcttcatctgcaccctttggaatatcttttgtaataaacccgtttcctggagttcagtaagctgctctaacaagtttatcaaacccaaggagggggttgtgggaataccaatttacaggcggttggttagaagcacaagttaaacaacctggggcttgtgattgacattggaagtgggggcagtcttgtgcgactgggcctgtggaatctgatgctatccccagagaaatagtcagaagacaaatggaggacagcaagctggtgttggctgaataattgattgcttgcttgctggtagggagagatccctacacatcttgtcatataagtcttatgttgattgctgtgatgtgagagcagaggaaaaacagctggagttgtttttttttttcctaaccgtagtataaaatgtattcaaaatacaataaaaatattgctgaattaatatagtct

SEQ ID NO: 344489 - DNA, 660 bp, Homo sapiens
atcatccttgcttccaagtcaaactacaaattaaattcctcccaaagttagcttgggctgtaccctggataaaaccaaagacagcttggaggtcagaagcaagatggagtcaactaagtcaaacttctcttactatcatagttttgcaaaggtggtttcagataccttctattcttttcttttcaaccatttgtatcatcaaaacttaagtgtgtctctgtagacagcatatagttggatcttgtttcttccattctgacaatttctgccctttaattggattgtttaatccatttacattttttaatttttaagtaatggtgagtgttgggcctctcatgtacctatcacccaaatattgaatattgtatctatccatttacatttaatggttttaatattgttgatttacatctgccagtttactttttgttttctaaatggctccatgtctttttgttcctctagtcttcttttgctgctttttcatttgtgaatattgctagtgctatattttaactcctttggtgattgtttttcactatcctttttgttattttcttagtggcttctctagaggttaccttatacatcttaactaataagaatctagttcatatttatactaattcttacaagacacagaaaattttcttttat

SEQ ID NO: 344490 - DNA, 714 bp, Homo sapiens
atcatccttgcttccaagtcaaactacaaattaaattcctcccaaagttagcttgggctgtaccctggataaaaccaaagacagcttggaggtcagaagcaagatggagtcaactaagtcaaacttctcttactatcatagttttgcaaaggtggtttcagataccttctattcttttcttttcaaccatttgtatcatcaaaacttaagtgtgtctctgtagacagcatatagttggatcttgtttcttccattctgacaatttctgccctttaattggattgtttaatccatttacattttttaatttttaaaaaattattttagattcagggagtacatgtgcttattacttaagtattatgtgtgtaatggtgagtgttgggcctctcatgtacctatcacccaaatattgaatattgtatctatccatttacatttaatggttttaatattgttgatttacatctgccagtttactttttgttttctaaatggctccatgtctttttgttcctctagtcttcttttgctgctttttcatttgtgaatattgctagtgctatattttaactcctttggtgattgtttttcactatcctttttgttattttcttagtggcttctctagaggttaccttatacatcttaactaataagaatctagttcatatttatactaattcttacaagacacagaaaattttcttttat

SEQ ID NO: 344491 - DNA, 493 bp, Homo sapiens
atgcatgtcatctcttagataagtttttactgtcattgtgttgtgtgtagtgtaattaagagtttcaaatgattttaggactttagactatctttagcacggataagaaatgagcagctgagcagcttttcattgcttaaggattttgattaccgatttctatgaagattaaaatttgtaagaagacaatttaaggccaggcatggtggcacacgcctgtaatccagcactttgagaggccaaggaagaaggagccctttgagttcaggagtttgagactggcctggcaatgtagttagactttatctctacaaaaaaatcgaataattagccaagtgtagtggtgcacacctgtagtcccagggacttgagagactgaggcagaaagatggcttgcacccgggagatagaggctccagtgaactgtgatcatgccactgcactgcagcctgggtgacagagtgagctgctgccttaaaaggaaaaaaaaaaa

SEQ ID NO: 344492 - DNA, 247 bp, Homo sapiens
ctgacagtatgtatacagtcatgcgccacataatgacatttccacatttcagtcaatgatggactacatatatgacactgtcccataagattataatggagcattgggataaagtaagtacttgatggctctgaggaatctgtgtgacttgggcattgtggatccatacccaccattatgtgacattaaaggatcatatacagcacaattgaacataccatagtgttgggtccaacatgtaaagaag

SEQ ID NO: 344493 - DNA, 926 bp, Homo sapiens
tgcgcaggcgcagtcccgacgagcaacgcgtttgtagaggggtgggtgcgcacgctctgtccctgcgtgaccttccgaccccgctgtcctcaccgcaatggcggctgtgagggccctggtggcctcgaggctcgctgcggcatctgcattcacgtccctgtcccccggcggtcggacgccttcccagcgcgcagcccttcacctctccgtgccgcgccccgcggccagggtcgcgctggtgctgtctggatgcggagtctacgatgggaccgagatccacgaggcctcggcgatcctggtgcacctgagccgtggaggggctgaagtccagatctttgctcctgacgtccctcagatgcacgtgattgaccacaccaaggggcagccgtccgaaggcgagagcaggaatgttttgaccgagtctgcgaggatcgcccgtggcaaaatcacagacctggccaacctcagtgcagccaaccatgatgctgccatctttccaggaggctttggagcggctaaaaacctgagcacgtttgccgtggacgggaaagattgcaaggtgaataaagaagtggagcgtgtcctgaaggagttccaccaggccgggaagcccatcggcttgtgctgcattgcacctgtcctcgcggccaaggtgctcagaggcgtcgaggtgactgtgggccacgagcaggaggaaggtggcaagtggccttatgccgggaccgcagaggccatcaaggccctgggtgccaagcactgcgtgaaggaagtggtctgcccagaactttgggatacttcgtggtggctctccgggatccaggtggccaccgtcctccctggctctctgtgttgcccactcctgaggccctggctcctggatgcttcagcctacgtgtgcctcctcgctctgttttcgtgggtgctac

SEQ ID NO: 344494 - DNA, 880 bp, Homo sapiens
tgcgcaggcgcagtcccgacgagcaacgcgtttgtagaggggtgggtgcgcacgctctgtccctgcgtgaccttccgaccccgctgtcctcaccgcaatggcggctgtgagggccctggtggcctcgaggctcgctgcggcatctgcattcacgtccctgtcccccggcggtcggacgccttcccagcgcgcagcccttcacctctccgtgccgcgccccgcggccagggtcgcgctggtgctgtctggatgcggagtctacgatgggaccgagatccacgaggcctcggcgatcctggtgcacctgagccgtggaggggctgaagtccagatctttgctcctgacgtccctcagatgcacgtgattgaccacaccaaggggcagccgtccgaaggcgagagcaggaatgttttgaccgagtctgcgaggatcgcccgtggcaaaatcacagacctggccaacctcagtgcagccaaccatgatgctgccatctttccaggaggctttggagcggctaaaaacctgagcacgtttgccgtggacgggaaagattgcaaggtgaataaagaagtggagcgtgtcctgaaggagttccaccaggccgggaagcccatcgggtgtgtacagccgtgcaggcctcggggagggagggaggagggtgcgtgggcccgcggcctctgttctcagccaggagctgccgctgatcctgaaaactcacagctgcttttcttgttttaactgaggggatttcacacgatgtcactggtgacttaacaggaaggagaggcacagtgcacttccctagaggaggcctggaattctcttggctcccagaggtgtccctaggcagtccctcaggacccctatcctttaccagac

SEQ ID NO: 344495 - DNA, 794 bp, Homo sapiens
tggcttagcttaaaccaagtcttgtgtgcaaatgaacgtccttctgagcagctgtgctcgggctgttccagaagtaatgctgccaaggctcaggagtgccttccttccagtactcacagaaggactgaaaatggcgaccggatcgcttcccactgagtcaggctgctcataccttggtcttaagcaaaggtggtggttctcagcttggtcgcccaccttcttcccctgtctgggctccagatctgttttgctggttcccagcagcatgtctgttactgcggtgtgtgtggttctggcctgtgtggcctgagatccccttcccttgcctgtcctgcctgacagccctgtgcaggccattccaaggtgccttccaactggcctcggaccacgagaggtcggagctggagattcgaggaagaagccatagctgcctcctggggctgtgcttctcaccagtggggacccctgtgatttcttttcctgcctgggaccctggcttctgcacctggacttgcaccttcggcccccacacctgggggctagcagcttcctgcggtggctggccttcgggttgcttcactggtcctgagtcctggcttcttaccttcccctctgagtcccaccgtcctgatgagtgcacagaattctgtctgctttagacactcggagagacttccatttcccatgggccttgactgcagaagattcagagtgatttggcgcaggttctgaagtgctgatcggaagagcccagcatagatttagcgttgccagaaccacaaatatcgttccag

SEQ ID NO: 344496 - DNA, 575 bp, Homo sapiens
agggagtgtgtgctcttcagcgtctgctgccgggaagtcactctcagatgtgtgagggtgacccagcaaggccgggttccgcctcggcaggtgtgatgcttccacgagcctcccggcacctgctccttggtggtcctggaacgcggcgctgtgctgtccaggtctcagctgcgtctggtgctggcagggcgagagccgcacttgcgtgggtgaacatcagtgaggcgcactcgcgatggccgctcactaccgagttctgtcagccgaacaaggatgaggatctatcggaatcctctgtctccccacccacagtcactcacttaaggacctgcctggtcactgtccagggaggcccctaaagtggagcctcaggaagaggtgcaggctcagagctcctgaaggaggtccctgctgcagccgtgtcacagccggggtgaaggtttcgcccatggtctccacctcgggatcccgtccttgtcagagaagtgttccttggatgagcgcccagagggaggagcccatggccctttcttctgtgactgattaaaaatctcgatgaaacaagacagcccctg

SEQ ID NO: 344497 - DNA, 787 bp, Homo sapiens
tggcttagcttaaaccaagtcttgtgtgcaaatgaacgtccttctgagcagctgtgctcgggctgttccagaagtaatgctgccaaggctcaggagtgccttccttccagtactcacagaaggactgaaaatggcgaccggatcgcttcccactgagtcaggctgctcataccttggtcttaagcaaaggtggtggttctcagcttggtcgcccaccttcttcccctgtctgggctccagatctgttttgctggttcccagcagcatgtctgttactgcggtgtgtgtggttctggcctgtgtggcctgagatccccttcccttgcctgtcctgcctgacagccctgtgcaggccattccaaggtgccttccaactggcctcggaccacgagaggtcggagctggagattcgaggaagaagccatagctgcctcctggggctgtgcttctcaccagtggggacccctgtgatttcttttcctgcctgggaccctggcttctgcacctggacttgcaccttcggcccccacacctgggggctagcagcttcctgcggtggctggccttcgggttttttgagtgctcccgaattttgggttttgggcccccatatgaataaaaaaaaaaaaaaaatggtggctcttaatatcattgtccctacaatacaccagcatagctgggctttataaccctactgaaagggtagaaagctgagattcagggagatgaagtggctcctgaagtcacgaatgacagggaccaaaaccggggccagtaccacaaatag

SEQ ID NO: 344498 - DNA, 450 bp, Homo sapiens
tgtcatgaaggccgagtaactggagccgctctcatccctccaccaggagggacttcacttacatctttgggccaagctgctcaatgaaccgccaggaactgacctgctgactgcactctgccaggcttcccaatgctttcactcttatctaccctttggcacttcgtgggcagcctgcccacgaagtgagagcaggaatgttttgaccgagtctgcgaggatcgcccgtggcaaaatcacagacctggccaacctccagatctttgctcctgacgtccctcagatgcacgtgattgaccacaccaaggggcagccgtccgaaggcgagagcaggaatgttttgaccgagtctgcgaggatcgcccgtggcaaaatcacagacctggccaacctcagatctttgctcctgacgtccctcagatgcacgtgattgaccacacttgtgggcag

SEQ ID NO: 344499 - DNA, 1610 bp, Homo sapiens
tgcgcaggcgcagtcccgacgagcaacgcgtttgtagaggggtgggtgcgcacgctctgtccctgcgtgaccttccgaccccgctgtcctcaccgcaatggcggctgtgagggccctggtggcctcgaggctcgctgcggcatctgcattcacgtccctgtcccccggcggtcggacgccttcccagcgcgcagcccttcacctctccgtgccgcgccccgcggccagggtcgcgctggtgctgtctggatgcggagtctacgatgggaccgagatccacgaggcctcggcgatcctggtgcacctgagccgtggaggggctgaagtccagatctttgctcctgacgtccctcagatgcacgtgattgaccacaccaaggggcagccgtccgaaggcgagagcaggaatgttttgaccgagtctgcgaggatcgcccgtggcaaaatcacagacctggccaacctcagtgcagccaaccatgatgctgccatctttccaggaggctttggagcggctaaaaacctgagcacgtttgccgtggacgggaaagattgcaaggtgaataaagaagtggagcgtgtcctgaaggagttccaccaggccgggaagcccatcggcttgtgctgcattgcacctgtcctcgcggccaaggtgctcagaggcgtcgaggtgactgtgggccacgagcaggaggaaggtggcaagtggccttatgccgggaccgcagaggccatcaaggccctgggtgccaagcactgcgtgaaggaagtggtcgaagctcacgtggaccagaaaaacaaggtggtcacgaccccagccttcatgtgcgagacggcactccactacatccatgatgggatcggagccatggtgaggaaggtgctggaactcactggaaagtgacgcgcatggacggggcccagctaggcgccaggacttggcctcaccctctggctgaggagctgtcggctgctttccatccagctgggagtctggcaggcccttttttttttttctttgccgaaacctgcaggcgttctctctctaaggaggatgtgctgcagtgcatgggggatgtttcttcctgggtgtggctgggctgctctcacatacagaggccgaggggccaattcgttctctgccacagggacttgcctcactgtgtcccaaaaacaaatcgcagccagcttttccagaaatagaaaattctgccgtctgaggttttatacttcaggttagttagtttttggaaggaagaacatttttaggtttgcaagcctcctgatcaggaaaccagaaataccacatttatggaccatgaaaggttggttcttgactctgaagggacttttgagttaatcagcgtaaggggatttctaaagcaggcaatccctgtagccgcagagaataaacgccttcccgaatggcagtgaggtttcttcaattagtctcagttctcttaattttcaggaagaaagggaaattgcagctcctcagcccccaggattgacctctggggagtgatggtagcgttggtgccaggccgtgggttcaggtgtggcagaagcttgcagatgcgtccgaagggaaataaagtgtgttggcgtta

SEQ ID NO: 344500 - DNA, 1926 bp, Homo sapiens
tgcgcaggcgcagtcccgacgagcaacgcgtttgtagaggggtgggtgcgcacgctctgtccctgcgtgaccttccgaccccgctgtcctcaccgcaatggcggctgtgagggccctggtggcctcgaggctcgctgcggcatctgcattcacgtccctgtcccccggcggtcggacgccttcccagcgcgcagcccttcacctctccgtgccgcgccccgcggccagggtcgcgctggtgagtggacggagggggtgaggtcagctcccgcctccagagatcagccttcgctgttctctgcccaaggtcggcccctcttcctaggtccgctcccgccgccccacgtcggctccttcaccccaagtcagctcctgcggccaggtcggccccattttcccgggtcagcgcccgcggcccaggtcggcccctttccccccagtcaactcccgccgcccaggtcggcccctttcccccgggtcagctcccgctcctctcgcaggtgctgtctggatgcggagtctacgatgggaccgagatccacgaggcctcggcgatcctggtgcacctgagccgtggaggggctgaagtccagatctttgctcctgacgtccctcagatgcacgtgattgaccacaccaaggggcagccgtccgaaggcgagagcaggaatgttttgaccgagtctgcgaggatcgcccgtggcaaaatcacagacctggccaacctcagtgcagccaaccatgatgctgccatctttccaggaggctttggagcggctaaaaacctgagcacgtttgccgtggacgggaaagattgcaaggtgaataaagaagtggagcgtgtcctgaaggagttccaccaggccgggaagcccatcggcttgtgctgcattgcacctgtcctcgcggccaaggtgctcagaggcgtcgaggtgactgtgggccacgagcaggaggaaggtggcaagtggccttatgccgggaccgcagaggccatcaaggccctgggtgccaagcactgcgtgaaggaagtggtcgaagctcacgtggaccagaaaaacaaggtggtcacgaccccagccttcatgtgcgagacggcactccactacatccatgatgggatcggagccatggtgaggaaggtgctggaactcactggaaagtgacgcgcatggacggggcccagctaggcgccaggacttggcctcaccctctggctgaggagctgtcggctgctttccatccagctgggagtctggcaggcccttttttttttttctttgccgaaacctgcaggcgttctctctctaaggaggatgtgctgcagtgcatgggggatgtttcttcctgggtgtggctgggctgctctcacatacagaggccgaggggccaattcgttctctgccacagggacttgcctcactgtgtcccaaaaacaaatcgcagccagcttttccagaaatagaaaattctgccgtctgaggttttatacttcaggttagttagtttttggaaggaagaacatttttaggtttgcaagcctcctgatcaggaaaccagaaataccacatttatggaccatgaaaggttggttcttgactctgaagggacttttgagttaatcagcgtaaggggatttctaaagcaggcaatccctgtagccgcagagaataaacgccttcccaaaatggcaacttcccacagccacatttcagacctgctgagactgctgagtgaggaatggcagtgaggtttcttcaattagtctcagttctcttaattttcaggaagaaagggaaattgcagctcctcagcccccaggattgacctctggggagtgatggtagcgttggtgccaggccgtgggttcaggtgtggcagaagcttgcagatgcgtccgaagggaaataaagtgtgttggcgtta

SEQ ID NO: 344501 - DNA, 1511 bp, Homo sapiens
ccccacatgatgtatagtcggcgccgggtttatttcggccgggccttcgcttttcggtccgtgccccgcggtcacgttcgcgctggtgctgtctggatgcggagtctacgatgggaccgagatccacgaggcctcggcgatcctggtgcacctgagccgtggaggggctgaagtccagatctttgctcctgacgtccctcagatgcacgtgattgaccacaccaaggggcagccgtccgaaggcgagagcaggaatgttttgaccgagtctgcgaggatcgcccgtggcaaaatcacagacctggccaacctcagtgcagccaaccatgatgctgccatctttccaggaggctttggagcggctaaaaacctgagcacgtttgccgtggacgggaaagattgcaaggtgaataaagaagtggagcgtgtcctgaaggagttccaccaggccgggaagcccatcggcttgtgctgcattgcacctgtcctcgcggccaaggtgctcagaggcgtcgaggtgactgtgggccacgagcaggaggaaggtggcaagtggccttatgccgggaccgcagaggccatcaaggccctgggtgccaagcactgcgtgaaggaagtggtcgaagctcacgtggaccagaaaaacaaggtggtcacgaccccagccttcatgtgcgagacggcactccactacatccatgatgggatcggagccatggtgaggaaggtgctggaactcactggaaagtgacgcgcatggacggggcccagctaggcgccaggacttggcctcaccctctggctgaggagctgtcggctgctttccatccagctgggagtctggcaggcccttttttttttttctttgccgaaacctgcaggcgttctctctctaaggaggatgtgctgcagtgcatgggggatgtttcttcctgggtgtggctgggctgctctcacatacagaggccgaggggccaattcgttctctgccacagggacttgcctcactgtgtcccaaaaacaaatcgcagccagcttttccagaaatagaaaattctgccgtctgaggttttatacttcaggttagttagtttttggaaggaagaacatttttaggtttgcaagcctcctgatcaggaaaccagaaataccacatttatggaccatgaaaggttggttcttgactctgaagggacttttgagttaatcagcgtaaggggatttctaaagcaggcaatccctgtagccgcagagaataaacgccttcccaaaatggcaacttcccacagccacatttcagacctgctgagactgctgagtgaggaatggcagtgaggtttcttcaattagtctcagttctcttaattttcaggaagaaagggaaattgcagctcctcagcccccaggattgacctctggggagtgatggtagcgttggtgccaggccgtgggttcaggtgtggcagaagcttgcagatgcgtccgaagggaaataaagtgtgttggcgtta

SEQ ID NO: 344502 - DNA, 1010 bp, Homo sapiens
tgcgcaggcgcagtcccgacgagcaacgcgtttgtagaggggtgggtgcgcacgctctgtccctgcgtgaccttccgaccccgctgtcctcaccgcaatggcggctgtgagggccctggtggcctcgaggctcgctgcggcatctgcattcacgtccctgtcccccggcggtcggacgccttcccagcgcgcagcccttcacctctccgtgccgcgccccgcggccagggtcgcgctggtgctgtctggatgcggagtctacgatgggaccgagatccacgaggcctcggcgatcctggtgcacctgagccgtggaggggctgaagtccagatctttgctcctgacgtccctcagatgcacgtgattgaccacaccaaggggcagccgtccgaaggcgagagcaggaatgttttgaccgagtctgcgaggatcgcccgtggcaaaatcacagacctggccaacctcagtgcagccaaccatgatgctgccatctttccaggaggctttggagcggctaaaaacctgagcacgtttgccgtggacgggaaagattgcaaggtgaataaagaagtggagcgtgtcctgaaggagttccaccaggccgggaagcccatcggcttgtgctgcattgcacctgtcctcgcggccaaggtgctcagaggcgtcgaggtgactgtgggccacgagcaggaggaaggtggcaagtggccttatgccgggaccgcagaggccatcaaggccctgggtgccaagcactgcgtgaaggaagtggtcgaagctcacgtggaccagaaaaacaaggtggtcacgaccccagccttcatgtgcgagacggcactccactacatccatgatgggatcggagccatggaagaaagggaaattgcagctcctcagcccccaggattgacctctggggagtgatggtagcgttggtgccaggccgtgggttcaggtgtggcagaagcttgcagatgcgtccgaagggaaataaagtgtgttggcgtta

SEQ ID NO: 344503 - DNA, 1143 bp, Homo sapiens
tgcgcaggcgcagtcccgacgagcaacgcgtttgtagaggggtgggtgcgcacgctctgtccctgcgtgaccttccgaccccgctgtcctcaccgcaatggcggctgtgagggccctggtggcctcgaggctcgctgcggcatctgcattcacgtccctgtcccccggcggtcggacgccttcccagcgcgcagcccttcacctctccgtgccgcgccccgcggccagggtcgcgctggtgagtggacggagggggtgaggtcagctcccgcctccagagatcagccttcgctgttctctgcccaaggtcggcccctcttcctaggtccgctcccgccgccccacgtcggctccttcaccccaagtcagctcctgcggccaggtcggccccattttcccgggtcagcgcccgcggcccaggtcggcccctttccccccagtcaactcccgccgcccaggtcggcccctttcccccgggtcagctcccgctcctctcgcaggtgctgtctggatgcggagtctacgatgggaccgagatccacgaggcctcggcgatcctggtgcacctgagccgtggaggggctgaagtccagatctttgctcctgacgtccctcagatgcacgtgattgaccacaccaaggggcagccgtccgaaggcgagagcaggaatgttttgaccgagtctgcgaggatcgcccgtggcaaaatcacagacctggccaacctcagtgcagccaaccatgatgctgccatctttccaggaggctttggagcggctaaaaacctgagcacgtttgccgtggacgggaaagattgcaaggtgaataaagaagtggagcgtgtcctgaaggagttccaccaggccgggaagcccatcggtcactcacttaaggacctgcctggtcactgtccagggaggcccctaaagtggagcctcaggaagaggtgcaggctcagagctcctgaaggaggtccctgctgcagccgtgtcacagccggggtgaaggtttcgcccatggtctccacctcgggatcccgtccttgtcagagaagtgttccttggatgagcgcccagagggaggagcccatggccctttcttctgtgactgattaaaaatctcgatgaaacaagacagcccctg

SEQ ID NO: 344504 - DNA, 905 bp, Homo sapiens
tgcgcaggcgcagtcccgacgagcaacgcgtttgtagaggggtgggtgcgcacgctctgtccctgcgtgaccttccgaccccgctgtcctcaccgcaatggcggctgtgagggccctggtggcctcgaggctcgctgcggcatctgcattcacgtccctgtcccccggcggtcggacgccttcccagcgcgcagcccttcacctctccgtgccgcgccccgcggccagggtcgcgctggtgctgtctggatgcggagtctacgatgggaccgagatccacgaggcctcggcgatcctggtgcacctgagccgtggaggggctgaagtccagatctttgctcctgacgtccctcagatgcacgtgattgaccacaccaaggggcagccgtccgaaggcgagagcaggaatgttttgaccgagtctgcgaggatcgcccgtggcaaaatcacagacctggccaacctcagtgcagccaaccatgatgctgccatctttccaggaggctttggagcggctaaaaacctgtgcgtatttgagctccaaggtcttccgctttccatgtggagcagatgggaagggggtgcacctgtctgctgtccaatgtggtcagtggagcggcgatgggagggggtggtgataggagcagtctctgggtttagggtctgggcagggcacgtgcctgccctctgacttgggagctgttcttagggttgggtcttaggtagcgttgtagcgagccatgcttttgtttctgcttctctgctgcctcttctctcagcattcctggtacccagcagcttgtcagagtgggtttggggctccctcttatctcatcactgtgctgtaggtctcgtcacgttgaaatcagtctctgagtatttactccttgcaagtgccagttttt

SEQ ID NO: 344505 - DNA, 463 bp, Homo sapiens
tttgcagagcaagtaagatattaatatacattaggaatttgctcctggtacttagctaaaatcctgtttttaaaaatgtgttaacacaaatctgagtggggcacgttttgaagagttgtctctggttttcccccgtgcaggatcctggtgcacctgagccgtggaggggctgaagtccagatctttgctcctgacgtccctcagatgcacgtgattgaccacaccaaggggcagccgtccgaaggcgagagcaggtgtgggggtgggattggaacttgcttcttgtctacctcccacggtgcagcctttttttgctggcttagcttaaaccaagtcttgtgtgcaaatgaacgtccttctgagcagctgtgctcgggctgttccagaagtaatgctgccaaggctcaggagtgccttccttccagtactcacagaaggactgaaaatggcgaccggatcgctt

SEQ ID NO: 344506 - DNA, 1664 bp, Homo sapiens
tgcgcaggcgcagtcccgacgagcaacgcgtttgtagaggggtgggtgcgcacgctctgtccctgcgtgaccttccgaccccgctgtcctcaccgcaatggcggctgtgagggccctggtggcctcgaggctcgctgcggcatctgcattcacgtccctgtcccccggcggtcggacgccttcccagcgcgcagcccttcacctctccgtgccgcgccccgcggccagggtcgcgctggtgctgtctggatgcggagtctacgatgggaccgagatccacgaggcctcggcgatcctggtgcacctgagccgtggaggggctgaagtccagatctttgctcctgacgtccctcagatgcacgtgattgaccacaccaaggggcagccgtccgaaggcgagagcaggaatgttttgaccgagtctgcgaggatcgcccgtggcaaaatcacagacctggccaacctcagtgcagccaaccatgatgctgccatctttccaggaggctttggagcggctaaaaacctgagcacgtttgccgtggacgggaaagattgcaaggtgaataaagaagtggagcgtgtcctgaaggagttccaccaggccgggaagcccatcggcttgtgctgcattgcacctgtcctcgcggccaaggtgctcagaggcgtcgaggtgactgtgggccacgagcaggaggaaggtggcaagtggccttatgccgggaccgcagaggccatcaaggccctgggtgccaagcactgcgtgaaggaagtggtcgaagctcacgtggaccagaaaaacaaggtggtcacgaccccagccttcatgtgcgagacggcactccactacatccatgatgggatcggagccatggtgaggaaggtgctggaactcactggaaagtgacgcgcatggacggggcccagctaggcgccaggacttggcctcaccctctggctgaggagctgtcggctgctttccatccagctgggagtctggcaggcccttttttttttttctttgccgaaacctgcaggcgttctctctctaaggaggatgtgctgcagtgcatgggggatgtttcttcctgggtgtggctgggctgctctcacatacagaggccgaggggccaattcgttctctgccacagggacttgcctcactgtgtcccaaaaacaaatcgcagccagcttttccagaaatagaaaattctgccgtctgaggttttatacttcaggttagttagtttttggaaggaagaacatttttaggtttgcaagcctcctgatcaggaaaccagaaataccacatttatggaccatgaaaggttggttcttgactctgaagggacttttgagttaatcagcgtaaggggatttctaaagcaggcaatccctgtagccgcagagaataaacgccttcccaaaatggcaacttcccacagccacatttcagacctgctgagactgctgagtgaggaatggcagtgaggtttcttcaattagtctcagttctcttaattttcaggaagaaagggaaattgcagctcctcagcccccaggattgacctctggggagtgatggtagcgttggtgccaggccgtgggttcaggtgtggcagaagcttgcagatgcgtccgaagggaaataaagtgtgttggcgtta

SEQ ID NO: 344507 - DNA, 1103 bp, Homo sapiens
tgcgcaggcgcagtcccgacgagcaacgcgtttgtagaggggtgggtgcgcacgctctgtccctgcgtgaccttccgaccccgctgtcctcaccgcaatggcggctgtgagggccctggtggcctcgaggctcgctgcggcatctgcattcacgtccctgtcccccggcggtcggacgccttcccagcgcgcagcccttcacctctccgtgccgcgccccgcggccagggtcgcgctggtgctgtctggatgcggagtctacgatgggaccgagatccacgaggcctcggcgatcctggtgcacctgagccgtggaggggctgaagtccagatctttgctcctgacgtccctcagatgcacgtgattgaccacaccaaggggcagccgtccgaaggcgagagcaggaatgttttgaccgagtctgcgaggatcgcccgtggcaaaatcacagacctggccaacctcagtgcagccaaccatgatgctgccatctttccaggaggctttggagcggctaaaaacctgagcacgtttgccgtggacgggaaagattgcaaggtgaataaagaagtggagcgtgtcctgaaggagttccaccaggccgggaagcccatcgggtgtgatgcttccacgagcctcccggcacctgctccttggtggtcctggaacgcggcgctgtgctgtccaggtctcagctgcgtctggtgctggcagggcgagagccgcacttgcgtgggtgaacatcagtgaggcgcactcgcgatggccgctcactaccgagttctgtcagccgaacaaggatgaggatctatcggaatcctctgtctccccacccacagtcactcacttaaggacctgcctggtcactgtccagggaggcccctaaagtggagcctcaggaagaggtgcaggctcagagctcctgaaggaggtccctgctgcagccgtgtcacagccggggtgaaggtttcgcccatggtctccacctcgggatcccgtccttgtcagagaagtgttccttggatgagcgcccagagggaggagcccatggccctttcttctgtgactgattaaaaatctcgatgaaacaagacagcccctg

SEQ ID NO: 344508 - DNA, 933 bp, Homo sapiens
tgcgcaggcgcagtcccgacgagcaacgcgtttgtagaggggtgggtgcgcacgctctgtccctgcgtgaccttccgaccccgctgtcctcaccgcaatggcggctgtgagggccctggtggcctcgaggctcgctgcggcatctgcattcacgtccctgtcccccggcggtcggacgccttcccagcgcgcagcccttcacctctccgtgccgcgccccgcggccagggtcgcgctggtgctgtctggatgcggagtctacgatgggaccgagatccacgaggcctcggcgatcctggtgcacctgagccgtggaggggctgaagtccagatctttgctcctgacgtccctcagatgcacgtgattgaccacaccaaggggcagccgtccgaaggcgagagcaggaatgttttgaccgagtctgcgaggatcgcccgtggcaaaatcacagacctggccaacctcagtgcagccaaccatgatgctgccatctttccaggaggctttggagcggctaaaaacctcttgtgctgcattgcacctgtcctcgcggccaaggtgctcagaggcgtcgaggtgactgtgggccacgagcaggaggaaggtggcaagtggccttatgccgggaccgcagaggccatcaaggccctgggtgccaagcactgcgtgaaggaagtggtcgaagctcacgtggaccagaaaaacaaggtggtcacgaccccagccttcatgtgcgagacggcactccactacatccatgatgggatcggagccatggaagaaagggaaattgcagctcctcagcccccaggattgacctctggggagtgatggtagcgttggtgccaggccgtgggttcaggtgtggcagaagcttgcagatgcgtccgaagggaaataaagtgtgttggcgttattagactttgtgctgc

SEQ ID NO: 344509 - DNA, 2019 bp, Homo sapiens
tgcgcaggcgcagtcccgacgagcaacgcgtttgtagaggggtgggtgcgcacgctctgtccctgcgtgaccttccgaccccgctgtcctcaccgcaatggcggctgtgagggccctggtggcctcgaggctcgctgcggcatctgcattcacgtccctgtcccccggcggtcggacgccttcccagcgcgcagcccttcacctctccgtgccgcgccccgcggccagggtcgcgctggtgctgtctggatgcggagtctacgatgggaccgagatccacgaggcctcggcgatcctggtgcacctgagccgtggaggggctgaagtccagatctttgctcctgacgtccctcagatgcacgtgattgaccacaccaaggggcagccgtccgaaggcgagagcaggaatgttttgaccgagtctgcgaggatcgcccgtggcaaaatcacagacctggccaacctcagtgcagccaaccatgatgctgccatctttccaggaggctttggagcggctaaaaacctgagcacgtttgccgtggacgggaaagattgcaaggtgaataaagaagtggagcgtgtcctgaaggagttccaccaggccgggaagcccatcggcttgtgctgcattgcacctgtcctcgcggccaaggtgctcagaggcgtcgaggtgactgtgggccacgagcaggaggaaggtggcaagtggccttatgccgggaccgcagaggccatcaaggccctgggtgccaagcactgcgtgaaggaagtggtcgaagctcacgtggaccagaaaaacaaggtggtcacgaccccagccttcatgtgcgagacggcactccactacatccatgatgggatcggagccatggtgaggaaggtgctggaactcactggaaagtgacgcgcatggacggggcccagctaggcgccaggacttggcctcaccctctggctgaggagctgtcggctgctttccatccagctgggagtctggcaggcccttttttttttttctttgccgaaacctgcaggcgttctctctctaaggaggatgtgctgcagtgcatgggggatgtttcttcctgggtgtggctgggctgctctcacatacagaggccgaggggccaattcgttctctgccacagggacttgcctcactgtgtcccaaaaacaaatcgcagccagcttttccagaaatagaaaattctgccgtctgaggttttatacttcaggttagttagtttttggaaggaagaacatttttaggtttgcaagcctcctgatcaggaaaccagaaataccacatttatggaccatgaaaggttggttcttgactctgaagggacttttgagttaatcagcgtaaggggatttctaaagcaggcaatccctgtagccgcagagaataaacgccttcccaaaatggcaacttcccacagccacatttcagacctgctgagactgctgagtgaggaatggcagtgaggtttcttcaattagtctcagttctcttaattttcaggaagaaagggaaattgcagctcctcagcccccaggattgacctctggggagtgatggtagcgttggtgccaggccgtgggttcaggtgtggcagaagcttgcagatgcgtccgaagggaaataaagtgtgttggcgttaaaaaaaaaaaaaaaaaaaaaaaaaaaaaaaaaaaaaaaaaaaaagggggcgcgcgcgcgcggccaaagagattctccccaagggggcgccacaaagatcccgcgcggcccccaggtttcggggagaaaaagggggccccaaaaaggggggagcgcgatatataaaaagagacagagagccagcgggcgcgggagaggttaacacaaagggcgcgcgcgggagcaggggggccaacacagcgcggccagagacaggggggagaaaaccttgggaggagagaggagcaacccctcttaacctccgcgaggggcggggcggggccaacatacgtgtggggaacacaaaaaccaaaccc

SEQ ID NO: 344510 - DNA, 1611 bp, Homo sapiens
tgcgcaggcgcagtcccgacgagcaacgcgtttgtagaggggtgggtgcgcacgctctgtccctgcgtgaccttccgaccccgctgtcctcaccgcaatggcggctgtgagggccctggtggcctcgaggctcgctgcggcatctgcattcacgtccctgtcccccggcggtcggacgccttcccagcgcgcagcccttcacctctccgtgccgcgccccgcggccagggtcgcgctggatcctggtgcacctgagccgtggaggggctgaagtccagatctttgctcctgacgtccctcagatgcacgtgattgaccacaccaaggggcagccgtccgaaggcgagagcaggaatgttttgaccgagtctgcgaggatcgcccgtggcaaaatcacagacctggccaacctcagtgcagccaaccatgatgctgccatctttccaggaggctttggagcggctaaaaacctgagcacgtttgccgtggacgggaaagattgcaaggtgaataaagaagtggagcgtgtcctgaaggagttccaccaggccgggaagcccatcggcttgtgctgcattgcacctgtcctcgcggccaaggtgctcagaggcgtcgaggtgactgtgggccacgagcaggaggaaggtggcaagtggccttatgccgggaccgcagaggccatcaaggccctgggtgccaagcactgcgtgaaggaagtggtcgaagctcacgtggaccagaaaaacaaggtggtcacgaccccagccttcatgtgcgagacggcactccactacatccatgatgggatcggagccatggtgaggaaggtgctggaactcactggaaagtgacgcgcatggacggggcccagctaggcgccaggacttggcctcaccctctggctgaggagctgtcggctgctttccatccagctgggagtctggcaggcccttttttttttttctttgccgaaacctgcaggcgttctctctctaaggaggatgtgctgcagtgcatgggggatgtttcttcctgggtgtggctgggctgctctcacatacagaggccgaggggccaattcgttctctgccacagggacttgcctcactgtgtcccaaaaacaaatcgcagccagcttttccagaaatagaaaattctgccgtctgaggttttatacttcaggttagttagtttttggaaggaagaacatttttaggtttgcaagcctcctgatcaggaaaccagaaataccacatttatggaccatgaaaggttggttcttgactctgaagggacttttgagttaatcagcgtaaggggatttctaaagcaggcaatccctgtagccgcagagaataaacgccttcccaaaatggcaacttcccacagccacatttcagacctgctgagactgctgagtgaggaatggcagtgaggtttcttcaattagtctcagttctcttaattttcaggaagaaagggaaattgcagctcctcagcccccaggattgacctctggggagtgatggtagcgttggtgccaggccgtgggttcaggtgtggcagaagcttgcagatgcgtccgaagggaaataaagtgtgttggcgtta

SEQ ID NO: 344511 - DNA, 1589 bp, Homo sapiens
tgcgcaggcgcagtcccgacgagcaacgcgtttgtagaggggtgggtgcgcacgctctgtccctgcgtgaccttccgaccccgctgtcctcaccgcaatggcggctgtgagggccctggtggcctcgaggctcgctgcggcatctgcattcacgtccctgtcccccggcggtcggacgccttcccagcgcgcagcccttcacctctccgtgccgcgccccgcggccagggtcgcgctggtgctgtctggatgcggagtctacgatgggaccgagatccacgaggcctcggcgtaagtcctcaggggcagctggtcctccaccccgggggcgaatgttttgaccgagtctgcgaggatcgcccgtggcaaaatcacagacctggccaacctcagtgcagccaaccatgatgctgccatctttccaggaggctttggagcggctaaaaacctgagcacgtttgccgtggacgggaaagattgcaaggtgaataaagaagtggagcgtgtcctgaaggagttccaccaggccgggaagcccatcggcttgtgctgcattgcacctgtcctcgcggccaaggtgctcagaggcgtcgaggtgactgtgggccacgagcaggaggaaggtggcaagtggccttatgccgggaccgcagaggccatcaaggccctgggtgccaagcactgcgtgaaggaagtggtcgaagctcacgtggaccagaaaaacaaggtggtcacgaccccagccttcatgtgcgagacggcactccactacatccatgatgggatcggagccatggtgaggaaggtgctggaactcactggaaagtgacgcgcatggacggggcccagctaggcgccaggacttggcctcaccctctggctgaggagctgtcggctgctttccatccagctgggagtctggcaggcccttttttttttttctttgccgaaacctgcaggcgttctctctctaaggaggatgtgctgcagtgcatgggggatgtttcttcctgggtgtggctgggctgctctcacatacagaggccgaggggccaattcgttctctgccacagggacttgcctcactgtgtcccaaaaacaaatcgcagccagcttttccagaaatagaaaattctgccgtctgaggttttatacttcaggttagttagtttttggaaggaagaacatttttaggtttgcaagcctcctgatcaggaaaccagaaataccacatttatggaccatgaaaggttggttcttgactctgaagggacttttgagttaatcagcgtaaggggatttctaaagcaggcaatccctgtagccgcagagaataaacgccttcccaaaatggcaacttcccacagccacatttcagacctgctgagactgctgagtgaggaatggcagtgaggtttcttcaattagtctcagttctcttaattttcaggaagaaagggaaattgcagctcctcagcccccaggattgacctctggggagtgatggtagcgttggtgccaggccgtgggttcaggtgtggcagaagcttgcagatgcgtccgaagggaaataaagtgtgttggcgtta

SEQ ID NO: 344512 - DNA, 1571 bp, Homo sapiens
tgcgcaggcgcagtcccgacgagcaacgcgtttgtagaggggtgggtgcgcacgctctgtccctgcgtgaccttccgaccccgctgtcctcaccgcaatggcggctgtgagggccctggtggcctcgaggctcgctgcggcatctgcattcacgtccctgtcccccggcggtcggacgccttcccagcgcgcagcccttcacctctccgtgccgcgccccgcggccagggtcgcgctggtgctgtctggatgcggagtctacgatgggaccgagatccacgaggcctcggcgatcctggtgcacctgagccgtggaggggctgaagtccagatctttgctcctgacgtccctcagatgcacgtgattgaccacaccaaggggcagccgtccgaaggcgagagcaggaatgttttgaccgagtctgcgaggatcgcccgtggcaaaatcacagacctggccaacctcagtgcagccaaccatgatgctgccatctttccaggaggctttggagcggctaaaaacctcttgtgctgcattgcacctgtcctcgcggccaaggtgctcagaggcgtcgaggtgactgtgggccacgagcaggaggaaggtggcaagtggccttatgccgggaccgcagaggccatcaaggccctgggtgccaagcactgcgtgaaggaagtggtcgaagctcacgtggaccagaaaaacaaggtggtcacgaccccagccttcatgtgcgagacggcactccactacatccatgatgggatcggagccatggtgaggaaggtgctggaactcactggaaagtgacgcgcatggacggggcccagctaggcgccaggacttggcctcaccctctggctgaggagctgtcggctgctttccatccagctgggagtctggcaggcccttttttttttttctttgccgaaacctgcaggcgttctctctctaaggaggatgtgctgcagtgcatgggggatgtttcttcctgggtgtggctgggctgctctcacatacagaggccgaggggccaattcgttctctgccacagggacttgcctcactgtgtcccaaaaacaaatcgcagccagcttttccagaaatagaaaattctgccgtctgaggttttatacttcaggttagttagtttttggaaggaagaacatttttaggtttgcaagcctcctgatcaggaaaccagaaataccacatttatggaccatgaaaggttggttcttgactctgaagggacttttgagttaatcagcgtaaggggatttctaaagcaggcaatccctgtagccgcagagaataaacgccttcccaaaatggcaacttcccacagccacatttcagacctgctgagactgctgagtgaggaatggcagtgaggtttcttcaattagtctcagttctcttaattttcaggaagaaagggaaattgcagctcctcagcccccaggattgacctctggggagtgatggtagcgttggtgccaggccgtgggttcaggtgtggcagaagcttgcagatgcgtccgaagggaaataaagtgtgttggcgtta

SEQ ID NO: 344513 - DNA, 1168 bp, Homo sapiens
gtctgaggaggccttttgtctcccggtaggagcacgtttgccgtggacgggaaagattgcaaggtgaataaagaagtggagcgtgtcctgaaggagttccaccaggccgggaagcccatcggcttgtgctgcattgcacctgtcctcgcggccaaggtgctcagaggcgtcgaggtgactgtgggccacgagcaggaggaaggtggcaagtggccttatgccgggaccgcagaggccatcaaggccctgggtgccaagcactgcgtgaaggaagtggtcgaagctcacgtggaccagaaaaacaaggtggtcacgaccccagccttcatgtgcgagacggcactccactacatccatgatgggatcggagccatggtgaggaaggtgctggaactcactggaaagtgacgcgcatggacggggcccagctaggcgccaggacttggcctcaccctctggctgaggagctgtcggctgctttccatccagctgggagtctggcaggcccttttttttttttctttgccgaaacctgcaggcgttctctctctaaggaggatgtgctgcagtgcatgggggatgtttcttcctgggtgtggctgggctgctctcacatacagaggccgaggggccaattcgttctctgccacagggacttgcctcactgtgtcccaaaaacaaatcgcagccagcttttccagaaatagaaaattctgccgtctgaggttttatacttcaggttagttagtttttggaaggaagaacatttttaggtttgcaagcctcctgatcaggaaaccagaaataccacatttatggaccatgaaaggttggttcttgactctgaagggacttttgagttaatcagcgtaaggggatttctaaagcaggcaatccctgtagccgcagagaataaacgccttcccaaaatggcaacttcccacagccacatttcagacctgctgagactgctgagtgaggaatggcagtgaggtttcttcaattagtctcagttctcttaattttcaggaagaaagggaaattgcagctcctcagcccccaggattgacctctggggagtgatggtagcgttggtgccaggccgtgggttcaggtgtggcagaagcttgcagatgcgtccgaagggaaataaagtgtgttggcgtta

SEQ ID NO: 344514 - DNA, 1453 bp, Homo sapiens
ataggggcacgtgtcttgggtggtgtggaggcctggccagtggttacatgcatggtgttggggaggctcaggtctgtggctggccggccccagttgtgccacctgctgccctgttgcctgttgccctgccccatgaggaccggctccttcacggccagttcttcatctgaaaagcggaggtgctgccactgcctcccgtggtggttgtgagcaccccaggcatgtgtgcgcccccatggcggggcagctcgtggccatgtgtgggtgttgggcctgtgtgatgctggcatgaaaggtgccccgttccctggaatttcccgctgctttcttcctctagaatgcatgtgaattgggaacaggttccttcttatgttgttcagcagcataaatcatacagaaagcagggtcctgccggcacagactgcaccaggagcgagttctcctcttccaagttatctgagaacaaagttaggacacgcggtgagggtgggggaggggccggggctccacacctgaaagtccctcaggtccgtgctgggtggctttttccgtaactctgcacacgaagctcacgtggaccagaaaaacaaggtggtcacgaccccagccttcatgtgcgagacggcactccactacatccatgatgggatcggagccatggtgaggaaggtgctggaactcactggaaagtgacgcgcatggacggggcccagctaggcgccaggacttggcctcaccctctggctgaggagctgtcggctgctttccatccagctgggagtctggcaggcccttttttttttttctttgccgaaacctgcaggcgttctctctctaaggaggatgtgctgcagtgcatgggggatgtttcttcctgggtgtggctgggctgctctcacatacagaggccgaggggccaattcgttctctgccacagggacttgcctcactgtgtcccaaaaacaaatcgcagccagcttttccagaaatagaaaattctgccgtctgaggttttatacttcaggttagttagtttttggaaggaagaacatttttaggtttgcaagcctcctgatcaggaaaccagaaataccacatttatggaccatgaaaggttggttcttgactctgaagggacttttgagttaatcagcgtaaggggatttctaaagcaggcaatccctgtagccgcagagaataaacgccttcccaaaatggcaacttcccacagccacatttcagacctgctgagactgctgagtgaggaatggcagtgaggtttcttcaattagtctcagttctcttaattttcaggaagaaagggaaattgcagctcctcagcccccaggattgacctctggggagtgatggtagcgttggtgccaggccgtgggttcaggtgtggcagaagcttgcagatgcgtccgaagggaaataaagtgtgttggcgtta

SEQ ID NO: 344515 - DNA, 944 bp, Homo sapiens
  misc_feature (913)..(914): n is a, c, g, or t
tgcgcaggcgcagtcccgacgagcaacgcgtttgtagaggggtgggtgcgcacgctctgtccctgcgtgaccttccgaccccgctgtcctcaccgcaatggcggctgtgagggccctggtggcctcgaggctcgctgcggcatctgcattcacgtccctgtcccccggcggtcggacgccttcccagcgcgcagcccttcacctctccgtgccgcgccccgcggccagggtcgcgctggtgctgtctggatgcggagtctacgatgggaccgagatccacgaggcctcggcgatcctggtgcacctgagccgtggaggggctgaagtccagatctttgctcctgacgtccctcagatgcacgtgattgaccacaccaaggggcagccgtccgaaggcgagagcaggaatgttttgaccgagtctgcgaggatcgcccgtggcaaaatcacagacctggccaacctcagtgcagccaaccatgatgctgccatctttccaggaggctttggagcggctaaaaacctgagcacgtttgccgtggacgggaaagattgcaaggtgaataaagaagtggagcgtgtcctgaaggagttccaccaggccgggaagcccatcggcttgtgctgcattgcacctgtcctcgcggccaaggtgctcagaggcgtcgaggtgactgtgggccacgagcaggaggaaggtggcaagtggccttatgccgggaccgcagaggccatcaaggccctgggtgccaagcactgcgtgaaggaagtggtcgaagctcacgtggaccagaaaaacaaggtggtcacgaccccagccttcatgtgcgagacggcactccactacatccatgatgggatcggagccatggtgaggaaggtgctggaactcactggaaagtgacgcgccatnntgcgcttcgggatcctctagatcaacccgg

SEQ ID NO: 344516 - DNA, 881 bp, Homo sapiens
tgcgcaggcgcagtcccgacgagcaacgcgtttgtagaggggtgggtgcgcacgctctgtccctgcgtgaccttccgaccccgctgtcctcaccgcaatggcggctgtgagggccctggtggcctcgaggctcgctgcggcatctgcattcacgtccctgtcccccggcggtcggacgccttcccagcgcgcagcccttcacctctccgtgccgcgccccgcggccagggtcgcgctggtgctgtctggatgcggagtctacgatgggaccgagatccacgaggcctcggcgatcctggtgcacctgagccgtggaggggctgaagtccagatctttgctcctgacgtccctcagatgcacgtgattgaccacaccaaggggcagccgtccgaaggcgagagcaggaatgttttgaccgagtctgcgaggatcgcccgtggcaaaatcacagacctggccaacctcagtgcagccaaccatgatgctgccatctttccaggaggctttggagcggctaaaaacctgagcacgtttgccgtggacgggaaagattgcaaggtgaataaagaagtggagcgtgtcctgaaggagttccaccaggccgggaagcccatcggtcactcacttaaggacctgcctggtcactgtccagggaggcccctaaagtggagcctcaggaagaggtgcaggctcagagctcctgaaggaggtccctgctgcagccgtgtcacagccggggtgaaggtttcgcccatggtctccacctcgggatcccgtccttgtcagagaagtgttccttggatgagcgcccagagggaggagcccatggccctttcttctgtgactgattaaaaatctcgatgaaacaagacagcccctg

SEQ ID NO: 344517 - DNA, 869 bp, Homo sapiens
  misc_feature (838)..(839): n is a, c, g, or t
tgcgcaggcgcagtcccgacgagcaacgcgtttgtagaggggtgggtgcgcacgctctgtccctgcgtgaccttccgaccccgctgtcctcaccgcaatggcggctgtgagggccctggtggcctcgaggctcgctgcggcatctgcattcacgtccctgtcccccggcggtcggacgccttcccagcgcgcagcccttcacctctccgtgccgcgccccgcggccagggtcgcgctggtgctgtctggatgcggagtctacgatgggaccgagatccacgaggcctcggcgtaagtcctcaggggcagctggtcctccaccccgggggcgaatgttttgaccgagtctgcgaggatcgcccgtggcaaaatcacagacctggccaacctcagtgcagccaaccatgatgctgccatctttccaggaggctttggagcggctaaaaacctgagcacgtttgccgtggacgggaaagattgcaaggtgaataaagaagtggagcgtgtcctgaaggagttccaccaggccgggaagcccatcggcttgtgctgcattgcacctgtcctcgcggccaaggtgctcagaggcgtcgaggtgactgtgggccacgagcaggaggaaggtggcaagtggccttatgccgggaccgcagaggccatcaaggccctgggtgccaagcactgcgtgaaggaagtggtcgaagctcacgtggaccagaaaaacaaggtggtcacgaccccagccttcatgtgcgagacggcactccactacatccatgatgggatcggagccatggtgaggaaggtgctggaactcactggaaagtgacgcgccatnntgcgcttcgggatcctctagatcaacccgg

SEQ ID NO: 344518 - DNA, 373 bp, Homo sapiens
aggtaaggggaagggacaagagggagaagatagcaaacctgaaagtaaataacgtgatatggtaaaataaatggacccaaaagtttatggaatatcataaaatagacagtgccaagggaatgtttgtgaccttgtcaatgtcctcaagaaagaaactgagttaagttagaacactaacttaagacaactgctatattctatattaacttagcactgaatatatattagatgtatattatatattatacataatatatattacattgatatatatttatatatcatatctataaagtgtatatatatattttagatagatagataaaattatctgtaattgaaggcctgagatagaacttgataaaacatatta

SEQ ID NO: 344519 - DNA, 921 bp, Homo sapiens
ccaaacaacttcgctaaaatacccagattcttttgcaatatcagtgtcttcgtcaccatataattttggctctgtttcctcctggcatttatcagctggaggggaaaacctgagaccaccccaggtgaccaccctcttcctcattcatctgtgctgtcacctgcctgctcctgtaggtatgtctgcttttagccttgatgtgtacaagaagctgacagaagggcctcgggtcttaatcacagacttagggaaatcataaggaaaagaggcatgaaggtgctaaaaaaatcttaaagacaacagtttgagaactcccaggagtcaatatccctatttccctgacccactgtgcccagccctcattattcaactggcaaacttcaccaacaaaccaaaacaaaagaaaaaattgtcatatttttgtttctatcattttttcctttagagcccacctagtcctatgtggcaataaatagacactactctaaatctcatctggccaactgagtttcaaaacctaatccagagagcctggaaagaaaatgcattgaaaagaaaaaaaaaagaaagaaaaagaaaatatgttgaatattgatgttataatttacatgtgagatttttctctttatgaatcatttttctgttcaggcaaagtggtctgttttccgattttgacattatgttatatgtatctgtgctaaaataagctgcaaatacttcaactagcagttgtcattctgtcagtctttttagaatccttaagttggcaaggtattgattagtgcctggatgcctccacacctaaattatatactgcagtgggaaactgctgtctcttagaattattcctttttttaaaggattattctttgtaacttcaaaaactctgatagcaacccattctttttttaatgtactcca

SEQ ID NO: 344520 - DNA, 445 bp, Homo sapiens
ggttgctttgtgtggtattgccatcttaatattaagtcttccaattgctgaacacaggatatctctatttatttatgtcttccttaattccattcagcaatgttttataacttttagtgtacaatgctttcacttggttaaatttattcctagggaccgggcgcagtaatcacacctataatcccagcactttgggaggccaaggtggccggatcacccaaggtcaggagtttgagaccagcctgaccaacatggagaaaccctgtctctactgaaagaaaatacagaattagccgggtgtggtggcacatgcctataatcccagctacttgggggagcaggggtgaggcaggagaatcacttgaacccgagaggtggaggttgcggtgagccaagatcacaccactgcactccagcctgggcaataagagcaagactccgtctc

SEQ ID NO: 344521 - DNA, 419 bp, Homo sapiens
atgtctatgtcctaatctccagaacctatgaatggattgtctttcatggaaaaggggtatttagattgctaatctactggccttgagatgggagagtatcctggatgatctttatgggcccaatgtgatcacaatggtccttaaaagtggaagaaggtgtccgaagaggaccagagagacacccatgtgagaaggactcggccttatgttgctggttttgaagacggagaaaggggccacaagcaaaggaaagtggggggcttctagaagctggaaaaggcaaggaaacggattctcccttatagcctccagaatggaacacagccctgccaaccccttgatcttagtcctgtgagacccctgttggacttttgactacagaactgtaaaagaataaatttgtgttgttttaagtcacc

SEQ ID NO: 344522 - DNA, 358 bp, Homo sapiens
ggataaaagactacaaatatggtgcagtgtatactgcttgggtgatgagtgcaccaaaatcccacaaatcaccactaaggaacttattcatgtaaccaaataccacctgttccccaattacctatggaaaaaaacacccaaaatgcttgggaacagaaatgttttggattttggatttttttttaaatattggaatatttgcgttatactcaccagttgagcatccctgatccaaaaatgagaaatccaaaatgtgccaatattcatttcctttgagcatgacctttgagcatcatatcggcactcgaagagttttgaactttggagtatttcagattttataaattttggattaggg

SEQ ID NO: 344523 - DNA, 8458 bp, Homo sapiens
  misc_feature (4013)..(4013): n is a, c, g, or t
gcggccgctcgcccggaccctgaggctgctgggcccaccctcccggaaccgtccgaccctcggtggcctcggcctcttctgccatctccggtcctaccctggggcggagggtggaaggcagcttccgtcgaagaggagggggctgcggtggccaccgcggcggagcccgagttattttaccaagaaaatggtttgcacgactttgaacatatactatccatgctgatgggacaggatccaatatgaatataaatgatggaggaagacgacgctttgaagataatgaacatacattacggatatatcctggggctatttcagaagggacaatctactgtccgattcctgccagaaaaaactccacagctgctgaggtgattgagtctcttataaacaaacttcatcttgacaaaacaaaatgttatgttctagcagaggtaaaggaatttggtggagaagaatggattctcaatccaacagattgtccagttcagcgaatgatgctgtggccccgaatggctctggaaaatcgcttaagtggagaggactaccgcttccttctgagagagaaaaaccttgatggatcaatccattatggtagcctgcagtcatggctacgggtaacagaagaacgtcgcaggatgatggaacggggttttcttccacagcctcaacagaaagactttgatgatttatgtagtttacctgatttgaatgagaaaactctcttagaaaacctacgaaatcgctttaagcatgaaaaaatttatacctatgttggcagtattctaatagttattaacccattcaagtttcttcctatttataaccccaaatatgtcaaaatgtatgataaccaccaactgggaaaacttgagccccacatttatgctgtggctgatgtagcttatcatgccatgcttcagcgcaaaaagaatcagtgcatcgtgatttcaggagagagtggttctgggaagactcaaagcacaaactttcttattcaccaccttactgctctcagtcagaaaggatttgccagtggagtagaacagattattcttggagctggaccagtacttgaggcctttggaaatgcaaagacagctcataataacaattcaagtcgttttgggaagtttattcaagtaaattaccaggaaacaggcactgtacttggtgcctatgttgaaaaatatctactggagaagtccagactcgtttatcaggagcataatgaacggaactatcatgtattctattacctcctggcaggagcaagtgaagatgagagatcagcattccatcttaagcaaccagaggaatatcattatctcaatcagataacaaagaaacccctcagacagagctgggatgattattgctatgactctgagccggattgcttcacggtggaaggagaagatttgagacatgactttgagcgcctacaacttgccatggaaatggtaggatttcttcccaagacacgaagacagattttctctcttctctcagccatactacatttgggtaatatctgttacaaaaagaagacataccgggatgactccattgatatctgtaatcctgaagttctgcctattgtctcagaattattagaggttaaagaagagatgctatttgaagcattagttacaaggaagacggtgacagtgggagaaaagcttattttgccatacaagttggcagaggctgtgacagtgaggaactccatggctaagtctctgtatagtgccctgtttgactggatagtttttcgaattaatcatgcacttctgaatagtaaagatttagagcataataccaagacattgtctattggtgttcttgatatttttgggtttgaagattatgaaaataacagctttgaacagttctgtattaattttgctaatgaacgtttacagcactactttaatcagcatatctttaaattggaacaagaggaatatagaactgaaggtatcagctggcacaacatagattacattgataatacctgctgcataaatcttattagcaaaaaaccaacaggactgcttcatcttttggatgaagaaagcaactttccacaggctacaaatcaaacattgctagacaagtttaagcatcaacatgaagataattcttacatcgaatttccagccgtgatggagcctgctttcattataaaacattatgctggaaaagtaaaatatggggtaaaggatttccgggaaaaaaatacagatcatatgcgcccagacattgtagctcttctgagaagcagcaagaatgcatttatctctgggatgattggaattgatcctgtagctgttttccgatgggcaattctccgagcttttttcagagccatggttgctttcagggaagctgggaaaagaaacattcacagaaaaactggacatgatgatacagcgccatgtgcaattttgaaaagtatggatagttttagctttctccaacacccagtccaccagaggagcttagagattctgcagagatgcaaggaagagaagtacagtataacccggaaaaatcccagaacacctctttctgatctccagggcatgaatgctctaaatgaaaaaaaccaacatgatacatttgatattgcctggaatggcagaactgggattcgccagagcagactatcaagtggcacctccttgcttgataaagatggaatatttgctaattcaactagcagcaaactcctggagagagcccatggaattctcacgagaaacaaaaatttcaaatccaagcctgcccttccaaagcacttgctagaagtaaattctttaaagcacctgacaagactgacactacaagatcgcattaccaagtctcttcttcatttacacaagaagaaaaaacctcccagcatcagtgcccagtttcaggcatcattaagcaagctaatggaaacacttggtcaagcagaaccatattttgtaaaatgcattcgctctaatgctgaaaagctgcccttaaggttcagtgatgtcttggtacttagacagcttcgatacaccgggatgctggaaacagttcaaattcgccaatcaggatacagctccaaatattctttccaggattttgtgagccacttccatgtacttcttccccgaaatattattccatccaaatttaacattcaggatttcttcaggaaaataaatcttaatccagataattatcaagttggaaaaaccatggtctttctaaaggagcaggaacgacagcacttacaagatctgcttcaccaagaggtgctccgcagaatcatattgttgcagcgatggttcagggtcttgctgtgtaggcagcatttcctccatctgagacaagcatctgttattatccagagattctggaggaattacctaaatcagaagcaagtcagagatgcagctgtgcagaaggatgcttttgttatggctagtgcagctgctcttctccaagcttcctggcgtgctcacttagagaggcagcggtacttggagttacgggctgcagccatcgttatccagcagaaatggagagattactataggcgcaggcacatggctgctatttgcatacaagcaagatggaaagcctacagggaaagtaaaaggtaccaagaacaaaggaaaaaaattatccttttgcaatcaacatgtagaggattcagagcaagacaaagatttaaagctttaaaagaacaaaggctaagagaaacaaagccagaagttggattggtgaatattaagggatatggatctctggaaattcagggttcagacccttcagaatgggaggattgttcttttgacaacagaataaaagccatagaggaatgtaaatctgtaatagagagtaatcgaattagccgtgaaagttcagtggactgcttgaaggagtcaccaaacaagcagcaggagagagcccaaagccagagtggtgtggacttgcaggaagatgtgcttgtaagagagagacccagntccttggaggatctccatcagaaaaaagtaggccgggctaagagagaaagtaggagaatgagagaactagagcaagctatatttagcttagaattgctgaaagttcgttctcttggtggtatttctccttcagaggatcgcagatggtctacagaattggtgcctgaaggccttcagtctccacggggtacacctgatagtgagagctctcaaggaagcttggaacttctgagctatgaggaaagccaaaagagcaaactagagtctgtcatttcagatgaaggagacttgcagtttccatcacctaagatatccagcagtccaaaatttgattcacgggacaatgccctcagtgcctcaaatgagactagcagtgcagagcatttgaaggatggaactatgaaggaaatggtggtctgcagttctgagtctattacctgtaaaccacagctgaaagactccttcatttcaaatagtctacctacttttttttatatcccccaacaagacccactgaaaacaaattcccaactagacacaagtatccaaagaaacaaactattggaaaatgaagacacagcgggggaagctcttactttggatatcaacagggaaactagaaggtatcactgctcaggaaaagatcagattgttccttctttgaatacagagtcttctaatcctgtgcttaagaagttagaaaagctaaacactgagaaggaagaaaggcaaaaacagttgcagcaacagaatgaaaaagagatgatggaacagattcgccagcaaacagatattttagagaaggagcgcaaagccttcaagacaattgaaaagccaagaattggagagtgtttggtggcaccatcttcctatcagtcaaagcaaagagtagagaggccatcctctctcctcagcttaaatacctcaaataagggagaacttaatgtactggggtccctatcattaaaagatgcagctcttgcccaaaaagacagttcctctgctcacttacccccaaaggaccgacctgtcaccgtgttctttgaaagaaaaggaagtccatgccaatctagtactgtcaaggaattatccaagacagacagaatgggcacccagctgaatgtagcctgtaaactctcaaataatcgcatttcaaaaagagaacactttaggccaactcagtcttacagccacaattctgatgacctttccagagagggaaatgctaggcccattttcttcactccaaaggacaatatgagtattccccttgtcagcaaagaagccttaaacagtaaaaatcctcaactccataaagaagatgaaccagcatggaaacctgtgaagttagctgggccaggccaaagagagacatcacagcgattttcgtcagttgatgaacaagcaaaacttcataagactatgtctcaaggagagattaccaagttggcagtgagacagaaggcttcagattcagatataagacctcagagagctaagatgagattctgggccaaagggaaacaaggggagaagaagactaccagagtgaaacctactacccagtcagaggtttcgccactctttgcaggcacagatgtgattccagctcatcagtttccagatgaattagctgcatatcacccaacacctcctttgagcccagaactgcccggcagttgccggaaggaattcaaagagaacaaagaaccttctccaaaggctaagcgcaagcgaagtgtgaagattagcaacgtggctttggattctatgcattggcaaaatgactctgtccagatcatagcaagtgtcagtgatttaaaaagcatggatgaatttcttctgaaaaaggtgaatgacctagataatgaagacagcaagaaggatacactagtggatgttgtatttaaaaaagccctgaaggaatttcggcagaatatcttcagcttttattcatctgcattggcgatggatgatgggaaaagcatacggtataaagacctctatgcactatttgaacagattctggaaaagacgatgaggcttgagcagcgtgattcactgggtgaatctccagtgagagtttgggtcaacacttttaaagtgtttttagatgaatatatgaatgaattcaagacttcagattgcacagccacaaaggtgccaaaaacagaaagaaagaaaagaaggaaaaaggaaactgatttggtggaagaacacaatggtcacatctttaaagccacccaatatagcatccctacatactgtgaatactgttcttctttgatatggataatggaccgagcctctgtttgcaaattatgcaagtatgcttgccataagaagtgctgtctgaaaaccacagccaagtgctctaaaaagtatgatccagagctgtcatctcgacaatttggggttgaactgtcccgtttgaccagtgaagaccgaactgttcctttagtagtggaaaagctcataaactacattgaaatgcatggactgtatacagaaggtatttatcgaaagtctggttcgactaataaaatcaaggagcttcggcagggtctagatacagatgctgagagtgtaaatctagatgactataacatacacgtcattgcaagtgtattcaaacaatggcttcgagatttgcccaatcctctcatgacctttgaactctatgaggaatttcttcgagctatgggccttcaggagaggaaggagacaatccgtggtgtatactctgtgattgatcaactctcccgaactcatctcaatacactggaacgcctcatctttcatctagtcaggattgctctgcaggaagacactaatcgaatgtctgctaatgctttggccattgtgtttgcgccctgcattctccgctgccctgacaccactgacccactacaaagtgtacaggacatcagtaagactaccacttgtgtggaactgattgttgtggaacaaatgaataaatacaaggctcgtctcaaagatatcagtagcttggaatttgctgagaataaggcaaagaccaggttgtcactgattcgtagatcaatgggaaaggggcgtattcgtcgaggaaactatccaggtccatcgtctcctgttgtagttcggttgccttctgtgtctgatgtctcagaggagaccttgactagtgaggcagccatggagactgacatcacagaacagcagcaagcagctatgcagcaggaggagagagtactgactgagcagattgagaacctacagaaggagaaggaggagctaacatttgagatgcttgtactggaaccccgtgcctctgatgatgaaacccttgagtctgaggcctccattgggactgctgatagctcagagaatttgaatatggagtctgaatatgctatctctgagaaatcagaaagaagcttagcccttagctccctgaagacagctggcaagtctgaaccttccagcaagttgcgaaagcaacttaaaaagcagcaagactctttagatgtcgtggactcttcggtctcctctttatgtctgtctaacacggcatcatctcatgggaccagaaaactatttcagatttattccaaatctccattctaccgagctgcctcaggtaatgaggccctgggaatggaaggaccattgggccagaccaaattcctggaagacaagcctcagttcatcagcagaggaaccttcaacccggaaaagggcaaacaaaaattaaagaatgtgaaaaactcacctcagaaaaccaaagagaccccagaggggacagtcatgtctggccgcagaaaaactgtggacccagactgcacctccaaccaacagctagcactctttggaaataatgaatttatggtctgaaccggcagatgtgtgtccctccgtggctacagagtggtaaacaaatctcacctttggggctgcgtttcatcacctcgtccacaatagtcaatcctaattgtggtcctgcctcttttctaagcatatggctaagactgtatgtgctgaattcctgggcctcctgcagaagcagaaagcctgctggggatggtgccagctgtgccttggctgttgtatttgaattgagatttttactatacaaagccacctagggcctggggatttgggtcagttgtagttgcctctcccccaccctcttttcccttcccaaaggtgggtgttgaactaggggggatattgctgtcctgagggaccctctcatttctgacatttgaagaaaacgtataaatctttcttaaccgtgaaagcaaaagcctttgggtttattttgggatagttaggagctagggtagaatataatttttttccaaaaacttacttacaaacaaaaagcctaatccctctattttaagatttctgaaaaaacactccatgttatattctggggaaagcaaaaacaaaaaaaaaaa

SEQ ID NO: 344524 - DNA, 440 bp, Homo sapiens
atcataaattattttgagaatctgatgaaagctgacactgttgttgtaaaatgtacatccttaacaatttgcatataaatgcaggaatttatggtgcccctgaagcctatccatggaccttacttaaaacttttgctttgtaacactatttttatagctcttcattttgtatatatcagtgatctctaatcttattaaattatgcatacttatcagatgcatagtatttaattttcagtgtatttcctctgtatagtttatatctgtactatactattaagttttttaattgtaaatctaaacaatttaaaaatataaaaatttgagataaagatgagataaattatatttgaaacaaattatttaaaattaaagactcaaccttggctctcaccagaaagaaatagttacttataacttttttgaaggggagagtcgtg

SEQ ID NO: 344525 - DNA, 8674 bp, Homo sapiens
  misc_feature (4013)..(4013): n is a, c, g, or t
gcggccgctcgcccggaccctgaggctgctgggcccaccctcccggaaccgtccgaccctcggtggcctcggcctcttctgccatctccggtcctaccctggggcggagggtggaaggcagcttccgtcgaagaggagggggctgcggtggccaccgcggcggagcccgagttattttaccaagaaaatggtttgcacgactttgaacatatactatccatgctgatgggacaggatccaatatgaatataaatgatggaggaagacgacgctttgaagataatgaacatacattacggatatatcctggggctatttcagaagggacaatctactgtccgattcctgccagaaaaaactccacagctgctgaggtgattgagtctcttataaacaaacttcatcttgacaaaacaaaatgttatgttctagcagaggtaaaggaatttggtggagaagaatggattctcaatccaacagattgtccagttcagcgaatgatgctgtggccccgaatggctctggaaaatcgcttaagtggagaggactaccgcttccttctgagagagaaaaaccttgatggatcaatccattatggtagcctgcagtcatggctacgggtaacagaagaacgtcgcaggatgatggaacggggttttcttccacagcctcaacagaaagactttgatgatttatgtagtttacctgatttgaatgagaaaactctcttagaaaacctacgaaatcgctttaagcatgaaaaaatttatacctatgttggcagtattctaatagttattaacccattcaagtttcttcctatttataaccccaaatatgtcaaaatgtatgataaccaccaactgggaaaacttgagccccacatttatgctgtggctgatgtagcttatcatgccatgcttcagcgcaaaaagaatcagtgcatcgtgatttcaggagagagtggttctgggaagactcaaagcacaaactttcttattcaccaccttactgctctcagtcagaaaggatttgccagtggagtagaacagattattcttggagctggaccagtacttgaggcctttggaaatgcaaagacagctcataataacaattcaagtcgttttgggaagtttattcaagtaaattaccaggaaacaggcactgtacttggtgcctatgttgaaaaatatctactggagaagtccagactcgtttatcaggagcataatgaacggaactatcatgtattctattacctcctggcaggagcaagtgaagatgagagatcagcattccatcttaagcaaccagaggaatatcattatctcaatcagataacaaagaaacccctcagacagagctgggatgattattgctatgactctgagccggattgcttcacggtggaaggagaagatttgagacatgactttgagcgcctacaacttgccatggaaatggtaggatttcttcccaagacacgaagacagattttctctcttctctcagccatactacatttgggtaatatctgttacaaaaagaagacataccgggatgactccattgatatctgtaatcctgaagttctgcctattgtctcagaattattagaggttaaagaagagatgctatttgaagcattagttacaaggaagacggtgacagtgggagaaaagcttattttgccatacaagttggcagaggctgtgacagtgaggaactccatggctaagtctctgtatagtgccctgtttgactggatagtttttcgaattaatcatgcacttctgaatagtaaagatttagagcataataccaagacattgtctattggtgttcttgatatttttgggtttgaagattatgaaaataacagctttgaacagttctgtattaattttgctaatgaacgtttacagcactactttaatcagcatatctttaaattggaacaagaggaatatagaactgaaggtatcagctggcacaacatagattacattgataatacctgctgcataaatcttattagcaaaaaaccaacaggactgcttcatcttttggatgaagaaagcaactttccacaggctacaaatcaaacattgctagacaagtttaagcatcaacatgaagataattcttacatcgaatttccagccgtgatggagcctgctttcattataaaacattatgctggaaaagtaaaatatggggtaaaggatttccgggaaaaaaatacagatcatatgcgcccagacattgtagctcttctgagaagcagcaagaatgcatttatctctgggatgattggaattgatcctgtagctgttttccgatgggcaattctccgagcttttttcagagccatggttgctttcagggaagctgggaaaagaaacattcacagaaaaactggacatgatgatacagcgccatgtgcaattttgaaaagtatggatagttttagctttctccaacacccagtccaccagaggagcttagagattctgcagagatgcaaggaagagaagtacagtataacccggaaaaatcccagaacacctctttctgatctccagggcatgaatgctctaaatgaaaaaaaccaacatgatacatttgatattgcctggaatggcagaactgggattcgccagagcagactatcaagtggcacctccttgcttgataaagatggaatatttgctaattcaactagcagcaaactcctggagagagcccatggaattctcacgagaaacaaaaatttcaaatccaagcctgcccttccaaagcacttgctagaagtaaattctttaaagcacctgacaagactgacactacaagatcgcattaccaagtctcttcttcatttacacaagaagaaaaaacctcccagcatcagtgcccagtttcaggcatcattaagcaagctaatggaaacacttggtcaagcagaaccatattttgtaaaatgcattcgctctaatgctgaaaagctgcccttaaggttcagtgatgtcttggtacttagacagcttcgatacaccgggatgctggaaacagttcaaattcgccaatcaggatacagctccaaatattctttccaggattttgtgagccacttccatgtacttcttccccgaaatattattccatccaaatttaacattcaggatttcttcaggaaaataaatcttaatccagataattatcaagttggaaaaaccatggtctttctaaaggagcaggaacgacagcacttacaagatctgcttcaccaagaggtgctccgcagaatcatattgttgcagcgatggttcagggtcttgctgtgtaggcagcatttcctccatctgagacaagcatctgttattatccagagattctggaggaattacctaaatcagaagcaagtcagagatgcagctgtgcagaaggatgcttttgttatggctagtgcagctgctcttctccaagcttcctggcgtgctcacttagagaggcagcggtacttggagttacgggctgcagccatcgttatccagcagaaatggagagattactataggcgcaggcacatggctgctatttgcatacaagcaagatggaaagcctacagggaaagtaaaaggtaccaagaacaaaggaaaaaaattatccttttgcaatcaacatgtagaggattcagagcaagacaaagatttaaagctttaaaagaacaaaggctaagagaaacaaagccagaagttggattggtgaatattaagggatatggatctctggaaattcagggttcagacccttcagaatgggaggattgttcttttgacaacagaataaaagccatagaggaatgtaaatctgtaatagagagtaatcgaattagccgtgaaagttcagtggactgcttgaaggagtcaccaaacaagcagcaggagagagcccaaagccagagtggtgtggacttgcaggaagatgtgcttgtaagagagagacccagntccttggaggatctccatcagaaaaaagtaggccgggctaagagagaaagtaggagaatgagagaactagagcaagctatatttagcttagaattgctgaaagttcgttctcttggtggtatttctccttcagaggatcgcagatggtctacagaattggtgcctgaaggccttcagtctccacggggtacacctgatagtgagagctctcaaggaagcttggaacttctgagctatgaggaaagccaaaagagcaaactagagtctgtcatttcagatgaaggagacttgcagtttccatcacctaagatatccagcagtccaaaatttgattcacgggacaatgccctcagtgcctcaaatgagactagcagtgcagagcatttgaaggatggaactatgaaggaaatggtggtctgcagttctgagtctattacctgtaaaccacagctgaaagactccttcatttcaaatagtctacctacttttttttatatcccccaacaagacccactgaaaacaaattcccaactagacacaagtatccaaagaaacaaactattggaaaatgaagacacagcgggggaagctcttactttggatatcaacagggaaactagaaggtatcactgctcaggaaaagatcagattgttccttctttgaatacagagtcttctaatcctgtgcttaagaagttagaaaagctaaacactgagaaggaagaaaggcaaaaacagttgcagcaacagaatgaaaaagagatgatggaacagattcgccagcaaacagatattttagagaaggagcgcaaagccttcaagacaattgaaaagccaagaattggagagtgtttggtggcaccatcttcctatcagtcaaagcaaagagtagagaggccatcctctctcctcagcttaaatacctcaaataagggagaacttaatgtactggggtccctatcattaaaagatgcagctcttgcccaaaaagacagttcctctgctcacttacccccaaaggaccgacctgtcaccgtgttctttgaaagaaaaggaagtccatgccaatctagtactgtcaaggaattatccaagacagacagaatgggcacccagctgaatgtagcctgtaaactctcaaataatcgcatttcaaaaagagaacactttaggccaactcagtcttacagccacaattctgatgacctttccagagagggaaatgctaggcccattttcttcactccaaaggacaatatgagtattccccttgtcagcaaagaagccttaaacagtaaaaatcctcaactccataaagaagatgaaccagcatggaaacctgtgaagttagctgggccaggccaaagagagcaggttgccagaccggcccataaaaagaaagctcgaatggcgcggacgcgctccgatttcttgactagaggtacttttgccgatggggagggggatacagaggaagatgattacgatgacattattgagccccttctctcccttgaccaagcttctcactgtgagctagggcctgcacccagcctgggtcaggcctctcacagtgactccgaaatgacatcacagcgattttcgtcagttgatgaacaagcaaaacttcataagactatgtctcaaggagagattaccaagttggcagtgagacagaaggcttcagattcagatataagacctcagagagctaagatgagattctgggccaaagggaaacaaggggagaagaagactaccagagtgaaacctactacccagtcagaggtttcgccactctttgcaggcacagatgtgattccagctcatcagtttccagatgaattagctgcatatcacccaacacctcctttgagcccagaactgcccggcagttgccggaaggaattcaaagagaacaaagaaccttctccaaaggctaagcgcaagcgaagtgtgaagattagcaacgtggctttggattctatgcattggcaaaatgactctgtccagatcatagcaagtgtcagtgatttaaaaagcatggatgaatttcttctgaaaaaggtgaatgacctagataatgaagacagcaagaaggatacactagtggatgttgtatttaaaaaagccctgaaggaatttcggcagaatatcttcagcttttattcatctgcattggcgatggatgatgggaaaagcatacggtataaagacctctatgcactatttgaacagattctggaaaagacgatgaggcttgagcagcgtgattcactgggtgaatctccagtgagagtttgggtcaacacttttaaagtgtttttagatgaatatatgaatgaattcaagacttcagattgcacagccacaaaggtgccaaaaacagaaagaaagaaaagaaggaaaaaggaaactgatttggtggaagaacacaatggtcacatctttaaagccacccaatatagcatccctacatactgtgaatactgttcttctttgatatggataatggaccgagcctctgtttgcaaattatgcaagtatgcttgccataagaagtgctgtctgaaaaccacagccaagtgctctaaaaagtatgatccagagctgtcatctcgacaatttggggttgaactgtcccgtttgaccagtgaagaccgaactgttcctttagtagtggaaaagctcataaactacattgaaatgcatggactgtatacagaaggtatttatcgaaagtctggttcgactaataaaatcaaggagcttcggcagggtctagatacagatgctgagagtgtaaatctagatgactataacatacacgtcattgcaagtgtattcaaacaatggcttcgagatttgcccaatcctctcatgacctttgaactctatgaggaatttcttcgagctatgggccttcaggagaggaaggagacaatccgtggtgtatactctgtgattgatcaactctcccgaactcatctcaatacactggaacgcctcatctttcatctagtcaggattgctctgcaggaagacactaatcgaatgtctgctaatgctttggccattgtgtttgcgccctgcattctccgctgccctgacaccactgacccactacaaagtgtacaggacatcagtaagactaccacttgtgtggaactgattgttgtggaacaaatgaataaatacaaggctcgtctcaaagatatcagtagcttggaatttgctgagaataaggcaaagaccaggttgtcactgattcgtagatcaatgggaaaggggcgtattcgtcgaggaaactatccaggtccatcgtctcctgttgtagttcggttgccttctgtgtctgatgtctcagaggagaccttgactagtgaggcagccatggagactgacatcacagaacagcagcaagcagctatgcagcaggaggagagagtactgactgagcagattgagaacctacagaaggagaaggaggagctaacatttgagatgcttgtactggaaccccgtgcctctgatgatgaaacccttgagtctgaggcctccattgggactgctgatagctcagagaatttgaatatggagtctgaatatgctatctctgagaaatcagaaagaagcttagcccttagctccctgaagacagctggcaagtctgaaccttccagcaagttgcgaaagcaacttaaaaagcagcaagactctttagatgtcgtggactcttcggtctcctctttatgtctgtctaacacggcatcatctcatgggaccagaaaactatttcagatttattccaaatctccattctaccgagctgcctcaggtaatgaggccctgggaatggaaggaccattgggccagaccaaattcctggaagacaagcctcagttcatcagcagaggaaccttcaacccggaaaagggcaaacaaaaattaaagaatgtgaaaaactcacctcagaaaaccaaagagaccccagaggggacagtcatgtctggccgcagaaaaactgtggacccagactgcacctccaaccaacagctagcactctttggaaataatgaatttatggtctgaaccggcagatgtgtgtccctccgtggctacagagtggtaaacaaatctcacctttggggctgcgtttcatcacctcgtccacaatagtcaatcctaattgtggtcctgcctcttttctaagcatatggctaagactgtatgtgctgaattcctgggcctcctgcagaagcagaaagcctgctggggatggtgccagctgtgccttggctgttgtatttgaattgagatttttactatacaaagccacctagggcctggggatttgggtcagttgtagttgcctctcccccaccctcttttcccttcccaaaggtgggtgttgaactaggggggatattgctgtcctgagggaccctctcatttctgacatttgaagaaaacgtataaatctttcttaaccgtgaaagcaaaagcctttgggtttattttgggatagttaggagctagggtagaatataatttttttccaaaaacttacttacaaacaaaaagcctaatccctctattttaagatttctgaaaaaacactccatgttatattctggggaaagcaaaaacaaaaaaaaaaa

SEQ ID NO: 344526 - DNA, 8636 bp, Homo sapiens
  misc_feature (3975)..(3975): n is a, c, g, or t
gcggccgctcgcccggaccctgaggctgctgggcccaccctcccggaaccgtccgaccctcggtggcctcggcctcttctgccatctccggtcctaccctggggctgcggtggccaccgcggcggagcccgagttattttaccaagaaaatggtttgcacgactttgaacatatactatccatgctgatgggacaggatccaatatgaatataaatgatggaggaagacgacgctttgaagataatgaacatacattacggatatatcctggggctatttcagaagggacaatctactgtccgattcctgccagaaaaaactccacagctgctgaggtgattgagtctcttataaacaaacttcatcttgacaaaacaaaatgttatgttctagcagaggtaaaggaatttggtggagaagaatggattctcaatccaacagattgtccagttcagcgaatgatgctgtggccccgaatggctctggaaaatcgcttaagtggagaggactaccgcttccttctgagagagaaaaaccttgatggatcaatccattatggtagcctgcagtcatggctacgggtaacagaagaacgtcgcaggatgatggaacggggttttcttccacagcctcaacagaaagactttgatgatttatgtagtttacctgatttgaatgagaaaactctcttagaaaacctacgaaatcgctttaagcatgaaaaaatttatacctatgttggcagtattctaatagttattaacccattcaagtttcttcctatttataaccccaaatatgtcaaaatgtatgataaccaccaactgggaaaacttgagccccacatttatgctgtggctgatgtagcttatcatgccatgcttcagcgcaaaaagaatcagtgcatcgtgatttcaggagagagtggttctgggaagactcaaagcacaaactttcttattcaccaccttactgctctcagtcagaaaggatttgccagtggagtagaacagattattcttggagctggaccagtacttgaggcctttggaaatgcaaagacagctcataataacaattcaagtcgttttgggaagtttattcaagtaaattaccaggaaacaggcactgtacttggtgcctatgttgaaaaatatctactggagaagtccagactcgtttatcaggagcataatgaacggaactatcatgtattctattacctcctggcaggagcaagtgaagatgagagatcagcattccatcttaagcaaccagaggaatatcattatctcaatcagataacaaagaaacccctcagacagagctgggatgattattgctatgactctgagccggattgcttcacggtggaaggagaagatttgagacatgactttgagcgcctacaacttgccatggaaatggtaggatttcttcccaagacacgaagacagattttctctcttctctcagccatactacatttgggtaatatctgttacaaaaagaagacataccgggatgactccattgatatctgtaatcctgaagttctgcctattgtctcagaattattagaggttaaagaagagatgctatttgaagcattagttacaaggaagacggtgacagtgggagaaaagcttattttgccatacaagttggcagaggctgtgacagtgaggaactccatggctaagtctctgtatagtgccctgtttgactggatagtttttcgaattaatcatgcacttctgaatagtaaagatttagagcataataccaagacattgtctattggtgttcttgatatttttgggtttgaagattatgaaaataacagctttgaacagttctgtattaattttgctaatgaacgtttacagcactactttaatcagcatatctttaaattggaacaagaggaatatagaactgaaggtatcagctggcacaacatagattacattgataatacctgctgcataaatcttattagcaaaaaaccaacaggactgcttcatcttttggatgaagaaagcaactttccacaggctacaaatcaaacattgctagacaagtttaagcatcaacatgaagataattcttacatcgaatttccagccgtgatggagcctgctttcattataaaacattatgctggaaaagtaaaatatggggtaaaggatttccgggaaaaaaatacagatcatatgcgcccagacattgtagctcttctgagaagcagcaagaatgcatttatctctgggatgattggaattgatcctgtagctgttttccgatgggcaattctccgagcttttttcagagccatggttgctttcagggaagctgggaaaagaaacattcacagaaaaactggacatgatgatacagcgccatgtgcaattttgaaaagtatggatagttttagctttctccaacacccagtccaccagaggagcttagagattctgcagagatgcaaggaagagaagtacagtataacccggaaaaatcccagaacacctctttctgatctccagggcatgaatgctctaaatgaaaaaaaccaacatgatacatttgatattgcctggaatggcagaactgggattcgccagagcagactatcaagtggcacctccttgcttgataaagatggaatatttgctaattcaactagcagcaaactcctggagagagcccatggaattctcacgagaaacaaaaatttcaaatccaagcctgcccttccaaagcacttgctagaagtaaattctttaaagcacctgacaagactgacactacaagatcgcattaccaagtctcttcttcatttacacaagaagaaaaaacctcccagcatcagtgcccagtttcaggcatcattaagcaagctaatggaaacacttggtcaagcagaaccatattttgtaaaatgcattcgctctaatgctgaaaagctgcccttaaggttcagtgatgtcttggtacttagacagcttcgatacaccgggatgctggaaacagttcaaattcgccaatcaggatacagctccaaatattctttccaggattttgtgagccacttccatgtacttcttccccgaaatattattccatccaaatttaacattcaggatttcttcaggaaaataaatcttaatccagataattatcaagttggaaaaaccatggtctttctaaaggagcaggaacgacagcacttacaagatctgcttcaccaagaggtgctccgcagaatcatattgttgcagcgatggttcagggtcttgctgtgtaggcagcatttcctccatctgagacaagcatctgttattatccagagattctggaggaattacctaaatcagaagcaagtcagagatgcagctgtgcagaaggatgcttttgttatggctagtgcagctgctcttctccaagcttcctggcgtgctcacttagagaggcagcggtacttggagttacgggctgcagccatcgttatccagcagaaatggagagattactataggcgcaggcacatggctgctatttgcatacaagcaagatggaaagcctacagggaaagtaaaaggtaccaagaacaaaggaaaaaaattatccttttgcaatcaacatgtagaggattcagagcaagacaaagatttaaagctttaaaagaacaaaggctaagagaaacaaagccagaagttggattggtgaatattaagggatatggatctctggaaattcagggttcagacccttcagaatgggaggattgttcttttgacaacagaataaaagccatagaggaatgtaaatctgtaatagagagtaatcgaattagccgtgaaagttcagtggactgcttgaaggagtcaccaaacaagcagcaggagagagcccaaagccagagtggtgtggacttgcaggaagatgtgcttgtaagagagagacccagntccttggaggatctccatcagaaaaaagtaggccgggctaagagagaaagtaggagaatgagagaactagagcaagctatatttagcttagaattgctgaaagttcgttctcttggtggtatttctccttcagaggatcgcagatggtctacagaattggtgcctgaaggccttcagtctccacggggtacacctgatagtgagagctctcaaggaagcttggaacttctgagctatgaggaaagccaaaagagcaaactagagtctgtcatttcagatgaaggagacttgcagtttccatcacctaagatatccagcagtccaaaatttgattcacgggacaatgccctcagtgcctcaaatgagactagcagtgcagagcatttgaaggatggaactatgaaggaaatggtggtctgcagttctgagtctattacctgtaaaccacagctgaaagactccttcatttcaaatagtctacctacttttttttatatcccccaacaagacccactgaaaacaaattcccaactagacacaagtatccaaagaaacaaactattggaaaatgaagacacagcgggggaagctcttactttggatatcaacagggaaactagaaggtatcactgctcaggaaaagatcagattgttccttctttgaatacagagtcttctaatcctgtgcttaagaagttagaaaagctaaacactgagaaggaagaaaggcaaaaacagttgcagcaacagaatgaaaaagagatgatggaacagattcgccagcaaacagatattttagagaaggagcgcaaagccttcaagacaattgaaaagccaagaattggagagtgtttggtggcaccatcttcctatcagtcaaagcaaagagtagagaggccatcctctctcctcagcttaaatacctcaaataagggagaacttaatgtactggggtccctatcattaaaagatgcagctcttgcccaaaaagacagttcctctgctcacttacccccaaaggaccgacctgtcaccgtgttctttgaaagaaaaggaagtccatgccaatctagtactgtcaaggaattatccaagacagacagaatgggcacccagctgaatgtagcctgtaaactctcaaataatcgcatttcaaaaagagaacactttaggccaactcagtcttacagccacaattctgatgacctttccagagagggaaatgctaggcccattttcttcactccaaaggacaatatgagtattccccttgtcagcaaagaagccttaaacagtaaaaatcctcaactccataaagaagatgaaccagcatggaaacctgtgaagttagctgggccaggccaaagagagcaggttgccagaccggcccataaaaagaaagctcgaatggcgcggacgcgctccgatttcttgactagaggtacttttgccgatggggagggggatacagaggaagatgattacgatgacattattgagccccttctctcccttgaccaagcttctcactgtgagctagggcctgcacccagcctgggtcaggcctctcacagtgactccgaaatgacatcacagcgattttcgtcagttgatgaacaagcaaaacttcataagactatgtctcaaggagagattaccaagttggcagtgagacagaaggcttcagattcagatataagacctcagagagctaagatgagattctgggccaaagggaaacaaggggagaagaagactaccagagtgaaacctactacccagtcagaggtttcgccactctttgcaggcacagatgtgattccagctcatcagtttccagatgaattagctgcatatcacccaacacctcctttgagcccagaactgcccggcagttgccggaaggaattcaaagagaacaaagaaccttctccaaaggctaagcgcaagcgaagtgtgaagattagcaacgtggctttggattctatgcattggcaaaatgactctgtccagatcatagcaagtgtcagtgatttaaaaagcatggatgaatttcttctgaaaaaggtgaatgacctagataatgaagacagcaagaaggatacactagtggatgttgtatttaaaaaagccctgaaggaatttcggcagaatatcttcagcttttattcatctgcattggcgatggatgatgggaaaagcatacggtataaagacctctatgcactatttgaacagattctggaaaagacgatgaggcttgagcagcgtgattcactgggtgaatctccagtgagagtttgggtcaacacttttaaagtgtttttagatgaatatatgaatgaattcaagacttcagattgcacagccacaaaggtgccaaaaacagaaagaaagaaaagaaggaaaaaggaaactgatttggtggaagaacacaatggtcacatctttaaagccacccaatatagcatccctacatactgtgaatactgttcttctttgatatggataatggaccgagcctctgtttgcaaattatgcaagtatgcttgccataagaagtgctgtctgaaaaccacagccaagtgctctaaaaagtatgatccagagctgtcatctcgacaatttggggttgaactgtcccgtttgaccagtgaagaccgaactgttcctttagtagtggaaaagctcataaactacattgaaatgcatggactgtatacagaaggtatttatcgaaagtctggttcgactaataaaatcaaggagcttcggcagggtctagatacagatgctgagagtgtaaatctagatgactataacatacacgtcattgcaagtgtattcaaacaatggcttcgagatttgcccaatcctctcatgacctttgaactctatgaggaatttcttcgagctatgggccttcaggagaggaaggagacaatccgtggtgtatactctgtgattgatcaactctcccgaactcatctcaatacactggaacgcctcatctttcatctagtcaggattgctctgcaggaagacactaatcgaatgtctgctaatgctttggccattgtgtttgcgccctgcattctccgctgccctgacaccactgacccactacaaagtgtacaggacatcagtaagactaccacttgtgtggaactgattgttgtggaacaaatgaataaatacaaggctcgtctcaaagatatcagtagcttggaatttgctgagaataaggcaaagaccaggttgtcactgattcgtagatcaatgggaaaggggcgtattcgtcgaggaaactatccaggtccatcgtctcctgttgtagttcggttgccttctgtgtctgatgtctcagaggagaccttgactagtgaggcagccatggagactgacatcacagaacagcagcaagcagctatgcagcaggaggagagagtactgactgagcagattgagaacctacagaaggagaaggaggagctaacatttgagatgcttgtactggaaccccgtgcctctgatgatgaaacccttgagtctgaggcctccattgggactgctgatagctcagagaatttgaatatggagtctgaatatgctatctctgagaaatcagaaagaagcttagcccttagctccctgaagacagctggcaagtctgaaccttccagcaagttgcgaaagcaacttaaaaagcagcaagactctttagatgtcgtggactcttcggtctcctctttatgtctgtctaacacggcatcatctcatgggaccagaaaactatttcagatttattccaaatctccattctaccgagctgcctcaggtaatgaggccctgggaatggaaggaccattgggccagaccaaattcctggaagacaagcctcagttcatcagcagaggaaccttcaacccggaaaagggcaaacaaaaattaaagaatgtgaaaaactcacctcagaaaaccaaagagaccccagaggggacagtcatgtctggccgcagaaaaactgtggacccagactgcacctccaaccaacagctagcactctttggaaataatgaatttatggtctgaaccggcagatgtgtgtccctccgtggctacagagtggtaaacaaatctcacctttggggctgcgtttcatcacctcgtccacaatagtcaatcctaattgtggtcctgcctcttttctaagcatatggctaagactgtatgtgctgaattcctgggcctcctgcagaagcagaaagcctgctggggatggtgccagctgtgccttggctgttgtatttgaattgagatttttactatacaaagccacctagggcctggggatttgggtcagttgtagttgcctctcccccaccctcttttcccttcccaaaggtgggtgttgaactaggggggatattgctgtcctgagggaccctctcatttctgacatttgaagaaaacgtataaatctttcttaaccgtgaaagcaaaagcctttgggtttattttgggatagttaggagctagggtagaatataatttttttccaaaaacttacttacaaacaaaaagcctaatccctctattttaagatttctgaaaaaacactccatgttatattctggggaaagcaaaaacaaaaaaaaaaa

SEQ ID NO: 344527 - DNA, 8554 bp, Homo sapiens
  misc_feature (3893)..(3893): n is a, c, g, or t
gcggccgctcgcccggaccctgaggctgctgggcccaccctcccggaaccgtccgaccctcggtggcctcggcctcttctgccatctccggtcctaccctggggcggagggtggaaggcagcttccgtcgaagaggagggggctgcggtggccaccgcggcggagcccgagttattttaccaagaaaatggtttgcacgactttgaacatatactatccatgctgatgggacaggatccaatatgaatataaatgatggaggaagacgacgctttgaagataatgaacatacattacggatatatcctggggctatttcagaagggacaatctactgtccgattcctgccagaaaaaactccacagctgctgaggtgattgagtctcttataaacaaacttcatcttgacaaaacaaaatgttatgttctagcagaggtaaaggaatttggtggagaagaatggattctcaatccaacagattgtccagttcagcgaatgatgctgtggccccgaatggctctggaaaatcgcttaagtggagaggactaccgcttccttctgagagagaaaaaccttgatggatcaatccattatggtagcctgcagtcatggctacgggtaacagaagaacgtcgcaggatgatggaacggggttttcttccacagcctcaacagaaagactttgatgatttatgtagtttacctgatttgaatgagaaaactctcttagaaaacctacgaaatcgctttaagcatgaaaaaatttatacctatgttggcagtattctaatagttattaacccattcaagtttcttcctatttataaccccaaatatgtcaaaatgtatgataaccaccaactgggaaaacttgagccccacatttatgctgtggctgatgtagcttatcatgccatgcttcagcgcaaaaagaatcagtgcatcgtgatttcaggagagagtggttctgggaagactcaaagcacaaactttcttattcaccaccttactgctctcagtcagaaaggatttgccagtggagtagaacagattattcttggagctggaccagtacttgaggcctttggaaatgcaaagacagctcataataacaattcaagtcgttttgggaagtttattcaagtaaattaccaggaaacaggcactgtacttggtgcctatgttgaaaaatatctactggagaagtccagactcgtttatcaggagcataatgaacggaactatcatgtattctattacctcctggcaggagcaagtgaagatgagagatcagcattccatcttaagcaaccagaggaatatcattatctcaatcagataacaaagaaacccctcagacagagctgggatgattattgctatgactctgagccggattgcttcacggtggaaggagaagatttgagacatgactttgagcgcctacaacttgccatggaaatggtaggatttcttcccaagacacgaagacagattttctctcttctctcagccatactacatttgggtaatatctgttacaaaaagaagacataccgggatgactccattgatatctgtaatcctgaagttctgcctattgtctcagaattattagaggttaaagaagagatgctatttgaagcattagttacaaggaagacggtgacagtgggagaaaagcttattttgccatacaagttggcagaggctgtgacagtgaggaactccatggctaagtctctgtatagtgccctgtttgactggatagtttttcgaattaatcatgcacttctgaatagtaaagatttagagcataataccaagacattgtctattggtgttcttgatatttttgggtttgaagattatgaaaataacagctttgaacagttctgtattaattttgctaatgaacgtttacagcactactttaatcagcatatctttaaattggaacaagaggaatatagaactgaaggtatcagctggcacaacatagattacattgataatacctgctgcataaatcttattagcaaaaaaccaacaggactgcttcatcttttggatgaagaaagcaactttccacaggctacaaatcaaacattgctagacaagtttaagcatcaacatgaagataattcttacatcgaatttccagccgtgatggagcctgctttcattataaaacattatgctggaaaagtaaaatatggggtaaaggatttccgggaaaaaaatacagatcatatgcgcccagacattgtagctcttctgagaagcagcaagaatgcatttatctctgggatgattggaattgatcctgtagctgttttccgatgggcaattctccgagcttttttcagagccatggttgctttcagggaagctgggaaaagaaacattcacagaaaaactggtataacccggaaaaatcccagaacacctctttctgatctccagggcatgaatgctctaaatgaaaaaaaccaacatgatacatttgatattgcctggaatggcagaactgggattcgccagagcagactatcaagtggcacctccttgcttgataaagatggaatatttgctaattcaactagcagcaaactcctggagagagcccatggaattctcacgagaaacaaaaatttcaaatccaagcctgcccttccaaagcacttgctagaagtaaattctttaaagcacctgacaagactgacactacaagatcgcattaccaagtctcttcttcatttacacaagaagaaaaaacctcccagcatcagtgcccagtttcaggcatcattaagcaagctaatggaaacacttggtcaagcagaaccatattttgtaaaatgcattcgctctaatgctgaaaagctgcccttaaggttcagtgatgtcttggtacttagacagcttcgatacaccgggatgctggaaacagttcaaattcgccaatcaggatacagctccaaatattctttccaggattttgtgagccacttccatgtacttcttccccgaaatattattccatccaaatttaacattcaggatttcttcaggaaaataaatcttaatccagataattatcaagttggaaaaaccatggtctttctaaaggagcaggaacgacagcacttacaagatctgcttcaccaagaggtgctccgcagaatcatattgttgcagcgatggttcagggtcttgctgtgtaggcagcatttcctccatctgagacaagcatctgttattatccagagattctggaggaattacctaaatcagaagcaagtcagagatgcagctgtgcagaaggatgcttttgttatggctagtgcagctgctcttctccaagcttcctggcgtgctcacttagagaggcagcggtacttggagttacgggctgcagccatcgttatccagcagaaatggagagattactataggcgcaggcacatggctgctatttgcatacaagcaagatggaaagcctacagggaaagtaaaaggtaccaagaacaaaggaaaaaaattatccttttgcaatcaacatgtagaggattcagagcaagacaaagatttaaagctttaaaagaacaaaggctaagagaaacaaagccagaagttggattggtgaatattaagggatatggatctctggaaattcagggttcagacccttcagaatgggaggattgttcttttgacaacagaataaaagccatagaggaatgtaaatctgtaatagagagtaatcgaattagccgtgaaagttcagtggactgcttgaaggagtcaccaaacaagcagcaggagagagcccaaagccagagtggtgtggacttgcaggaagatgtgcttgtaagagagagacccagntccttggaggatctccatcagaaaaaagtaggccgggctaagagagaaagtaggagaatgagagaactagagcaagctatatttagcttagaattgctgaaagttcgttctcttggtggtatttctccttcagaggatcgcagatggtctacagaattggtgcctgaaggccttcagtctccacggggtacacctgatagtgagagctctcaaggaagcttggaacttctgagctatgaggaaagccaaaagagcaaactagagtctgtcatttcagatgaaggagacttgcagtttccatcacctaagatatccagcagtccaaaatttgattcacgggacaatgccctcagtgcctcaaatgagactagcagtgcagagcatttgaaggatggaactatgaaggaaatggtggtctgcagttctgagtctattacctgtaaaccacagctgaaagactccttcatttcaaatagtctacctacttttttttatatcccccaacaagacccactgaaaacaaattcccaactagacacaagtatccaaagaaacaaactattggaaaatgaagacacagcgggggaagctcttactttggatatcaacagggaaactagaaggtatcactgctcaggaaaagatcagattgttccttctttgaatacagagtcttctaatcctgtgcttaagaagttagaaaagctaaacactgagaaggaagaaaggcaaaaacagttgcagcaacagaatgaaaaagagatgatggaacagattcgccagcaaacagatattttagagaaggagcgcaaagccttcaagacaattgaaaagccaagaattggagagtgtttggtggcaccatcttcctatcagtcaaagcaaagagtagagaggccatcctctctcctcagcttaaatacctcaaataagggagaacttaatgtactggggtccctatcattaaaagatgcagctcttgcccaaaaagacagttcctctgctcacttacccccaaaggaccgacctgtcaccgtgttctttgaaagaaaaggaagtccatgccaatctagtactgtcaaggaattatccaagacagacagaatgggcacccagctgaatgtagcctgtaaactctcaaataatcgcatttcaaaaagagaacactttaggccaactcagtcttacagccacaattctgatgacctttccagagagggaaatgctaggcccattttcttcactccaaaggacaatatgagtattccccttgtcagcaaagaagccttaaacagtaaaaatcctcaactccataaagaagatgaaccagcatggaaacctgtgaagttagctgggccaggccaaagagagcaggttgccagaccggcccataaaaagaaagctcgaatggcgcggacgcgctccgatttcttgactagaggtacttttgccgatggggagggggatacagaggaagatgattacgatgacattattgagccccttctctcccttgaccaagcttctcactgtgagctagggcctgcacccagcctgggtcaggcctctcacagtgactccgaaatgacatcacagcgattttcgtcagttgatgaacaagcaaaacttcataagactatgtctcaaggagagattaccaagttggcagtgagacagaaggcttcagattcagatataagacctcagagagctaagatgagattctgggccaaagggaaacaaggggagaagaagactaccagagtgaaacctactacccagtcagaggtttcgccactctttgcaggcacagatgtgattccagctcatcagtttccagatgaattagctgcatatcacccaacacctcctttgagcccagaactgcccggcagttgccggaaggaattcaaagagaacaaagaaccttctccaaaggctaagcgcaagcgaagtgtgaagattagcaacgtggctttggattctatgcattggcaaaatgactctgtccagatcatagcaagtgtcagtgatttaaaaagcatggatgaatttcttctgaaaaaggtgaatgacctagataatgaagacagcaagaaggatacactagtggatgttgtatttaaaaaagccctgaaggaatttcggcagaatatcttcagcttttattcatctgcattggcgatggatgatgggaaaagcatacggtataaagacctctatgcactatttgaacagattctggaaaagacgatgaggcttgagcagcgtgattcactgggtgaatctccagtgagagtttgggtcaacacttttaaagtgtttttagatgaatatatgaatgaattcaagacttcagattgcacagccacaaaggtgccaaaaacagaaagaaagaaaagaaggaaaaaggaaactgatttggtggaagaacacaatggtcacatctttaaagccacccaatatagcatccctacatactgtgaatactgttcttctttgatatggataatggaccgagcctctgtttgcaaattatgcaagtatgcttgccataagaagtgctgtctgaaaaccacagccaagtgctctaaaaagtatgatccagagctgtcatctcgacaatttggggttgaactgtcccgtttgaccagtgaagaccgaactgttcctttagtagtggaaaagctcataaactacattgaaatgcatggactgtatacagaaggtatttatcgaaagtctggttcgactaataaaatcaaggagcttcggcagggtctagatacagatgctgagagtgtaaatctagatgactataacatacacgtcattgcaagtgtattcaaacaatggcttcgagatttgcccaatcctctcatgacctttgaactctatgaggaatttcttcgagctatgggccttcaggagaggaaggagacaatccgtggtgtatactctgtgattgatcaactctcccgaactcatctcaatacactggaacgcctcatctttcatctagtcaggattgctctgcaggaagacactaatcgaatgtctgctaatgctttggccattgtgtttgcgccctgcattctccgctgccctgacaccactgacccactacaaagtgtacaggacatcagtaagactaccacttgtgtggaactgattgttgtggaacaaatgaataaatacaaggctcgtctcaaagatatcagtagcttggaatttgctgagaataaggcaaagaccaggttgtcactgattcgtagatcaatgggaaaggggcgtattcgtcgaggaaactatccaggtccatcgtctcctgttgtagttcggttgccttctgtgtctgatgtctcagaggagaccttgactagtgaggcagccatggagactgacatcacagaacagcagcaagcagctatgcagcaggaggagagagtactgactgagcagattgagaacctacagaaggagaaggaggagctaacatttgagatgcttgtactggaaccccgtgcctctgatgatgaaacccttgagtctgaggcctccattgggactgctgatagctcagagaatttgaatatggagtctgaatatgctatctctgagaaatcagaaagaagcttagcccttagctccctgaagacagctggcaagtctgaaccttccagcaagttgcgaaagcaacttaaaaagcagcaagactctttagatgtcgtggactcttcggtctcctctttatgtctgtctaacacggcatcatctcatgggaccagaaaactatttcagatttattccaaatctccattctaccgagctgcctcaggtaatgaggccctgggaatggaaggaccattgggccagaccaaattcctggaagacaagcctcagttcatcagcagaggaaccttcaacccggaaaagggcaaacaaaaattaaagaatgtgaaaaactcacctcagaaaaccaaagagaccccagaggggacagtcatgtctggccgcagaaaaactgtggacccagactgcacctccaaccaacagctagcactctttggaaataatgaatttatggtctgaaccggcagatgtgtgtccctccgtggctacagagtggtaaacaaatctcacctttggggctgcgtttcatcacctcgtccacaatagtcaatcctaattgtggtcctgcctcttttctaagcatatggctaagactgtatgtgctgaattcctgggcctcctgcagaagcagaaagcctgctggggatggtgccagctgtgccttggctgttgtatttgaattgagatttttactatacaaagccacctagggcctggggatttgggtcagttgtagttgcctctcccccaccctcttttcccttcccaaaggtgggtgttgaactaggggggatattgctgtcctgagggaccctctcatttctgacatttgaagaaaacgtataaatctttcttaaccgtgaaagcaaaagcctttgggtttattttgggatagttaggagctagggtagaatataatttttttccaaaaacttacttacaaacaaaaagcctaatccctctattttaagatttctgaaaaaacactccatgttatattctggggaaagcaaaaacaaaaaaaaaaa

SEQ ID NO: 344528 - DNA, 8719 bp, Homo sapiens
  misc_feature (4058)..(4058): n is a, c, g, or t
gcggccgctcgcccggaccctgaggctgctgggcccaccctcccggaaccgtccgaccctcggtggcctcggcctcttctgccatctccggtcctaccctggggcggagggtggaaggcagcttccgtcgaagaggagggggctgcggtggccaccgcggcggagcccgaggcagaaggagtctctccctgtggctaccacctccccaggcctgtgttattttaccaagaaaatggtttgcacgactttgaacatatactatccatgctgatgggacaggatccaatatgaatataaatgatggaggaagacgacgctttgaagataatgaacatacattacggatatatcctggggctatttcagaagggacaatctactgtccgattcctgccagaaaaaactccacagctgctgaggtgattgagtctcttataaacaaacttcatcttgacaaaacaaaatgttatgttctagcagaggtaaaggaatttggtggagaagaatggattctcaatccaacagattgtccagttcagcgaatgatgctgtggccccgaatggctctggaaaatcgcttaagtggagaggactaccgcttccttctgagagagaaaaaccttgatggatcaatccattatggtagcctgcagtcatggctacgggtaacagaagaacgtcgcaggatgatggaacggggttttcttccacagcctcaacagaaagactttgatgatttatgtagtttacctgatttgaatgagaaaactctcttagaaaacctacgaaatcgctttaagcatgaaaaaatttatacctatgttggcagtattctaatagttattaacccattcaagtttcttcctatttataaccccaaatatgtcaaaatgtatgataaccaccaactgggaaaacttgagccccacatttatgctgtggctgatgtagcttatcatgccatgcttcagcgcaaaaagaatcagtgcatcgtgatttcaggagagagtggttctgggaagactcaaagcacaaactttcttattcaccaccttactgctctcagtcagaaaggatttgccagtggagtagaacagattattcttggagctggaccagtacttgaggcctttggaaatgcaaagacagctcataataacaattcaagtcgttttgggaagtttattcaagtaaattaccaggaaacaggcactgtacttggtgcctatgttgaaaaatatctactggagaagtccagactcgtttatcaggagcataatgaacggaactatcatgtattctattacctcctggcaggagcaagtgaagatgagagatcagcattccatcttaagcaaccagaggaatatcattatctcaatcagataacaaagaaacccctcagacagagctgggatgattattgctatgactctgagccggattgcttcacggtggaaggagaagatttgagacatgactttgagcgcctacaacttgccatggaaatggtaggatttcttcccaagacacgaagacagattttctctcttctctcagccatactacatttgggtaatatctgttacaaaaagaagacataccgggatgactccattgatatctgtaatcctgaagttctgcctattgtctcagaattattagaggttaaagaagagatgctatttgaagcattagttacaaggaagacggtgacagtgggagaaaagcttattttgccatacaagttggcagaggctgtgacagtgaggaactccatggctaagtctctgtatagtgccctgtttgactggatagtttttcgaattaatcatgcacttctgaatagtaaagatttagagcataataccaagacattgtctattggtgttcttgatatttttgggtttgaagattatgaaaataacagctttgaacagttctgtattaattttgctaatgaacgtttacagcactactttaatcagcatatctttaaattggaacaagaggaatatagaactgaaggtatcagctggcacaacatagattacattgataatacctgctgcataaatcttattagcaaaaaaccaacaggactgcttcatcttttggatgaagaaagcaactttccacaggctacaaatcaaacattgctagacaagtttaagcatcaacatgaagataattcttacatcgaatttccagccgtgatggagcctgctttcattataaaacattatgctggaaaagtaaaatatggggtaaaggatttccgggaaaaaaatacagatcatatgcgcccagacattgtagctcttctgagaagcagcaagaatgcatttatctctgggatgattggaattgatcctgtagctgttttccgatgggcaattctccgagcttttttcagagccatggttgctttcagggaagctgggaaaagaaacattcacagaaaaactggacatgatgatacagcgccatgtgcaattttgaaaagtatggatagttttagctttctccaacacccagtccaccagaggagcttagagattctgcagagatgcaaggaagagaagtacagtataacccggaaaaatcccagaacacctctttctgatctccagggcatgaatgctctaaatgaaaaaaaccaacatgatacatttgatattgcctggaatggcagaactgggattcgccagagcagactatcaagtggcacctccttgcttgataaagatggaatatttgctaattcaactagcagcaaactcctggagagagcccatggaattctcacgagaaacaaaaatttcaaatccaagcctgcccttccaaagcacttgctagaagtaaattctttaaagcacctgacaagactgacactacaagatcgcattaccaagtctcttcttcatttacacaagaagaaaaaacctcccagcatcagtgcccagtttcaggcatcattaagcaagctaatggaaacacttggtcaagcagaaccatattttgtaaaatgcattcgctctaatgctgaaaagctgcccttaaggttcagtgatgtcttggtacttagacagcttcgatacaccgggatgctggaaacagttcaaattcgccaatcaggatacagctccaaatattctttccaggattttgtgagccacttccatgtacttcttccccgaaatattattccatccaaatttaacattcaggatttcttcaggaaaataaatcttaatccagataattatcaagttggaaaaaccatggtctttctaaaggagcaggaacgacagcacttacaagatctgcttcaccaagaggtgctccgcagaatcatattgttgcagcgatggttcagggtcttgctgtgtaggcagcatttcctccatctgagacaagcatctgttattatccagagattctggaggaattacctaaatcagaagcaagtcagagatgcagctgtgcagaaggatgcttttgttatggctagtgcagctgctcttctccaagcttcctggcgtgctcacttagagaggcagcggtacttggagttacgggctgcagccatcgttatccagcagaaatggagagattactataggcgcaggcacatggctgctatttgcatacaagcaagatggaaagcctacagggaaagtaaaaggtaccaagaacaaaggaaaaaaattatccttttgcaatcaacatgtagaggattcagagcaagacaaagatttaaagctttaaaagaacaaaggctaagagaaacaaagccagaagttggattggtgaatattaagggatatggatctctggaaattcagggttcagacccttcagaatgggaggattgttcttttgacaacagaataaaagccatagaggaatgtaaatctgtaatagagagtaatcgaattagccgtgaaagttcagtggactgcttgaaggagtcaccaaacaagcagcaggagagagcccaaagccagagtggtgtggacttgcaggaagatgtgcttgtaagagagagacccagntccttggaggatctccatcagaaaaaagtaggccgggctaagagagaaagtaggagaatgagagaactagagcaagctatatttagcttagaattgctgaaagttcgttctcttggtggtatttctccttcagaggatcgcagatggtctacagaattggtgcctgaaggccttcagtctccacggggtacacctgatagtgagagctctcaaggaagcttggaacttctgagctatgaggaaagccaaaagagcaaactagagtctgtcatttcagatgaaggagacttgcagtttccatcacctaagatatccagcagtccaaaatttgattcacgggacaatgccctcagtgcctcaaatgagactagcagtgcagagcatttgaaggatggaactatgaaggaaatggtggtctgcagttctgagtctattacctgtaaaccacagctgaaagactccttcatttcaaatagtctacctacttttttttatatcccccaacaagacccactgaaaacaaattcccaactagacacaagtatccaaagaaacaaactattggaaaatgaagacacagcgggggaagctcttactttggatatcaacagggaaactagaaggtatcactgctcaggaaaagatcagattgttccttctttgaatacagagtcttctaatcctgtgcttaagaagttagaaaagctaaacactgagaaggaagaaaggcaaaaacagttgcagcaacagaatgaaaaagagatgatggaacagattcgccagcaaacagatattttagagaaggagcgcaaagccttcaagacaattgaaaagccaagaattggagagtgtttggtggcaccatcttcctatcagtcaaagcaaagagtagagaggccatcctctctcctcagcttaaatacctcaaataagggagaacttaatgtactggggtccctatcattaaaagatgcagctcttgcccaaaaagacagttcctctgctcacttacccccaaaggaccgacctgtcaccgtgttctttgaaagaaaaggaagtccatgccaatctagtactgtcaaggaattatccaagacagacagaatgggcacccagctgaatgtagcctgtaaactctcaaataatcgcatttcaaaaagagaacactttaggccaactcagtcttacagccacaattctgatgacctttccagagagggaaatgctaggcccattttcttcactccaaaggacaatatgagtattccccttgtcagcaaagaagccttaaacagtaaaaatcctcaactccataaagaagatgaaccagcatggaaacctgtgaagttagctgggccaggccaaagagagcaggttgccagaccggcccataaaaagaaagctcgaatggcgcggacgcgctccgatttcttgactagaggtacttttgccgatggggagggggatacagaggaagatgattacgatgacattattgagccccttctctcccttgaccaagcttctcactgtgagctagggcctgcacccagcctgggtcaggcctctcacagtgactccgaaatgacatcacagcgattttcgtcagttgatgaacaagcaaaacttcataagactatgtctcaaggagagattaccaagttggcagtgagacagaaggcttcagattcagatataagacctcagagagctaagatgagattctgggccaaagggaaacaaggggagaagaagactaccagagtgaaacctactacccagtcagaggtttcgccactctttgcaggcacagatgtgattccagctcatcagtttccagatgaattagctgcatatcacccaacacctcctttgagcccagaactgcccggcagttgccggaaggaattcaaagagaacaaagaaccttctccaaaggctaagcgcaagcgaagtgtgaagattagcaacgtggctttggattctatgcattggcaaaatgactctgtccagatcatagcaagtgtcagtgatttaaaaagcatggatgaatttcttctgaaaaaggtgaatgacctagataatgaagacagcaagaaggatacactagtggatgttgtatttaaaaaagccctgaaggaatttcggcagaatatcttcagcttttattcatctgcattggcgatggatgatgggaaaagcatacggtataaagacctctatgcactatttgaacagattctggaaaagacgatgaggcttgagcagcgtgattcactgggtgaatctccagtgagagtttgggtcaacacttttaaagtgtttttagatgaatatatgaatgaattcaagacttcagattgcacagccacaaaggtgccaaaaacagaaagaaagaaaagaaggaaaaaggaaactgatttggtggaagaacacaatggtcacatctttaaagccacccaatatagcatccctacatactgtgaatactgttcttctttgatatggataatggaccgagcctctgtttgcaaattatgcaagtatgcttgccataagaagtgctgtctgaaaaccacagccaagtgctctaaaaagtatgatccagagctgtcatctcgacaatttggggttgaactgtcccgtttgaccagtgaagaccgaactgttcctttagtagtggaaaagctcataaactacattgaaatgcatggactgtatacagaaggtatttatcgaaagtctggttcgactaataaaatcaaggagcttcggcagggtctagatacagatgctgagagtgtaaatctagatgactataacatacacgtcattgcaagtgtattcaaacaatggcttcgagatttgcccaatcctctcatgacctttgaactctatgaggaatttcttcgagctatgggccttcaggagaggaaggagacaatccgtggtgtatactctgtgattgatcaactctcccgaactcatctcaatacactggaacgcctcatctttcatctagtcaggattgctctgcaggaagacactaatcgaatgtctgctaatgctttggccattgtgtttgcgccctgcattctccgctgccctgacaccactgacccactacaaagtgtacaggacatcagtaagactaccacttgtgtggaactgattgttgtggaacaaatgaataaatacaaggctcgtctcaaagatatcagtagcttggaatttgctgagaataaggcaaagaccaggttgtcactgattcgtagatcaatgggaaaggggcgtattcgtcgaggaaactatccaggtccatcgtctcctgttgtagttcggttgccttctgtgtctgatgtctcagaggagaccttgactagtgaggcagccatggagactgacatcacagaacagcagcaagcagctatgcagcaggaggagagagtactgactgagcagattgagaacctacagaaggagaaggaggagctaacatttgagatgcttgtactggaaccccgtgcctctgatgatgaaacccttgagtctgaggcctccattgggactgctgatagctcagagaatttgaatatggagtctgaatatgctatctctgagaaatcagaaagaagcttagcccttagctccctgaagacagctggcaagtctgaaccttccagcaagttgcgaaagcaacttaaaaagcagcaagactctttagatgtcgtggactcttcggtctcctctttatgtctgtctaacacggcatcatctcatgggaccagaaaactatttcagatttattccaaatctccattctaccgagctgcctcaggtaatgaggccctgggaatggaaggaccattgggccagaccaaattcctggaagacaagcctcagttcatcagcagaggaaccttcaacccggaaaagggcaaacaaaaattaaagaatgtgaaaaactcacctcagaaaaccaaagagaccccagaggggacagtcatgtctggccgcagaaaaactgtggacccagactgcacctccaaccaacagctagcactctttggaaataatgaatttatggtctgaaccggcagatgtgtgtccctccgtggctacagagtggtaaacaaatctcacctttggggctgcgtttcatcacctcgtccacaatagtcaatcctaattgtggtcctgcctcttttctaagcatatggctaagactgtatgtgctgaattcctgggcctcctgcagaagcagaaagcctgctggggatggtgccagctgtgccttggctgttgtatttgaattgagatttttactatacaaagccacctagggcctggggatttgggtcagttgtagttgcctctcccccaccctcttttcccttcccaaaggtgggtgttgaactaggggggatattgctgtcctgagggaccctctcatttctgacatttgaagaaaacgtataaatctttcttaaccgtgaaagcaaaagcctttgggtttattttgggatagttaggagctagggtagaatataatttttttccaaaaacttacttacaaacaaaaagcctaatccctctattttaagatttctgaaaaaacactccatgttatattctggggaaagcaaaaacaaaaaaaaaaa

SEQ ID NO: 344529 - DNA, 8500 bp, Homo sapiens
  misc_feature (4013)..(4013): n is a, c, g, or t
gcggccgctcgcccggaccctgaggctgctgggcccaccctcccggaaccgtccgaccctcggtggcctcggcctcttctgccatctccggtcctaccctggggcggagggtggaaggcagcttccgtcgaagaggagggggctgcggtggccaccgcggcggagcccgagttattttaccaagaaaatggtttgcacgactttgaacatatactatccatgctgatgggacaggatccaatatgaatataaatgatggaggaagacgacgctttgaagataatgaacatacattacggatatatcctggggctatttcagaagggacaatctactgtccgattcctgccagaaaaaactccacagctgctgaggtgattgagtctcttataaacaaacttcatcttgacaaaacaaaatgttatgttctagcagaggtaaaggaatttggtggagaagaatggattctcaatccaacagattgtccagttcagcgaatgatgctgtggccccgaatggctctggaaaatcgcttaagtggagaggactaccgcttccttctgagagagaaaaaccttgatggatcaatccattatggtagcctgcagtcatggctacgggtaacagaagaacgtcgcaggatgatggaacggggttttcttccacagcctcaacagaaagactttgatgatttatgtagtttacctgatttgaatgagaaaactctcttagaaaacctacgaaatcgctttaagcatgaaaaaatttatacctatgttggcagtattctaatagttattaacccattcaagtttcttcctatttataaccccaaatatgtcaaaatgtatgataaccaccaactgggaaaacttgagccccacatttatgctgtggctgatgtagcttatcatgccatgcttcagcgcaaaaagaatcagtgcatcgtgatttcaggagagagtggttctgggaagactcaaagcacaaactttcttattcaccaccttactgctctcagtcagaaaggatttgccagtggagtagaacagattattcttggagctggaccagtacttgaggcctttggaaatgcaaagacagctcataataacaattcaagtcgttttgggaagtttattcaagtaaattaccaggaaacaggcactgtacttggtgcctatgttgaaaaatatctactggagaagtccagactcgtttatcaggagcataatgaacggaactatcatgtattctattacctcctggcaggagcaagtgaagatgagagatcagcattccatcttaagcaaccagaggaatatcattatctcaatcagataacaaagaaacccctcagacagagctgggatgattattgctatgactctgagccggattgcttcacggtggaaggagaagatttgagacatgactttgagcgcctacaacttgccatggaaatggtaggatttcttcccaagacacgaagacagattttctctcttctctcagccatactacatttgggtaatatctgttacaaaaagaagacataccgggatgactccattgatatctgtaatcctgaagttctgcctattgtctcagaattattagaggttaaagaagagatgctatttgaagcattagttacaaggaagacggtgacagtgggagaaaagcttattttgccatacaagttggcagaggctgtgacagtgaggaactccatggctaagtctctgtatagtgccctgtttgactggatagtttttcgaattaatcatgcacttctgaatagtaaagatttagagcataataccaagacattgtctattggtgttcttgatatttttgggtttgaagattatgaaaataacagctttgaacagttctgtattaattttgctaatgaacgtttacagcactactttaatcagcatatctttaaattggaacaagaggaatatagaactgaaggtatcagctggcacaacatagattacattgataatacctgctgcataaatcttattagcaaaaaaccaacaggactgcttcatcttttggatgaagaaagcaactttccacaggctacaaatcaaacattgctagacaagtttaagcatcaacatgaagataattcttacatcgaatttccagccgtgatggagcctgctttcattataaaacattatgctggaaaagtaaaatatggggtaaaggatttccgggaaaaaaatacagatcatatgcgcccagacattgtagctcttctgagaagcagcaagaatgcatttatctctgggatgattggaattgatcctgtagctgttttccgatgggcaattctccgagcttttttcagagccatggttgctttcagggaagctgggaaaagaaacattcacagaaaaactggacatgatgatacagcgccatgtgcaattttgaaaagtatggatagttttagctttctccaacacccagtccaccagaggagcttagagattctgcagagatgcaaggaagagaagtacagtataacccggaaaaatcccagaacacctctttctgatctccagggcatgaatgctctaaatgaaaaaaaccaacatgatacatttgatattgcctggaatggcagaactgggattcgccagagcagactatcaagtggcacctccttgcttgataaagatggaatatttgctaattcaactagcagcaaactcctggagagagcccatggaattctcacgagaaacaaaaatttcaaatccaagcctgcccttccaaagcacttgctagaagtaaattctttaaagcacctgacaagactgacactacaagatcgcattaccaagtctcttcttcatttacacaagaagaaaaaacctcccagcatcagtgcccagtttcaggcatcattaagcaagctaatggaaacacttggtcaagcagaaccatattttgtaaaatgcattcgctctaatgctgaaaagctgcccttaaggttcagtgatgtcttggtacttagacagcttcgatacaccgggatgctggaaacagttcaaattcgccaatcaggatacagctccaaatattctttccaggattttgtgagccacttccatgtacttcttccccgaaatattattccatccaaatttaacattcaggatttcttcaggaaaataaatcttaatccagataattatcaagttggaaaaaccatggtctttctaaaggagcaggaacgacagcacttacaagatctgcttcaccaagaggtgctccgcagaatcatattgttgcagcgatggttcagggtcttgctgtgtaggcagcatttcctccatctgagacaagcatctgttattatccagagattctggaggaattacctaaatcagaagcaagtcagagatgcagctgtgcagaaggatgcttttgttatggctagtgcagctgctcttctccaagcttcctggcgtgctcacttagagaggcagcggtacttggagttacgggctgcagccatcgttatccagcagaaatggagagattactataggcgcaggcacatggctgctatttgcatacaagcaagatggaaagcctacagggaaagtaaaaggtaccaagaacaaaggaaaaaaattatccttttgcaatcaacatgtagaggattcagagcaagacaaagatttaaagctttaaaagaacaaaggctaagagaaacaaagccagaagttggattggtgaatattaagggatatggatctctggaaattcagggttcagacccttcagaatgggaggattgttcttttgacaacagaataaaagccatagaggaatgtaaatctgtaatagagagtaatcgaattagccgtgaaagttcagtggactgcttgaaggagtcaccaaacaagcagcaggagagagcccaaagccagagtggtgtggacttgcaggaagatgtgcttgtaagagagagacccagntccttggaggatctccatcagaaaaaagtaggccgggctaagagagaaagtaggagaatgagagaactagagcaagctatatttagcttagaattgctgaaagttcgttctcttggtggtatttctccttcagaggatcgcagatggtctacagaattggtgcctgaaggccttcagtctccacggggtacacctgatagtgagagctctcaaggaagcttggaacttctgagctatgaggaaagccaaaagagcaaactagagtctgtcatttcagatgaaggagacttgcagtttccatcacctaagatatccagcagtccaaaatttgattcacgggacaatgccctcagtgcctcaaatgagactagcagtgcagagcatttgaaggatggaactatgaaggaaatggtggtctgcagttctgagtctattacctgtaaaccacagctgaaagactccttcatttcaaatagtctacctacttttttttatatcccccaacaagacccactgaaaacaaattcccaactagacacaagtatccaaagaaacaaactattggaaaatgaagacacagcgggggaagctcttactttggatatcaacagggaaactagaaggtatcactgctcaggaaaagatcagattgttccttctttgaatacagagtcttctaatcctgtgcttaagaagttagaaaagctaaacactgagaaggaagaaaggcaaaaacagttgcagcaacagaatgaaaaagagatgatggaacagattcgccagcaaacagatattttagagaaggagcgcaaagccttcaagacaattgaaaagccaagaattggagagtgtttggtggcaccatcttcctatcagtcaaagcaaagagtagagaggccatcctctctcctcagcttaaatacctcaaataagggagaacttaatgtactggggtccctatcattaaaagatgcagctcttgcccaaaaagacagttcctctgctcacttacccccaaaggaccgacctgtcaccgtgttctttgaaagaaaaggaagtccatgccaatctagtactgtcaaggaattatccaagacagacagaatgggcacccagctgaatgtagcctgtaaactctcaaataatcgcatttcaaaaagagaacactttaggccaactcagtcttacagccacaattctgatgacctttccagagagggaaatgctaggcccattttcttcactccaaaggacaatatgagtattccccttgtcagcaaagaagccttaaacagtaaaaatcctcaactccataaagaagatgaaccagcatggaaacctgtgaagttagctgggccaggccaaagagagcaggttgccagaccggcccataaaaagaaagctcgaatggcgcggacgcgctccgatttcttgactagaggtacttttgccgatggggagggggatacagaggaagatgattacgatgacattattgagccccttctctcccttgaccaagcttctcactgtgagctagggcctgcacccagcctgggtcaggcctctcacagtgactccgaaatgacatcacagcgattttcgtcagttgatgaacaagcaaaacttcataagactatgtctcaaggagagattaccaagttggcagtgagacagaaggcttcagattcagatataagacctcagagagctaagatgagattctgggccaaagggaaacaaggggagaagaagactaccagagtgaaacctactacccagtcagaggtttcgccactctttgcaggcacagatgtgattccagctcatcagtttccagatgaattagctgcatatcacccaacacctcctttgagcccagaactgcccggcagttgccggaaggaattcaaagagaacaaagaaccttctccaaaggctaagcgcaagcgaagtgtgaagattagcaacgtggctttggattctatgcattggcaaaatgactctgtccagatcatagcaagtgtcagtgatttaaaaagcatggatgaatttcttctgaaaaaggtgaatgacctagataatgaagacagcaagaaggatacactagtggatgttgtatttaaaaaagccctgaaggaatttcggcagaatatcttcagcttttattcatctgcattggcgatggatgatgggaaaagcatacggtataaagacctctatgcactatttgaacagattctggaaaagacgatgaggcttgagcagcgtgattcactgggtgaatctccagtgagagtttgggtcaacacttttaaagtgtttttagatgaatatatgaatgaattcaagacttcagattgcacagccacaaaggtgccaaaaacagaaagaaagaaaagaaggaaaaaggaaactgatttgtatgatccagagctgtcatctcgacaatttggggttgaactgtcccgtttgaccagtgaagaccgaactgttcctttagtagtggaaaagctcataaactacattgaaatgcatggactgtatacagaaggtatttatcgaaagtctggttcgactaataaaatcaaggagcttcggcagggtctagatacagatgctgagagtgtaaatctagatgactataacatacacgtcattgcaagtgtattcaaacaatggcttcgagatttgcccaatcctctcatgacctttgaactctatgaggaatttcttcgagctatgggccttcaggagaggaaggagacaatccgtggtgtatactctgtgattgatcaactctcccgaactcatctcaatacactggaacgcctcatctttcatctagtcaggattgctctgcaggaagacactaatcgaatgtctgctaatgctttggccattgtgtttgcgccctgcattctccgctgccctgacaccactgacccactacaaagtgtacaggacatcagtaagactaccacttgtgtggaactgattgttgtggaacaaatgaataaatacaaggctcgtctcaaagatatcagtagcttggaatttgctgagaataaggcaaagaccaggttgtcactgattcgtagatcaatgggaaaggggcgtattcgtcgaggaaactatccaggtccatcgtctcctgttgtagttcggttgccttctgtgtctgatgtctcagaggagaccttgactagtgaggcagccatggagactgacatcacagaacagcagcaagcagctatgcagcaggaggagagagtactgactgagcagattgagaacctacagaaggagaaggaggagctaacatttgagatgcttgtactggaaccccgtgcctctgatgatgaaacccttgagtctgaggcctccattgggactgctgatagctcagagaatttgaatatggagtctgaatatgctatctctgagaaatcagaaagaagcttagcccttagctccctgaagacagctggcaagtctgaaccttccagcaagttgcgaaagcaacttaaaaagcagcaagactctttagatgtcgtggactcttcggtctcctctttatgtctgtctaacacggcatcatctcatgggaccagaaaactatttcagatttattccaaatctccattctaccgagctgcctcaggtaatgaggccctgggaatggaaggaccattgggccagaccaaattcctggaagacaagcctcagttcatcagcagaggaaccttcaacccggaaaagggcaaacaaaaattaaagaatgtgaaaaactcacctcagaaaaccaaagagaccccagaggggacagtcatgtctggccgcagaaaaactgtggacccagactgcacctccaaccaacagctagcactctttggaaataatgaatttatggtctgaaccggcagatgtgtgtccctccgtggctacagagtggtaaacaaatctcacctttggggctgcgtttcatcacctcgtccacaatagtcaatcctaattgtggtcctgcctcttttctaagcatatggctaagactgtatgtgctgaattcctgggcctcctgcagaagcagaaagcctgctggggatggtgccagctgtgccttggctgttgtatttgaattgagatttttactatacaaagccacctagggcctggggatttgggtcagttgtagttgcctctcccccaccctcttttcccttcccaaaggtgggtgttgaactaggggggatattgctgtcctgagggaccctctcatttctgacatttgaagaaaacgtataaatctttcttaaccgtgaaagcaaaagcctttgggtttattttgggatagttaggagctagggtagaatataatttttttccaaaaacttacttacaaacaaaaagcctaatccctctattttaagatttctgaaaaaacactccatgttatattctggggaaagcaaaaacaaaaaaaaaaa

SEQ ID NO: 344530 - DNA, 1668 bp, Homo sapiens
tttggaatggatgcagcttatattaaaagaagaaactcatctcagtacacaatgggttcttacactcccacctaccaaagtatccgttttccagtactcctgcaagaaatattttaacttaaatgtgttgtatgaatatgtctcactaaatatcctaggcctcgcaggtgtttccatttattcttatcattcacctggtgtgatggaaatacacttgttatcctaaaagagcaatgtaaaactgatgcagtcactcaatttactttctaacatgaatttttctctgcagggaaaggggcgtattcgtcgaggaaactatccaggtccatcgtctcctgttgtagttcggttgccttctgtgtctgatgtctcagaggagaccttgactagtgaggcagccatggagactgacatcacagaacagcagcaagcagctatgcagcaggaggagagagtactgactgagcagattgagaacctacagaaggagaaggaggagctaacatttgagatgcttgtactggaaccccgtgcctctgatgatgaaacccttgagtctgaggcctccattgggactgctgatagctcagagaatttgaatatggagtctgaatatgctatctctgagaaatcagaaagaagcttagcccttagctccctgaagacagctggcaagtctgaaccttccagcaagttgcgaaagcaacttaaaaagcagcaagactctttagatgtcgtggactcttcggtctcctctttatgtctgtctaacacggcatcatctcatgggaccagaaaactatttcagatttattccaaatctccattctaccgagctgcctcaggtaatgaggccctgggaatggaaggaccattgggccagaccaaattcctggaagacaagcctcagttcatcagcagaggaaccttcaacccggaaaagggcaaacaaaaattaaagaatgtgaaaaactcacctcagaaaaccaaagagaccccagaggggacagtcatgtctggccgcagaaaaactgtggacccagactgcacctccaaccaacagctagcactctttggaaataatgaatttatggtctgaaccggcagatgtgtgtccctccgtggctacagagtggtaaacaaatctcacctttggggctgcgtttcatcacctcgtccacaatagtcaatcctaattgtggtcctgcctcttttctaagcatatggctaagactgtatgtgctgaattcctgggcctcctgcagaagcagaaagcctgctggggatggtgccagctgtgccttggctgttgtatttgaattgagatttttactatacaaagccacctagggcctggggatttgggtcagttgtagttgcctctcccccaccctcttttcccttcccaaaggtgggtgttgaactaggggggatattgctgtcctgagggaccctctcatttctgacatttgaagaaaacgtataaatctttcttaaccgtgaaagcaaaagcctttgggtttattttgggatagttaggagctagggtagaatataatttttttccaaaaacttacttacaaacaaaaagcctaatccctctattttaagatttctgaaaaaacactccatgttatattctggggaaagcaaaaacaaaaaaaaaaa

SEQ ID NO: 344531 - DNA, 2676 bp, Homo sapiens
gcggccgctcgcccggaccctgaggctgctgggcccaccctcccggaaccgtccgaccctcggtggcctcggcctcttctgccatctccggtcctaccctggggcggagggtggaaggcagcttccgtcgaagaggagggggctgcggtggccaccgcggcggagcccgagttattttaccaagaaaatggtttgcacgactttgaacatatactatccatgctgatgggacaggatccaatatgaatataaatgatggaggaagacgacgctttgaagataatgaacatacattacggatatatcctggggctatttcagaagggacaatctactgtccgattcctgccagaaaaaactccacagctgctgaggtgattgagtctcttataaacaaacttcatcttgacaaaacaaaatgttatgttctagcagaggtaaaggaatttggtggagaagaatggattctcaatccaacagattgtccagttcagcgaatgatgctgtggccccgaatggctctggaaaatcgcttaagtggagaggactaccgcttccttctgagagagaaaaaccttgatggatcaatccattatggtagcctgcagtcatggctacgggtaacagaagaacgtcgcaggatgatggaacggggttttcttccacagcctcaacagaaagactttgatgatttatgtagtttacctgatttgaatgagaaaactctcttagaaaacctacgaaatcgctttaagcatgaaaaaatttatacctatgttggcagtattctaatagttattaacccattcaagtttcttcctatttataaccccaaatatgtcaaaatgtatgataaccaccaactgggaaaacttgagccccacatttatgctgtggctgatgtagcttatcatgccatgcttcagcgcaaaaagaatcagtgcatcgtgatttcaggagagagtggttctgggaagactcaaagcacaaactttcttattcaccaccttactgctctcagtcagaaaggatttgccagtggagtagaacagattattcttggagctggaccagtacttgaggcctttggaaatgcaaagacagctcataataacaattcaagtcgttttgggaagtttattcaagtaaattaccaggaaacaggcactgtacttggtgcctatgttgaaaaatatctactggagaagtccagactcgtttatcaggagcataatgaacggaactatcatgtattctattacctcctggcaggagcaagtgaagatgagagatcagcattccatcttaagcaaccagaggaatatcattatctcaatcagataacaaagaaacccctcagacagagctgggatgattattgctatgactctgagccggattgcttcacggtggaaggagaagatttgagacatgactttgagcgcctacaacttgccatggaaatggtaggatttcttcccaagacacgaagacagattttctctcttctctcagccatactacatttgggtaatatctgttacaaaaagaagacataccgggatgactccattgatatctgtaatcctgaagttctgcctattgtctcagaattattagaggttaaagaagagatgctatttgaagcattagttacaaggaagacggtgacagtgggagaaaagcttattttgccatacaagttggcagaggctgtgacagtgaggaactccatggctaagtctctgtatagtgccctgtttgactggatagtttttcgaattaatcatgcacttctgaatagtaaagatttagagcataataccaagacattgtctattggtgttcttgatatttttgggtttgaagattatgaaaataacagctttgaacagttctgtattaattttgctaatgaacgtttacagcactactttaatcagcatatctttaaattggaacaagaggaatatagaactgaaggtatcagctggcacaacatagattacattgataatacctgctgcataaatcttattagcaaaaaaccaacaggactgcttcatcttttggatgaagaaagcaactttccacaggctacaaatcaaacattgctagacaagtttaagcatcaacatgaagataattcttacatcgaatttccagccgtgatggagcctgctttcattataaaacattatgctggaaaagtaaaatatggggtaaaggatttccgggaaaaaaatacagatcatatgcgcccagacattgtagctcttctgagaagcagcaagaatgcatttatctctgggatgattggaattgatcctgtagctgttttccgatgggcaattctccgagcttttttcagagccatggttgctttcagggaagctgggaaaagaaacattcacagaaaaactggacatgatgatacagcgccatgtgcaattttgaaaagtatggatagttttagctttctccaacacccagtccaccagaggagcttagagattctgcagagatgcaaggaagagaagtacagtaaggctacaaatcctgataaactgttatcacatatccatttggaaatggaaaccaggagcatcctacaccagggtgggatatagattgtatgggcaacatggcctccataaacctctgagcagtctttga

SEQ ID NO: 344532 - DNA, 401 bp, Homo sapiens
ccgagcctctgtttgcaaatgtaagtatgagagatctttgaggaatatttttaaccactgacatttctgtttccttgagttgtcttatatctcctttaacataaaggagttatttacactacctaaatttttaacctcatctcttgctatactctcttcacctactctttgtctctaaaccagatattttgatgttatttggtcactgagagtcttgtacatgtaattcactctgtctaaaatggtcttgtcccagattttagtatgacttaatatttcaattacttcatgcctacactcacatctcaccttctcagagagctctcttttctacccccagtttaaatgccaccttgtccccaaattcgctattcttttttttgtttttgagatggtgtctt

SEQ ID NO: 344533 - DNA, 356 bp, Homo sapiens
tttggaatggatgcagcttatattaaaagaagaaactcatctcagtacacaatgggttcttacactcccacctaccaaagtatccgttttccagtactcctgcaagaaatattttaacttaaatgtgttgtatgaatatgtctcactaaatatcctaggcctcgcaggtgtttccatttattcttatcattcacctggtgtgatggaaatacacttgttatcctaaaagagcaatgtaaaactgatgcagtcactcaatttactttctaacatgaatttttctctgcagggaaaggggcgtattcgtcgaggaaactatccaggtccatcgtctcctgttgtagttcggttgcctt

SEQ ID NO: 344534 - DNA, 350 bp, Homo sapiens
ccatcgtctcctgttgtagttcggttgccttctgtgtctgatgtctcagaggagaccttgactagtgaggcagccatggagactgacatcacagaacagcagcaagcagctatgcagcaggaggagagagtactgactgagcagattgagaacctacagaaggagaagtgagtatccaggaggaaggggagagacagttatagtctgtttttgtttccttccttctatcgtttctttattttttcttatttattatctcctgtgtgttaaacactgtgtcagatgatacaggagatgttgagatgacaaagacgtgttgtctatactcaggtaacagtgtgagagttgtt

SEQ ID NO: 344535 - DNA, 309 bp, Homo sapiens
aagatggaaagcctacagggaaagtaaaaggtaccaagaacaaaggaaaaaaattatccttttgcaatcaacatgtagaggattcagagcaagacaaaggtaatctctattactataataattgctttttttcttcttcccaagtactttgtttatacctctgcattaacacttgtctaatttgtattagaattggttgtatacaatttgtcttttccactatactgtgataccgattttaacccacattgtattgtctataatggaagttaaataaggttttattgaattaaattggattgaaaatct

SEQ ID NO: 344536 - DNA, 470 bp, Homo sapiens
attgagatttagctctttttattgagtaaacactctctgggttgttgcaagctttcgattagtttccacagttctgaaaaggttaattatgacagatttgccagatttctcattggttttatggagaagagaattttcagaggtcctaactttgttaactttgctgccttcatccctctcttttgtattccacatccaaaacatcattcaatttttaggagtacttaaacgctgaatttatcacatttatattaaaaaatgaagcaaagctgatacattttactaattactgtttgcttcccccctccccctgttaaatgataaccataagtcacacattatgaaacttgtacttctttgtttcccacaggaactatcatgtattctattacctcctggcaggagcaagtgaagatgagagatcagcattccatcttaagcaaccagaggaatatcattatctcaatcag

SEQ ID NO: 344537 - DNA, 453 bp, Homo sapiens
atgatatgttttgaatactggccaaacacaatcccctgtacactgctttagaggaattgagcattttgttacttatgttgtggatattattcattaaataaatttaaacattacttttaatcaaaactttctcttgttttacagacattgtctattggtgttcttgatatttttgggtttgaagattatgaaaataacagctttgaacagttctgtattaattttgctaatgaacgtttacagcactactttaatcagcatatctttaaattggaacaagtgagtacctaaatatgtatacacttgtccccccatcacacatatctttgagtcatattcataataattcacttcattttttcacacattttattgatttacatagtgtttttattaaatattgaaacgtgcctttacaaacaagaataaccgaagtaaattggcttgggaaca

SEQ ID NO: 344538 - DNA, 378 bp, Homo sapiens
aatcttgatttttaaacttttattttaaataagcaggattgcttcacggtggaaggagaagatttgagacatgactttgagcgcctacaacttgccatggaaatggtaggatttcttcccaagacacgaagacagtgagtttacttgttgtatttttatatctctaatagagaacacatgatatgtctttgaaagatttctgccgttgacctttttaaatagttttctaagtggtattcttcatctagtacctcatccatctcgagcattatttctaattcctttttttatcataaattattttgagaatctgatgaaagctgacactgttgttgtaaaatgtacatccttaacaatttgcatataaatgcaggaatt

SEQ ID NO: 344539 - DNA, 7429 bp, Homo sapiens
  misc_feature (4013)..(4013): n is a, c, g, or t
gcggccgctcgcccggaccctgaggctgctgggcccaccctcccggaaccgtccgaccctcggtggcctcggcctcttctgccatctccggtcctaccctggggcggagggtggaaggcagcttccgtcgaagaggagggggctgcggtggccaccgcggcggagcccgagttattttaccaagaaaatggtttgcacgactttgaacatatactatccatgctgatgggacaggatccaatatgaatataaatgatggaggaagacgacgctttgaagataatgaacatacattacggatatatcctggggctatttcagaagggacaatctactgtccgattcctgccagaaaaaactccacagctgctgaggtgattgagtctcttataaacaaacttcatcttgacaaaacaaaatgttatgttctagcagaggtaaaggaatttggtggagaagaatggattctcaatccaacagattgtccagttcagcgaatgatgctgtggccccgaatggctctggaaaatcgcttaagtggagaggactaccgcttccttctgagagagaaaaaccttgatggatcaatccattatggtagcctgcagtcatggctacgggtaacagaagaacgtcgcaggatgatggaacggggttttcttccacagcctcaacagaaagactttgatgatttatgtagtttacctgatttgaatgagaaaactctcttagaaaacctacgaaatcgctttaagcatgaaaaaatttatacctatgttggcagtattctaatagttattaacccattcaagtttcttcctatttataaccccaaatatgtcaaaatgtatgataaccaccaactgggaaaacttgagccccacatttatgctgtggctgatgtagcttatcatgccatgcttcagcgcaaaaagaatcagtgcatcgtgatttcaggagagagtggttctgggaagactcaaagcacaaactttcttattcaccaccttactgctctcagtcagaaaggatttgccagtggagtagaacagattattcttggagctggaccagtacttgaggcctttggaaatgcaaagacagctcataataacaattcaagtcgttttgggaagtttattcaagtaaattaccaggaaacaggcactgtacttggtgcctatgttgaaaaatatctactggagaagtccagactcgtttatcaggagcataatgaacggaactatcatgtattctattacctcctggcaggagcaagtgaagatgagagatcagcattccatcttaagcaaccagaggaatatcattatctcaatcagataacaaagaaacccctcagacagagctgggatgattattgctatgactctgagccggattgcttcacggtggaaggagaagatttgagacatgactttgagcgcctacaacttgccatggaaatggtaggatttcttcccaagacacgaagacagattttctctcttctctcagccatactacatttgggtaatatctgttacaaaaagaagacataccgggatgactccattgatatctgtaatcctgaagttctgcctattgtctcagaattattagaggttaaagaagagatgctatttgaagcattagttacaaggaagacggtgacagtgggagaaaagcttattttgccatacaagttggcagaggctgtgacagtgaggaactccatggctaagtctctgtatagtgccctgtttgactggatagtttttcgaattaatcatgcacttctgaatagtaaagatttagagcataataccaagacattgtctattggtgttcttgatatttttgggtttgaagattatgaaaataacagctttgaacagttctgtattaattttgctaatgaacgtttacagcactactttaatcagcatatctttaaattggaacaagaggaatatagaactgaaggtatcagctggcacaacatagattacattgataatacctgctgcataaatcttattagcaaaaaaccaacaggactgcttcatcttttggatgaagaaagcaactttccacaggctacaaatcaaacattgctagacaagtttaagcatcaacatgaagataattcttacatcgaatttccagccgtgatggagcctgctttcattataaaacattatgctggaaaagtaaaatatggggtaaaggatttccgggaaaaaaatacagatcatatgcgcccagacattgtagctcttctgagaagcagcaagaatgcatttatctctgggatgattggaattgatcctgtagctgttttccgatgggcaattctccgagcttttttcagagccatggttgctttcagggaagctgggaaaagaaacattcacagaaaaactggacatgatgatacagcgccatgtgcaattttgaaaagtatggatagttttagctttctccaacacccagtccaccagaggagcttagagattctgcagagatgcaaggaagagaagtacagtataacccggaaaaatcccagaacacctctttctgatctccagggcatgaatgctctaaatgaaaaaaaccaacatgatacatttgatattgcctggaatggcagaactgggattcgccagagcagactatcaagtggcacctccttgcttgataaagatggaatatttgctaattcaactagcagcaaactcctggagagagcccatggaattctcacgagaaacaaaaatttcaaatccaagcctgcccttccaaagcacttgctagaagtaaattctttaaagcacctgacaagactgacactacaagatcgcattaccaagtctcttcttcatttacacaagaagaaaaaacctcccagcatcagtgcccagtttcaggcatcattaagcaagctaatggaaacacttggtcaagcagaaccatattttgtaaaatgcattcgctctaatgctgaaaagctgcccttaaggttcagtgatgtcttggtacttagacagcttcgatacaccgggatgctggaaacagttcaaattcgccaatcaggatacagctccaaatattctttccaggattttgtgagccacttccatgtacttcttccccgaaatattattccatccaaatttaacattcaggatttcttcaggaaaataaatcttaatccagataattatcaagttggaaaaaccatggtctttctaaaggagcaggaacgacagcacttacaagatctgcttcaccaagaggtgctccgcagaatcatattgttgcagcgatggttcagggtcttgctgtgtaggcagcatttcctccatctgagacaagcatctgttattatccagagattctggaggaattacctaaatcagaagcaagtcagagatgcagctgtgcagaaggatgcttttgttatggctagtgcagctgctcttctccaagcttcctggcgtgctcacttagagaggcagcggtacttggagttacgggctgcagccatcgttatccagcagaaatggagagattactataggcgcaggcacatggctgctatttgcatacaagcaagatggaaagcctacagggaaagtaaaaggtaccaagaacaaaggaaaaaaattatccttttgcaatcaacatgtagaggattcagagcaagacaaagatttaaagctttaaaagaacaaaggctaagagaaacaaagccagaagttggattggtgaatattaagggatatggatctctggaaattcagggttcagacccttcagaatgggaggattgttcttttgacaacagaataaaagccatagaggaatgtaaatctgtaatagagagtaatcgaattagccgtgaaagttcagtggactgcttgaaggagtcaccaaacaagcagcaggagagagcccaaagccagagtggtgtggacttgcaggaagatgtgcttgtaagagagagacccagntccttggaggatctccatcagaaaaaagtaggccgggctaagagagaaagtaggagaatgagagaactagagcaagctatatttagcttagaattgctgaaagttcgttctcttggtggtatttctccttcagaggatcgcagatggtctacagaattggtgcctgaaggccttcagtctccacggggtacacctgatagtgagagctctcaaggaagcttggaacttctgagctatgaggaaagccaaaagagcaaactagagtctgtcatttcagatgaaggagacttgcagtttccatcacctaagatatccagcagtccaaaatttgattcacgggacaatgccctcagtgcctcaaatgagactagcagtgcagagcatttgaaggatggaactatgaaggaaatggtggtctgcagttctgagtctattacctgtaaaccacagctgaaagactccttcatttcaaatagtctacctacttttttttatatcccccaacaagacccactgaaaacaaattcccaactagacacaagtatccaaagaaacaaactattggaaaatgaagacacagcgggggaagctcttactttggatatcaacagggaaactagaaggtatcactgctcaggaaaagatcagattgttccttctttgaatacagagtcttctaatcctgtgcttaagaagttagaaaagctaaacactgagaaggaagaaaggcaaaaacagttgcagcaacagaatgaaaaagagatgatggaacagattcgccagcaaacagatattttagagaaggagcgcaaagccttcaagacaattgaaaagccaagaattggagagtgtttggtggcaccatcttcctatcagtcaaagcaaagagtagagaggccatcctctctcctcagcttaaatacctcaaataagggagaacttaatgtactggggtccctatcattaaaagatgcagctcttgcccaaaaagacagttcctctgctcacttacccccaaaggaccgacctgtcaccgtgttctttgaaagaaaaggaagtccatgccaatctagtactgtcaaggaattatccaagacagacagaatgggcacccagctgaatgtagcctgtaaactctcaaataatcgcatttcaaaaagagaacactttaggccaactcagtcttacagccacaattctgatgacctttccagagagggaaatgctaggcccattttcttcactccaaaggacaatatgagtattccccttgtcagcaaagaagccttaaacagtaaaaatcctcaactccataaagaagatgaaccagcatggaaacctgtgaagttagctgggccaggccaaagagagcaggttgccagaccggcccataaaaagaaagctcgaatggcgcggacgcgctccgatttcttgactagaggtacttttgccgatggggagggggatacagaggaagatgattacgatgacattattgagccccttctctcccttgaccaagcttctcactgtgagctagggcctgcacccagcctgggtcaggcctctcacagtgactccgaaatgacatcacagcgattttcgtcagttgatgaacaagcaaaacttcataagactatgtctcaaggagagattaccaagttggcagtgagacagaaggcttcagattcagatataagacctcagagagctaagatgagattctgggccaaagggaaacaaggggagaagaagactaccagagtgaaacctactacccagtcagaggtttcgccactctttgcaggcacagatgtgattccagctcatcagtttccagatgaattagctgcatatcacccaacacctcctttgagcccagaactgcccggcagttgccggaaggaattcaaagagaacaaagaaccttctccaaaggctaagcgcaagcgaagtgtgaagattagcaacgtggctttggattctatgcattggcaaaatgactctgtccagatcatagcaagtgtcagtgatttaaaaagcatggatgaatttcttctgaaaaaggtgaatgacctagataatgaagacagcaagaaggatacactagtggatgttgtatttaaaaaagccctgaaggaatttcggcagaatatcttcagcttttattcatctgcattggcgatggatgatgggaaaagcatacggtataaagacctctatgcactatttgaacagattctggaaaagacgatgaggcttgagcagcgtgattcactgggtgaatctccagtgagagtttgggtcaacacttttaaagtgtttttagatgaatatatgaatgaattcaagacttcagattgcacagccacaaaggtgccaaaaacagaaagaaagaaaagaaggaaaaaggaaactgatttggtggaagaacacaatggtcacatctttaaagccacccaatatagcatccctacatactgtgaatactgttcttctttgatatggataatggaccgagcctctgtttgcaaattatgcaagtatgcttgccataagaagtgctgtctgaaaaccacagccaagtgctctaaaaagtatgatccagagctgtcatctcgacaatttggggttgaactgtcccgtttgaccagtgaagaccgaactgttcctttagtagtggaaaagctcataaactacattgaaatgcatggactgtatacagaaggtatttatcgaaagtctggttcgactaataaaatcaaggagcttcggcagggtctagatacagatgctgagagtgtaaatctagatgactataacatacacgtcattgcaagtgtattcaaacaatggcttcgagatttgcccaatcctctcatgacctttgaactctatgaggaatttcttcgagctatgggccttcaggagaggaaggagacaatccgtggtgtatactctgtgattgatcaactctcccgaactcatctcaatacactggaacgcctcatctttcatctagtcaggattgctctgcaggaagacactaatcgaatgtctgctaatgctttggccattgtgtttgcgccctgcattctccgctgccctgacaccactgacccactacaaagtgtacaggacatcagtaagactaccacttgtgtggaactgattgttgtggaacaaatgaataaatacaaggctcgtctcaaagatatcagtagcttggaatttgctgagaataaggcaaagaccaggttgtcactgattcgtagatcaatggtaagatgcaacacatggaatagtggaaaaatgggagttgtcttgggaatttaaatgtgcttttgtggtgtatacaaggattattatcagaatcttttttataaaaaacaagtaaaacgtcaccaaatctcaag

SEQ ID NO: 344540 - DNA, 2238 bp, Homo sapiens
gcggccgctcgcccggaccctgaggctgctgggcccaccctcccggaaccgtccgaccctcggtggcctcggcctcttctgccatctccggtcctaccctggggcggagggtggaaggcagcttccgtcgaagaggagggggctgcggtggccaccgcggcggagcccgagttattttaccaagaaaatggtttgcacgactttgaacatatactatccatgctgatgggacaggatccaatatgaatataaatgatggaggaagacgacgctttgaagataatgaacatacattacggatatatcctggggctatttcagaagggacaatctactgtccgattcctgccagaaaaaactccacagctgctgaggtgattgagtctcttataaacaaacttcatcttgacaaaacaaaatgttatgttctagcagaggtaaaggaatttggtggagaagaatggattctcaatccaacagattgtccagttcagcgaatgatgctgtggccccgaatggctctggaaaatcgcttaagtggagaggactaccgcttccttctgagagagaaaaaccttgatggatcaatccattatggtagcctgcagtcatggctacgggtaacagaagaacgtcgcaggatgatggaacggggttttcttccacagcctcaacagaaagactttgatgatttatgtagtttacctgatttgaatgagaaaactctcttagaaaacctacgaaatcgctttaagcatgaaaaaatttatacctatgttggcagtattctaatagttattaacccattcaagtttcttcctatttataaccccaaatatgtcaaaatgtatgataaccaccaactgggaaaacttgagccccacatttatgctgtggctgatgtagcttatcatgccatgcttcagcgcaaaaagaatcagtgcatcgtgatttcaggagagagtggttctgggaagactcaaagcacaaactttcttattcaccaccttactgctctcagtcagaaaggatttgccagtggagtagaacagattattcttggagctggaccagtacttgaggcctttggaaatgcaaagacagctcataataacaattcaagtcgttttgggaagtttattcaagtaaattaccaggaaacaggcactgtacttggtgcctatgttgaaaaatatctactggagaagtccagactcgtttatcaggagcataatgaacggaactatcatgtattctattacctcctggcaggagcaagtgaagatgagagatcagcattccatcttaagcaaccagaggaatatcattatctcaatcaggtgagagttcataaaaagcattttgaagtatagggcagtattaaatttaatgcttgaaaaatgtcttttttctagtactttctcaaacctaggaatggattagctagcattttcatatatgtactctacaaatttaggtgatgcagttctcaaatttgaggatgattaccatcctcatataaatgttaaaagctcagataatatatgtgcttttcgttttctgtgagattctttgggaaaataataataagctgtttattgatatttctactgtattagaaaaatgctttacttttactaaagtgatttaccttttacaacccccaggatattaaatgttactaatgattaattcttgtcctttgcaagggattacttgaaacctaatttgcatgttttgaagtctcatacacatacgtctttgcatgatactatgacactgacttagagtatgactatttttataatttaatgaacaatcttcttaaatattcagtatgaaggtcatcaaaggcaaatgacttagagaatttggatctttcctcaaaactcaaaattcatccctaaacttccacattgaggagtaattcttacttttcattacattgactttactaattttattatttctcataataacagaaattttacaaccagcactaatggaattagtaaaacaataggtcatttaaataatagatgtctccccttatttttccattgttggaggcaagatgtaatgtctacggaaataaatccctttatgaccattaaaaaaatccttacgaagcttttgtaaacaaattgacactttgatgatggttcagatagcagtatatatttagggttatgaaagttacatctttggctgagtgcagtggctcacacctgtaatccc

SEQ ID NO: 344541 - DNA, 1156 bp, Homo sapiens
  misc_feature (737)..(737): n is a, c, g, or t
  misc_feature (1144)..(1144): n is a, c, g, or t
  misc_feature (1146)..(1149): n is a, c, g, or t
tctgctcctaacgccattgaatttggcaaatgtagtaaaattggttgtaatttgataactagtttcagtttcactgagatatgaaggagaccagtggcttccaactatggtgtcaacacagtgttgtgttaaactcagctgtgaggtattaacagctactgataacctaaagaagtttgcagatgacttattttaagatatctacgtataaacgagagtggatttacgttcaaccctaaaatgctactttcacttgcattctgacatgaagggatggagctgcaactgtcatggtgggcattttgtataaattgcagttgcttgatcttactgataagtctttaatcacagtggaaattacatatgtgtgtatttccctgaacatttttttttatagtggttcattagaatctggatttgtttatcctagtgtttcgtagaagtgaatgttatatcatgtatatctctggggggaagaaaggccgagacctgtcatgggagactgtgcctttgctagccagtctgtaaattgaataatcttgaaacatttaggtaggcacatttggggtgacttcaaagtgctttatgaagtcttctctcctcacacatctccagagactaccatacctgaaatttcatgattgtttaagataagaattgctttttatgatagatatttcagaagtaactgatatttaaaacataattaactgactaatttaaatttttttcctttngggtaatgttgaatctaggaaaaaaatcctgttattcaggagcctttttgagagttaactttcatgcttctttttaaatccatatcccatgcctctttgaaattgtcactcgggggttgggcgcggtggctcacacttgtaattccagcactttgggaggccgggtgggtggatctcctgcggtcaggagttttagaccagcctggccaacatggcaaaaaatcatttccactaaaaatataaaaattagctgtgcgtggtgtcatgcgcctgtaatcccagctacttgggaggctgaggcaagagaatcgcttgaacctgggaggtggaggttgcagtgagcagagatcacgacattgcactcaagcctgggcgacaagagtgaaactctgcctcaaaaaaaaaanannnntcacttg

SEQ ID NO: 344542 - DNA, 359 bp, Homo sapiens
tactcaaaattctttcctgaatgacaacgtgaagttaaaatactttgttcttaacagttaacttcattgacatgacgcttctgcttcttgactaaggaaacttggctaataagagctttttgtttattcaagtaaaagtggactgcaagttgtaggattttatagcctccctgcatctttgcttaattaaggcatgcatagagaatgttttgctagcatattacttgatttaaaatatctaaatatggctgatatttaaatagttaccatcctcttgacttggcttcccctattttattggcttctgaatgattgtttttcttatcgttaggctaggaaaaattattgcaagctttaat

SEQ ID NO: 344543 - DNA, 744 bp, Homo sapiens
agggagctgtgccatgctgaatctgcagcatgccttggacataagcatgtagcttgtcttctccagcttggaggagagtctcagaggaaaggtcttagaggaatgcaaaggtggaggggtcctcataatatggaacaacgacagctctgtatcacccttcttatggaaaaacccagaataactgcccatgtgttctgtgaccttggattgtggaggaacagacggatgtcgattctgccagccactccttccccagtgggcagcacatccttgccccccaaccttcctgggcacctggagttcagatactaggggaatattaatcagggtccaaccaggaaaacagaaacccttctctgcagttaacagagagggaagtaaatgcaggacggtgcccctgcattggatcccagcacaggcaaagaacgttagtggaaagatgatgaaatccaaagaaagcctgtcagttaattattgtaccagtgttaatttttttttttttttggcggatgtgctggggtcgtgtaaagcatgaacattagagggacctggatgaagggcatatgggaactctctgtacctctgcaactcttttgcaagtttaaatttattcccaggtaagaagtgtgtttaaaaaatgaattagtcggccgggtgcagtggctcacgcctgtaatctcagcactttgggatgccaaggtgggcggatcacctgaggtcgggagttcgagaccagcttgacca

SEQ ID NO: 344544 - DNA, 408 bp, Homo sapiens
tgggaggacctcctgagccccgaggtcgaggctgcaatgagccgagattgtaccacagcactccagcctgggcagggacagagtgagaccctgtatccaaaaaaaagaaagaaaaaagaaaagaagtgatttctaaattttcttgcttgcaccattaagctgatatttagtggtggtaaagtattgatttgaatttgaaaaatattaataaggaaaagtgtttgacttgttcaatgtatatgaaacacttctgtgtcattttacattttacaacagttttattccttctgtgtgtacatacaggtttatctatttagacctgcctctctacaaaatagatttgaggcagctgacattaagagtacaaaccaggaaacaatatttaggtataaaaagataaagtacggc

SEQ ID NO: 344545 - DNA, 544 bp, Homo sapiens
cagtcatcaaagtcagagaaattaacatcagtacattgctgccatctaatgcttactccctactcaagtttcactagtttgctccaaaagtgtcttttatggcaggaggatcagaattaatgtataggccaggcacagtgccttgaatctgtaatcccagcactttgggagaccaagtaggagggttgcttgaacccaggagttcgagaccagcctgggaaacatagcaagactctatctacaaaaaaatagaaaaattaaccaggcatggtggcacacacctatagtctcagctacttgggaggctgaggcaggaggatcactcgagcccaggaggtcgaagtcatagggagccaaggttgcacctctgcattccagtttgggcaatagggtaagactctgtctcttaaaaaaagaaaagaaaaagaaaaagaatgaacgtgtagcagtttgttgtcatgtcttttaatcacctctagtctttaacagttatcagtctttactttcgtgatcatgagcttttgaagatcacaggccacctatt

SEQ ID NO: 344546 - DNA, 703 bp, Homo sapiens
cattgtcagtcaatgtttactcttagtgatgctcgtatgggaaatgtattatttgtattaccccaagttccaatcataaaacaactcatcgatctttaaaataaaaatgggcactgagttgcagtccaggcatattcagtaagtgacctgatcagtcaatatcagtaaggaggtagacaataagacctttgtatcagtcaggggaggttaacaggtagtaacaaataacccctgaatctcatgggcttaagacaaagttttcttcctcactcatactacatggctgactctggcaaatgggggcattgcttctcagggggctcagcccctggaacgttgctggccaccatgggaggagaaggagagtatactcacacccacacatatacgaaatgctcggcagaagcggcaggtctcttccactcacagctcattggccagaaccaaccacattgctccattgaacacaggggtccaaatgacatcctcctaccatttctccacatcatagagagccagaagtacctgacgaggagcatgactaaatattgctggctacaactgagtcagcaagacctacgcctgcacaatattctggagtgttcaatgggcttcaggaatgagttgcattcagtgatggaaaatagcaattgctattgatgaagctcccaattattgttgaataacttgaaagagttttaac

SEQ ID NO: 344547 - DNA, 787 bp, Homo sapiens
actacagtacagctcctaaaaagaaatgtattcagataaaagatttgatattactaggaagaattaacccaggaaataacattctggaattcaaaacacaggagactacccacaaagccagtattttattgaatggtaaacttaaggtagaaagtggtcagatttataaaaacccagtcacctggctcaaggatcttctgggaggcaacagttatgtgacctggaattatgcttggagtaaggtaacgtatcttgggaaggagcttttaaggtatgtttctgaggatgcacccatacttccagaaccaaactcagtacctcagcaatatcaaccttgtcttccagaagttgcttgtttagatgacccagtacaggaacccaaacaaatcaatgtttgagaaaacaaaatttggaccaaggaacttccagagagtcaatgtaaagcagcccacgttatctacaaataaatgaaatactattaatcagtgatcaagaatttctcccatgccacataatggatcagcattggaagttttgtgtggaatgtgaggaactaacaccctaaaaccttggtttcttaatattttattggatatttgttcaaattatcaacaaacatttatatttcatcttgtataatctggtgggcctattttaacatacactttatgagttgctatttaggatgtatgtttactgttcttaagatgtatgtaactgttcaacaattatataagattaatgcttttttgccattgaaataaaggcacatttgaactagaccata

SEQ ID NO: 344548 - DNA, 1308 bp, Homo sapiens
actacagtacagctcctaaaaagaaatgtattcagataaaagatttgatattactaggaagaattaacccaggaaataacattctggaattcaaaacacaggagactacccacaaagccagtattttattgaatggtaaacttaaggtagaaagtggtcagatttataaaaacccagtcacctggctcaaggatcttctgggaggcaacagttatgtgacctggaattatgcttggagtaaggtaacgtatcttgggaaggagcttttaaggtatgtttctgaggatgcacccatacttccagaaccaaactcagtacctcagcaatatcaaccttgtcttccagaagttgcttgtttagatgacccagtacaggaacccaaacaaatcaatgtttgagaaaacaaaatttggaccaaggaacttccagagagtcaatgtaaagcagcccacgttatctacaaataaatgaaatactattaatcagtgatcaagaatttctcccatgccacataatggatcagcattggaagttttgtgtggaatgtgaggaactaacaccctaaaaccttggtttcttaatattttattggatattggtcaacaaaccgctcacacttcatatctaaccatttctactctctctgtccctcttttcacccaacactctattaaccacatattatgcaacctgtctaccctcccgcacacactgatccgtacacaacacttcgctgccgtgctctgttattttaccccttattgactcttccatttctcctcctccccgtatccacctcagctcccttcttgccctcctttacttaactccctcataaaccactcgcatatacacattttgatactcccatgtcccacgactgcatccgcacaattctcagtcgctaaattattaccctcaatcgctccgtatcctttacttaatactccactatccacccaactcgtactctccctcacatcgtccaatcctcaatcatattattccctccccctctatctacagttcgtgcctgtttcgtcttccctcctttcttctcttcttcccctcttcacttacttcattattttctacctccattcccatttcctcgctgcacacatactaagtcctctaatatttctcatttgcccaatttattaattagcaccgccattcataataaccctgcacagccccgctcattaaaccccccacacatttattgctttcccatcccatagtccgatatgatgacctagctatttcattaacccaatatactctttccctaatcgctgcatattt

SEQ ID NO: 344549 - DNA, 1220 bp, Homo sapiens
actacagtacagctcctaaaaagaaatgtattcagataaaagatttgatattactaggaagaattaacccaggaaataacattctggaattcaaaacacaggagactacccacaaagccagtattttattgaatggtaaacttaaggtagaaagtggtcagatttataaaaacccagtcacctggctcaaggatcttctgggaggcaacagttatgtgacctggaattatgcttggagtaaggtaacgtatcttgggaaggagcttttaaggtatgtttctgaggatgcacccatacttccagaaccaaactcagtacctcagcaatatcaaccttgtcttccagaagttgcttgtttagatgacccagtacaggaacccaaacaaatcaatgtttgagaaaacaaaatttggaccaaggaacttccagagagtcaatgtaaagcagcccacgttatctacaaataaatgaaatactattaatcagtgatcaagaatttctcccatgccacataatggatcagcattggaagttttgtgtggaatgtgaggaactaacaccctaaaaccttggtttcttaatattttattggatatttgttcaaattatcaacaaacatttatatttcatcttgtataatctggtgggcctattttaacatacactttatgagttgctatttaggatgtatgtttactgttcttaagatgtatgtaactgttcaacaattatataagattaatgcttttttgccattgaaataaaggcacatttgaactagaccataaagaaaaaaaccacgacacttctaccacatcgctccttcatacacacccctacgcccccaaaaatccctttcacgtccgtaccttagcaatactctcctccctccccctctcccttccccacctttcccccgccctctttgaccccaacccgcaccgtccacccccctcacttgcgacatagcttcacctaatcctcccgcttacccgtcactttccctttccacatcctccatcccgcacttctctctcacactctttcattctcgcatttccttccctctacccacatatccaccctctctctaaaccataacctactccgtcacacccccccgtacactacctattaacgcttcccgcgccccatccgctcactaccaacatccccaccttttgcgcacataaccacccccccactcccctcatccttct

SEQ ID NO: 344550 - DNA, 1121 bp, Homo sapiens
tggctcatgcctgtaatcctagcactttgggaggccgaggtgggcagatcacctgaggtcaggagtttgagaccagcctggcaacatggcgaaaccccatctctactaaaaatacgaaaattagccacgcatggtggcaaacacctgtaatctcagctactcgggaggctgagataggagaattgtttgaacctgggaggcggaggttgcaatgagccgagatcgtgtcactgcactccagcctgggcaacagagtaagactccctctcaagaaaaaaaaagaaaaaatcaaatggccaggtgtcaggtatataagtctaaatgacagtaacagcagaaagtggtgttgatagaggtttgaagaattctgggtagttgtgcagtgttggtgggggtgtcaggtgttctgattatgtaaatgtcagatacataccttttgaccttaagttttacttctggaactttatcccagggaagtaattggataacagtgtacagttaaaagttagaatgctaattatgtttttgatactgcaaaagctgaaaacaacctaaatttcactaatagacatttgaccaaatagctttttccacaaagtgaaataccagatagcctttgaaaagaatggtcggtcatctccctgggtatggaaaagtgcctacagtgtattgtttagtgaaaagaaagcaggaagtagactagccagcaaaagattatcctatctttagggaaacatgttagctctaaaatgtggacccaaaaaagatatcagggaagctgttaactgccgcattgggaatggacatttgggaatctttaatattctgtactacatttctgatagctttttaaacacgatcaaaatattttatttgaggcaatagagcttgaacaaagacagacatgtagacagattaagttatctgtgtaaagaggctcacatagcacctgatacctaccaagggctgacagcaaaggtcacccatgttgtgatacactgacttgtgtctgtattgggagacagtagtcaagagaagctgatgggttaagtggcacttgtggcaccactcaggcgggtggtctgtcctctggactcttcccacccttccaggatacccag

SEQ ID NO: 344551 - DNA, 780 bp, Homo sapiens
ggtcggtcatctccctgggtatggaaaagtgcctacagtgtattgtttagtgaaaagaaagcaggaagtagactagccagcaaaagattatcctatctttagggaaacatgttagctctaaaatgtggacccaaaaaagatatcagggaagctgttaactgccgcattgggaatggacatttgggaatctttaatattctgtactacatttctgatagctttttaaacacgatcaaaatattttatttgaggcaatagagcttgaacaaagacagacatgtagacagattaagttatctgtgtaaagaggctcacatagcacctgatacctaccaagggctgacagcaaaggtcacccatgttgtgatacactgacttgtgtctgtattgggagacagtagtcaagagaagctgatgggttaagtggcacttgtggcaccactcaggcgggtggtctgtcctctggactcttcccacccttccaggatacccaggacatgtatttcttccccgtcttcctcccttctccctaacacactcctccctgcagctccccacagctgctctctcagactcttctctcctctccacccagcacccccaggctcactctcagcaggtgaatatgccccagactcacgaggtcaaccagagccattgagccctgaggtccaggagaagatatttaaaaattcctcaaattattatgacctattcagtagtttttcacagtagcttgtgagaaaaaaaatgatctccatctctgtgcgctaatatgga

SEQ ID NO: 344552 - DNA, 622 bp, Homo sapiens
cctgtagcagccacttcccagttttgctaattcagttacctctgcaatccattctctccctgcttccaggctggtctccctaaattttaaatcttacactccacacgattctccccgatctctccccttggctgaaaatctcttagtgagtccctttgcctgttaaacaaacccaagctgcttagcactggcaaataaggcccacaagatttgcccttgcctaccttctcaggcacctctttccagccccacatgttaacttcccatttcaggtgaacttgggatgctcagtttctctgagtttccaggttctctcattccaggcattggcatatccaggaatctcctctgacccacccactggttagtcctgtcctgagttcctacagtctcctgggcgtttctttcttctggcccctatgtcactgtgttttatatctgattagtaatctattttattacaaggggcatatcctgggaagaattctaccctgtattcaacccctttctcatttctggacacactgcttgacagtccttctagagcgtgcttttccacatttgataataagttgtgagtcagttgctaccttttcattagttgtcataaggtgttaacatg

SEQ ID NO: 344553 - DNA, 1396 bp, Homo sapiens
gtcgcctggaagcttctttactctgtgtctgaagcctggttgacgggtgcctctctccatggggctagggcttctcacagcttggcagctggattcccagagaggatatcgcagggagagtctggagagcaaatgtgccaagaaagtcagctggaagccacatggccttttatgacctaacctcagaaatcaagctgggtgcggtggctgctggacgcggtggctcaagcctgtaatcccaccactttgagaggctgaggtgggtggatcatttgagaccaggattttgacaccagcctggccaacatggtgaaactccgtctctactaaaaatacaaaaattagctgggtgtggtggtgcgtgcctataatcccagcactttgcgaggctgaggtgggcagatcacttgaggccaggagtttgacaccagcctggtcaagatggtgaaactctgtctctactgaaaatacaaaaattagccaggcgtggtggtgcatgtctacagtctcagctactcgggagctgaagcatgagaattgcttgaacccaggaggcagaggttgcagtgagccgaggttgcgcccctgcactccagcctgggcaacggagcaagactccatctcaaaacaacacacaaaaagagaaatcatagggatgtcacctgcatggtattctctgggttgaaacaggtacaaccccagcttgagttaggggagggggctgatatagtctgaatatttgtcccctctaaatctcgtgttgaaatgtgatccccagctattggagatgaggccaagtgggaggtgtttgggtcatgggggcagatgcctcatgaatggcttggtgccctccctgtggtaatgagtgaattcttgctctattcactcattctttcaaagagctggatctttgaaagaacctggcatgtctgttgctcaccacgtgatcttgtcggccccccttcatcttccactatgataggaagcttcctgcggtcctcactagcagcagatgctggcaccatgcttcttgtacagcctgcagaaccacgagccaaatacacctcttttctttataaatcacccagcctcaggtattcctttatagcaacaaaaacagactaagacagggtcatagaccctgcttcttgatggaggaggacaaagttactttgcagaagagcatgttggatgaagttacttttgtagccattttgggaaaatacaacttgacatttagaaaggtgaagtcctgcagaaggtgtggctgtggaagctgccacagcttcattttcttccttcacttctttctgtttctttcggaaggggagtgagctgacgctcggaaggtgtcttgagattatcatccgctgagggtggaagcggcccccgcaga

SEQ ID NO: 344554 - DNA, 378 bp, Homo sapiens
tgaaggcagcctcttcagccaagttccaaaggccaggtggcccactgtgaaccttgtttaaccacacagaacatatgaatagctacaacaagggatctaacagttaccagaatgttttcagaaaggtgacttcagaagtgccaagcttcaggaagacctggactgagaagggatcagacaactttaggaaagcaggtaccaaacagcccttttacagtttacacacaggccttggtgtcagaaaaatactggtttgagtactggttatgcatcagagatgccactctggacaagctccttatgctctctgggactctgctttctcatctaaaaaatggggatcacctgaggtcaggagtttgagaccagcctggccaa

SEQ ID NO: 344555 - DNA, 392 bp, Homo sapiens
atccagtaaatcccatttctggttatatacccaaaataattgaaattaagatctcagagagatataagcatgcttattgtggcattatttacaataaccaagatattgaaacaacctaaatgttcattgatggataaataagttaaaaagtagtatacacatacaatagaatgtcattcagctttaaaaaaagaaggaaatcgtgtcatatgtgacatcatagatgaaacataaagacatgatggtaagtgaaataatccagttaatgatggacaaatactgcatgactccacttatttgagatgtctaaacagtcaaactcatagaaacaaagagaaaagttttggtttccagtgattaggggcagaagaaaatgaggagatgctgttcaa

SEQ ID NO: 344556 - DNA, 516 bp, Homo sapiens
atgagtgattgaggcataagtttcaatcactgaggtttattaagccagctttagagtgcatctagggaaacacaccagccacagataaacctgtggctatttttctaaagaggtttttgggaggtttaatatgtatgcattccttaaagtggggagaaggtacgtaggaagacaggtaggtaggcagtaaggcaaatgggtacaaccctgtgaaattttagttagtgtccagtaaatctacattttacacaagatatagtgaatgttagaagagaaaaagggagtaaaggaggagccaattatgtgcacatctttaggcaggtgaagaaatgagtcttgtttttgttctgtacctggaagacaagcttccatttggaagaggatgttgcacaattcagcttcatggctttaatttggggggtcctgagatttttttttttaccttccaagagtaaatttcaaatgttctcatcaaaaaatttaagcatttaacgtgaaggataggttaataacttg

SEQ ID NO: 344557 - DNA, 3156 bp, Homo sapiens
  misc_feature (2330)..(2330): n is a, c, g, or t
tcggattggcactcacgtttcccgactccttagtctgtattcttttcaaccttgtctctaatattccatgattccatggttctgatgccattcctcagcgctctgctgttcttgcctgaccaagtggatcaatggtggctctggcatttctataaaggggatttcagggctgcctgctggggagggaggcttgaagctgtgtctgcactgcatcttcacagcactgagaaaatgccagtcattcaggaggacagggcagccctgtcctcgccacagtgcccgcatcttcattggttcacctttgcaggtatcatctgtgacctgtcatccaggctctgagccctgaggataataagtttccctcgaaggtcctgggtttgttggagctttttctccctcttgccatgtccttttcacggtccatcctctgagtttgtgaattatctttcttcgtggcccatgtggcacaagatgaagagtgcatgggcagcttctcccctgacatccctacctccctgacgcttaacccacatagggaagaacattcctgaaacagagacgtcacccagggttgctttctgccacagcaggcactctgcttcgtgcctttctcacttccatttgtaaatgatcttgtctccttccttgtagaaagcttttcagccattccaggctttctctttgggttccatccctctgggattttccacgaattgcatttccttgtagttcattttcatcattttccttgttagggaaatgcacctgagacattggcatgcagcctgattgcccccggcctcccctctgctcattgccagagctacctctgcacagaggagtcactctcctcccactccagggcctctgtcaggggccaggcttgatgctgtcaccagccagctcttcactgctgcccagtgccatattcatatccattgagacaagtccctgggaaatggttgggagccgggggacagccctgcatcctgagatcctaagatcagggaggttctccctgcactcccagctggaaggagactggatcggccaccctcaccaaattcccagattctctgactgaagcaagccagtccttggtttgaatggggaatcaactcagggttataaaatagacgccagccttcttgtaggtagaatctgacttcagacagcaaaagactctaaaacagcttaaattcctgtatatgccttctcctgtgcatgccaccggtcagaccaaaggccacacgccaatcaaggcccaagatcagccaggggtgtttccatgtcctcaagaacttttacaaactgtagctgattgggttccgcccctggagattcgatttagtgggtctggagtgaggcctgggcttcttagaagccccagcggattctaaaatgcagccaggaggaagaacgttgccagaatcccatgaggcacagatgcaaatgtgcatagtgacattgggttgcattatcaatggcaggactgactttataaacctccacatccttactggagctgctgtttgctttttagaaaagtccctcatcagattatcaggaagtcgtgggttttccgtgatcatgctgtggtcagatccagcccaaccagagagccaaaaacaaaacaaacatacaaaacaaacaaacaaacaaacaaaacccaaatccctggcaagccccacgaaatgactgctctgataacattcagcagacaagcctgtttgaaatcatctcagaatcataccagacccaaacccaagaggtcatctggtctatgcatcgactctaggagggtgtattagtccgttttcacgctgctgataaagacacacccgagactgggcaatttacaaaagaaagaggtttcatggacttacagttccacatggctggggaggcctgacaatcatggtggaaggcaaagaggagcaagtcacatcttacgtggatggcggcaggcaaagagacagcttttgcagggaaacttccttttttaaaaccatcagatctcgtgagacttactcactatcacgagaacagcacgggaaagactcgcccccatgattcaattaccgcccaccagtttcctcccacaacacaagggaattgtgggagttaaaattcaagacgaggtttgggtgaggacacagccaaaccatatcagagggtgaggggctatttctccatgttacagacaaggcacgtgaagcctagggacgttccatcacaggcccacaccttgtctcagaattaagaggaaatgcttctggctgccaggggtggggtggggtaggatgcagagcctctccctccaccaccanctccatccttttccctttctctgaaaatctcatttgatgattccccagcctggctgcaaattaaagatttgtagacctgaaagatgctaccgatggttatcagcaccaccaccaccatcgtaacagtaaacatttatggagcgccataattattcataataatttttatgtgttaaacaaatctgacctagctctataaagaaataggccctgttaaccaaaaatattggataaattaaaagtctcctagaagcatctgatgaaaggatctcaagttccataacacacggaccattcagtggtgttgtttctgggcttgattcactgtgggtcacttgaacgatgtcgggggtattgtccacctcccagtgctcagtctgtggcttgtggccagctgttcctctgtggggtctatgttggctgtgttaaggcctgctgcagaaacatctcatttctagcatgtttttctcaagcagtgatcctgtggggtcaagtcttcaatatcaaataatattgataataattatgatagaaataataagaggccaggcaccgtggctcacatttgtaatcccagcactttgggaggcagagttcaggtggatcatttgggcccaggagttcgagatcagcctggtcaacatggtgaaacccagtctctactaaaaatacaacaattagccgggcatggtggtgcacacctgtaattccagctactcgggaggctgaggcaggagaattgcttgaaaccagaaggcagaggttgcagttcgctgagattgcaccactgcactccagcctgggtgacagagtgagactctgtctc

SEQ ID NO: 344558 - DNA, 386 bp, Homo sapiens
tcaaaacactaagcctagtgctttggagatgtgggttctggtctggagtggcagtatggagtgccatctctcaggtcctcatgagcaacacagaggtcacctctccaggcacaggtcgagccacaccactgacacacaagagtcacgtccaaagccatgtgatggacgtggtgggtggttttatcccgaaccatcaatacccggcaccctggctgccccaggttcagcctctcaggggctgcttcactcgctctccacacagctgtgaacattgcaggatgagtcactgtgaaaccacaaactccttggcattggtgaagatgactaaagttataggcaaattagtcactggaaaccttcctgtcctctgtatctgcagcagcctc

SEQ ID NO: 344559 - DNA, 462 bp, Homo sapiens
gcctccacagggcctacatcaacaggactcgcgggccgagcttccaggcgccttgagtggctgggccgggcctccacgttgccctgctgcagggttaggtgggagcgagactggccccactcctgttgactgttccaccagcaccttcagtttgtggaagtggttgtgtccaaagagattttcgtaaaaacatcacaattctaaaacttttttttttttttcacaattctaaaactttatgcatttttggcatttaaaaagccctggcaagtctactgccttatttctcctgctcccttggcctgtgggtctgttcctgtatggttacccactttgttttttttgtttttttttttttttgctgttactgtggctttgtagtatattttaaaatttggtattcgttaactctttttttttctttttttttttttttgaaacagagtctcgttctgttgcctg

SEQ ID NO: 344560 - DNA, 389 bp, Homo sapiens
cagtttctgccattataccaagtttattaatacaccatgcaagagaatcatcaaaatactttatttctttgaaatgagagattttaagatcactgttagtccagaacaagacttgagtatagtctctttcactgcatttccaaattctcaattctcacaactgtggtaattattaccagccttacttgagaaaaaaacatcgaaggtcacacttactggtagagccaggacaagaccataggccttgactctcaagtcctacatcccttgtagcatacacttctacctttcaaaactgagctcggtagctcatgcctgtaatcccaggactttgggaggcggaggcaggcatattgcttgagtccagaagtttgagaagcctaggcaat

SEQ ID NO: 344561 - DNA, 412 bp, Homo sapiens
gttgtgcacatgtatcctaaaacttaaaatataataaaaaagaaaggagatcaatggttgccagggactagggggaaggaagaatgggattaactgcataatagttatagagttttattttgaggtgatgaaaacattttagaactagatagagatagtggttgtaccatattgtgaatgactaattgtaaatgtcactttattgttcactttaaatgattacttttacattgtgtaaatttcaactcaattttaaaaatttaaaaatggaacaagggagaggatttagaaggttctaaatgctaaaagaagttaatgatagaattcaggtagtgcgtatacaggtgttcactgaaatctttcaattttgctgtatgtttgaaattttttataataaaagttcagagggaaa

SEQ ID NO: 344562 - DNA, 594 bp, Homo sapiens
ccacagtgtctcacacatagctttgttattgtgtatataactattggctggtatttcttctcccatagagactgtgaacttctcacatagaggcatggtctattcatggctgccaacacctagcagagcctttagcacacagtagacacttggtattggttttgtgagtggaaattaatttctgccctccagagactgagagtgtaaggatgtgggaaatgttgataagacactcttttagtggaaagagtttctgaagaaaactaattattgtgacatattccaatatatgatagattgaaaggagatgaagatttggagactgaaagttctcacagctttctcacttcacaggctatgtgatcttggaaaagtctgagccttatttcacttattagtcaagagaatgaaatgagaggatgtgtcctggggccataaatgttagatcatttcaacaacatttaatgttagacacttaattaagtgaattctgttttctcagtgactttcattataattagataagtttttttcaggaagaaaaataaagatcctagagtaagtcacagtaaacattttgaatgttttctttaa

SEQ ID NO: 344563 - DNA, 408 bp, Homo sapiens
gctagaaaaccccaggcatatttgttctaagaaaatacttgtgttcggtgaatttaccaacaaagggagcatcagaggatgtgagggaagtctggaatggttgtatcactaagtgagagcagcacagatgtttgtggacctattgagaatgttacagataagaccatttttgaaaagttgtttgcagtgtcattttatgatcttgtgtacattttccaagcgatgtggctattctctaggagggatagtagaaattatttcaattttaatcaaataacctagagaatataacccaaatgactgaaaggaagaaatgtagaaaaagtatataaaataattttttgcattataaaagtttaaagacataaagtaatattactacataaaatctaagttttttactccagc

SEQ ID NO: 344564 - DNA, 2699 bp, Homo sapiens
atccacttccgggctcggcagctagactagcgggggcagcctcagagcgggtgagcttggggacgcacggagaggtgcagctgggccgtccagcatcaaacactagcctccacacgtggaaaagaccctgactcccacagtagactagtcttatgggagtcctggctcttgggccaggctgcattaggaaaatggaaaccagactgtcttcaaattcttctgcctagccttagccattagagagaggtcctgctaaagatggactgcaaatgcgcttgatggaaggagatgtcaattccactgaagtcctcatttctgctgagctacctgtgcaccctgcctccggctctcctgagcagagagatcctgatggctgactcagaagcactcccctcccttgctggggacccagtggctgtggaagccttgctccgggccgtgtttggggttgttgtggatgaggccattcagaaaggaaccagtgtctcccagaaggtctgtgagtggaaggagcctgaggagctgaagcagctgctggatttggagctgcggagccagggcgagtcacagaagcagatcctggagcggtgtcgggctgtgattcgctacagtgtcaagactggtcaccctcggttcttcaaccagctcttctctgggttggatccccatgctctggccgggcgcattatcactgagagcctcaacaccagccagtacacatatgaaatcgcccccgtgtttgtgctcatggaagaggaggtgctgaggaaactgcgggccctggtgggctggagctctggggacggaatcttctgccctggtggctccatctccaacatgtatgctgtaaatctggcccgctatcagcgctacccggattgcaagcagaggggcctccgcacactgccgcccctggccctattcacatcgaaggagtgtcactactccatccagaagggagctgcgtttctgggacttggcaccgacagtgtccgagtggtcaaggctgatgagagagggaaaatggtccccgaggatctggagaggcagattggtatggccgaggctgagggtgctgtgccgttcctggtcagtgccacctctggcaccactgtgctaggggcctttgaccccctggaggcaattgctgatgtgtgccagcgtcatgggctatggctgcatgtggatgctgcctggggtgggagcgtcctgctgtcacagacacacaggcatctcctggatgggatccagagggctgactctgtggcctggaatccccacaagctcctcgcagcaggcctgcaatgctctgcacttcttctccaggatacctcgaacctgctcaagcgctgccatgggtcccaggccagctaccttttccagcaggacaagttctacgatgtggctctggacacgggagacaaggtggtgcagtgtggccgccgtgtggactgtctgaagctgtggctcatgtggaaggcacagggcgatcaagggctggagcggcgcatcgaccaggcctttgtccttgcccggtacctggtggaggaaatgaagaagcgggaagggtttgagctagtcatggagcctgagtttgtcaatgtgtgtttctggttcgtaccccccagcctgcgagggaagcaggagagtccagattaccacgaaaggctgtcaaaggtggcccccgtgctcaaggagcgcatggtgaaggagggctccatgatgattggctaccagccccacgggacccggggcaacttcttccgtgtggttgtggccaactctgcactgacctgtgctgatatggacttcctcctcaacgagctggagcggctaggccaggacctgtgagccttctctgtcttgctgccggccttgataccacccctcacccgcagagtcactgcattccctcccagcctttgaggccgggtgcagtggctcacgcctgtaatcccagcactttgggaggccgaggcgggtggatcacttgaggtcaggagttcgagaccagcctggccaataaggtgaaaccctgtctctactaaaaatacaaaaattagccgagcatggtggcctgtgcctgtaaacccagctactcaggaggttggggcagaattgcttgaacccagggggcagaggttgcagtgagccgagattgcacccctgcactccaggctgggcaacagtacgagactctgttccaaaaaaaataaaaaagaacagcctttttaggccacagtgacctgcgcaatgtttatatgctttgacctactaactttctcctaactaaatatttgattttaggagagtgtttaaataaattacagtatgtctatatgatgaaatgttattttgccattaaaattttgtttacaaagataatttttattgacataaaaataactttaatgtaatttatgttgaaaaagctgaatacaagtctttatatagagtaatatttgagctgtgttcaaaaatacataggaaaagactgataaaatgaaatatggcaaaatgttaatagttttccctggaataggataataggcaattttaaaacagactcctttaaaaaaacaaacaaacaaaaaaaacatagacttctttatatcttttgagctccctcccttttattatgtaatgaatatgtgttgcttttgtaataggaaaataataaagttaaaatttcaactgca

SEQ ID NO: 344565 - DNA, 1740 bp, Homo sapiens
tttggttttctgtttctgtgttaactcacttaggatactggcctccagctgcatccatgttgctgcagaggacatgatttcattcttttttatggctgcataatacttcatgggtgctgtgccgttcctggtcagtgccacctctggcaccactgtgctaggggcctttgaccccctggaggcaattgctgatgtgtgccagcgtcatgggctatggctgcatgtggatgctgcctggggtgggagcgtcctgctgtcacagacacacaggcatctcctggatgggatccagagggctgactctgtggcctggaatccccacaagctcctcgcagcaggcctgcaatgctctgcacttcttctccaggatacctcgaacctgctcaagcgctgccatgggtcccaggccagctaccttttccagcaggacaagttctacgatgtggctctggacacgggagacaaggtggtgcagtgtggccgccgtgtggactgtctgaagctgtggctcatgtggaaggcacagggcgatcaagggctggagcggcgcatcgaccaggcctttgtccttgcccggtacctggtggaggaaatgaagaagcgggaagggtttgagctagtcatggagcctgagtttgtcaatgtgtgtttctggttcgtaccccccagcctgcgagggaagcaggagagtccagattaccacgaaaggctgtcaaaggtggcccccgtgctcaaggagcgcatggtgaaggagggctccatgatgattggctaccagccccacgggacccggggcaacttcttccgtgtggttgtggccaactctgcactgacctgtgctgatatggacttcctcctcaacgagctggagcggctaggccaggacctgtgagccttctctgtcttgctgccggccttgataccacccctcacccgcagagtcactgcattccctcccagcctttgaggccgggtgcagtggctcacgcctgtaatcccagcactttgggaggccgaggcgggtggatcacttgaggtcaggagttcgagaccagcctggccaataaggtgaaaccctgtctctactaaaaatacaaaaattagccgagcatggtggcctgtgcctgtaaacccagctactcaggaggttggggcagaattgcttgaacccagggggcagaggttgcagtgagccgagattgcacccctgcactccaggctgggcaacagtacgagactctgttccaaaaaaaataaaaaagaacagcctttttaggccacagtgacctgcgcaatgtttatatgctttgacctactaactttctcctaactaaatatttgattttaggagagtgtttaaataaattacagtatgtctatatgatgaaatgttattttgccattaaaattttgtttacaaagataatttttattgacataaaaataactttaatgtaatttatgttgaaaaagctgaatacaagtctttatatagagtaatatttgagctgtgttcaaaaatacataggaaaagactgataaaatgaaatatggcaaaatgttaatagttttccctggaataggataataggcaattttaaaacagactcctttaaaaaaacaaacaaacaaaaaaaacatagacttctttatatcttttgagctccctcccttttattatgtaatgaatatgtgttgcttttgtaataggaaaataataaagttaaaatttcaactgca

SEQ ID NO: 344566 - DNA, 2230 bp, Homo sapiens
  misc_feature (102)..(102): n is a, c, g, or t
  misc_feature (119)..(119): n is a, c, g, or t
atccacttccgggctcggcagctagactagcgggggcagcctcagagcgggtgagcttggggacgcacggagaggtgcagctggggtggctcacacctgtantcccagcacgttgggangccgaggagctacctgtgcaccctgcctccggctctcctgagcagagagatcctgatggctgactcagaagcactcccctcccttgctggggacccagtggctgtggaagccttgctccgggccgtgtttggggttgttgtggatgaggccattcagaaaggaaccagtgtctcccagaaggtctgtgagtggaaggagcctgaggagctgaagcagctgctggatttggagctgcggagccagggcgagtcacagaagcagatcctggagcggtgtcgggctgtgattcgctacagtgtcaagactggtcaccctcggttcttcaaccagctcttctctgggttggatccccatgctctggccgggcgcattatcactgagagcctcaacaccagccagtacacatatgaaatcgcccccgtgtttgtgctcatggaagaggaggtgctgaggaaactgcgggccctggtgggctggagctctggggacggaatcttctgccctggtggctccatctccaacatgtatgctgtaaatctggcccgctatcagcgctacccggattgcaagcagaggggcctccgcacactgccgcccctggccctattcacatcgaaggaggtggggaagaggcacaggcccaaccctgggctcctgattctaatctccagccatgtcactactccatccagaagggagctgcgtttctgggacttggcaccgacagtgtccgagtggtcaaggctgatgagagagggaaaatggtccccgaggatctggagaggcagattggtatggccgaggctgagggtgctgtgccgttcctggtcagtgccacctctggcaccactgtgctaggggcctttgaccccctggaggcaattgctgatgtgtgccagcgtcatgggctatggctgcatgtggatggctgactctgtggcctggaatccccacaagctcctcgcagcaggcctgcaatgctctgcacttcttctccaggatacctcgaacctgctcaagcgctgccatgggtcccaggccagctaccttttccagcaggacaagttctacgatgtggctctggacacgggagacaaggtggtgcagtgtggccgccgtgtggactgtctgaagctgtggctcatgtggaaggcacagggcgatcaagggctggagcggcgcatcgaccaggcctttgtccttgcccggtacctggtggaggaaatgaagaagcgggaagggtttgagctagtcatggagcctgagtttgtcaatgtgtgtttctggttcgtaccccccagcctgcgagggaagcaggagagtccagattaccacgaaaggctgtcaaagggctcacgcctgtaatcccagcactttgggaggccgaggcgggtggatcacttgaggtcaggagttcgagaccagcctggccaataaggtgaaaccctgtctctactaaaaatacaaaaattagccgagcatggtggcctgtgcctgtaaacccagctactcaggaggttggggcagaattgcttgaacccagggggcagaggttgcagtgagccgagattgcacccctgcactccaggctgggcaacagtacgagactctgttccaaaaaaaataaaaaagaacagcctttttaggccacagtgacctgcgcaatgtttatatgctttgacctactaactttctcctaactaaatatttgattttaggagagtgtttaaataaattacagtatgtctatatgatgaaatgttattttgccattaaaattttgtttacaaagataatttttattgacataaaaataactttaatgtaatttatgttgaaaaagctgaatacaagtctttatatagagtaatatttgagctgtgttcaaaaatacataggaaaagactgataaaatgaaatatggcaaaatgttaatagttttccctggaataggataataggcaattttaaaacagactcctttaaaaaaacaaacaaacaaaaaaaacatagacttctttatatcttttgagctccctcccttttattatgtaatgaatatgtgttgcttttgtaataggaaaataataaagttaaaatttcaactgca

SEQ ID NO: 344567 - DNA, 619 bp, Homo sapiens
gtactattcaaatttatttatttatttagagacagagtttcactttgtcacccagactggagttgcagtgagccgagattgcacccctgcactccaggctgggcaacagtacgagactctgttccaaaaaaaataaaaaagaacagcctttttaggccacagtgacctgcgcaatgtttatatgctttgacctactaactttctcctaactaaatatttgattttaggagagtgtttaaataaattacagtatgtctatatgatgaaatgttattttgccattaaaattttgtttacaaagataatttttattgacataaaaataactttaatgtaatttatgttgaaaaagctgaatacaagtctttatatagagtaatatttgagctgtgttcaaaaatacataggaaaagactgataaaatgaaatatggcaaaatgttaatagttttccctggaataggataataggcaattttaaaacagactcctttaaaaaaacaaacaaacaaaaaaaacatagacttctttatatcttttgagctccctcccttttattatgtaatgaatatgtgttgcttttgtaataggaaaataataaagttaaaatttcaactgca

SEQ ID NO: 344568 - DNA, 664 bp, Homo sapiens
ctcacccccccttcttgtattcttatggttgtatattttcagtttctgtctttatcttagctgcagttaatttttgtcaatgatgagaaatagtgagaaatgccacacggacctgtgatgcagtggaagaggtagcctaaagtcagaaagtcagtgatctaggcttgttcccatgtcacctttgtaattttggacaattagttcaccttctttcagctaagaatcctcatcttgaaaacaagaatgaataaatacctatttaggctaatttctaatactattgtgaaggtcaaataagataataaatgagaaggaaaaacaccctttgcaaatctattatcattactacagattcttggttgatgcaaatcaaatgtaagtagaatgcagcattttttccagtacctgcaaatcattgattgatttaacaaatgtttatgtaatgcctctgtgcaagtccctgggggaggggagaggacaatcaagaagatggaaactaacatttgaggggtcctgctaaagatggactgcaaatgcgcttgatggaaggagatgtcaattccactgaagtcctcatttctgctgtaggtgatattatgtcgtgactttaggagaagtaatggtgataccaaaagaaaaaaaaaactgtatgatgaaaaaaaaa

SEQ ID NO: 344569 - DNA, 3188 bp, Homo sapiens
atccacttccgggctcggcagctagactagcgggggcagcctcagagcgggtgagcttggggacgcacggagaggtgcagctgggtgagtgggcggcgccgtgcgccgagggcatggaggagggagcgctgaggccggcgcgtgcgccgtggccggggcgcgccccggccgccatcgagactgagggcaggaccctcggcccttcgatgattgtacgctgggtgctcgatgggaggagggtttgctgggtgagctggttcagactccttgaaaaatcatcgtcactctttcttcctcgcggacgtcctgcccatcgctctgagccggcgccccaagtagagccagagtagttcgtacccagccttttcacgtaactcggccgaggtggttcttctccgaattttttccgtcaggcccagattagcagattttggggtcagctgggagaggcgttaacttttcttcgcacactcttgctttgtgcgctcaaccacagtctgaattctcgcagaggcgttccttgagtagcccttggccacactgctcacctccctgcagaagtcaaagccccagccctcctctgcgaatcccgaggccagcctggttggttaccttctccccttcgccctttactccaggccgtccagcatcaaacactagcctccacacgtggaaaagaccctgactcccacagtagactagtcttatgggagtcctggctcttgggccaggctgcattaggaaaatggaaaccagactgtcttcaaattcttctgcctagccttagccattagagagaggtcctgctaaagatggactgcaaatgcgcttgatggaaggagatgtcaattccactgaagtcctcatttctgctgagctacctgtgcaccctgcctccggctctcctgagcagagagatcctgatggctgactcagaagcactcccctcccttgctggggacccagtggctgtggaagccttgctccgggccgtgtttggggttgttgtggatgaggccattcagaaaggaaccagtgtctcccagaaggtctgtgagtggaaggagcctgaggagctgaagcagctgctggatttggagctgcggagccagggcgagtcacagaagcagatcctggagcggtgtcgggctgtgattcgctacagtgtcaagactggtcaccctcggttcttcaaccagctcttctctgggttggatccccatgctctggccgggcgcattatcactgagagcctcaacaccagccagtacacatatgaaatcgcccccgtgtttgtgctcatggaagaggaggtgctgaggaaactgcgggccctggtgggctggagctctggggacggaatcttctgccctggtggctccatctccaacatgtatgctgtaaatctggcccgctatcagcgctacccggattgcaagcagaggggcctccgcacactgccgcccctggccctattcacatcgaaggagtgtcactactccatccagaagggagctgcgtttctgggacttggcaccgacagtgtccgagtggtcaaggctgatgagagagggaaaatggtccccgaggatctggagaggcagattggtatggccgaggctgagggtgctgtgccgttcctggtcagtgccacctctggcaccactgtgctaggggcctttgaccccctggaggcaattgctgatgtgtgccagcgtcatgggctatggctgcatgtggatggctgactctgtggcctggaatccccacaagctcctcgcagcaggcctgcaatgctctgcacttcttctccaggatacctcgaacctgctcaagcgctgccatgggtcccaggccagctaccttttccagcaggacaagttctacgatgtggctctggacacgggagacaaggtggtgcagtgtggccgccgtgtggactgtctgaagctgtggctcatgtggaaggcacagggcgatcaagggctggagcggcgcatcgaccaggcctttgtccttgcccggtacctggtggaggaaatgaagaagcgggaagggtttgagctagtcatggagcctgagtttgtcaatgtgtgtttctggttcgtaccccccagcctgcgagggaagcaggagagtccagattaccacgaaaggctgtcaaaggtggcccccgtgctcaaggagcgcatggtgaaggagggctccatgatgattggctaccagccccacgggacccggggcaacttcttccgtgtggttgtggccaactctgcactgacctgtgctgatatggacttcctcctcaacgagctggagcggctaggccaggacctgtgagccttctctgtcttgctgccggccttgataccacccctcacccgcagagtcactgcattccctcccagcctttgaggccgggtgcagtggctcacgcctgtaatcccagcactttgggaggccgaggcgggtggatcacttgaggtcaggagttcgagaccagcctggccaataaggtgaaaccctgtctctactaaaaatacaaaaattagccgagcatggtggcctgtgcctgtaaacccagctactcaggaggttggggcagaattgcttgaacccagggggcagaggttgcagtgagccgagattgcacccctgcactccaggctgggcaacagtacgagactctgttccaaaaaaaataaaaaagaacagcctttttaggccacagtgacctgcgcaatgtttatatgctttgacctactaactttctcctaactaaatatttgattttaggagagtgtttaaataaattacagtatgtctatatgatgaaatgttattttgccattaaaattttgtttacaaagataatttttattgacataaaaataactttaatgtaatttatgttgaaaaagctgaatacaagtctttatatagagtaatatttgagctgtgttcaaaaatacataggaaaagactgataaaatgaaatatggcaaaatgttaatagttttccctggaataggataataggcaattttaaaacagactcctttaaaaaaacaaacaaacaaaaaaaacatagacttctttatatcttttgagctccctcccttttattatgtaatgaatatgtgttgcttttgtaataggaaaataataaagttaaaatttcaactgca

SEQ ID NO: 344570 - DNA, 2346 bp, Homo sapiens
gtagagcaagctcgaacgaccagttatgggcgtagctgcctgcacaccctgcctccggctctcctgagcagagagatcctgatggctgactcagaagcactcccctcccttgctggggacccagtggctgtggaagccttgctccgggccgtgtttggggttgttgtggatgaggccattcagaaaggaaccagtgtctcccagaaggtctgtgagtggaaggagcctgaggagctgaagcagctgctggatttggagctgcggagccagggcgagtcacagaagcagatcctggagcggtgtcgggctgtgattcgctacagtgtcaagactggtcaccctcggttcttcaaccagctcttctctgggttggatccccatgctctggccgggcgcattatcactgagagcctcaacaccagccagtacacatatgaaatcgcccccgtgtttgtgctcatggaagaggaggtgctgaggaaactgcgggccctggtgggctggagctctggggacggaatcttctgccctggtggctccatctccaacatgtatgctgtaaatctggcccgctatcagcgctacccggattgcaagcagaggggcctccgcacactgccgcccctggccctattcacatcgaaggagtgtcactactccatccagaagggagctgcgtttctgggacttggcaccgacagtgtccgagtggtcaaggctgatgagagagggaaaatggtccccgaggatctggagaggcagattggtatggccgaggctgagggtgctgtgccgttcctggtcagtgccacctctggcaccactgtgctaggggcctttgaccccctggaggcaattgctgatgtgtgccagcgtcatgggctatggctgcatgtggatggctgactctgtggcctggaatccccacaagctcctcgcagcaggcctgcaatgctctgcacttcttctccaggatacctcgaacctgctcaagcgctgccatgggtcccaggccagctaccttttccagcaggacaagttctacgatgtggctctggacacgggagacaaggtggtgcagtgtggccgccgtgtggactgtctgaagctgtggctcatgtggaaggcacagggcgatcaagggctggagcggcgcatcgaccaggcctttgtccttgcccggtacctggtggaggaaatgaagaagcgggaagggtttgagctagtcatggagcctgagtttgtcaatgtgtgtttctggttcgtaccccccagcctgcgagggaagcaggagagtccagattaccacgaaaggctgtcaaaggtggcccccgtgctcaaggagcgcatggtgaaggagggctccatgatgattggctaccagccccacgggacccggggcaacttcttccgtgtggttgtggccaactctgcactgacctgtgctgatatggacttcctcctcaacgagctggagcggctaggccaggacctgtgagccttctctgtcttgctgccggccttgataccacccctcacccgcagagtcactgcattccctcccagcctttgaggccgggtgcagtggctcacgcctgtaatcccagcactttgggaggccgaggcgggtggatcacttgaggtcaggagttcgagaccagcctggccaataaggtgaaaccctgtctctactaaaaatacaaaaattagccgagcatggtggcctgtgcctgtaaacccagctactcaggaggttggggcagaattgcttgaacccagggggcagaggttgcagtgagccgagattgcacccctgcactccaggctgggcaacagtacgagactctgttccaaaaaaaataaaaaagaacagcctttttaggccacagtgacctgcgcaatgtttatatgctttgacctactaactttctcctaactaaatatttgattttaggagagtgtttaaataaattacagtatgtctatatgatgaaatgttattttgccattaaaattttgtttacaaagataatttttattgacataaaaataactttaatgtaatttatgttgaaaaagctgaatacaagtctttatatagagtaatatttgagctgtgttcaaaaatacataggaaaagactgataaaatgaaatatggcaaaatgttaatagttttccctggaataggataataggcaattttaaaacagactcctttaaaaaaacaaacaaacaaaaaaaacatagacttctttatatcttttgagctccctcccttttattatgtaatgaatatgtgttgcttttgtaataggaaaataataaagttaaaatttcaactgca

SEQ ID NO: 344571 - DNA, 929 bp, Homo sapiens
atccacttccgggctcggcagctagactagcgggggcagcctcagagcgggtgagcttggggacgcacggagaggtgcagctgggtgagtgggcggcgccgtgcgccgagggcatggaggagggagcgctgaggccggcgcgtgcgccgtggccggggcgcgccccggccgccatcgagactgagggcaggaccctcggcccttcgatgattgtacgctgggtgctcgatgggaggagggtttgctgggtgagctggttcagactccttgaaaaatcatcgtcactctttcttcctcgcggacgtcctgcccatcgctctgagccggcgccccaagtagagccagagtagttcgtacccagccttttcacgtaactcggccgaggtggttcttctccgaattttttccgtcaggcccagattagcagattttggggtcagctgggagaggcgttaacttttcttcgcacactcttgctttgtgcgctcaaccacagtctgaattctcgcagaggcgttccttgagtagcccttggccacactgctcacctccctgcagaagtcaaagccccagccctcctctgcgaatcccgaggccagcctggttggttaccttctccccttcgccctttactccaggccgtccagcatcaaacactagcctccacacgtggaaaagaccctgactcccacagtagactagtcttatgggagtcctggctcttgggccaggctgcattaggaaaatggaaaccagactgtcttcaaattcttctgcctagccttagccattagagagaggtcctgctaaagatggactgcaaatgcgcttgatggaaggagatgtcaattccactgaagtcctcatttctgctgtaggtgatattatgtcgtgactttaggagaagtaatggtgataccaaaagaaaa

SEQ ID NO: 344572 - DNA, 2174 bp, Homo sapiens
atccacttccgggctcggcagctagactagcgggggcagcctcagagcgggtgagcttggggacgcacggagaggtgcagctgggtgagtgggcggcgccgtgcgccgagggcatggaggagggagcgctgaggccggcgcgtgcgccgtggccggggcgcgccccggccgccatcgagactgagggcaggaccctcggcccttcgatgattgtacgctgggtgctcgatgggaggagggtttgctgggtgagctggttcagactccttgaaaaatcatcgtcactctttcttcctcgcggacgtcctgcccatcgctctgagccggcgccccaagtagagccagagtagttcgtacccagccttttcacgtaactcggccgaggtggttcttctccgaattttttccgtcaggcccagattagcagattttggggtcagctgggagaggcgttaacttttcttcgcacactcttgctttgtgcgctcaaccacagtctgaattctcgcagaggcgttccttgagtagcccttggccacactgctcacctccctgcagaagtcaaagccccagccctcctctgcgaatcccgaggccagcctggttggttaccttctccccttcgccctttactccaggccgtccagcatcaaacactagcctccacacgtggaaaagaccctgactcccacagtagactagtcttatgggagtcctggctcttgggccaggctgcattaggaaaatggaaaccagactgtcttcaaattcttctgcctagccttagccattagagagaggtcctgctaaagatggactgcaaatgcgcttgatggaaggagatgtcaattccactgaagtcctcatttctgctgagctacctgtgcaccctgcctccggctctcctgagcagagagatcctgatggctgactcagaagcactcccctcccttgctggggacccagtggctgtggaagccttgctccgggccgtgtttggggttgttgtggatgaggccattcagaaaggaaccagtgtctcccagaaggtctgtgagtggaaggagcctgaggagctgaagcagctgctggatttggagctgcggagccagggcgagtcacagaagcagatcctggagcggtgtcgggctgtgattcgctacagtgtcaagactggtcaccctcggttcttcaaccagctcttctctgggttggatccccatgctctggccgggcgcattatcactgagagcctcaacaccagccagtacacatatgaaatcgcccccgtgtttgtgctcatggaagaggaggtgctgaggaaactgcgggccctggtgggctggagctctggggacggaatcttctgccctggtggctccatctccaacatgtatgctgtaaatctggcccgctatcagcgctacccggattgcaagcagaggggcctccgcacactgccgcccctggccctattcacatcgaaggaggtggggaagaggcacaggcccaaccctgggctcctgattctaatctccagccagctaagtagagaccttccaggtcttctccctgccctccctacatcctccaaggccagcctgcccccaggcggatgtgcttccttccaatcaaggaggtcaagtaactgctcctgttcacattgccttctgtttgggggcagaggaggggccgtgagtgcagtggacacagtccatactcttcctactcaagagtgtggtctgtggaccagcagcattggtatgacctggggcttgttagaaatgcagaatctggccgggcacggtgactcacgcctgtaatcccagcactttgagaggctgaggtgggtggattgcctgagctcaggagtttgataccaccctgggaaacatagtgaaataaatagggaaaagcaatatcaggaaaagtattaaggagggatatttaatctattccattcaaaataacctttaaagtctttactgttatgatccttaacaaatacaacatacattcctaaagatttttccaagtcattctgtaactaaggagacaatatgatctttcaactagtttctcatctaattatgcttttacttcagcatggacgtactctgacctcaaccttccccagcaggttattttttgttacccctgcgtgacacctcagt

SEQ ID NO: 344573 - DNA, 1341 bp, Homo sapiens
ctcacccccccttcttgtattcttatggttgtatattttcagtttctgtctttatcttagctgcagttaatttttgtcaatgatgagaaatagtgagaaatgccacacggacctgtgatgcagtggaagaggtagcctaaagtcagaaagtcagtgatctaggcttgttcccatgtcacctttgtaattttggacaattagttcaccttctttcagctaagaatcctcatcttgaaaacaagaatgaataaatacctatttaggctaatttctaatactattgtgaaggtcaaataagataataaatgagaaggaaaaacaccctttgcaaatctattatcattactacagattcttggttgatgcaaatcaaatgtaagtagaatgcagcattttttccagtacctgcaaatcattgattgatttaacaaatgtttatgtaatgcctctgtgcaagtccctgggggaggggagaggacaatcaagaagatggaaactaacatttgaggggtccctgttttctattagtttacttaatgaaggaaaagacttagttctctccacccaggagagtacagtctagaagcagagaaaagattgtatacataggagcgtttgtgcctttattaatgtgggtgtggagccactagggtttgttgattgggagatagcacagagtactttagctttctaaccataaacctggctgagagcgcttcaggagacaattgcctagatccctttgtccccaggcaggcctcctcctgtgtgaccttccctaactccctcttccctcaggcccactccatcacttattcaaatagcattgcaatgactcctgctgagtcttttcctgcaccagctctctattgccttaaggagagccttagtgttttgtccttgaagcctgtcctgggccagttgaactttcctgcctttccatggtgacctctcaactccctcttgtggcaatttccctttattttacatgcaggtctctcttgccagcctgttagctggagcccacagggcagatgcagcacctagggtaatgccagccaggcgctcagaagtagacaacactcagtcaatgtttgctgaacaaactgaacccattcccttccctgagagccagcgggggttgaggggttgcgtaatagagatgagcagtgtgtggctccctttgccttccattagacctttgataacagtggattgaggagttgggaaaccacatgatgtgcaagggacattccttgagcctgatgatttgtatattttagaattcttgtacccccttaattctccagcctgggtgacagagggagactcttgtctcca

SEQ ID NO: 344574 - DNA, 1287 bp, Homo sapiens
ctcacccccccttcttgtattcttatggttgtatattttcagtttctgtctttatcttagctgcagttaatttttgtcaatgatgagaaatagtgagaaatgccacacggacctgtgatgcagtggaagaggtagcctaaagtcagaaagtcagtgatctaggcttgttcccatgtcacctttgtaattttggacaattagttcaccttctttcagctaagaatcctcatcttgaaaacaagaatgaataaatacctatttaggctaatttctaatactattgtgaaggtcaaataagataataaatgagaaggaaaaacaccctttgcaaatctattatcattactacagattcttggttgatgcaaatcaaatgtaagtagaatgcagcattttttccagtacctgcaaatcattgattgatttaacaaatgtttatgtaatgcctctgtgcaagtccctgggggaggggagaggacaatcaagaagatggaaactaacatttgaggggtccctgttttctattagtttacttaatgaaggaaaagacttagttctctccacccaggagagtacagtctagaagcagagaatagggtttgttgattgggagatagcacagagtactttagctttctaaccataaacctggctgagagcgcttcaggagacaattgcctagatccctttgtccccaggcaggcctcctcctgtgtgaccttccctaactccctcttccctcaggcccactccatcacttattcaaatagcattgcaatgactcctgctgagtcttttcctgcaccagctctctattgccttaaggagagccttagtgttttgtccttgaagcctgtcctgggccagttgaactttcctgcctttccatggtgacctctcaactccctcttgtggcaatttccctttattttacatgcaggtctctcttgccagcctgttagctggagcccacagggcagatgcagcacctagggtaatgccagccaggcgctcagaagtagacaacactcagtcaatgtttgctgaacaaactgaacccattcccttccctgagagccagcgggggttgaggggttgcgtaatagagatgagcagtgtgtggctccctttgccttccattagacctttgataacagtggattgaggagttgggaaaccacatgatgtgcaagggacattccttgagcctgatgatttgtatattttagaattcttgtacccccttaattctccagcctgggtgacagagggagactcttgtctcca

SEQ ID NO: 344575 - DNA, 412 bp, Homo sapiens
cttctgtttgggggcagaggaggggccgtgagtgcagtggacacagtccatactcttcctactcaagagtgtggtctgtggaccagcagcattggtatgacctggggcttgttagaaatgcagaatctggccgggcacggtgactcacgcctgtaatcccagcactttgagaggctgaggtgggtggattgcctgagctcaggagtttgataccaccctgggaaacatagtgaaaccccctctttactaaaatacaaaaaattagccaggcatggtggtgggcacctgtagtcccagctgcttaggaggctgaggcacgagaattgcttgaacctgggaggcggaagttgcagtgagccgagatgacaccactgcactccagcctgggtgacagagggagactcttgtctcc

SEQ ID NO: 344576 - DNA, 1993 bp, Homo sapiens
gcttggggacgcacggagaggtgcagctggggtggctcacgcctgtggtcccggcgcgttgggaggccgagagagggaatgactctgctctgccacagatcctgatggctgactcagaagcactcccctcccttgctggggacccagtggctgtggaagccttgctccgggccgtgtttggggttgttgtggatgaggccattcagaaaggaaccagtgtctcccagaagtgtcactactccatccagaagggagctgcgtttctgggacttggcaccgacagtgtccgagtggtcaaggctgatgagagagggaaaatggtccccgaggatctggagaggcagattggtatggccgaggctgagggtgctgtgccgttcctggtcagtgccacctctggcaccactgtgctaggggcctttgaccccctggaggcaattgctgatgtgtgccagcgtcatgggctatggctgcatgtggatgctgcctggggtgggagcgtcctgctgtcacagacacacaggcatctcctggatgggatccagagggctgactctgtggcctggaatccccacaagctcctcgcagcaggcctgcaatgctctgcacttcttctccaggatacctcgaacctgctcaagcgctgccatgggtcccaggccagctaccttttccagcaggacaagttctacgatgtggctctggacacgggagacaaggtggtgcagtgtggccgccgtgtggactgtctgaagctgtggctcatgtggaaggcacagggcgatcaagggctggagcggcgcatcgaccaggcctttgtccttgcccggtacctggtggaggaaatgaagaagcgggaagggtttgagctagtcatggagcctgagtttgtcaatgtgtgtttctggttcgtaccccccagcctgcgagggaagcaggagagtccagattaccacgaaaggctgtcaaaggtggcccccgtgctcaaggagcgcatggtgaaggagggctccatgatgattggctaccagccccacgggacccggggcaacttcttccgtgtggttgtggccaactctgcactgacctgtgctgatatggacttcctcctcaacgagctggagcggctaggccaggacctgtgagccttctctgtcttgctgccggccttgataccacccctcacccgcagagtcactgcattccctcccagcctttgaggccgggtgcagtggctcacgcctgtaatcccagcactttgggaggccgaggcgggtggatcacttgaggtcaggagttcgagaccagcctggccaataaggtgaaaccctgtctctactaaaaatacaaaaattagccgagcatggtggcctgtgcctgtaaacccagctactcaggaggttggggcagaattgcttgaacccagggggcagaggttgcagtgagccgagattgcacccctgcactccaggctgggcaacagtacgagactctgttccaaaaaaaataaaaaagaacagcctttttaggccacagtgacctgcgcaatgtttatatgctttgacctactaactttctcctaactaaatatttgattttaggagagtgtttaaataaattacagtatgtctatatgatgaaatgttattttgccattaaaattttgtttacaaagataatttttattgacataaaaataactttaatgtaatttatgttgaaaaagctgaatacaagtctttatatagagtaatatttgagctgtgttcaaaaatacataggaaaagactgataaaatgaaatatggcaaaatgttaatagttttccctggaataggataataggcaattttaaaacagactcctttaaaaaaacaaacaaacaaaaaaaacatagacttctttatatcttttgagctccctcccttttattatgtaatgaatatgtgttgcttttgtaataggaaaataataaagttaaaatttcaactgca

SEQ ID NO: 344577 - DNA, 2411 bp, Homo sapiens
atccacttccgggctcggcagctagactagcgggggcagcctcagagcgggtgagcttggggacgcacggagaggtgcagctgggagctacctgtgcaccctgcctccggctctcctgagcagagagatcctgatggctgactcagaagcactcccctcccttgctggggacccagtggctgtggaagccttgctccgggccgtgtttggggttgttgtggatgaggccattcagaaaggaaccagtgtctcccagaaggtctgtgagtggaaggagcctgaggagctgaagcagctgctggatttggagctgcggagccagggcgagtcacagaagcagatcctggagcggtgtcgggctgtgattcgctacagtgtcaagactggtcaccctcggttcttcaaccagctcttctctgggttggatccccatgctctggccgggcgcattatcactgagagcctcaacaccagccagtacacatatgaaatcgcccccgtgtttgtgctcatggaagaggaggtgctgaggaaactgcgggccctggtgggctggagctctggggacggaatcttctgccctggtggctccatctccaacatgtatgctgtaaatctggcccgctatcagcgctacccggattgcaagcagaggggcctccgcacactgccgcccctggccctattcacatcgaaggagtgtcactactccatccagaagggagctgcgtttctgggacttggcaccgacagtgtccgagtggtcaaggctgatgagagagggaaaatggtccccgaggatctggagaggcagattggtatggccgaggctgagggtgctgtgccgttcctggtcagtgccacctctggcaccactgtgctaggggcctttgaccccctggaggcaattgctgatgtgtgccagcgtcatgggctatggctgcatgtggatgctgcctggggtgggagcgtcctgctgtcacagacacacaggcatctcctggatgggatccagagggctgactctgtggcctggaatccccacaagctcctcgcagcaggcctgcaatgctctgcacttcttctccaggatacctcgaacctgctcaagcgctgccatgggtcccaggccagctaccttttccagcaggacaagttctacgatgtggctctggacacgggagacaaggtggtgcagtgtggccgccgtgtggactgtctgaagctgtggctcatgtggaaggcacagggcgatcaagggctggagcggcgcatcgaccaggcctttgtccttgcccggtacctggtggaggaaatgaagaagcgggaagggtttgagctagtcatggagcctgagtttgtcaatgtgtgtttctggttcgtaccccccagcctgcgagggaagcaggagagtccagattaccacgaaaggctgtcaaaggtggcccccgtgctcaaggagcgcatggtgaaggagggctccatgatgattggctaccagccccacgggacccggggcaacttcttccgtgtggttgtggccaactctgcactgacctgtgctgatatggacttcctcctcaacgagctggagcggctaggccaggacctgtgagccttctctgtcttgctgccggccttgataccacccggctcacgcctgtaatcccagcactttgggaggccgaggcgggtggatcacttgaggtcaggagttcgagaccagcctggccaataaggtgaaaccctgtctctactaaaaatacaaaaattagccgagcatggtggcctgtgcctgtaaacccagctactcaggaggttggggcagaattgcttgaacccagggggcagaggttgcagtgagccgagattgcacccctgcactccaggctgggcaacagtacgagactctgttccaaaaaaaataaaaaagaacagcctttttaggccacagtgacctgcgcaatgtttatatgctttgacctactaactttctcctaactaaatatttgattttaggagagtgtttaaataaattacagtatgtctatatgatgaaatgttattttgccattaaaattttgtttacaaagataatttttattgacataaaaataactttaatgtaatttatgttgaaaaagctgaatacaagtctttatatagagtaatatttgagctgtgttcaaaaatacataggaaaagactgataaaatgaaatatggcaaaatgttaatagttttccctggaataggataataggcaattttaaaacagactcctttaaaaaaacaaacaaacaaaaaaaacatagacttctttatatcttttgagctccctcccttttattatgtaatgaatatgtgttgcttttgtaataggaaaataataaagttaaaatttcaactgca

SEQ ID NO: 344578 - DNA, 3030 bp, Homo sapiens
atccacttccgggctcggcagctagactagcgggggcagcctcagagcgggtgagcttggggacgcacggagaggtgcagctgggtgagtgggcggcgccgtgcgccgagggcatggaggagggagcgctgaggccggcgcgtgcgccgtggccggggcgcgccccggccgccatcgagactgagggcaggaccctcggcccttcgatgattgtacgctgggtgctcgatgggaggagggtttgctgggtgagctggttcagactccttgaaaaatcatcgtcactctttcttcctcgcggacgtcctgcccatcgctctgagccggcgccccaagtagagccagagtagttcgtacccagccttttcacgtaactcggccgaggtggttcttctccgaattttttccgtcaggcccagattagcagattttggggtcagctgggagaggcgttaacttttcttcgcacactcttgctttgtgcgctcaaccacagtctgaattctcgcagaggcgttccttgagtagcccttggccacactgctcacctccctgcagaagtcaaagccccagccctcctctgcgaatcccgaggccagcctggttggttaccttctccccttcgccctttactccaggccgtccagcatcaaacactagcctccacacgtggaaaagaccctgactcccacagtagactagtcttatgggagtcctggctcttgggccaggctgcattaggaaaatggaaaccagactgtcttcaaattcttctgcctagccttagccattagagagaggtcctgctaaagatggactgcaaatgcgcttgatggaaggagatgtcaattccactgaagtcctcatttctgctgagctacctgtgcaccctgcctccggctctcctgagcagagagatcctgatggctgactcagaagcactcccctcccttgctggggacccagtggctgtggaagccttgctccgggccgtgtttggggttgttgtggatgaggccattcagaaaggaaccagtgtctcccagaaggtctgtgagtggaaggagcctgaggagctgaagcagctgctggatttggagctgcggagccagggcgagtcacagaagcagatcctggagcggtgtcgggctgtgattcgctacagtgtcaagactggtcaccctcggttcttcaaccagctcttctctgggttggatccccatgctctggccgggcgcattatcactgagagcctcaacaccagccatgtcactactccatccagaagggagctgcgtttctgggacttggcaccgacagtgtccgagtggtcaaggctgatgagagagggaaaatggtccccgaggatctggagaggcagattggtatggccgaggctgagggtgctgtgccgttcctggtcagtgccacctctggcaccactgtgctaggggcctttgaccccctggaggcaattgctgatgtgtgccagcgtcatgggctatggctgcatgtggatgctgcctggggtgggagcgtcctgctgtcacagacacacaggcatctcctggatgggatccagagggctgactctgtggcctggaatccccacaagctcctcgcagcaggcctgcaatgctctgcacttcttctccaggatacctcgaacctgctcaagcgctgccatgggtcccaggccagctaccttttccagcaggacaagttctacgatgtggctctggacacgggagacaaggtggtgcagtgtggccgccgtgtggactgtctgaagctgtggctcatgtggaaggcacagggcgatcaagggctggagcggcgcatcgaccaggcctttgtccttgcccggtacctggtggaggaaatgaagaagcgggaagggtttgagctagtcatggagcctgagtttgtcaatgtgtgtttctggttcgtaccccccagcctgcgagggaagcaggagagtccagattaccacgaaaggctgtcaaaggtggcccccgtgctcaaggagcgcatggtgaaggagggctccatgatgattggctaccagccccacgggacccggggcaacttcttccgtgtggttgtggccaactctgcactgacctgtgctgatatggacttcctcctcaacgagctggagcggctaggccaggacctgtgagccttctctgtcttgctgccggccttgataccacccctcacccgcagagtcactgcattccctcccagcctttgaggccgggtgcagtggctcacgcctgtaatcccagcactttgggaggccgaggcgggtggatcacttgaggtcaggagttcgagaccagcctggccaataaggtgaaaccctgtctctactaaaaatacaaaaattagccgagcatggtggcctgtgcctgtaaacccagctactcaggaggttggggcagaattgcttgaacccagggggcagaggttgcagtgagccgagattgcacccctgcactccaggctgggcaacagtacgagactctgttccaaaaaaaataaaaaagaacagcctttttaggccacagtgacctgcgcaatgtttatatgctttgacctactaactttctcctaactaaatatttgattttaggagagtgtttaaataaattacagtatgtctatatgatgaaatgttattttgccattaaaattttgtttacaaagataatttttattgacataaaaataactttaatgtaatttatgttgaaaaagctgaatacaagtctttatatagagtaatatttgagctgtgttcaaaaatacataggaaaagactgataaaatgaaatatggcaaaatgttaatagttttccctggaataggataataggcaattttaaaacagactcctttaaaaaaacaaacaaacaaaaaaaacatagacttctttatatcttttgagctccctcccttttattatgtaatgaatatgtgttgcttttgtaataggaaaataataaagttaaaatttcaactgca

SEQ ID NO: 344579 - DNA, 3147 bp, Homo sapiens
atccacttccgggctcggcagctagactagcgggggcagcctcagagcgggtgagcttggggacgcacggagaggtgcagctgggtgagtgggcggcgccgtgcgccgagggcatggaggagggagcgctgaggccggcgcgtgcgccgtggccggggcgcgccccggccgccatcgagactgagggcaggaccctcggcccttcgatgattgtacgctgggtgctcgatgggaggagggtttgctgggtgagctggttcagactccttgaaaaatcatcgtcactctttcttcctcgcggacgtcctgcccatcgctctgagccggcgccccaagtagagccagagtagttcgtacccagccttttcacgtaactcggccgaggtggttcttctccgaattttttccgtcaggcccagattagcagattttggggtcagctgggagaggcgttaacttttcttcgcacactcttgctttgtgcgctcaaccacagtctgaattctcgcagaggcgttccttgagtagcccttggccacactgctcacctccctgcagaagtcaaagccccagccctcctctgcgaatcccgaggccagcctggttggttaccttctccccttcgccctttactccaggccgtccagcatcaaacactagcctccacacgtggaaaagaccctgactcccacagtagactagtcttatgggagtcctggctcttgggccaggctgcattaggaaaatggaaaccagactgtcttcaaattcttctgcctagccttagccattagagagaggtcctgctaaagatggactgcaaatgcgcttgatggaaggagatgtcaattccactgaagtcctcatttctgctgagctacctgtgcaccctgcctccggctctcctgagcagagagatcctgatggctgactcagaagcactcccctcccttgctggggacccagtggctgtggaagccttgctccgggccgtgtttggggttgttgtggatgaggccattcagaaaggaaccagtgtctcccagaaggtctgtgagtggaaggagcctgaggagctgaagcagctgctggatttggagctgcggagccagggcgagtcacagaagcagatcctggagcggtgtcgggctgtgattcgctacagtgtcaagactggtcaccctcggttcttcaaccagctcttctctgggttggatccccatgctctggccgggcgcattatcactgagagcctcaacaccagccagtacacatatgaaatcgcccccgtgtttgtgctcatggaagaggaggtgctgaggaaactgcgggccctggtgggctggagctctggggacggaatcttctgccctggtggctccatctccaacatgtatgctgtaaatctggcccgctatcagcgctacccggattgcaagcagaggggcctccgcacactgccgcccctggccctattcacatcgaaggagtgtcactactccatccagaagggagctgcgtttctgggacttggcaccgacagtgtccgagtggtcaaggctgatgagagagggaaaatggtccccgaggatctggagaggcagattggtatggccgaggctgagggtgctgtgccgttcctggtcagtgccacctctggcaccactgtgctaggggcctttgaccccctggaggcaattgctgatgtgtgccagcgtcatgggctatggctgcatgtggatggctgactctgtggcctggaatccccacaagctcctcgcagcaggcctgcaatgctctgcacttcttctccaggatacctcgaacctgctcaagcgctgccatgggtcccaggccagctaccttttccagcaggacaagttctacgatgtggctctggacacgggagacaaggtggtgcagtgtggccgccgtgtggactgtctgaagctgtggctcatgtggaaggcacagggcgatcaagggctggagcggcgcatcgaccaggcctttgtccttgcccggtacctggtggaggaaatgaagaagcgggaagggtttgagctagtcatggagcctgcgagggaagcaggagagtccagattaccacgaaaggctgtcaaaggtggcccccgtgctcaaggagcgcatggtgaaggagggctccatgatgattggctaccagccccacgggacccggggcaacttcttccgtgtggttgtggccaactctgcactgacctgtgctgatatggacttcctcctcaacgagctggagcggctaggccaggacctgtgagccttctctgtcttgctgccggccttgataccacccctcacccgcagagtcactgcattccctcccagcctttgaggccgggtgcagtggctcacgcctgtaatcccagcactttgggaggccgaggcgggtggatcacttgaggtcaggagttcgagaccagcctggccaataaggtgaaaccctgtctctactaaaaatacaaaaattagccgagcatggtggcctgtgcctgtaaacccagctactcaggaggttggggcagaattgcttgaacccagggggcagaggttgcagtgagccgagattgcacccctgcactccaggctgggcaacagtacgagactctgttccaaaaaaaataaaaaagaacagcctttttaggccacagtgacctgcgcaatgtttatatgctttgacctactaactttctcctaactaaatatttgattttaggagagtgtttaaataaattacagtatgtctatatgatgaaatgttattttgccattaaaattttgtttacaaagataatttttattgacataaaaataactttaatgtaatttatgttgaaaaagctgaatacaagtctttatatagagtaatatttgagctgtgttcaaaaatacataggaaaagactgataaaatgaaatatggcaaaatgttaatagttttccctggaataggataataggcaattttaaaacagactcctttaaaaaaacaaacaaacaaaaaaaacatagacttctttatatcttttgagctccctcccttttattatgtaatgaatatgtgttgcttttgtaataggaaaataataaagttaaaatttcaactgca

SEQ ID NO: 344580 - DNA, 1955 bp, Homo sapiens
atccacttccgggctcggcagctagactagcgggggcagcctcagagcgggtgagcttggggacgcacggagaggtgcagctgggtgagtgggcggcgccgtgcgccgagggcatggaggagggagcgctgaggccggcgcgtgcgccgtggccggggcgcgccccggccgccatcgagactgagggcaggaccctcggcccttcgatgattgtacgctgggtgctcgatgggaggagggtttgctgggtgagctggttcagactccttgaaaaatcatcgtcactctttcttcctcgcggacgtcctgcccatcgctctgagccggcgccccaagtagagccagagtagttcgtacccagccttttcacgtaactcggccgaggtggttcttctccgaattttttccgtcaggcccagattagcagattttggggtcagctgggagaggcgttaacttttcttcgcacactcttgctttgtgcgctcaaccacagtctgaattctcgcagaggcgttccttgagtagcccttggccacactgctcacctccctgcagaagtcaaagccccagccctcctctgcgaatcccgaggccagcctggttggttaccttctccccttcgccctttactccaggccgtccagcatcaaacactagcctccacacgtggaaaagaccctgactcccacagtagactagtcttatgggagtcctggctcttgggccaggctgcattaggaaaatggaaaccagactgtcttcaaattcttctgcctagccttagccattagagagaggtcctgctaaagatggactgcaaatgcgcttgatggaaggagatgtcaattccactgaagtcctcatttctgctgagctacctgtgcaccctgcctccggctctcctgagcagagagatcctgatggctgactcagaagcactcccctcccttgctggggacccagtggctgtggaagccttgctccgggccgtgtttggggttgttgtggatgaggccattcagaaaggaaccagtgtctcccagaaggtctgtgagtggaaggagcctgaggagctgaagcagctgctggatttggagctgcggagccagggcgagtcacagaagcagatcctggagcggtgtcgggctgtgattcgctacagtgtcaagactggtcaccctcggttcttcaaccagctcttctctgggttggatccccatgctctggccgggcgcattatcactgagagcctcaacaccagccagtacacatatgaaatcgcccccgtgtttgtgctcatggaagaggaggtgctgaggaaactgcgggccctggtgggctggagctctggggacggaatcttctgccctggtggctccatctccaacatgtatgctgtaaatctggcccgctatcagcgctacccggattgcaagcagaggggcctccgcacactgccgcccctggccctattcacatcgaaggagtgtcactactccatccagaagggagctgcgtttctgggacttggcaccgacagtgtccgagtggtcaaggctgatgagagagggaaaatggtccccgaggatctggagaggcagattggtatggccgaggctgaggtgagtcagtgaggctcgctggggtgatatagcctccaactgtcttggagggttatttgggctctcctttctcaaggcatccttcatccctctcgtctccatgcccatctcccctgtgggctgaagtgaccatggagagcctgggggtgaggacactacattgctttctggggctctgcccagacacctacgccgggttggattctgagaggcagggctgagtgagggagcgagtcccaggcagcaccacagggagggtgctgggggcctgcgctgtagtgtggaaggttcctgtgggctgtgagggtctgcgcagggagaggctgagga

SEQ ID NO: 344581 - DNA, 1705 bp, Homo sapiens
cgcaccttgggctggaatgtgtctccaggcaaaagtacaggcaattataaggctctcctcatttgtttcttctctctcagggaccacagttctgtactgcttgttgaccaatgcttgaaaactgttatttcatatcttttgtccagtttttaaattatttacagtgggaggattagtccagtcccacttcctccagaaagagtaattctggaatctcatttttattttctaatgcaacatagtggtaagacctccactctgaattagaaagacctgaatttgaattctagctctgaattgaataaatagcttcttaatattgtggttttcttttaagtggggataatgaaattccctatctcctgagattattgtgaagatttactgaattaggcattgtattaatttactgtggctgctgtaacaaattactacaaactgggtgacttaaaacacagttttggagaccaaaagtccaaaacagtttcactgagctgaaatcaaggtgtcaataggaccacggtccttcgcgggccctaggggggattcattccttgcctcttccaccttctgatggccacaggcctttggcttatggctgcatcactccaatctctgccttcatagttacattcttttctcctcttctctctgtatcaaattcccctctgcccctttcttataaggattgcatttaggacccgcccagataatctaggataatcccctcatttttaagatccttaatcacatctgcaacccatttttcttacaaggcaacatttacaagtttcagggattagaacatgatgtctttctgtggccattatttagcctactacgaggtgataaagcatttgacacacattcactaataatcaaaacatttaacaaacactacaaggcaccaaggcaccaacctatcagataataatcaccaactaataagaatggatgctggccacaaacccccctaacagtgcctttggctgaatagcagccctgtacttgccatatgccagcatctcacacatcctatacaccgaataaatatgagttcattgagatccgacttaagtcatttctactacttcttaaatgtctgggcatgttctttggtcatttatttgcagggtcttgtgttctgcttctctatttgtctgagtacttcatatagggaggatgctaacattcgcatatttgtgacaaatgtttgcattatattgtgttaatattttctaaatcttatacttgattatatgtatctagataatatgttcttaaccttcatttttaaatatatacatttaaattgagtatatggcttattatctcattaggttgtattaaacttaatgaaataaatatactgatatacactaactaggctttttgaatgcaagattcttctttaaatctttttctttgcaaacaaaaggatctctgttttccccaaagataagcaaatttgtcatggccagtttttattatgcttaaacatgcacttataaaatagagatgttagagttaaatgtgaattgcaaagacttgttttttttttttttttttttggagacagtgtctctgtagcccaggctggagtgcagtgatgcaatcacagctcactgcaacctcaaactcctggacttaagcaatcttccagtctcagcctcccaagtagctgggggaatacagggacacacca

SEQ ID NO: 344582 - DNA, 918 bp, Homo sapiens
cgcaccttgggctggaatgtgtctccaggcaaaagtacaggcaattataaggctctcctcatttgtttcttctctctcagggaccacagttctgtactgcttgttgaccaatgcttgaaaactgttatttcatatcttttgtccagtttttaaattatttacagtgggaggattagtccagtcccacttcctccagaaagagtaattctggaatctcatttttattttctaatgcaacatagtggtaagacctccactctgaattagaaagacctgaatttgaattctagctctgaattgaataaatagcttcttaatattgtggttttcttttaagtggggataatgaaattccctatctcctgagattattgtgaagatttactgaattaggcattgtattaatttactgtggctgctgtaacaaattactacaaactgggtgacttaaaacacagttttggagaccaaaagtccaaaacagtttcactgagctgaaatcaaggtgtcaataggaccacggtccttcgcgggccctaggggggattcattccttgcctcttccaccttctgatggccacaggcctttggcttatggctgcatcactccaatctctgccttcatagttacattcttttctcctcttctctctgtatcaaattcccctctgcccctttcttataaggattgcatttaggacccgcccagataatctaggataatcccctcatttttaagatccttaatcacatctgcaacccatttttcttacaaggcaacatttacaagtttcagggattagaacatgatgtctttctgtggccattatttagcctactacgaggtgataaagcatttgacacacattcactaataatcaaaacattaacgaccttgcatccgaggggatcctctga

SEQ ID NO: 344583 - DNA, 686 bp, Homo sapiens
ggggggtggctcagggggcaagggcaaaggaggttgcccggctgtgcggctgaaagcacgttaccagacaatgagcatcttgcccatggagctatataaagagtttgcagagtatgtcaccaaccattatcggatgctgtgtgcagtcttggagcccgccctgaatgtcaaaggcaaggaggaggttgccagtgcactagttcacatcctgcagagtacaggcaaggccaaggacttcctttcagacatggccatgtctgaggtagaccggttcatggaacgggagcacctcatattccgcgagaacacgcttgccactaaagccatagaagagtatatgagactgattggtcagaaatacctcaaggatgccattggagaattcatccgtgctctgtatgaatctgaggaaaactgcgaggtagaccctatcaagtgcacagcatccagtttggcagagcaccaggccaacctgcgaatgtgctgtgagttggccctgtgcaaggtggtcaactcccactggtgagactgggaacgctgggctggggggccagggtcgggggaattatgtgttcatctgttcatctatctgtccatcctcaaagaggactgagcaccatttatgggcaaagcattgttctaggcgctatagagcaaacaggtgaaagaggcctggtccctgccct

SEQ ID NO: 344584 - DNA, 761 bp, Homo sapiens
ggggggtggctcagggggcaagggcaaaggaggttgcccggctgtgcggctgaaagcacgttaccagacaatgagcatcttgcccatggagctatataaagagtttgcagagtatgtcaccaaccattatcggatgctgtgtgcagtcttggagcccgccctgaatgtcaaaggcaaggaggaggttgccagtgcactagttcacatcctgcagagtacaggcaaggccaaggacttcctttcagacatggccatgtctgaggtagaccggttcatggaacgggagcacctcatattccgcgagaacacgcttgccactaaagccatagaagagtatatgagactgattggtcagaaatacctcaaggatgccattggagaattcatccgtgctctgtatgaatctgaggaaaactgcgaggtagaccctatcaagtgcacagcatccagtttggcagagcaccaggccaacctgcgaatgtgctgtgagttggccctgtgcaaggtggtcaactcccactgcgtgttcccgagggagctgaaggaggtgtttgcttcgtggcggctgcgctgcgcagagcgaggccgggaggacatcgcagacaggcttatcagcgcctcactcttcctgcgcttcctctgcccagcgattatgtcgcccagtctctttgggcttatgcaggagtacccagatgagcagacctcacgaaccctcaccctcattgccaaggtcatccagaacctggccaacttttccaagt

SEQ ID NO: 344585 - DNA, 545 bp, Homo sapiens
ggggggtggctcagggggcaagggcaaaggaggttgcccggctgtgcggctgaaagcacgttaccagacaatgagcatcttgcccatggagctatataaagagtttgcagagtatgtcaccaaccattatcggatgctgtgtgcagtcttggagcccgccctgaatgtcaaaggcaaggaggaggttgccagtgcactagttcacatcctgcagagtacaggcaaggccaaggacttcctttcagacatggccatgtctgaggtagaccggttcatggaacgggagcacctcatattccgcgagaacacgcttgccactaaagccatagaagagtatatgagactgattggtcagaaatacctcaaggatgccattggagaattcatccgtgctctgtatgaatctgaggaaaactgcgaggtagaccctatcaagtgcacagcatccagtttggcagagcaccaggccaacctgcgaatgtgctgtgagttggccctgtgcaaggtggtcaactcccactgcctcccatcttgctcctgcggtc

SEQ ID NO: 344586 - DNA, 708 bp, Homo sapiens
tccaagatccagatgctgtcatgtttggtgtatggttagggaacacgtcctagttcatgaatgctttttctctgtgccctcacttggcagaaggggtgaaggagatctggggtctgttgtatagagcactaagcactaatcccattcattagggcttcgctctcatgaccaactacctgtaaaaatcccccctcctaataccgtcacatctgtgattggctttcagcatataaattttggggaagacaaacattcagaccacagcagatgtttattatttcctttcctctgcttgctttgggtttatgtcactcttcttttatctagttgcttaaggtagaagtcaaagtcattgatttaagactcttctaatgtagacattcagcagtgctaaaaatttgtattcaagtacagctgtagctgcattccacaaattctggttgatgaatttttattcagttcagaatattttctattttctatttctattttcattacctgtttgacccagggttatttagatgtgtgttacttagtttccaaatatttgtgtatttcccagagttatttttgttatcggtctttaatctgattgatttgtggtcagggcacatactttgtatgagttaaatccttctgactcaatcctttaattgagagttgttgtatggcctaaaatatggtctattttggtaagtgttccgtggg

SEQ ID NO: 344587 - DNA, 759 bp, Homo sapiens
gcagctgccccaggccaaatttctgcctgcctgccagcagcctcaacaggcacagctcctccctcacagtggcccatttaggcccaactcatgactgtgaggccatttccaggcctagtgcctgcctcgtggctgactcttgaagcccaaaacttcctcaaatcaggcttttgcccaacttctgtctactgtcggactctacaggtcagcctctgcctcacagtggaccctccagacccagatggtgtctcactgtggcatcctcaggcgaagctcctgcctttcggcagcctctccaggcccagctcctcctgcctcccagtggcctctttcggcccagcccagctcatgcctcccggcggccttcccaagccccgcttttgactttcggtggcctctgcaggcctcgacaaggcccagcctcctgcctcccgaaggcctgcacaggcccagcctctgcctcacagcggactctccacgcccagctagctgttgcttcactgcggcctcccgagtccaaagctcctgcctctcggccgcttcggcaggcccagctcccgcctgccagtggcctcttcaggcccatggggctcattcctgacaacggcctttccaggcccagtttttcccttccggcggcctctccgggcccagaacctcctcaagtcagcctctccagacccacttgcaccctccgggcattctctccgggcccagctcttcttcctggttgggtctccaggcccgattcctgcctct

SEQ ID NO: 344588 - DNA, 435 bp, Homo sapiens
atgtgggtctgaagagctgtgagagacttcggggtctacaaacgcaggcgggagctgagccaaaagagctggttggctgggaggtgggagatgcagccgggaggaacagctcccgtcagcctctacagtcccaacgtctgcctcacagcagattcttcaggcccagcatctgcctcactgtggaccccccaagccaagctcccaacctttcagcagcttctacacacccactcccgcctgccagtggcctcttcaggcccatggggctcattcctgacaacggcctttccaggcccagtttttcccttccggcggcctctccgggcccagaacctcctcaagtcagcctctccagacccacttgcaccctccgggcattctctccgggcccagctcttcttcctggttgggtctccaggcccgattcctgcctct

SEQ ID NO: 344589 - DNA, 414 bp, Homo sapiens
atgtgggtctgaagagctgtgagagacttcggggtctacaaacgcaggcgggagctgagccaaaagagctggttggctgggaggtgggagatgcagccgggaggaacagctcccgtcagcctctacagtcccaacgtctgcctcacagcagattcttcaggcccagcatctgcctcactgtggaccccccaagccaagctcccaacctttcagcagcttctacacacccagctcctgccacccagtggcctctttaggccaagctcatgcttcacaagggcctttccaggcccaacttttgtctcatggcaaccttccctggccagattcctgcctgtctcccagcagcctagacaggcccaggtcttgcctcacactggcctctctacatccagcttatgcctcacggtggcc

SEQ ID NO: 344590 - DNA, 418 bp, Homo sapiens
ctcagtcccccgagtagctgggagtacaggtgcgtgtcaccgtgctcggctaattttttgtattttttctagagacaggttttgccatgttgccgagtttggtctcaaactctgagcttcaagtgatcctcacccttcatcctcccaaagtgctgcgacgacaggtgtgggctaccatgcctggccaagaaggtcatttttatcatttgattctacagctgctactcacggttacactgtgagaatgtcctgtataaaagcccttatttgggccaggtgtggtgacgctcgcctgtaatcccagcagtctgggaggccaaggcaggtggatcacttgaggtcaggagttcaaaaccagtctgggcaacattggtaaaaccccatctccaccaaaaaaaatagaaaaatgagccaggca

SEQ ID NO: 344591 - DNA, 156 bp, Homo sapiens
cagtccctacactatgcagatctgcccaggtgtaaacactatctcagcccctagtgttcttctatacatagcatatggcattcaataaaaaattacaacacacatataaaagcaagggtgggaggggggaaagacattgttaaaacaatctacaga

SEQ ID NO: 344592 - DNA, 767 bp, Homo sapiens
ccttttgttttattgtgtaacattgatgtgtgttacagcctaggtagtctcaaaataggaaattatcttgctggtttttccagctgggcaatttatatttatttagtcttccatttattccatttaaatgttaatttattttgccatttactgttcaaaggaaaaggagagctctattcagaagaccatatcagggatcctgtagcatttctcatatttctgtattttttgccactgtggttctttcttgtttctgtgccatgacccctttgaggaactgaagaatgctcattgtatatatgtttagaataggacaagtaataacaaacttccaaatctcaatggcttaacaaaacagaggtttatttcttgttgacatcacagactactgtgaatcaggtgatcttcctcaatcttacagccgtgcctatcgaatatgaggttccaagattgtgatacaaagatacggcaggatgtctcaggggatgatttttaggatctaagcttagaagtagcttacatcacttctgctcaaattctgttagctaaaactcactgtcatcttcccaaatattatctgtgtgctctttgctatttcccagacccctgttcatggagtttctgctacattccatctttctagtcaccaaacagctcttggcttctttctttacccatgcataacacacttagtctctctccttagggagaaatcccaaagtcccattccatcattgcaccccggccccaaatccatgatctccaga

SEQ ID NO: 344593 - DNA, 526 bp, Homo sapiens
attccaacagtaaataaaatgaaaatagcttaagaaaactaataaaagcaaaccaagcaaagctaagacaattttgtattccctttctgctttcacctcttgtgcctatcttgctcctaaccacttagactcccccagataagctaactgggtccatgagaatttcctgaaaatgcctatcctaaagtcaaatggagaataatgattctcaagacacacccctcccttgttctttcttttcccttctactcccacatatttaaatctcaaaatttcttaggtggcagattcagagaaggaaaaacggaagaaaaatctatttctaagattctgcgtaccaaagactaaatctcagagtactttagaccagagtattccttttttgggaaaagctttatttatgggttgataggtaacaaataggtaagtactctctattccacttgaagtaataatgaacagatggggccagatgacttgggctagaaatctctacatcctaattttttccctcaaacctagacca

SEQ ID NO: 344594 - DNA, 278 bp, Homo sapiens
tgtacaatttttcagacaacagtttcaaacatgttttcacttcatgaaagttttcttgaaagacagttaatgtttgctctgttcctctgaatattgtttctttggagattcctactataaaaacactgtatttctattgcctattatcaatatttgccactttctcatgagcccttttagacttttaaaatgttcttgtcttttatcttcaatttctctgaagatgttttaattttatttatttttaaattgctgttttctgtagccataaggttttg

SEQ ID NO: 344595 - DNA, 419 bp, Homo sapiens
ggtttcgcaggacttagtcataggcacgtttcataatactctcctgcacgtttcataatactctcctgcatgcccctaaacacagcacctcgagcattgaactctgacatcagttgagaagatgatacccctctagctggtgcttaagccttctggcttaagcctggacttgatctctgacccctttctcttccagactgcaccctgctttcatttccaatccgtctccaaggcctgttgcttctacctctggaagaccttgactccacctgataacctctatctccgctgccatccgcgaggttcaagctgtcatcctccctctcctggaccattccagtagccttcttacatgagggctacacttctaccctgccccttccaaaccagagcacccactcagatcctgccaacccttg

SEQ ID NO: 344596 - DNA, 445 bp, Homo sapiens
ccctcatttatttttggttttggatgaggaaagtcatgttttctaagtcctctcccctaataaaacctacccaacaatagtgctttgaaaagtggtagttatcttgaagatactcttgccaaatgcaaagataaacattctttttgtctgctttataaatatgaaatatgccagatctatagtattttaatgtgcatctactttaaatgagtcatcttggggtttttataattcccttacattcttgcccctctacacttgaaataacaaaatgccttaattttatagattagttctcttatagtagacaggcagctatatgcagcaaaaccaataaagttatttttcaactttcatagttgtaaaatattttatagcaatacaaaacagctaagaaaacatgccacattttattttagcattttcaaataatttgtttttggtg

SEQ ID NO: 344597 - DNA, 538 bp, Homo sapiens
atgtgccaaacatggtaccaggccatgggcacacactgacaaataagacagactttgtcattatggagctaacagtttagtgggagatagacaaaagtaaaagataatttcactgcatgtgataaggacaatgatggagaaatgcatggcatatacagtgtcgtatcctgtgctttgcactttggtttttgtttttgttttcattttgagatgtagtttcgctctgttgccaagactggaatgcaatgatgtgatctcagcacaccacaacctccacctcccgggagaatcacttgaacgtaggagacaggggtttcagtgagccgagatcatgccattgcactccagcctgggcaacaagagcaaaactctgtctccaaaaaaaaaaaaaaaaaaaaagaatatgcaatgtagacttaatgcaaattgacaagtatgcattaccagtaatgtgtttcaaggaatacaaaaaaaggacacattttacttgccctccagaggcctacagtctcactggggggaaaaaagtgacatacat

SEQ ID NO: 344598 - DNA, 1414 bp, Homo sapiens
tgagacagagtctttctcttgtcgcccaagctggcgtgcaatggcacaatcttggttcactgcaacctccacctcctgcattcaagcaattctcttttctaagcctcccaagtagctgggatttcagatgtgtgccaccacaccacatagtccctctccacagagatggttgagaaggctgatggaaaagccagatacttgttctacagctttccctgacactagtatatcatccacatactggagcatagatatacactttgggatgctcatcttttctaacacctcctcaagaatttggccaaaccagttaggagaatctgtaaatccttggggtaagactgtccagcagtattgttgttttcacccagagtgagaatcttcccattcaaaagtgaatatatcctgactatcttcagctaaaggacatgcccagaaggcatctttcaggtctatttctgtaaaccactgatggtcatatggaattttgctgagaatagtatatggattgggaaccacaggatgagtggtttgaaccgtttgactaatggcttgaagatcttctacaagtcagtatcacccatctgactactttacaagtaatattggagtagtatagggagacatgcaccgttcaagtagcccatctcagataaggctctcaattagaggttttaaacctaatctaccttctaagggaattggacattggtttcttttcactgtttccctgggagtttttaactttatgtgaattggaggaacttgtagcttccttcaatttccctcccttgaccactcattagcattgatgtagctttcttctgctgtagtaaacggtttaatgaagtgatgatcccttctgggcttacacgcaagcctatacctaactttgccattaggccacttcctaacaagtttgtcccagccttaggaagtagcaaaaatttaacattggttgatcgggtttcaaatctgacttctgttttttctgagactttggctttaaatccttcccctttgactcctaaaacttgaagttcttctaataaacaatttatattagagggcacaaaacaaacagaggagtgggaagctcctgagtctattagaaaagtaataagttcggctgggtgccatggctcacacctgtagtcccagcactttgggaggccaaggtgggcggatcacctgaggtcgagagttcgagaccagcctgacccacatggagaaaccccatctttactaaaaatacaaaattagccagactttgtggcacatgcctataatactagctacttgggaaggctgaggcaggagaatcatgtgaacctgggaggtagaggttgcagtgagccaagatcacgccattgcactccatcctgggcaacaagaacaaaactctgtctcaaaa

SEQ ID NO: 344599 - DNA, 205 bp, Homo sapiens
gtgcccaacaccttgatcagtgcctgctttgtagtaggcattcaaatactgtggactggatgaatggagtcacttcccttccaacctgcacaccaacgtggttgaactgcctcctttctaagtgccaaagtctgttttacaaggctgtaagtgaaatcactgacatggaaattatattttcaaaattaaaggaacaattttctaa

SEQ ID NO: 344600 - DNA, 260 bp, Homo sapiens
gggatagaatgaatgataacgttactaaaaggtacggggcccaccctgatgtaggctgggcctaaacaatgtcaccaagacttcccttctctttctgtttgtgcattggcttcacttaggcagattttctcttcagttgatcagctcaataacccagcgaacaaaaaccagcttctctttctcagtagtcacagaaaacccttataatttagtctcattggggtgactagagttatatttcatttccctttagtccagta

SEQ ID NO: 344601 - DNA, 304 bp, Homo sapiens
tccttgccaacacttgattttgtcagatttcaattttgttgctaatttaggtagacatgaaatgttatcttactattattttaatttatattcccctactgaaattcctattcaacctttttgcccattttcccattggttgtcttttttttttttttttttccctgagacaatgtctcactctggcactcaggctgcagtgcactggtgcgatctcggctcactgcaacctctgcctcccaggctcaagccatctttctacctcagcctcctgagtagctgggaccacaggtgcatgtcacca

SEQ ID NO: 344602 - DNA, 184 bp, Homo sapiens
tttgtcttacagcttttagaattgtgtacctttgagaggattttgaggggctgaattttattggggatcttttcattcctagatgtccataacttccaagacttccttccaagaagtgcagaaggacacaggcaatctatttaaccaaatgggtggtctatgcctctcttcacttattctttct

SEQ ID NO: 344603 - DNA, 200 bp, Homo sapiens
attcttttgagtaagggatgcttcatgaggcattttattaagtaatacctccgctttagctgctgcagagttctctacggttttgttatgttcaagccataaatgcattcaagataacagcaacttctctgatcttctaactagtgagactggcacctgctgactcgcaatgctccaataccatcccctttacctggctt

SEQ ID NO: 344604 - DNA, 638 bp, Homo sapiens
gtgcaaaatgagatcctgtctctaaaaaaatacataaataaataagccttaatgagcaggtggaagaaagtgcatgtaaatgtcaactaatgagaaaatgtaacaatgggattttacaatggccaattattacacctaaattatacagccaacaattatcttgtagtacaaggcttccactcatttccacactctgctgccatatgtatatgcatacttcaaaccctgcgaactcataggttcgcaggaccagaggacacattcaggagagaagccttatatttgcagaaagtgtggacggggctttagtcggaagtccaaccttatcagacatcagaggacacactcaggatagaaactttatgtgtatagggaatgtggtacagcctttagccaggagtcatacttcatcagacaccagaggacacacgcagtgctgtggctttttcagccattgctagataccaaagtggagacattctgtgtgtgattatgcatgagactgtactggtaagacttgtatctccatccacctgaaggagaattgctggctcattttcaggagccctgcccttcctcactgtggatgggtgggttgtgaaaaccggtcaggaatgatatggcagagcagtcatgcc

SEQ ID NO: 344605 - DNA, 425 bp, Homo sapiens
gaaaactgaaattccagacccatggggacaaattattaaatctttcaaggctttgagagtggaaagaaaatgacctgtgagttttggaaaaagtgtaaggaatatatgttcagaaaataaattttcagcatattttagatgtttctcacaaaacactgttgaagctaaggagaccagcaactcttaacagtgttgatgcagtttttattactgtatgtcaagaaaaatatatcggaaaaggaactaaggtggtcaagagaacaatagacttgctgtctaggaacagaaagtaagttagttctggtctgaaaagaagctaggttaggtaacttaaatttattccttgccatagcagaaaagagatttaaggcacttcctggaagtggcacagctgaaaatatgaatagattcacatatatttagga

SEQ ID NO: 344606 - DNA, 630 bp, Homo sapiens
ctgtaatcccaacactttggaggaggctgaggtgggcagattttgagcccaagagttcaagaccagcctgggaaacatggcaagatcctgtctctacaaaaagtagaaaaattagctgagtgtggtagctggcacgtgcctgtagtccttcctacttgaagccaaggtgggaggatcaccagagcctgggaaggttgaggctgaaatgagctgtgatcatgccactctaccttgggtgacagagagacggtgtctcaaataaaaattaaaaagatcacttaagctatcttttatttagttttatacgttattcgaattatcttatgtctcctgagctttataaaagttagcactcaaattgacttttttttttttttgggccaggggatggggtcccactttgtcacccaggttggagtacagtggtatgatctcggctcactacaacctccacctcctggatgcaagccatcctgccacctcagcatacggagtagctgggactatgggcacgcgccaccacgcccagctaattttttttttgtatttttggtagagatggggtttctccatgttgccgaggctggtctccaactcctgggctcaggagatccacccgtatcagcctcc

SEQ ID NO: 344607 - DNA, 450 bp, Homo sapiens
tgagcagactatactcactgtctcctataattctcccagcagtcctaagagggtgtgttttccccgttgtacagtgaaggatggtgagccgatagcaggttccagggtcgcacaattcagaaatggcagagctgtgtcaaggcctgcctttaatgtggtgctccccacatgggaccaagccttcctccatgaggaaaggactcgcctgtgcctggttgccctggaaacagcatgttggtttctcctgtggctcctctcaagctggggagcatgaaactaagatacacagttctgagtatcaattggataaataggaaatcacctgccaagaagcctaaaaccaaagagtttgcctcttcctcctcccttccctttaaaagacatccacacaactccagccttataatatggagcatgtgaattaataaaataattgtgagttgttatctc

SEQ ID NO: 344608 - DNA, 1239 bp, Homo sapiens
ccctaactgtcccagtgtaatcttcagggccatcattctcctctctgaccacagtctccaatgctcccgattcctccatgccctctccaccgtgacacccattcttcaacctcatcaagcctccaggtcttgactcctccattttctcccaatctatcaatgcttcctggtttcagggccatcctaaccagtccagaccatggtgaggcatcatttaacctcgcctttgccaacacctcagttcccttgggctctcttctagtatttgtctcctagaagatccccaaccctcttccaatctcacctctcaaattttctccatctctgcacctgagcctcagggtaacactagagaaaatcaagtgatttgtaaattggtgcctgtgggaggcagaatggttgtcccctgagatgtccacatcctaatccctggaacctgtgaatatgtggccttacatgacaaaaaggactttgagagtgtgattaaattaagaatcttcagatgctcggattatcctggattatctgggtggccccagacagaaggacaaaggtccctctaagggaaagagggaggcaggagtgttggaggagggctctgacagagcagcagaggtcagagttctgggactgctggcttcaaagaaggaaggggccacaagctgaggaccactggcagcctctagagggtgagaaatctgaggggtctcccctggagcttccagaagaaacacagccctgccaacactttcatttttagttcagtaggacttaaaacctccagaactgatatgataataaatttgtattgtttaagccactaagtttgaggtaatttgttccaaaagcaagagccaatgaacacaatcccatgtgtatgcacggggctggtactatgctgcaccccagctatcatcctcaatgcccttgatatggtttggctgtgtccccactcaaatgtcatcttgaattgtagctcccataattcccatgtgtcgtgggagggaccaggtggagataattgaatcatgggggcagtttctcccatactgttctcctggtagtgaataagtctcatgagatctgatggttttatacatgggagttcccctgcacaagttctcttgcctgccaccacgtaagacgtcccttttctcttccttgtcttccaccatgattgtgaggctgccccagccgtgtggaactgtgagtccattaaatctctttcctttataaatt

SEQ ID NO: 344609 - DNA, 1054 bp, Homo sapiens
ggtctgtgttctgtcgcgactcacaactgaatcacagagtagggaggtgtcttagcgatgactcagttctcccctgcattgatgcatattaatgttattcctcactacccacagcccatctcatctggaggttttattcttcttgattgtctcagtgtcaaggagttcactgcctcatgaggcagctcaggaactgggctataaataatgactcattgttgtaacattgatttctctcctcactcctggaatctcagaagagtaaagggagaaatagggccagtgttgtacaattgattccctctttctttgtaaaggctgccaggtgacttgctaggaaagagaaacgggaggaaggggctaacatttagagtgaatgtttgcaacgggagaggcactttgttaggtgccttatatttgctgctgtttattttggtcttcacaaagttcttgtactcatgagtaaactaagtctcagggagatcaaaagccttatccagaatcacccaataaggaaggtggatttagaatttgggattttatcatcttagttcagttcattttaccatttctggggaacttgctatgtgccaggcactgtgttaaatacttcccacacatatttttgataatacttgaatcaatctggcattaatatacctatttgacaggtgaagaaatggaggcttacaaagtcaagtgactttcccagggtgaaaaaactagtacatggtatgaccaggattcaaatctagttgtgattgaacccaaatcctgtgtcttttcatagccccctgcagccccaggatttagcttccaaatactaagtatgacagcacattgggcatcagccacacacctggctctggcctaagctctgggatacaaggcgatggatgaggtataccatgccccctagtaatgagctaagtgttagttgctatgttgcagagcagggtcacattaactaatattttaagcagtaacgatacagtgctttgggcgttgacataaggaagagatggactggaagttgctagggtaagttgctagg

SEQ ID NO: 344610 - DNA, 966 bp, Homo sapiens
ggtctgtgttctgtcgcgactcacaactgaatcacagagtagggaggtgtcttagcgatgactcagttctcccctgcattgatgcatattaatgttattcctcactacccacagcccatctcatctggaggttttattcttcttgattgtctcagtgtcaaggagttcactgcctcatgaggcagctcaggaactgggctataaataatgactcattgttgtaacattgatttctctcctcactcctggaatctcagaagagtaaagggagaaatagggccagtgttgtacaattgattccctctttctttgtaaaggctgccaggtgacttgctaggaaagagaaacgggaggaaggggctaacatttagagtgaatgtttgcaacgggagaggcactttgttaggtgccttatatttgctgctgtttattttggtcttcacaaagttcttgtactcatgagtaaactaagtctcagggagatcaaaagccttatccagaatcacccaataaggaaggtggatttagaatttgggattttatcatcttagttcagttcattttaccatttctggggaacttgctatgtgccaggcactgtgttaaatacttcccacacatatttttgataatacttgaatcaatctggcattaatatacctatttgacaggtgaagaaatggaggcttacaaagtcaagtgactttcccagggtgaaaaaactagtacatggtatgaccaggattcaatcatgagagaaagggaatcctttccctagcttcttacacagagaatctgtaggacctgctggaatcactagttggttttgtttcccaagaggaaggttttctaaggcacacccctacatttttttttttttaaatcagcattcactgtaagaaaaaaaatcgacataatattctcataatgatttctcctaataaagatggatattgttacagttac

SEQ ID NO: 344611 - DNA, 1299 bp, Homo sapiens
caggaaaactgaagcccaaggaggtgaagtgattgcctaagttccttggatggaagttgaagaattcagattaaatgaaatgaagacactgagctctgcaagtacactgctttttgaatcccagaggggatgatgtagcaagaaggacctcaccagatgctggcaccttgatgttagacttcccagtctccacaatgtgaacttgcttgtcaaatgcctctttaaaaagcaagtgaagataattgcaagtcagctggaagtgctgccaagatatgacctccaggaaggcccagaagacaagtgatattgtgtggactgctacagcgcaatgtctaactgatgcaaaatgaagaatcaatttgaaattaagatgagtaaaggcatccagcacttacagcaaaaaacattgtcatcaggccctggggagatgaggacacctcccttcccttctcaggctccctttccctgtcagactctagctctcaaaggctgtcatcctccaagggtattccctacgtactgcatagcatctctgttaccctttgaattcaacagtattcatctcctccaacattcattcattcctttagtcaaaagtcagttgtcaaacacaaggcacaagtgcacatttaaggaattcatggccaatatttgtcatgtcatttcatgaattgtctgagaaacataaaacatacaatgaggatactgatccaagatacatggcacacaattaaattgcgaaaaacatgactctgagtccaaaagttcttattttttcacagtcttcagagtattgtatagaccccttgaaaaataaatttgcagagtgtgaatgttaattactgtcaccttcagaaaagagattttacacatttataaaagagaaatagtgactattctagattatagagcacagaaagaattctcaaactagtataaccctatttctctatatcacaaagacatcttgtaggcatgttcctctgaaggacttgagaattatgctttttttcctccttgtctctctaaaagcaaaaagcacagtaatctcgctgaagtataatcaaaacagagcctgatgtgaaaccagagccttgagttttcatcctgcatttgttacttaaaagctgacataagaaaaattatttaacttctcttaacctcagtttcttatctataaaatgggattataaaatgtatctcacaaggtagttatgaggattaaaggaaatgaaaaaatgcttatttggttttgaatcctggtttggtctagctatcaataaaactcattaagatgga

SEQ ID NO: 344612 - DNA, 1294 bp, Homo sapiens
ctagatcacatctgcattccctgcccaccttctccctccagcaacttccgcagcctagtcatacattgtgtgcatcaggccttcaccagcatgctaagacttgtccaagagtcttgatgtcctaaactgcaagtgacatgtaaagcttggatcccaaggtcaaacagcatgacttgaggataacataaatagtgaacttgcttgtcaaatgcctctttaaaaagcaagtgaagataattgcaagtcagctggaagtgctgccaagatatgacctccaggaaggcccagaagacaagtgatattgtgtggactgctacagcgcaatgtctaactgatgcaaaatgaagaatcaatttgaaattaagatgagtaaaggcatccagcacttacagcaaaaaacattgtcatcaggccctggggagatgaggacacctcccttcccttctcaggctccctttccctgtcagactctagctctcaaaggctgtcatcctccaagggtattccctacgtactgcatagcatctctgttaccctttgaattcaacagtattcatctcctccaacattcattcattcctttagtcaaaagtcagttgtcaaacacaaggcacaagtgcacatttaaggaattcatggccaatatttgtcatgtcatttcatgaattgtctgagaaacataaaacatacaatgaggatactgatccaagatacatggcacacaattaaattgcgaaaaacatgactctgagtccaaaagttcttattttttcacagtcttcagagtattgtatagaccccttgaaaaataaatttgcagagtgtgaatgttaattactgtcaccttcagaaaagagattttacacatttataaaagagaaatagtgactattctagattatagagcacagaaagaattctcaaactagtataaccctatttctctatatcacaaagacatcttgtaggcatgttcctctgaaggacttgagaattatgctttttttcctccttgtctctctaaaagcaaaaagcacagtaatctcgctgaagtataatcaaaacagagcctgatgtgaaaccagagccttgagttttcatcctgcatttgttacttaaaagctgacataagaaaaattatttaacttctcttaacctcagtttcttatctataaaatgggattataaaatgtatctcacaaggtagttatgaggattaaaggaaatgaaaaaatgcttatttggttttgaatcctggtttggtctagctatcaataaaactcattaagatgga

SEQ ID NO: 344613 - DNA, 1414 bp, Homo sapiens
cctgctctttacctctcttgccttgccaggggatgatgtagcaagaaggacctcaccagatgctggcaccttgatgttagacttcccagtctccacaatgtgtccttatctggctttggtgggaaggtaattctggccttttgaaatgagattggaagtatcctttcttcaattttctgaaaaagcgtgagaaggattggcattacttttttaaaaatgcttggcaatatgcacctctgaagccatctgttcttcggcttttgtttgttgagaagtttttgattattgcttcaatcttcttactggttattgtgaacttgcttgtcaaatgcctctttaaaaagcaagtgaagataattgcaagtcagctggaagtgctgccaagatatgacctccaggaaggcccagaagacaagtgatattgtgtggactgctacagcgcaatgtctaactgatgcaaaatgaagaatcaatttgaaattaagatgagtaaaggcatccagcacttacagcaaaaaacattgtcatcaggccctggggagatgaggacacctcccttcccttctcaggctccctttccctgtcagactctagctctcaaaggctgtcatcctccaagggtattccctacgtactgcatagcatctctgttaccctttgaattcaacagtattcatctcctccaacattcattcattcctttagtcaaaagtcagttgtcaaacacaaggcacaagtgcacatttaaggaattcatggccaatatttgtcatgtcatttcatgaattgtctgagaaacataaaacatacaatgaggatactgatccaagatacatggcacacaattaaattgcgaaaaacatgactctgagtccaaaagttcttattttttcacagtcttcagagtattgtatagaccccttgaaaaataaatttgcagagtgtgaatgttaattactgtcaccttcagaaaagagattttacacatttataaaagagaaatagtgactattctagattatagagcacagaaagaattctcaaactagtataaccctatttctctatatcacaaagacatcttgtaggcatgttcctctgaaggacttgagaattatgctttttttcctccttgtctctctaaaagcaaaaagcacagtaatctcgctgaagtataatcaaaacagagcctgatgtgaaaccagagccttgagttttcatcctgcatttgttacttaaaagctgacataagaaaaattatttaacttctcttaacctcagtttcttatctataaaatgggattataaaatgtatctcacaaggtagttatgaggattaaaggaaatgaaaaaatgcttatttggttttgaatcctggtttggtctagctatcaataaaactcattaagatgga

SEQ ID NO: 344614 - DNA, 1793 bp, Homo sapiens
ggaaaggagagacttttcaaaacctccatcctggggcacaccaacgtttagagatttggaagaggagagctgtcagaggacactgagaagtggcagtgacgttggaagaaaataagaatgctgtgtttctggagtcaagttaaaactccattttaaagatggagtggtcacctgtatcagatgtccccaggaggccaaggaaggaagcctcctatcagactctctgcctggcctgagatatccagttaacacctgcaattcagaataccctctcacccagcaataaagcatccagcctttgcatctgtaacaacctcctctgtaatttgtgcattctatgaatgctccaaatcataataaaatccatccattacttcagacagatgaaaacagttccttctaaaaagaggctaatgtttttaaaagacagtaagagaagaatgtcagctccccatggctgcagtagaaagtgctggatgagaggagcatctccagagcatggaagacaaagcagctttatcctcaacttttccacctcaatttccattttcctccaaggcaaaactcccactcctggcagattaaatgaaatgaagacactgagctctgcaagtacactgctttttgaatcccagagctatttcagcctggttaagaatcattgctggggaactagtgtggttgtttggagtgaacttgcttgtcaaatgcctctttaaaaagcaagtgaagataattgcaagtcagctggaagtgctgccaagatatgacctccaggaaggcccagaagacaagtgatattgtgtggactgctacagcgcaatgtctaactgatgcaaaatgaagaatcaatttgaaattaagatgagtaaaggcatccagcacttacagcaaaaaacattgtcatcaggccctggggagatgaggacacctcccttcccttctcaggctccctttccctgtcagactctagctctcaaaggctgtcatcctccaagggtattccctacgtactgcatagcatctctgttaccctttgaattcaacagtattcatctcctccaacattcattcattcctttagtcaaaagtcagttgtcaaacacaaggcacaagtgcacatttaaggaattcatggccaatatttgtcatgtcatttcatgaattgtctgagaaacataaaacatacaatgaggatactgatccaagatacatggcacacaattaaattgcgaaaaacatgactctgagtccaaaagttcttattttttcacagtcttcagagtattgtatagaccccttgaaaaataaatttgcagagtgtgaatgttaattactgtcaccttcagaaaagagattttacacatttataaaagagaaatagtgactattctagattatagagcacagaaagaattctcaaactagtataaccctatttctctatatcacaaagacatcttgtaggcatgttcctctgaaggacttgagaattatgctttttttcctccttgtctctctaaaagcaaaaagcacagtaatctcgctgaagtataatcaaaacagagcctgatgtgaaaccagagccttgagttttcatcctgcatttgttacttaaaagctgacataagaaaaattatttaacttctcttaacctcagtttcttatctataaaatgggattataaaatgtatctcacaaggtagttatgaggattaaaggaaatgaaaaaatgcttatttggttttgaatcctggtttggtctagctatcaataaaactcattaagatgga

SEQ ID NO: 344615 - DNA, 1739 bp, Homo sapiens
ggaaaggagagacttttcaaaacctccatcctggggcacaccaacgtttagagatttggaagaggagagctgtcagaggacactgagaagtggcagtgacgttggaagaaaataagaatgctgtgtttctggagtcaagttaaaactccattttaaagatggagtggtcacctgtatcagatgtccccaggaggccaaggaaggaagcctcctatcagactctctgcctggcctgagatatccagttaacacctgcaattcagaataccctctcacccagcaataaagcatccagcctttgcatctgtaacaacctcctctgtaatttgtgcattctatgaatgctccaaatcataataaaatccatccattacttcagacagatgaaaacagttccttctaaaaagaggctaatgtttttaaaagacagtaagagaagaatgtcagctccccatggctgcagtagaaagtgctggatgagaggagcatctccagagcatggaagacaaagcagctttatcctcaacttttccacctcaatttccattttcctccaaggcaaaactcccactcctggcagattaaatgaaatgaagacactgagctctgcaagtacactgctttttgaatcccagagtgaacttgcttgtcaaatgcctctttaaaaagcaagtgaagataattgcaagtcagctggaagtgctgccaagatatgacctccaggaaggcccagaagacaagtgatattgtgtggactgctacagcgcaatgtctaactgatgcaaaatgaagaatcaatttgaaattaagatgagtaaaggcatccagcacttacagcaaaaaacattgtcatcaggccctggggagatgaggacacctcccttcccttctcaggctccctttccctgtcagactctagctctcaaaggctgtcatcctccaagggtattccctacgtactgcatagcatctctgttaccctttgaattcaacagtattcatctcctccaacattcattcattcctttagtcaaaagtcagttgtcaaacacaaggcacaagtgcacatttaaggaattcatggccaatatttgtcatgtcatttcatgaattgtctgagaaacataaaacatacaatgaggatactgatccaagatacatggcacacaattaaattgcgaaaaacatgactctgagtccaaaagttcttattttttcacagtcttcagagtattgtatagaccccttgaaaaataaatttgcagagtgtgaatgttaattactgtcaccttcagaaaagagattttacacatttataaaagagaaatagtgactattctagattatagagcacagaaagaattctcaaactagtataaccctatttctctatatcacaaagacatcttgtaggcatgttcctctgaaggacttgagaattatgctttttttcctccttgtctctctaaaagcaaaaagcacagtaatctcgctgaagtataatcaaaacagagcctgatgtgaaaccagagccttgagttttcatcctgcatttgttacttaaaagctgacataagaaaaattatttaacttctcttaacctcagtttcttatctataaaatgggattataaaatgtatctcacaaggtagttatgaggattaaaggaaatgaaaaaatgcttatttggttttgaatcctggtttggtctagctatcaataaaactcattaagatgga

SEQ ID NO: 344616 - DNA, 1230 bp, Homo sapiens
tagggcttggagaatgtttgcaaccctttcatctttagcatgggtgctgttcacttcgcccttggaaatacttctctctctagatctggataggaaatggggcatcgtcttcccacagagacaagcagtgaacttgcttgtcaaatgcctctttaaaaagcaagtgaagataattgcaagtcagctggaagtgctgccaagatatgacctccaggaaggcccagaagacaagtgatattgtgtggactgctacagcgcaatgtctaactgatgcaaaatgaagaatcaatttgaaattaagatgagtaaaggcatccagcacttacagcaaaaaacattgtcatcaggccctggggagatgaggacacctcccttcccttctcaggctccctttccctgtcagactctagctctcaaaggctgtcatcctccaagggtattccctacgtactgcatagcatctctgttaccctttgaattcaacagtattcatctcctccaacattcattcattcctttagtcaaaagtcagttgtcaaacacaaggcacaagtgcacatttaaggaattcatggccaatatttgtcatgtcatttcatgaattgtctgagaaacataaaacatacaatgaggatactgatccaagatacatggcacacaattaaattgcgaaaaacatgactctgagtccaaaagttcttattttttcacagtcttcagagtattgtatagaccccttgaaaaataaatttgcagagtgtgaatgttaattactgtcaccttcagaaaagagattttacacatttataaaagagaaatagtgactattctagattatagagcacagaaagaattctcaaactagtataaccctatttctctatatcacaaagacatcttgtaggcatgttcctctgaaggacttgagaattatgctttttttcctccttgtctctctaaaagcaaaaagcacagtaatctcgctgaagtataatcaaaacagagcctgatgtgaaaccagagccttgagttttcatcctgcatttgttacttaaaagctgacataagaaaaattatttaacttctcttaacctcagtttcttatctataaaatgggattataaaatgtatctcacaaggtagttatgaggattaaaggaaatgaaaaaatgcttatttggttttgaatcctggtttggtctagctatcaataaaactcattaagatgga

SEQ ID NO: 344617 - DNA, 668 bp, Homo sapiens
ctaggtggctgatcactggaatacagtcatatccccaggcatacacacgagcctcacttgacgatcccaaagtttgtacatctgagcttgagacgtgacaagttgaggtctctgctttgttcttcatagttggcagtttgtctcctcgggtgcccctccggttagctgtttatcatacgtctagccctatcaacagtgcaggcagcttccagagtatagttttctctgcaaagtgcctggtggaggggtacctccttttccattgtcctaatggctccactgggcttccataccagccctttccagtgtcttaacagctcaaagaaacccatctgtggctttcttgttagcactggcctatcacaccttcctattgcctgttaactaaaattttgcctggaatgctttaagcttagagtactgggtctttgtttcacccgattgataggagagtgtcatgcagtcagccgaactccgacttctgtgctgtttaaatccttaggtaggtctggggcaaggcacaaaccactgtgtattcaaagggttatggtgcttgcattctgtgtgtatatgtttgtaatttccaaccagagtcgtttcccgtgcctgccctgcctctgtgcaatctagtctagtagggtagggaggcaagctgtggagtttgaaaa

SEQ ID NO: 344618 - DNA, 375 bp, Homo sapiens
gtctaggaaacacttgcttttattttcttgcctgaatatgtcagaaccttaaatcacccaatcaatctagaagtactacagttgattaaagtaagtcaccacaggtcacccattcgtggcaggtcagctaggtggctgatcactggaatacagtcatatccccaggcatacacacgagcctcacttgacgatcccaaagtttgtacatctgagcttgagacgtgacaagttgaggtctctgctttgttcttcatagttggcagtttgtctcctcgggtgcccctccggttagctgtttatcatacgtctagccctatcaacagtgcaggcagcttccagagtatagttttctctgcaaagtgcctggtggagggg

SEQ ID NO: 344619 - DNA, 374 bp, Homo sapiens
cagacagaaatgccgcctgtttcttcttttctgagcaatacactgttctagaaactggagcaaacagacactgcccctgctctcctggagcacatattctggtgggagagtgtgagaaagtaagcaaataagccaatccagtaacaaggtgactccagataaacatacttgctacctaattatgttactgaagaaattattaccatgaaagaaagaaggtgatgaaagggaaatattcttgggatggtccatctcatgagacaggcagagactcggttatttatctgactcccatactaaactgtaaattcatcaatgacaagaactatttcttaatatcctgcacaactgccttgtgaacgacaatcaatagc

SEQ ID NO: 344620 - DNA, 306 bp, Homo sapiens
aaatctgagcatatctcttgcttgcttacaatcattaaatgtcttcctgttgccaaaaataaagtttaaattctttaacaaaacctggaaaattatcgatacttgttgcactccccccacattgccctgcccatctttccagcatcgtctttcctcatgcttgtgtttcagccttttagttctccttggccatggggctttggcatactatgtatcatgacttaccctgtatgtagtcataaagtaacagtttttagctgtttccaccactaaaaattagttgattccttttcctcttgtttgttt

SEQ ID NO: 344621 - DNA, 240 bp, Homo sapiens
tgagaggtcagtggcccaagcccacctcaggaatcttcttaccaactctcagccatcaaggatatccaaggcgatgggggtggctgactccttgggagggggcatccaggaggccaaacggggtgggcggcaggcaggcggaaaggaggcgagcaggtagagggttattacgaaattgcttccataaaacctgtggctgttgtaaaactctgctttccaaagactttatttcctcctttc

SEQ ID NO: 344622 - DNA, 601 bp, Homo sapiens
gttctcacttacaagtaggagctaagctatgaggatgcaaaggaataagaatgacacaatgggctttggggactcagggggaaagggtgggaagtgggtgaggggtaaaagactacaaatagcatgcagtgtatactgcctgggtggtggatgcaccaaaatcttacaaatcaccactagagaatgtactcatataaccaaacaccacctgttccccaataacctgtggaaacaaaaaatttttttaaattaaaacttagaagaaaaaaaggatgtaacagaatgataggctggtggtaaaatctgtctaatcttgttcagtagaaggcataacttgtgactttgctttattgtgcttcatagatattgcattttttacaaattgaaggtttgtgccaactgtgttttgagtaagtctgttggcaccattttttcaagagcagatgctcactttatgtctctgtgtcatgttttggtaattctcacaatatttcaaactttttcattattgttatacctgttacagtgatctgtgatcagtgatctttgatgttactattgacttcatttgggggcattacaaaccacatccatataggat

SEQ ID NO: 344623 - DNA, 2063 bp, Homo sapiens
  misc_feature (346)..(346): n is a, c, g, or t
  misc_feature (728)..(728): n is a, c, g, or t
  misc_feature (1086)..(1086): n is a, c, g, or t
  misc_feature (1284)..(1284): n is a, c, g, or t
  misc_feature (1905)..(1905): n is a, c, g, or t
atgaagatcatggacttccgatacaaattacagcagcctgggcgacagaacaagactctgtctccaaaataaataaataaataaaatatttctcaaggattcagatttggggattttactgccaagtagcctggctttctcattattgattaacctacaaagaaaaatttgatatatctgatgaaaatcagttatattgtacctacaaaaacatctcttccatattacttgatgtattttaatgtcactgaatccattggtttatctttatctcttagaagctcttaaagtcacaggaattctagtccatatgatcagattaaccaaaaattcaggcagctactcngttcaaacaggaaagaaaaaactgaaaatgaattgttgtattgaatctgctttttcacaagagacaactaggcgtaatggttctgagcgtgggttagaaattgggcaagtcgcgttcacattcttttactaccttgaagagaagtctctgcctccatctcatctctagaaagatgggaataatatagcttgtgtcagcatgattgggggattgaaggagatgatgtctgtgaagagtttagcacagtgcctcctacatcagaagtgcttgacacgtgtctggctcttgcttctccaggaaggagaggaggggagaagagagagtttgcagggccgtagttattcaagtagttacagctatctcttctttctggtcacactgntgggtaatttgttcttgaaaagtgtctcaagatgactgctcccacttagtagctggaaaatcacatccttccagaaagggatctagagggcagacatgggtgaagtgtacattgttagagggctgactggaaataatcagtgcagagatcactgtgggcagagccacagccttcaggtcctataaagggcagaacgataggaataatctactgcataggaaaaccaaagaaaagaaggaggacgaaaaacactctggggaggaaaaaataattggggttcactactgggatatctttccctctgctagaagatccttcatacataatgaatcacagtttggaaatggagcctttgaanaaaaatccttacacaactggtaagagagaagtctcataccagccactgaatttttgcagaaatttgggcctccctccgcaagtgtactttcagactcaaattcctccagcatccaggacctcttgattaactatgtactctcaataaagagaaaaagatgagacctctgggaagcaagaattggtagaagctgggccnggtacagtggctcacacctgtcaccccagcactttgggaggccaaggtgggtggatcacttgaggccaggagtttgagaccagcctgggcaacatggcgaagcctatctctactaaaattacaaaaaaactagccaggtatggtggcgtacacctgtaatcccagctacagcaggaggctgaggcacgagaatcacttgaacccaggaggcggaggttacattgagccaagattgtgccactgcactccagcctgggtgacagagagagactctgtcttaaaaaaaaaaaaaaaaaaagatgctgaaatgtatcaaaaccagcctactcgtcatcctcttttaaaagaaaaagatgagtaaaccatcgcattactcattaggatgttaccagatatgtgagttggtcagagggactcctagctacaagtagaaggagtccactctaccattgactgtgtgcaaagtagcacattttatctacctttttaagatactcggccggatgcagtggctcacgcctgtaatcccagcactctggggggctgaggcaggcagatcacctgaggtcaggagttcaagaccatcctggccaacttagtgaaaccctgtctctgctaaanatacaaaaattagccagatgtcgtggcacgcacctgtagtcccagctacttgggagactgaggcctgagaatcgcttgaacctgggagatggagtttgcagtgagccaagatcatgtcactacactccagcctgggtaagagagtgagactctgtctt

SEQ ID NO: 344624 - DNA, 543 bp, Homo sapiens
tggactgcactggagtgattcctggataagacagttgggctttgagctgtcacatgacctcagttggccataggagaggtacagtctgtcccccattggggcaaactaagttaatgcttaattaccacttccaggcttttctaatcattcttgatcaagcctggatttgggggttctgggattctgtaagccttggtttaaaaaaattaattacatgttacgttataaaagacttttttaaagggtcaagcgaatctatttgtgaaaacacagaataagagtgactcccatgtgatgaataaagtggatatgagttgccagattgtaagtgagttaggtaatgacattggagaagtcataagtatctgagaataagtaataaagtgcatattttggaagcacttccaacaaatcaaccttgcttgaatctcatccatctgctagaactctcctacccaaccagcctcatcctgtggaatagtccctccctaatatctctcacatcctttatttccctggtctcctgccactattctagtccag

SEQ ID NO: 344625 - DNA, 182 bp, Homo sapiens
tgcccttggacatcagagctcttgatctcaggcctctggactctgaaaccagtgccccaatacccccttcccaggcctttggaccaggacagaattaccccactggctttcctggctcttcagtgtgcagacggcagattgtgaaacttcttagcctctataattgtgggagccaattccca

SEQ ID NO: 344626 - DNA, 838 bp, Homo sapiens
gggcaagccgggcaaggagaccccgcacccacacctacctcatttaagtgttggattttttgctgttttgaaatgtgagaccctctccaagccccctactgccccaaccctctcccccacctcactgccctcttctgagtgggtggaaggggggtaggaggaggaagaaaaacaacaacaaaaaatccatctttgtttttaattatgggcatgggatggtggttgaggcaaatgatgatgaagattggggatgactggcccctagttgctctaggacttccttctccatctggacatgggggcaggagggagctaaacctaggaccaggatatctccctcctgttttcccaacctcatcatgagcctgtttgccctccagcccctggacgggttgggtggggggtagggtgagggctatccctgagtggcatgcccatacctagtgaggcagggtgtggcccggagctcccactttccctcagtcaccaaactgctgctggtctggtgggaaggggtggtgatgtgggggtgggggagcttagtgtcagcgcggggagggtggggggtatttatctatttatacatgggattgtacatagtcttgtggggcatgggggagccggctggaggtgagaaccctcccctctccccccaccccccggggagagcaaatgtaaaactactaatttttgtgctttatatattctatataaatatatctattttctttttacaaaaccagtttataaatggtaggggggtgtggggcggacacatggagctccccttgtggggggggggcctccattacccgacctaccgcgccttttcctcacc

SEQ ID NO: 344627 - DNA, 662 bp, Homo sapiens
  misc_feature (537)..(537): n is a, c, g, or t
gggcaagccgggcaaggagaccccgcacccacacctacctcatttaagtgttggattttttgctgttttgaaatgtgagaccctctccaagccccctactgccccaaccctctcccccacctcactgccctcttctgagtgggtggaaggggggtaggaggaggaagaaaaacaacaacaaaaaatccatctttgtttttaattatgggcatgggatggtggttgaggcaaatgatgatgaagattggggatgactggcccctagttgctctaggacttccttctccatctggacatgggggcaggagggagctaaacctaggaccaggatatctccctcctgttttcccaacctcatcatgagcctgtttgccctccagcccctggacgggttgggtggagagcggaggggctcatttcttcagctcgccctcaccttgcagaaggggaactttaaccctggaagagcagtgttggacagcaggttccctccctgagatccacggactccaggagctgagtgagaggctgcagcanagggagcttggagatcgagttttatccccacattttgtagttgaaactcagacctggagaagttgaaaggactttcccaagatcacacggtaaataaattccttactaaccgatgtctgggggtg

SEQ ID NO: 344628 - DNA, 617 bp, Homo sapiens
gtggcctggctgtaaagagatgccttgcaggggccacctgagtcccataagattgtcaggaagaaatgatatcagtggccaggtcaaggagctatccattagtttctgaggatgtaatatttactaatatttacttggttttaggttttactgtacagttaattttttcttatagtttgtggtattttaacaggcaagcaggtgcttttaaggtggggggaaacatcttaactgtagcctgaaatcttgacttactgacagtgttgctagtagagtagtgtgtgatacccagaaaggaaaaaataaacctgttgagttcaacatgtttccccgaaatgagcaagaaacatatatcagactgcttaagagaatcccatttttatttgcattttgacactcttttattatttttatggtatacttttcctgtttcttcctttcaacctggaaattattagtttgtgtgccctttgggctttaaaataaagttcattttattctgtggtcatctcaagagctcttactcccccagttctcctggacttgttttggtgagagcctgttccaggatccctttcattgtaagaggacattgtatgggtggatatgatgacttt

SEQ ID NO: 344629 - DNA, 472 bp, Homo sapiens
tgagtgagatggaagaagaagcaaacctgaggctacagaaggatggctgaggttcaaattgtgcttttggaggggccctggggaaaagagaaatgagaaactagctctcaggtcttgtgcattttaggaccatcaggtctggaggtaccagaggtcctgggttggagaaataaaggatcccctatctgtagttcgaaatgtggggatgatctaccccacaaagtccccaagaccaggtttaatgtccaggtctagccctgttgcacccagactctggtgagtcacagggtccgtcctgcagaacaaggtgctagagaaggatctcctattgcagtctgtttccaacaagcagagcagaaagaaaaccatgcaagcactcaagagcctggtatttgagtccaggccctatcattctctagctatgtgttcttgggcagggcattgttaaacctccctgagcctcagcttcctc

SEQ ID NO: 344630 - DNA, 4407 bp, Homo sapiens
  misc_feature (767)..(767): n is a, c, g, or t
  misc_feature (2601)..(2601): n is a, c, g, or t
  misc_feature (2740)..(2740): n is a, c, g, or t
cacagcggacctacaggcgctcagagaagcccaccttccccctctctgtcccgagaaggcttagagtggtacctgcttgctcaagcaacctgctgcctccacccagagcagccgctcctctcctccctcccttccggaagatgctgaggatgacagcttttagcctgactcttacatttctttggcagagcagttagaggccagactgtcctgtgaaggcttctccttccttcttcctctgctcaggagaaaacttacaaacttttaaatgtaagaggcagatgagctgggaacctggaagtgggttgcatctgactctgaaagttcctccctctcgctggcattacctcatgctgccacaaagtgaacggatcactggggaaggcagagtctccccggcactgctgggaccctcccttgaagagcccccatgtcctgtaggcagagccttgtagtctgtccgcttggttactgactcgggctgtctgaccagcccctcttctgtgccttgtctgaggtccttgtccatctctgtgattgggcagcttctctctctggattgggtcacgtgaagcgggaaactgaagccattactctccaaaccctgtttcatcttcccaagcatgtcggaaagctggcaacagccgccacagacgcagccgcagcagccacagccaccgcagcctcagcaccatgcagagccaccgccagccctggcagagcacacgctgcctccgggcacggcggagaaccccctgggctgtgcngtctatggcatcctcctgcagccagaccccggcctgcagcccccacaacacgcacccctgcaggcagcaggagagccaggccccaaatgtggcgtgtgtggtcacgacctggcgcacctgtccagtccgcatgagcaccagtgtctggcgggccatgaccgctcattccagtgcacacagtgtctcaagatcttccaccaggccactgacctgctggagcaccagtgcgtgcaggctgagcagaagcccttcgtctgtggggtctgcaagatgggcttctcactactcacctcactggcacagcaccacagctcccacagtggcctggtgaagtgttccatctgtgaaaagacctacaagccagctgaggcagcggagccagccaccacagccgccccgtcgcttcccgcagcacccgcgccttccactgtcacccctgctgaacaggccgacaagccctacagctgccccatctgccaaaagcccttcaagcacctgtcggagctctctcggcatgagcggatccacaccggtgagaagccctacaagtgcacgctgtgtgacaaaagcttcagccagtcgtcgcacctggtgcaccacaagcgcacgcacagctccgagcggccctacaagtgcgcagtctgcgagaagaccttcaagcaccgctctcacctggtgcgccacatgtacgcgcactcgggcgagcaccacctgttccgctgcaacgtgtgcgagttgcatttcaaggagtcgtcggagctgctgcagcacccgtgcacgccaagtggggagcggcccttccgctgcggcgagtgccagaaggccttcaagcggccctcggacctgcggcagcatgagcgcacacacagcgccgagcggcccttcaagtgcgacctgtgccccatgggcttcaagcagcagtacgcactgatgcgccaccggcgcacacacaagaccgaggagcccttcaaatgcggcctatgtgagaagggctttgggcagcccagccacctgctctaccaccagcacgtgcacaccctcgagactctcttcaagtgccccgtgtgccagaaaggctttgaccaatctgccgagctgctgcggcacaagtgcctgcccggcgcggccgagcggcccttcaagtgccctgtgtgcaacaaggcctacaagcgcgcgtcggccctgcagaagcaccagctggcccactgtgcggcggcagagaagcccctgcgctgcacgctttgcgaacgccgcttcttctcctcttccgagttcgtgcagcaccgctgcgatccggcccgcgagaagccactcaagtgcccagactgcgagaaacgcttcaagtacgcgtcagacctgcagcggcaccggcgggtacacacaggcgagaagccctacaagtgccccaactgcgacaaggccttcaagcagcgggagcatctcaacaagcaccagggcgtgcacgcccgcgagcagcagttcaagtgtgtatggtgcggggagcgcttcctagacgtggccttgttgcaggagcacagcgcgcagcacagtgccgccgccgcggcagcggagggcgcctaccaggtagccgcctgcctgccctgactctgcggctgtggcccctaccagcctgacctgagtcggcgccgtgggcccagcaggcctcgcgcagcctagctcctcacagctgccttgcaccaagggccccacccagctcggtgttctgagacctcgggagtgaggacgcaggggtatgaggcagggagagggtgtgccgctcgtactcctggcaccagcgggcagtgcgggcggccagattgctgtggcccatccngattccacaaacctctttcccatgacaagattcactttcttgagagccatcagcaccccccttatttccggggcactggagccaggctggaagtcaagtggcttctccctgccctaaggagggtgtgatgccagcccanccttcccatatctttcaagctagcagccacataggttaggaaagcggaggctcatggtggggctggggccccagaggtgggctaggtgtaaggcatcagttgccgtgtgggggagaaggccagctttaagacgtaggcctggggactgggagggcagagggtgagtcacagccctctccgtctgctctagccaggggcgacgtgtccccaggtttctggcaggggagatgtgcagggtgggtcttggggctgggtctgcctggagaccagtgggcccagggggaagggggaagctgagaagttcgtgtgacaccctcagccaagggacagtgccatccttggggacaggaggaaaagcagcctgtctctgctaagggcaaatcctccggttttggaagcgcccctcccacctttgtagtgcagttcctaggtgtggtggggaatgtgccgtgctctcagcagacagaactgctggtgtgaaaggcagggattgtcagcccacctgaggctgggaggaagcaggaccaggcctaggatctccccagcagatgcaaacaagtgtcctcccctgaattgtgtgaaccaaagcgtcaggggcttggggcacagccccagtcagctcaacccagtcctgcttcagagccaagactaggccagggtggggacccccccagtaccctccctacatcaatgtggctgctggcctggaccccaggggtctggtacagccaagatgttctggacaacatccagctacttcaaaggccagagtgtcctttgggtcctcctagagtccccctaggtctctggctgcccatgaggctcatgaagcagagggtatcccagtcatagggagcagaaagagcaagtgggttaaggaagcctgtgggggacctggtggatggagttgaccaacatcgctgggtggctacggccctccttaggaagcccagaaggacctttattattaaaataatcattttgaaccctgctctatcccctgccctcttccagccccacccctccctggtcttgaaagaagactaatcagtgggcacaccaagggccctgaggggcagggagatgccaccatgcttctctgtcaccgtaagaaggctgaccagccacgcccacctcctctgtctgactgagttccttcctgtggccacagggaggggctggtccttccccttggtgctggctctctgtcacaatgcctcaaaagacatggaacccaggcctacaaccgtcccaactgctaattcttttcctttcattttgctttctgaaagcagtttgttatactattcataacattgtagagtttaatttcatgtcattttggatcttatataaaaatgtgaggatttggatttttaaaaagaatgactccattttaggtagccacttttgatgttaatatatagtgagtccaatgtatgctttagaagtaaagacattgaccgtcacagaccacaaaaaaaaaaaggggggggtctaaaattcctgggggccaagttaagcgtaccagttttgtaacaggggccatagggggatataaagaggcgggcgggtaaagggtgggggaaacgtcgggcttggagcctctttggggacacggcagatccgataggtcaggaaatagtatggagcttgcgggatgcggt

SEQ ID NO: 344631 - DNA, 4013 bp, Homo sapiens
  misc_feature (767)..(767): n is a, c, g, or t
  misc_feature (2601)..(2601): n is a, c, g, or t
  misc_feature (2740)..(2740): n is a, c, g, or t
cacagcggacctacaggcgctcagagaagcccaccttccccctctctgtcccgagaaggcttagagtggtacctgcttgctcaagcaacctgctgcctccacccagagcagccgctcctctcctccctcccttccggaagatgctgaggatgacagcttttagcctgactcttacatttctttggcagagcagttagaggccagactgtcctgtgaaggcttctccttccttcttcctctgctcaggagaaaacttacaaacttttaaatgtaagaggcagatgagctgggaacctggaagtgggttgcatctgactctgaaagttcctccctctcgctggcattacctcatgctgccacaaagtgaacggatcactggggaaggcagagtctccccggcactgctgggaccctcccttgaagagcccccatgtcctgtaggcagagccttgtagtctgtccgcttggttactgactcgggctgtctgaccagcccctcttctgtgccttgtctgaggtccttgtccatctctgtgattgggcagcttctctctctggattgggtcacgtgaagcgggaaactgaagccattactctccaaaccctgtttcatcttcccaagcatgtcggaaagctggcaacagccgccacagacgcagccgcagcagccacagccaccgcagcctcagcaccatgcagagccaccgccagccctggcagagcacacgctgcctccgggcacggcggagaaccccctgggctgtgcngtctatggcatcctcctgcagccagaccccggcctgcagcccccacaacacgcacccctgcaggcagcaggagagccaggccccaaatgtggcgtgtgtggtcacgacctggcgcacctgtccagtccgcatgagcaccagtgtctggcgggccatgaccgctcattccagtgcacacagtgtctcaagatcttccaccaggccactgacctgctggagcaccagtgcgtgcaggctgagcagaagcccttcgtctgtggggtctgcaagatgggcttctcactactcacctcactggcacagcaccacagctcccacagtggcctggtgaagtgttccatctgtgaaaagacctacaagccagctgaggcagcggagccagccaccacagccgccccgtcgcttcccgcagcacccgcgccttccactgtcacccctgctgaacaggccgacaagccctacagctgccccatctgccaaaagcccttcaagcacctgtcggagctctctcggcatgagcggatccacaccggtgagaagccctacaagtgcacgctgtgtgacaaaagcttcagccagtcgtcgcacctggtgcaccacaagcgcacgcacagctccgagcggccctacaagtgcgcagtctgcgagaagaccttcaagcaccgctctcacctggtgcgccacatgtacgcgcactcgggcgagcaccacctgttccgctgcaacgtgtgcgagttgcatttcaaggagtcgtcggagctgctgcagcacccgtgcacgccaagtggggagcggcccttccgctgcggcgagtgccagaaggccttcaagcggccctcggacctgcggcagcatgagcgcacacacagcgccgagcggcccttcaagtgcgacctgtgccccatgggcttcaagcagcagtacgcactgatgcgccaccggcgcacacacaagaccgaggagcccttcaaatgcggcctatgtgagaagggctttgggcagcccagccacctgctctaccaccagcacgtgcacaccctcgagactctcttcaagtgccccgtgtgccagaaaggctttgaccaatctgccgagctgctgcggcacaagtgcctgcccggcgcggccgagcggcccttcaagtgccctgtgtgcaacaaggcctacaagcgcgcgtcggccctgcagaagcaccagctggcccactgtgcggcggcagagaagcccctgcgctgcacgctttgcgaacgccgcttcttctcctcttccgagttcgtgcagcaccgctgcgatccggcccgcgagaagccactcaagtgcccagactgcgagaaacgcttcaagtacgcgtcagacctgcagcggcaccggcgggtacacacaggcgagaagccctacaagtgccccaactgcgacaaggccttcaagcagcgggagcatctcaacaagcaccagggcgtgcacgcccgcgagcagcagttcaagtgtgtatggtgcggggagcgcttcctagacgtggccttgttgcaggagcacagcgcgcagcacagtgccgccgccgcggcagcggagggcgcctaccaggtagccgcctgcctgccctgactctgcggctgtggcccctaccagcctgacctgagtcggcgccgtgggcccagcaggcctcgcgcagcctagctcctcacagctgccttgcaccaagggccccacccagctcggtgttctgagacctcgggagtgaggacgcaggggtatgaggcagggagagggtgtgccgctcgtactcctggcaccagcgggcagtgcgggcggccagattgctgtggcccatccngattccacaaacctctttcccatgacaagattcactttcttgagagccatcagcaccccccttatttccggggcactggagccaggctggaagtcaagtggcttctccctgccctaaggagggtgtgatgccagcccanccttcccatatctttcaagctagcagccacataggttaggaaagcggaggctcatggtggggctggggccccagaggtgggctaggtgtaaggcatcagttgccgtgtgggggagaaggccagctttaagacgtaggcctggggactgggagggcagagggtgagtcacagccctctccgtctgctctagccaggggcgacgtgtccccaggtttctggcaggggagatgtgcagggtgggtcttggggctgggtctgcctggagaccagtgggcccagggggaagggggaagctgagaagttcgtgtgacaccctcagccaagggacagtgccatccttggggacaggaggaaaagcagcctgtctctgctaagggcaaatcctccggttttggaagcgcccctcccacctttgtagtgcagttcctaggtgtggtggggaatgtgccgtgctctcagcagacagaactgctggtgtgaaaggcagggattgtcagcccacctgaggctgggaggaagcaggaccaggcctaggatctccccagcagatgcaaacaagtgtcctcccctgaattgtgtgaaccaaagcgtcaggggcttggggcacagccccagtcagctcaacccagtcctgcttcagagccaagaactaatcagtgggcacaccaagggccctgaggggcagggagatgccaccatgcttctctgtcaccgtaagaaggctgaccagccacgcccacctcctctgtctgactgagttccttcctgtggccacagggaggggctggtccttccccttggtgctggctctctgtcacaatgcctcaaaagacatggaacccaggcctacaaccgtcccaactgctaattcttttcctttcattttgctttctgaaagcagtttgttatactattcataacattgtagagtttaatttcatgtcattttggatcttatataaaaatgtgaggatttggatttttaaaaagaatgactccattttaggtagccacttttgatgttaatatatagtgagtccaatgtatgctttagaagtaaagacattgaccgtcacagaccacaaaaaaaaaaaggggggggtctaaaattcctgggggccaagttaagcgtaccagttttgtaacaggggccatagggggatataaagaggcgggcgggtaaagggtgggggaaacgtcgggcttggagcctctttggggacacggcagatccgataggtcaggaaatagtatggagcttgcgggatgcggt

SEQ ID NO: 344632 - DNA, 554 bp, Homo sapiens
tagctttataagttctaaaatagtatttagaagtgtgaagtgtgactggcacaaagttatagtctccctagggggcttgtctgaagggctgaacttgtctgatacttcttattctgcacgtgcttacgggtgtgtctggaagaagtaggttaatctcaatactttatagttgttcttcctatagtttaatttataaaataaatgagcccaatttttcttgcttcattgaggaaaaatgtttatatgcatagaggaagaagggaaataaaaaactagcccaatagagaccagctaaatctgttgtttttctagtttacaacttccataggatggggaaggcttataggtttattttgaaaaggacttgagcttaagtcctatggctggagagtaaaaatagatgatgataatgtttagcaattaattagcagagtagatgattttgtgattaaagaaagttaaaatgttactccagattaactgttaactagaaaacttttgcagttttgtggttttatgtaacatctcttcaattaaagatgatcttaagcact

SEQ ID NO: 344633 - DNA, 542 bp, Homo sapiens
aggaattttggaaatcttgtagccctcccgacttatttttcagtaaaaactgaagcctagaaatgtagcttttgcctaggtcacattggaaccaaaccctataactccagatttttttgctattttttttactgccttaaaaattttattttatttatttatttttttgagactcggtttcactgtgtcacccagggtggagtgcagtggcaccatcatggctcactgtagctcctatctcttgggtcaagccatcctctcaccttagcctcctgagtagctgggaccataagcacgtgccaccatgcctggctaatttttatttatttattatagaaatagggtttccttatgttgcccaggctggtctcgaacttctggcctcaaccaatccccctaccttggcttccaaaagttctgggattacttttgagtacattgcttttgagatggaaagctaggtggtatctccacttaacatgagaattgaggtaagatatcgagtcatccatatgatgttagattgatgttagattatgacg

SEQ ID NO: 344634 - DNA, 2572 bp, Homo sapiens
  misc_feature (5)..(6): n is a, c, g, or t
ggagnngcctgcctccaacctgcgggcgggaggtgggtggctgcggggcaattgaaaaagagccggcgaggagttccccgaaacttgttggaactccgggctcgcgcggaggccaggagctgagcggcggcggctgccggacgatgggagcgtgagcaggacggtgataacctctccccgatcgggttgcgagggcgccgggcagaggccaggacgcgagccgccagcggcgggacccatcgacgacttcccggggcgacaggagcagccccgagagccagggcgagcgcccgttccaggtggccggaccgcccgccgcgtccgcgccgcgctccctgcaggcaacgggagacgcccccgcgcagcgcgagcgcctcagcgcggccgctcgctctccccatcgagggacaaacttttcccaaacccgatccgagcccttggaccaaactcgcctgcgccgagagccgtccgcgtagagcgctccgtctccggcgagatgtccgagcgcaaagaaggcagaggcaaagggaagggcaagaagaaggagcgaggctccggcaagaagccggagtccgcggcgggcagccagagcccagccttgcctccccaattgaaagagatgaaaagccaggaatcggctgcaggttccaaactagtccttcggtgtgaaaccagttctgaatactcctctctcagattcaagtggttcaagaatgggaatgaattgaatcgaaaaaacaaaccacaaaatatcaagatacaaaaaaagccagggaagtcagaacttcgcattaacaaagcatcactggctgattctggagagtatatgtgcaaagtgatcagcaaattaggaaatgacagtgcctctgccaatatcaccatcgtggaatcaaacgagatcatcactggtatgccagcctcaactgaaggagcatatgtgtcttcagagtctcccattagaatatcagtatccacagaaggagcaaatacttcttcatctacatctacatccaccactgggacaagccatcttgtaaaatgtgcggagaaggagaaaactttctgtgtgaatggaggggagtgcttcatggtgaaagacctttcaaacccctcgagatacttgtgcaagtgccaacctggattcactggagcaagatgtactgagaatgtgcccatgaaagtccaaaaccaagaaaaggcggaggagctgtaccagaagagagtgctgaccataaccggcatctgcatcgccctccttgtggtcggcatcatgtgtgtggtggcctactgcaaaaccaagaaacagcggaaaaagctgcatgaccgtcttcggcagagccttcggtctgaacgaaacaatatgatgaacattgccaatgggcctcaccatcctaacccaccccccgagaatgtccagctggtgaatcaatacgtatctaaaaacgtcatctccagtgagcatattgttgagagagaagcagagacatccttttccaccagtcactatacttccacagcccatcactccactactgtcacccagactcctagccacagctggagcaacggacacactgaaagcatcctttccgaaagccactctgtaatcgtgatgtcatccgtagaaaacagtaggcacagcagcccaactgggggcccaagaggacgtcttaatggcacaggaggccctcgtgaatgtaacagcttcctcaggcatgccagagaaacccctgattcctaccgagactctcctcatagtgaaaggtatgtgtcagccatgaccaccccggctcgtatgtcacctgtagatttccacacgccaagctcccccaaatcgcccccttcggaaatgtctccacccgtgtccagcatgacggtgtccatgccttccatggcggtcagccccttcatggaagaagagagacctctacttctcgtgacaccaccaaggctgcgggagaagaagtttgaccatcaccctcagcagttcagctccttccaccacaaccccgcgcatgacagtaacagcctccctgctagccccttgaggatagtggaggatgaggagtatgaaacgacccaagagtacgagccagcccaagagcctgttaagaaactcgccaatagccggcgggccaaaagaaccaagcccaatggccacattgctaacagattggaagtggacagcaacacaagctcccagagcagtaactcagagagtgaaacagaagatgaaagagtaggtgaagatacgcctttcctgggcatacagaaccccctggcagccagtcttgaggcaacacctgccttccgcctggctgacagcaggactaacccagcaggccgcttctcgacacaggaagaaatccaggccaggctgtctagtgtaattgctaaccaagaccctattgctgtataaaacctaaataaacacatagattcacctgtaaaactttattttatataataaagtattccaccttaaattaaacaatttattttattttagcagttctgcaaatagaaaacaggaaaaaaacttttataaattaaatatatgtatgtaaaaatg

SEQ ID NO: 344635 - DNA, 2522 bp, Homo sapiens
  misc_feature (5)..(6): n is a, c, g, or t
ggagnngcctgcctccaacctgcgggcgggaggtgggtggctgcggggcaattgaaaaagagccggcgaggagttccccgaaacttgttggaactccgggctcgcgcggaggccaggagctgagcggcggcggctgccggacgatgggagcgtgagcaggacggtgataacctctccccgatcgggttgcgagggcgccgggcagaggccaggacgcgagccgccagcggcgggacccatcgacgacttcccggggcgacaggagcagccccgagagccagggcgagcgcccgttccaggtggccggaccgcccgccgcgtccgcgccgcgctccctgcaggcaacgggagacgcccccgcgcagcgcgagcgcctcagcgcggccgctcgctctccccatcgagggacaaacttttcccaaacccgatccgagcccttggaccaaactcgcctgcgccgagagccgtccgcgtagagcgctccgtctccggcgagatgtccgagcgcaaagaaggcagaggcaaagggaagggcaagaagaaggagcgaggctccggcaagaagccggagtccgcggcgggcagccagagcccagccttgcctccccaattgaaagagatgaaaagccaggaatcggctgcaggttccaaactagtccttcggtgtgaaaccagttctgaatactcctctctcagattcaagtggttcaagaatgggaatgaattgaatcgaaaaaacaaaccacaaaatatcaagatacaaaaaaagccagggaagtcagaacttcgcattaacaaagcatcactggctgattctggagagtatatgtgcaaagtgatcagcaaattaggaaatgacagtgcctctgccaatatcaccatcgtggaatcaaacgagatcatcactggtatgccagcctcaactgaaggagcatatgtgtcttcagagtctcccattagaatatcagtatccacagaaggagcaaatacttcttcatctacatctacatccaccactgggacaagccatcttgtaaaatgtgcggagaaggagaaaactttctgtgtgaatggaggggagtgcttcatggtgaaagacctttcaaacccctcgagatacttgtgcaagtgccaacctggattcactggagcaagatgtactgagaatgtgcccatgaaagtccaaaaccaagaaaaggcggaggagctgtaccagaagagagtgctgaccataaccggcatctgcatcgccctccttgtggtcggcatcatgtgtgtggtggcctactgcaaaaccaagaaacagcggaaaaagctgcatgaccgtcttcggcagagccttcggtctgaacgaaacaatatgatgaacattgccaatgggcctcaccatcctaacccaccccccgagaatgtccagctggtgaatcaatacgtatctaaaaacgtcatctccagtgagcatattgttgagagagaagcagagacatccttttccaccagtcactatacttccacagcccatcactccactactgtcacccagactcctagccacagctggagcaacggacacactgaaagcatcctttccgaaagccactctgtaatcgtgatgtcatccgtagaaaacagtaggcacagcagcccaactgggggcccaagaggacgtcttaatggcacaggaggccctcgtgaatgtaacagcttcctcaggcatgccagagaaacccctgattcctaccgagactctcctcatagtgaaaggtatgtgtcagccatgaccaccccggctcgtatgtcacctgtagatttccacacgccaagctcccccaaatcgcccccttcggaaatgtctccacccgtgtccagcatgacggtgtccatgccttccatggcggtcagccccttcatggaagaagagagacctctacttctcgtgacaccaccaaggctgcgggagaagaagtttgaccatcaccctcagcagttcagctccttccaccacaaccccgcgcatgacagtaacagcctccctgctagccccttgaggatagtggaggatgaggagtatgaaacgacccaagagtacgagccagcccaagagcctgttaagaaactcgccaatagccggcgggccaaaagaaccaagcccaatggccacattgctaacagattggaagtggacagcaacacaagctcccagagcagtaactcagagagtgaaacagaagatgaaagagtaggtgaagatacgcctttcctgggcatacagaaccccctggcagccagtcttgaggcaacacctgccttccgcctggctgacagcaggactaacccagcaggccgcttctcgacacaggaagaaatccaggccaggctgtctagtgtaattgctaaccaagaccctattgctgtataaaacctaaataaacacatagattcacctgtaaaactttattttatataataaagtattccaccttaaattaaacaatttattttattttagcagttctgcaaat

SEQ ID NO: 344636 - DNA, 2587 bp, Homo sapiens
  misc_feature (5)..(6): n is a, c, g, or t
ggagnngcctgcctccaacctgcgggcgggaggtgggtggctgcggggcaattgaaaaagagccggcgaggagttccccgaaacttgttggaactccgggctcgcgcggaggccaggagctgagcggcggcggctgccggacgatgggagcgtgagcaggacggtgataacctctccccgatcgggttgcgagggcgccgggcagaggccaggacgcgagccgccagcggcgggacccatcgacgacttcccggggcgacaggagcagccccgagagccagggcgagcgcccgttccaggtggccggaccgcccgccgcgtccgcgccgcgctccctgcaggcaacgggagacgcccccgcgcagcgcgagcgcctcagcgcggccgctcgctctccccatcgagggacaaacttttcccaaacccgatccgagcccttggaccaaactcgcctgcgccgagagccgtccgcgtagagcgctccgtctccggcgagatgtccgagcgcaaagaaggcagaggcaaagggaagggcaagaagaaggagcgaggctccggcaagaagccggagtccgcggcgggcagccagagcccagccttgcctccccaattgaaagagatgaaaagccaggaatcggctgcaggttccaaactagtccttcggtgtgaaaccagttctgaatactcctctctcagattcaagtggttcaagaatgggaatgaattgaatcgaaaaaacaaaccacaaaatatcaagatacaaaaaaagccagggaagtcagaacttcgcattaacaaagcatcactggctgattctggagagtatatgtgcaaagtgatcagcaaattaggaaatgacagtgcctctgccaatatcaccatcgtggaatcaaacgagatcatcactggtatgccagcctcaactgaaggagcatatgtgtcttcagagtctcccattagaatatcagtatccacagaaggagcaaatacttcttcatctacatctacatccaccactgggacaagccatcttgtaaaatgtgcggagaaggagaaaactttctgtgtgaatggaggggagtgcttcatggtgaaagacctttcaaacccctcgagatacttgtgcaagtgcccaaatgagtttactggtgatcgctgccaaaactacgtaatggccagcttctacaagcatcttgggattgaatttatggaggcggaggagctgtaccagaagagagtgctgaccataaccggcatctgcatcgccctccttgtggtcggcatcatgtgtgtggtggcctactgcaaaaccaagaaacagcggaaaaagctgcatgaccgtcttcggcagagccttcggtctgaacgaaacaatatgatgaacattgccaatgggcctcaccatcctaacccaccccccgagaatgtccagctggtgaatcaatacgtatctaaaaacgtcatctccagtgagcatattgttgagagagaagcagagacatccttttccaccagtcactatacttccacagcccatcactccactactgtcacccagactcctagccacagctggagcaacggacacactgaaagcatcctttccgaaagccactctgtaatcgtgatgtcatccgtagaaaacagtaggcacagcagcccaactgggggcccaagaggacgtcttaatggcacaggaggccctcgtgaatgtaacagcttcctcaggcatgccagagaaacccctgattcctaccgagactctcctcatagtgaaaggtatgtgtcagccatgaccaccccggctcgtatgtcacctgtagatttccacacgccaagctcccccaaatcgcccccttcggaaatgtctccacccgtgtccagcatgacggtgtccatgccttccatggcggtcagccccttcatggaagaagagagacctctacttctcgtgacaccaccaaggctgcgggagaagaagtttgaccatcaccctcagcagttcagctccttccaccacaaccccgcgcatgacagtaacagcctccctgctagccccttgaggatagtggaggatgaggagtatgaaacgacccaagagtacgagccagcccaagagcctgttaagaaactcgccaatagccggcgggccaaaagaaccaagcccaatggccacattgctaacagattggaagtggacagcaacacaagctcccagagcagtaactcagagagtgaaacagaagatgaaagagtaggtgaagatacgcctttcctgggcatacagaaccccctggcagccagtcttgaggcaacacctgccttccgcctggctgacagcaggactaacccagcaggccgcttctcgacacaggaagaaatccaggccaggctgtctagtgtaattgctaaccaagaccctattgctgtataaaacctaaataaacacatagattcacctgtaaaactttattttatataataaagtattccaccttaaattaaacaatttattttattttagcagttctgcaaatagaaaacaggaaaaaaacttttataaattaaatatatgtatgtaaaaatg

SEQ ID NO: 344637 - DNA, 2181 bp, Homo sapiens
  misc_feature (5)..(6): n is a, c, g, or t
ggagnngcctgcctccaacctgcgggcgggaggtgggtggctgcggggcaattgaaaaagagccggcgaggagttccccgaaacttgttggaactccgggctcgcgcggaggccaggagctgagcggcggcggctgccggacgatgggagcgtgagcaggacggtgataacctctccccgatcgggttgcgagggcgccgggcagaggccaggacgcgagccgccagcggcgggacccatcgacgacttcccggggcgacaggagcagccccgagagccagggcgagcgcccgttccaggtggccggaccgcccgccgcgtccgcgccgcgctccctgcaggcaacgggagacgcccccgcgcagcgcgagcgcctcagcgcggccgctcgctctccccatcgagggacaaacttttcccaaacccgatccgagcccttggaccaaactcgcctgcgccgagagccgtccgcgtagagcgctccgtctccggcgagatgtccgagcgcaaagaaggcagaggcaaagggaagggcaagaagaaggagcgaggctccggcaagaagccggagtccgcggcgggcagccagagcccagccttgcctccccaattgaaagagatgaaaagccaggaatcggctgcaggttccaaactagtccttcggtgtgaaaccagttctgaatactcctctctcagattcaagtggttcaagaatgggaatgaattgaatcgaaaaaacaaaccacaaaatatcaagatacaaaaaaagccagggaagtcagaacttcgcattaacaaagcatcactggctgattctggagagtatatgtgcaaagtgatcagcaaattaggaaatgacagtgcctctgccaatatcaccatcgtggaatcaaacgagatcatcactggtatgccagcctcaactgaaggagcatatgtgtcttcagagtctcccattagaatatcagtatccacagaaggagcaaatacttcttcatctacatctacatccaccactgggacaagccatcttgtaaaatgtgcggagaaggagaaaactttctgtgtgaatggaggggagtgcttcatggtgaaagacctttcaaacccctcgagatacttgtgcaagtgccaacctggattcactggagcaagatgtactgagaatgtgcccatgaaagtccaaaaccaagaaaaggcggaggagctgtaccagaagagagtgctgaccataaccggcatctgcatcgccctccttgtggtcggcatcatgtgtgtggtggcctactgcaaaaccaagaaacagcggaaaaagctgcatgaccgtcttcggcagagccttcggtctgaacgaaacaatatgatgaacattgccaatgggcctcaccatcctaacccaccccccgagaatgtccagctggtgaatcaatacgtatctaaaaacgtcatctccagtgagcatattgttgagagagaagcagagacatccttttccaccagtcactatacttccacagcccatcactccactactgtcacccagactcctagccacagctggagcaacggacacactgaaagcatcctttccgaaagccactctgtaatcgtgatgtcatccgtagaaaacagtaggcacagcagcccaactgggggcccaagaggacgtcttaatggcacaggaggccctcgtgaatgtaacagcttcctcaggcatgccagagaaacccctgattcctaccgagactctcctcatagtgaaagacataaccttatagctgagctaaggagaaacaaggcacacagatccaaatgcatgcagatccagctatcagcaactcatcttagatcttcttccattccccatttgggcttcattctctaagaccccttggcctttaggaaggtatgtgtcagccatgaccaccccggctcgtatgtcacctgtagatttccacacgccaagctcccccaaatcgcccccttcggaaatgtctccacccgtgtccagcatgacggtgtccatgccttccatggcggtcagccccttcatggaagaagagagacctctacttctcgtgacaccaccaaggctgcgggagaagaagtttgaccatcaccctcagcagttcagctccttccaccacaaccccgcgcgcccacgcgtccgcggacgcgtgg

SEQ ID NO: 344638 - DNA, 371 bp, Homo sapiens
tgcagcacatggagtttccagctctggccatgggctcagacccactcggggtctcagtgtcctcagttgtaacattagagagatggcatcaatgcttgataaggacccttctataattccaattgccagttatccaaactctgattcggtggtcgagctggcctcgtgttcttatctgctaaccctgtcttaccttccagcctcaacataaccttatagctgagctaaggagaaacaaggcacacagatccaaatgcatgcagatccagctatcagcaactcatcttagatcttcttccattccccatttgggcttcattctctaagaccccttggcctttaggaaggtatagtatttaagtaatacttct

SEQ ID NO: 344639 - DNA, 1538 bp, Homo sapiens
  misc_feature (5)..(6): n is a, c, g, or t
ggagnngcctgcctccaacctgcgggcgggaggtgggtggctgcggggcaattgaaaaagagccggcgaggagttccccgaaacttgttggaactccgggctcgcgcggaggccaggagctgagcggcggcggctgccggacgatgggagcgtgagcaggacggtgataacctctccccgatcgggttgcgagggcgccgggcagaggccaggacgcgagccgccagcggcgggacccatcgacgacttcccggggcgacaggagcagccccgagagccagggcgagcgcccgttccaggtggccggaccgcccgccgcgtccgcgccgcgctccctgcaggcaacgggagacgcccccgcgcagcgcgagcgcctcagcgcggccgctcgctctccccatcgagggacaaacttttcccaaacccgatccgagcccttggaccaaactcgcctgcgccgagagccgtccgcgtagagcgctccgtctccggcgagatgtccgagcgcaaagaaggcagaggcaaagggaagggcaagaagaaggagcgaggctccggcaagaagccggagtccgcggcgggcagccagagcccagccttgcctccccaattgaaagagatgaaaagccaggaatcggctgcaggttccaaactagtccttcggtgtgaaaccagttctgaatactcctctctcagattcaagtggttcaagaatgggaatgaattgaatcgaaaaaacaaaccacaaaatatcaagatacaaaaaaagccagggaagtcagaacttcgcattaacaaagcatcactggctgattctggagagtatatgtgcaaagtgatcagcaaattaggaaatgacagtgcctctgccaatatcaccatcgtggaatcaaacgagatcatcactggtatgccagcctcaactgaaggagcatatgtgtcttcagagtctcccattagaatatcagtatccacagaaggagcaaatacttcttcatctacatctacatccaccactgggacaagccatcttgtaaaatgtgcggagaaggagaaaactttctgtgtgaatggaggggagtgcttcatggtgaaagacctttcaaacccctcgagatacttgtgcaagtgcccaaatgagtttactggtgatcgctgccaaaactacgtaatggccagcttctacagtacgtccactccctttctgtctctgcctgaataggagcatgctcagttggtgctgctttcttgttgctgcatctcccctcagattccacctagagctagatgtgtcttaccagatctaatgtgggtgtgggggaacctttaaaaaagagggggtttgtttttccttcccttttttcccaaaaaaaggggggttttaaaaaaaaaaaaaagggggggggaggggccccggtttttttcgcggtttttatttttaagtggggggcccccctttgtgtggccccctcccccggccggtgaattatgttttaaaaagggggccttttaagaggggttccccttttttttttgga

SEQ ID NO: 344640 - DNA, 1772 bp, Homo sapiens
  misc_feature (5)..(6): n is a, c, g, or t
ggagnngcctgcctccaacctgcgggcgggaggtgggtggctgcggggcaattgaaaaagagccggcgaggagttccccgaaacttgttggaactccgggctcgcgcggaggccaggagctgagcggcggcggctgccggacgatgggagcgtgagcaggacggtgataacctctccccgatcgggttgcgagggcgccgggcagaggccaggacgcgagccgccagcggcgggacccatcgacgacttcccggggcgacaggagcagccccgagagccagggcgagcgcccgttccaggtggccggaccgcccgccgcgtccgcgccgcgctccctgcaggcaacgggagacgcccccgcgcagcgcgagcgcctcagcgcggccgctcgctctccccatcgagggacaaacttttcccaaacccgatccgagcccttggaccaaactcgcctgcgccgagagccgtccgcgtagagcgctccgtctccggcgagatgtccgagcgcaaagaaggcagaggcaaagggaagggcaagaagaaggagcgaggctccggcaagaagccggagtccgcggcgggcagccagagcccagccttgcctccccaattgaaagagatgaaaagccaggaatcggctgcaggttccaaactagtccttcggtgtgaaaccagttctgaatactcctctctcagattcaagtggttcaagaatgggaatgaattgaatcgaaaaaacaaaccacaaaatatcaagatacaaaaaaagccagggaagtcagaacttcgcattaacaaagcatcactggctgattctggagagtatatgtgcaaagtgatcagcaaattaggaaatgacagtgcctctgccaatatcaccatcgtggaatcaaacgagatcatcactggtatgccagcctcaactgaaggagcatatgtgtcttcagagtctcccattagaatatcagtatccacagaaggagcaaatacttcttcatctacatctacatccaccactgggacaagccatcttgtaaaatgtgcggagaaggagaaaactttctgtgtgaatggaggggagtgcttcatggtgaaagacctttcaaacccctcgagatacttgtgcaagtgccaacctggattcactggagcaagatgtactgagaatgtgcccatgaaagtccaaaaccaagaaagtgcccaaatgagtttactggtgatcgctgccaaaactacgtaatggccagcttctacagtacgtccactccctttctgtctctgcctgaataggagcatgctcagttggtgctgctttcttgttgctgcatctcccctcagattccacctagagctagatgtgtcttaccagatctaatattgactgcctctgcctgtcgcatgagaacattaacaaaagcaattgtattacttcctctgttcgcgactagttggctctgagatactaataggtgtgtgaggctccggatgtttctggaattgatattgaatgatgtgatacaaattgatagtcaatatcaagcagtgaaatatgataataaaggcatttcaaagtctcacttttattgataaaataaaaatcattctactgaacagtccatcttctttatacaatgaccacatcctgaaaagggtgttgctaagctgtaaccgatatgcacttgaaatgatggtaagttaattttgattcagaatgtgttatttgtcacaaataaacataataaaaggagttcagatgtttttcttcattaacc

SEQ ID NO: 344641 - DNA, 3030 bp, Homo sapiens
ggaagaaagtgaatgagcactcaagaaggacaaagaggagtagtcgggggtggggtggaggcagggcggggaagggagtgaccgcccctcctggctgcactcttgcctccggagccctctgatcctgtttgcagtgatgctccgagggcaggcacctgctgctctgtaatgattcagcccctttcagccgtcgtcgcgttaacacaacaggatgctgttgctattgtcactactgcctctcctgccgccgctgctgctgccgccgccgccaccgccgctggtcctccttctgcttttacttctcctgcatgacagttgttttcttcatctgagcagacaccagcttcagatgctcgaggtgagaaacatgcctttcagtttgggctactggtttacttaattaatcagccggcagctccgtcgatctattttcgtccctgtcctcttgacgagcccgggatggtttggagtagcatttaaaagaactagaaaagtggcccagaaacagcagcttaaagaattattacgatatactttgattttgtagttgctaggagcttttcttccccccttgcatctttctgaactcttcttgattttaataatggccttggacttggacgatttatcgatttccccctgtaagatgctgtatcatttggttgggggggcctctgcgtggtaatggaccgtgagagcggccaggccttcttctggaggtgagccgatggagatttattccccagacatgtctgaggtcgccgccgagaggtcctccagcccctccactcagctgagtgcagacccatctcttgatgggcttccggcagcagaagacatgccagagccccagactgaagatgggagaacccctggactcgtgggcctggccgtgccctgctgtgcgtgcctagaagctgagcgcctgagaggttgcctcaactcagagaaaatctgcattgtccccatcctggcttgcctggtcagcctctgcctctgcatcgccggcctcaagtgggtatttgtggacaagatctttgaatatgactctcctactcaccttgaccctggggggttaggccaggaccctattatttctctggacgcaactgctgcctcagctgtgtgggtgtcgtctgaggcatacacttcacctgtctctagggctcaatctgaaagtgaggttcaagttacagtgcaaggtgacaaggctgttgtctcctttgaaccatcagcggcaccgacaccgaagaatcgtatttttgccttttctttcttgccgtccactgcgccatccttcccttcacccacccggaaccctgaggtgagaacgcccaagtcagcaactcagccacaaacaacagaaactaatctccaaactgctcctaaactttctacatctacatccaccactgggacaagccatcttgtaaaatgtgcggagaaggagaaaactttctgtgtgaatggaggggagtgcttcatggtgaaagacctttcaaacccctcgagatacttgtgcaagtgccaacctggattcactggagcaagatgtactgagaatgtgcccatgaaagtccaaaaccaagaaaagcatcttgggattgaatttatggaggcggaggagctgtaccagaagagagtgctgaccataaccggcatctgcatcgccctccttgtggtcggcatcatgtgtgtggtggcctactgcaaaaccaagaaacagcggaaaaagctgcatgaccgtcttcggcagagccttcggtctgaacgaaacaatatgatgaacattgccaatgggcctcaccatcctaacccaccccccgagaatgtccagctggtgaatcaatacgtatctaaaaacgtcatctccagtgagcatattgttgagagagaagcagagacatccttttccaccagtcactatacttccacagcccatcactccactactgtcacccagactcctagccacagctggagcaacggacacactgaaagcatcctttccgaaagccactctgtaatcgtgatgtcatccgtagaaaacagtaggcacagcagcccaactgggggcccaagaggacgtcttaatggcacaggaggccctcgtgaatgtaacagcttcctcaggcatgccagagaaacccctgattcctaccgagactctcctcatagtgaaaggtatgtgtcagccatgaccaccccggctcgtatgtcacctgtagatttccacacgccaagctcccccaaatcgcccccttcggaaatgtctccacccgtgtccagcatgacggtgtccatgccttccatggcggtcagccccttcatggaagaagagagacctctacttctcgtgacaccaccaaggctgcgggagaagaagtttgaccatcaccctcagcagttcagctccttccaccacaaccccgcgcatgacagtaacagcctccctgctagccccttgaggatagtggaggatgaggagtatgaaacgacccaagagtacgagccagcccaagagcctgttaagaaactcgccaatagccggcgggccaaaagaaccaagcccaatggccacattgctaacagattggaagtggacagcaacacaagctcccagagcagtaactcagagagtgaaacagaagatgaaagagtaggtgaagatacgcctttcctgggcatacagaaccccctggcagccagtcttgaggcaacacctgccttccgcctggctgacagcaggactaacccagcaggccgcttctcgacacaggaagaaatccaggccaggctgtctagtgtaattgctaaccaagaccctattgctgtataaaacctaaataaacacatagattcacctgtaaaactttattttatataataaagtattccaccttaaattaaacaatttattttattttagcagttctgcaaatagaaaacaggaaaaaaacttttataaattaaatatatgtatgtaaaaatgtgttatgtgccatatgtagcaattttttacagtatttc

SEQ ID NO: 344642 - DNA, 2026 bp, Homo sapiens
tgcccttatacctcttcgcctttctgtggttccatccacttcttccccctcctcctcccataaacaactctcctacccctgcacccccaataaataaataaaaggaggagggcaaggggggaggaggaggagtggtgctgcgaggggaaggaaaagggaggcagcgcgagaagagccgggcagagtccgaaccgacagccagaagcccgcacgcacctcgcaccatgagatggcgacgcgccccgcgccgctccgggcgtcccggcccccgggcccagcgccccggctccgccgcccgctcgtcgccgccgctgccgctgctgccactactgctgctgctggggaccgcggccctggcgccgggggcggcggccggcaacgaggcggctcccgcgggggcctcggtgtgctactcgtccccgcccagcgtgggatcggtgcaggagctagctcagcgcgccgcggtggtgatcgagggaaaggtgcacccgcagcggcggcagcagggggcactcgacaggaaggcggcggcggcggcgggcgaggcaggggcgtggggcggcgatcgcgagccgccagccgcgggcccacgggcgctggggccgcccgccgaggagccgctgctcgccgccaacgggaccgtgccctcttggcccaccgccccggtgcccagcgccggcgagcccggggaggaggcgccctatctggtgaaggtgcaccaggtgtgggcggtgaaagccgggggcttgaagaaggactcgctgctcaccgtgcgcctggggacctggggccaccccgccttcccctcctgcgggaggctcaaggaggacagcaggtacatcttcttcatggagcccgacgccaacagcaccagccgcgcgccggccgccttccgagcctctttcccccctctggagacgggccggaacctcaagaaggaggtcagccgggtgctgtgcaagcggtgcgccttgcctccccaattgaaagagatgaaaagccaggaatcggctgcaggttccaaactagtccttcggtgtgaaaccagttctgaatactcctctctcagattcaagtggttcaagaatgggaatgaattgaatcgaaaaaacaaaccacaaaatatcaagatacaaaaaaagccagggaagtcagaacttcgcattaacaaagcatcactggctgattctggagagtatatgtgcaaagtgatcagcaaattaggaaatgacagtgcctctgccaatatcaccatcgtggaatcaaacgagatcatcactggtatgccagcctcaactgaaggagcatatgtgtcttcagctacatctacatccaccactgggacaagccatcttgtaaaatgtgcggagaaggagaaaactttctgtgtgaatggaggggagtgcttcatggtgaaagacctttcaaacccctcgagatacttgtgcaagtgcccaaatgagtttactggtgatcgctgccaaaactacgtaatggccagcttctacagtacgtccactccctttctgtctctgcctgaataggagcatgctcagttggtgctgctttcttgttgctgcatctcccctcagattccacctagagctagatgtgtcttaccagatctaatattgactgcctctgcctgtcgcatgagaacattaacaaaagcaattgtattacttcctctgttcgcgactagttggctctgagatactaataggtgtgtgaggctccggatgtttctggaattgatattgaatgatgtgatacaaattgatagtcaatatcaagcagtgaaatatgataataaaggcatttcaaagtctcacttttattgataaaataaaaatcattctactgaacagtccatcttctttatacaatgaccacatcctgaaaagggtgttgctaagctgtaaccgatatgcacttgaaatgatggtaagttaattttgattcagaatgtgttatttgtcacaaataaacataataaaaggagttcagatgtttttcttcattaacc

SEQ ID NO: 344643 - DNA, 487 bp, Homo sapiens
ccaaacccgatccgagcccttggaccaaactcgcctgcgccgagagccgtccgcgtagagcgctccgtctccggcgagatgtccgagcgcaaagaaggcagaggcaaagggaagggcaagaagaaggagcgaggctccggcaagaagccggagtccgcggcgggcagccagagcccaggtgggtgcgcagcgcggcccgggccccacgatcctcctcctgctcctcctactcctcctcctcctcggatgccgtggcctctccctccccctctccctcgcccgtcctcttcgccctgcgctctgagcgcccgttgagtcgcgcggtgcttcccctcctgggggccgccgctcacctgggcgccgagtcctaccgggcgcctacgcccagagctcagggcaagggacagcagtcccggccgcaccctcccagagtcccgggagcgcttcgctccctggcacggcccctccccagcgccttagcggctga

SEQ ID NO: 344644 - DNA, 449 bp, Homo sapiens
caaagccatcatatggaaaactgagatgaataaaacatcggatttcattttaaggggttccctttgaaagaaggcaaccacttaaagtgctgggatctttccaccataccaacttaagaactgcattctgtccaaatttttaaccatttgggggaagtgccagagcctgaaagccatgatcagggcaaagattcagttcctgagggtgaactcaccaagtttcagtcaaatgacactgaaggagcttctttctagcatatattcacctcttctctttttctctgtttttctaccattgtttttttgtttcttctctcaggtgcccaaatgagtttactggtgatcgctgccaaaactacgtaatggccagcttctacagtacgtccactccctttctgtctctgcctgaataggagcatgctcagttggtgctgctttcttgttgctgc

SEQ ID NO: 344645 - DNA, 1704 bp, Homo sapiens
  misc_feature (5)..(6): n is a, c, g, or t
ggagnngcctgcctccaacctgcgggcgggaggtgggtggctgcggggcaattgaaaaagagccggcgaggagttccccgaaacttgttggaactccgggctcgcgcggaggccaggagctgagcggcggcggctgccggacgatgggagcgtgagcaggacggtgataacctctccccgatcgggttgcgagggcgccgggcagaggccaggacgcgagccgccagcggcgggacccatcgacgacttcccggggcgacaggagcagccccgagagccagggcgagcgcccgttccaggtggccggaccgcccgccgcgtccgcgccgcgctccctgcaggcaacgggagacgcccccgcgcagcgcgagcgcctcagcgcggccgctcgctctccccatcgagggacaaacttttcccaaacccgatccgagcccttggaccaaactcgcctgcgccgagagccgtccgcgtagagcgctccgtctccggcgagatgtccgagcgcaaagaaggcagaggcaaagggaagggcaagaagaaggagcgaggctccggcaagaagccggagtccgcggcgggcagccagagcccagccttgcctccccaattgaaagagatgaaaagccaggaatcggctgcaggttccaaactagtccttcggtgtgaaaccagttctgaatactcctctctcagattcaagtggttcaagaatgggaatgaattgaatcgaaaaaacaaaccacaaaatatcaagatacaaaaaaagccagggaagtcagaacttcgcattaacaaagcatcactggctgattctggagagtatatgtgcaaagtgatcagcaaattaggaaatgacagtgcctctgccaatatcaccatcgtggaatcaaacgagatcatcactggtatgccagcctcaactgaaggagcatatgtgtcttcagagtctcccattagaatatcagtatccacagaaggagcaaatacttcttcatctacatctacatccaccactgggacaagccatcttgtaaaatgtgcggagaaggagaaaactttctgtgtgaatggaggggagtgcttcatggtgaaagacctttcaaacccctcgagatacttgtgcaagtgcccaaatgagtttactggtgatcgctgccaaaactacgtaatggccagcttctacagtacgtccactccctttctgtctctgcctgaataggagcatgctcagttggtgctgctttcttgttgctgcatctcccctcagattccacctagagctagatgtgtcttaccagatctaatattgactgcctctgcctgtcgcatgagaacattaacaaaagcaattgtattacttcctctgttcgcgactagttggctctgagatactaataggtgtgtgaggctccggatgtttctggaattgatattgaatgatgtgatacaaattgatagtcaatatcaagcagtgaaatatgataataaaggcatttcaaagtctcacttttattgataaaataaaaatcattctactgaacagtccatcttctttatacaatgaccacatcctgaaaagggtgttgctaagctgtaaccgatatgcacttgaaatgatggtaagttaattttgattcagaatgtgttatttgtcacaaataaacataataaaaggagttcagatgtttttcttcattaacc

SEQ ID NO: 344646 - DNA, 2100 bp, Homo sapiens
ggaagaaagtgaatgagcactcaagaaggacaaagaggagtagtcgggggtggggtggaggcagggcggggaagggagtgaccgcccctcctggctgcactcttgcctccggagccctctgatcctgtttgcagtgatgctccgagggcaggcacctgctgctctgtaatgattcagcccctttcagccgtcgtcgcgttaacacaacaggatgctgttgctattgtcactactgcctctcctgccgccgctgctgctgccgccgccgccaccgccgctggtcctccttctgcttttacttctcctgcatgacagttgttttcttcatctgagcagacaccagcttcagatgctcgaggtgagaaacatgcctttcagtttgggctactggtttacttaattaatcagccggcagctccgtcgatctattttcgtccctgtcctcttgacgagcccgggatggtttggagtagcatttaaaagaactagaaaagtggcccagaaacagcagcttaaagaattattacgatatactttgattttgtagttgctaggagcttttcttccccccttgcatctttctgaactcttcttgattttaataatggccttggacttggacgatttatcgatttccccctgtaagatgctgtatcatttggttgggggggcctctgcgtggtaatggaccgtgagagcggccaggccttcttctggaggtgagccgatggagatttattccccagacatgtctgaggtcgccgccgagaggtcctccagcccctccactcagctgagtgcagacccatctcttgatgggcttccggcagcagaagacatgccagagccccagactgaagatgggagaacccctggactcgtgggcctggccgtgccctgctgtgcgtgcctagaagctgagcgcctgagaggttgcctcaactcagagaaaatctgcattgtccccatcctggcttgcctggtcagcctctgcctctgcatcgccggcctcaagtgggtatttgtggacaagatctttgaatatgactctcctactcaccttgaccctggggggttaggccaggaccctattatttctctggacgcaactgctgcctcagctgtgtgggtgtcgtctgaggcatacacttcacctgtctctagggctcaatctgaaagtgaggttcaagttacagtgcaaggtgacaaggctgttgtctcctttgaaccatcagcggcaccgacaccgaagaatcgtatttttgccttttctttcttgccgtccactgcgccatccttcccttcacccacccggaaccctgaggtgagaacgcccaagtcagcaactcagccacaaacaacagaaactaatctccaaactgctcctaaactttctacatctacatccaccactgggacaagccatcttgtaaaatgtgcggagaaggagaaaactttctgtgtgaatggaggggagtgcttcatggtgaaagacctttcaaacccctcgagatacttgtgcaagtgcccaaatgagtttactggtgatcgctgccaaaactacgtaatggccagcttctacagtacgtccactccctttctgtctctgcctgaataggagcatgctcagttggtgctgctttcttgttgctgcatctcccctcagattccacctagagctagatgtgtcttaccagatctaatattgactgcctctgcctgtcgcatgagaacattaacaaaagcaattgtattacttcctctgttcgcgactagttggctctgagatactaataggtgtgtgaggctccggatgtttctggaattgatattgaatgatgtgatacaaattgatagtcaatatcaagcagtgaaatatgataataaaggcatttcaaagtctcacttttattgataaaataaaaatcattctactgaacagtccatcttctttatacaatgaccacatcctgaaaagggtgttgctaagctgtaaccgatatgcacttgaaatgatggtaagttaattttgattcagaatgtgttatttgtcacaaataaacataataaaaggagttcagatgtttttcttcattaacc

SEQ ID NO: 344647 - DNA, 1975 bp, Homo sapiens
tgcccttatacctcttcgcctttctgtggttccatccacttcttccccctcctcctcccataaacaactctcctacccctgcacccccaataaataaataaaaggaggagggcaaggggggaggaggaggagtggtgctgcgaggggaaggaaaagggaggcagcgcgagaagagccgggcagagtccgaaccgacagccagaagcccgcacgcacctcgcaccatgagatggcgacgcgccccgcgccgctccgggcgtcccggcccccgggcccagcgccccggctccgccgcccgctcgtcgccgccgctgccgctgctgccactactgctgctgctggggaccgcggccctggcgccgggggcggcggccggcaacgaggcggctcccgcgggggcctcggtgtgctactcgtccccgcccagcgtgggatcggtgcaggagctagctcagcgcgccgcggtggtgatcgagggaaaggtgcacccgcagcggcggcagcagggggcactcgacaggaaggcggcggcggcggcgggcgaggcaggggcgtggggcggcgatcgcgagccgccagccgcgggcccacgggcgctggggccgcccgccgaggagccgctgctcgccgccaacgggaccgtgccctcttggcccaccgccccggtgcccagcgccggcgagcccggggaggaggcgccctatctggtgaaggtgcaccaggtgtgggcggtgaaagccgggggcttgaagaaggactcgctgctcaccgtgcgcctggggacctggggccaccccgccttcccctcctgcgggaggctcaaggaggacagcaggtacatcttcttcatggagcccgacgccaacagcaccagccgcgcgccggccgccttccgagcctctttcccccctctggagacgggccggaacctcaagaaggaggtcagccgggtgctgtgcaagcggtgcgccttgcctccccaattgaaagagatgaaaagccaggaatcggctgcaggttccaaactagtccttcggtgtgaaaccagttctgaatactcctctctcagattcaagtggttcaagaatgggaatgaattgaatcgaaaaaacaaaccacaaaatatcaagatacaaaaaaagccagggaagtcagaacttcgcattaacaaagcatcactggctgattctggagagtatatgtgcaaagtgatcagcaaattaggaaatgacagtgcctctgccaatatcaccatcgtggaatcaaacgctacatctacatccaccactgggacaagccatcttgtaaaatgtgcggagaaggagaaaactttctgtgtgaatggaggggagtgcttcatggtgaaagacctttcaaacccctcgagatacttgtgcaagtgcccaaatgagtttactggtgatcgctgccaaaactacgtaatggccagcttctacagtacgtccactccctttctgtctctgcctgaataggagcatgctcagttggtgctgctttcttgttgctgcatctcccctcagattccacctagagctagatgtgtcttaccagatctaatattgactgcctctgcctgtcgcatgagaacattaacaaaagcaattgtattacttcctctgttcgcgactagttggctctgagatactaataggtgtgtgaggctccggatgtttctggaattgatattgaatgatgtgatacaaattgatagtcaatatcaagcagtgaaatatgataataaaggcatttcaaagtctcacttttattgataaaataaaaatcattctactgaacagtccatcttctttatacaatgaccacatcctgaaaagggtgttgctaagctgtaaccgatatgcacttgaaatgatggtaagttaattttgattcagaatgtgttatttgtcacaaataaacataataaaaggagttcagatgtttttcttcattaacc

SEQ ID NO: 344648 - DNA, 1682 bp, Homo sapiens
  misc_feature (5)..(6): n is a, c, g, or t
ggagnngcctgcctccaacctgcgggcgggaggtgggtggctgcggggcaattgaaaaagagccggcgaggagttccccgaaacttgttggaactccgggctcgcgcggaggccaggagctgagcggcggcggctgccggacgatgggagcgtgagcaggacggtgataacctctccccgatcgggttgcgagggcgccgggcagaggccaggacgcgagccgccagcggcgggacccatcgacgacttcccggggcgacaggagcagccccgagagccagggcgagcgcccgttccaggtggccggaccgcccgccgcgtccgcgccgcgctccctgcaggcaacgggagacgcccccgcgcagcgcgagcgcctcagcgcggccgctcgctctccccatcgagggacaaacttttcccaaacccgatccgagcccttggaccaaactcgcctgcgccgagagccgtccgcgtagagcgctccgtctccggcgagatgtccgagcgcaaagaaggcagaggcaaagggaagggcaagaagaaggagcgaggctccggcaagaagccggagtccgcggcgggcagccagagcccagccttgcctccccaattgaaagagatgaaaagccaggaatcggctgcaggttccaaactagtccttcggtgtgaaaccagttctgaatactcctctctcagattcaagtggttcaagaatgggaatgaattgaatcgaaaaaacaaaccacaaaatatcaagatacaaaaaaagccagggaagtcagaacttcgcattaacaaagcatcactggctgattctggagagtatatgtgcaaagtgatcagcaaattaggaaatgacagtgcctctgccaatatcaccatcgtggaatcaaacgagatcatcactggtatgccagcctcaactgaaggagcatatgtgtcttcagagtctcccattagaatatcagtatccacagaaggagcaaatacttcttcatctacatctacatccaccactgggacaagccatcttgtaaaatgtgcggagaaggagaaaactttctgtgtgaatggaggggagtgcttcatggtgaaagacctttcaaacccctcgagatacttgtgcaagtaagaaaagaaatcctgtgtgtcgcttatgtctataactccttgtttcagatgattctatgtctcatgattgattgttgctttttttccaattttgttgcatcatgttgaataatgctgttttatatgtagagtcttttaaaacattcacaccattcgtcatcactcctctgtcatatgcagttttgttttttgctcttttcaatgtgtgtgaggtgttttttgtttttgtttttgtttttttgccatgttatttatagtgttgctttccttgtgctttccttgtggttttcttggttggttattcagaaaagatgtgcagatatcacagaggcctatagccttttggtatctacttctacatccaatgtatgaattaagctgtaagataatgttgctttcttatcccagtgatcacctgccaaatgaataagacaacaaagagaagcagaagggcaagaagattatttactgacatatatctattacacttgggattgtgcttactgttgcataactattttttaaacggagtttagttttatattgctagt

SEQ ID NO: 344649 - DNA, 2625 bp, Homo sapiens
  misc_feature (5)..(6): n is a, c, g, or t
ggagnngcctgcctccaacctgcgggcgggaggtgggtggctgcggggcaattgaaaaagagccggcgaggagttccccgaaacttgttggaactccgggctcgcgcggaggccaggagctgagcggcggcggctgccggacgatgggagcgtgagcaggacggtgataacctctccccgatcgggttgcgagggcgccgggcagaggccaggacgcgagccgccagcggcgggacccatcgacgacttcccggggcgacaggagcagccccgagagccagggcgagcgcccgttccaggtggccggaccgcccgccgcgtccgcgccgcgctccctgcaggcaacgggagacgcccccgcgcagcgcgagcgcctcagcgcggccgctcgctctccccatcgagggacaaacttttcccaaacccgatccgagcccttggaccaaactcgcctgcgccgagagccgtccgcgtagagcgctccgtctccggcgagatgtccgagcgcaaagaaggcagaggcaaagggaagggcaagaagaaggagcgaggctccggcaagaagccggagtccgcggcgggcagccagagcccagccttgcctccccaattgaaagagatgaaaagccaggaatcggctgcaggttccaaactagtccttcggtgtgaaaccagttctgaatactcctctctcagattcaagtggttcaagaatgggaatgaattgaatcgaaaaaacaaaccacaaaatatcaagatacaaaaaaagccagggaagtcagaacttcgcattaacaaagcatcactggctgattctggagagtatatgtgcaaagtgatcagcaaattaggaaatgacagtgcctctgccaatatcaccatcgtggaatcaaacgagatcatcactggtatgccagcctcaactgaaggagcatatgtgtcttcagagtctcccattagaatatcagtatccacagaaggagcaaatacttcttcatctacatctacatccaccactgggacaagccatcttgtaaaatgtgcggagaaggagaaaactttctgtgtgaatggaggggagtgcttcatggtgaaagacctttcaaacccctcgagatacttgtgcaagtgcccaaatgagtttactggtgatcgctgccaaaactacgtaatggccagcttctacaagcatcttgggattgaatttatggaggcggaggagctgtaccagaagagagtgctgaccataaccggcatctgcatcgccctccttgtggtcggcatcatgtgtgtggtggcctactgcaaaaccaagaaacagcggaaaaagctgcatgaccgtcttcggcagagccttcggtctgaacgaaacaatatgatgaacattgccaatgggcctcaccatcctaacccaccccccgagaatgtccagctggtgaatcaatacgtatctaaaaacgtcatctccagtgagcatattgttgagagagaagcagagacatccttttccaccagtcactatacttccacagcccatcactccactactgtcacccagactcctagccacagctggagcaacggacacactgaaagcatcctttccgaaagccactctgtaatcgtgatgtcatccgtagaaaacagtaggcacagcagcccaactgggggcccaagaggacgtcttaatggcacaggaggccctcgtgaatgtaacagcttcctcaggcatgccagagaaacccctgattcctaccgagactctcctcatagtgaaaggtatgtgtcagccatgaccaccccggctcgtatgtcacctgtagatttccacacgccaagctcccccaaatcgcccccttcggaaatgtctccacccgtgtccagcatgacggtgtccatgccttccatggcggtcagccccttcatggaagaagagagacctctacttctcgtgacaccaccaaggctgcgggagaagaagtttgaccatcaccctcagcagttcagctccttccaccacaaccccgcgcatgacagtaacagcctccctgctagccccttgaggatagtggaggatgaggagtatgaaacgacccaagagtacgagccagcccaagagcctgttaagaaactcgccaatagccggcgggccaaaagaaccaagcccaatggccacattgctaacagattggaagtggacagcaacacaagctcccagagcagtaactcagagagtgaaacagaagatgaaagagtaggtgaagatacgcctttcctgggcatacagaaccccctggcagccagtcttgaggcaacacctgccttccgcctggctgacagcaggactaacccagcaggccgcttctcgacacaggaagaaatccaggccaggctgtctagtgtaattgctaaccaagaccctattgctgtataaaacctaaataaacacatagattcacctgtaaaactttattttatataataaagtattccaccttaaattaaacaatttattttattttagcagttctgcaaatagaaaacaggaaaaaaacttttataaattaaatatatgtatgtaaaaatgtgttatgtgccatatgtagcaattttttacagtatttc

SEQ ID NO: 344650 - DNA, 1970 bp, Homo sapiens
ggaagaaagtgaatgagcactcaagaaggacaaagaggagtagtcgggggtggggtggaggcagggcggggaagggagtgaccgcccctcctggctgcactcttgcctccggagccctctgatcctgtttgcagtgatgctccgagggcaggcacctgctgctctgtaatgattcagcccctttcagccgtcgtcgcgttaacacaacaggatgctgttgctattgtcactactgcctctcctgccgccgctgctgctgccgccgccgccaccgccgctggtcctccttctgcttttacttctcctgcatgacagttgttttcttcatctgagcagacaccagcttcagatgctcgaggtgagaaacatgcctttcagtttgggctactggtttacttaattaatcagccggcagctccgtcgatctattttcgtccctgtcctcttgacgagcccgggatggtttggagtagcatttaaaagaactagaaaagtggcccagaaacagcagcttaaagaattattacgatatactttgattttgtagttgctaggagcttttcttccccccttgcatctttctgaactcttcttgattttaataatggccttggacttggacgatttatcgatttccccctgtaagatgctgtatcatttggttgggggggcctctgcgtggtaatggaccgtgagagcggccaggccttcttctggaggtgagccgatggagatttattccccagacatgtctgaggtcgccgccgagaggtcctccagcccctccactcagctgagtgcagacccatctcttgatgggcttccggcagcagaagacatgccagagccccagactgaagatgggagaacccctggactcgtgggcctggccgtgccctgctgtgcgtgcctagaagctgagcgcctgagaggttgcctcaactcagagaaaatctgcattgtccccatcctggcttgcctggtcagcctctgcctctgcatcgccggcctcaagtgggtatttgtggacaagatctttgaatatgactctcctactcaccttgaccctggggggttaggccaggaccctattatttctctggacgcaactgctgcctcagctgtgtgggtgtcgtctgaggcatacacttcacctgtctctagggctcaatctgaaagtgaggttcaagttacagtgcaaggtgacaaggctgttgtctcctttgaaccatcagcggcaccgacaccgaagaatcgtatttttgccttttctttcttgccgtccactgcgccatccttcccttcacccacccggaaccctgaggtgagaacgcccaagtcagcaactcagccacaaacaacagaaactaatctccaaactgctcctaaactttgtgcccaaatgagtttactggtgatcgctgccaaaactacgtaatggccagcttctacagtacgtccactccctttctgtctctgcctgaataggagcatgctcagttggtgctgctttcttgttgctgcatctcccctcagattccacctagagctagatgtgtcttaccagatctaatattgactgcctctgcctgtcgcatgagaacattaacaaaagcaattgtattacttcctctgttcgcgactagttggctctgagatactaataggtgtgtgaggctccggatgtttctggaattgatattgaatgatgtgatacaaattgatagtcaatatcaagcagtgaaatatgataataaaggcatttcaaagtctcacttttattgataaaataaaaatcattctactgaacagtccatcttctttatacaatgaccacatcctgaaaagggtgttgctaagctgtaaccgatatgcacttgaaatgatggtaagttaattttgattcagaatgtgttatttgtcacaaataaacataataaaaggagttcagatgtttttcttcattaacc

SEQ ID NO: 344651 - DNA, 1844 bp, Homo sapiens
ggttaaagcctggacttttctcactcccttgcaatacttccttcctttacacttaacttttagttccaaggcaggctgtggtacctgctcccggcctcctgtttatatatcataatgtcctatcacctttttttttcagagatcatcactggtatgccagcctcaactgaaggagcatatgtgtcttcagagtctcccattagaatatcagtatccacagaaggagcaaatacttcttcatctacatctacatccaccactgggacaagccatcttgtaaaatgtgcggagaaggagaaaactttctgtgtgaatggaggggagtgcttcatggtgaaagacctttcaaacccctcgagatacttgtgcaagtgcccaaatgagtttactggtgatcgctgccaaaactacgtaatggccagcttctacaaggcggaggagctgtaccagaagagagtgctgaccataaccggcatctgcatcgccctccttgtggtcggcatcatgtgtgtggtggcctactgcaaaaccaagaaacagcggaaaaagctgcatgaccgtcttcggcagagccttcggtctgaacgaaacaatatgatgaacattgccaatgggcctcaccatcctaacccaccccccgagaatgtccagctggtgaatcaatacgtatctaaaaacgtcatctccagtgagcatattgttgagagagaagcagagacatccttttccaccagtcactatacttccacagcccatcactccactactgtcacccagactcctagccacagctggagcaacggacacactgaaagcatcctttccgaaagccactctgtaatcgtgatgtcatccgtagaaaacagtaggcacagcagcccaactgggggcccaagaggacgtcttaatggcacaggaggccctcgtgaatgtaacagcttcctcaggcatgccagagaaacccctgattcctaccgagactctcctcatagtgaaaggtatgtgtcagccatgaccaccccggctcgtatgtcacctgtagatttccacacgccaagctcccccaaatcgcccccttcggaaatgtctccacccgtgtccagcatgacggtgtccatgccttccatggcggtcagccccttcatggaagaagagagacctctacttctcgtgacaccaccaaggctgcgggagaagaagtttgaccatcaccctcagcagttcagctccttccaccacaaccccgcgcatgacagtaacagcctccctgctagccccttgaggatagtggaggatgaggagtatgaaacgacccaagagtacgagccagcccaagagcctgttaagaaactcgccaatagccggcgggccaaaagaaccaagcccaatggccacattgctaacagattggaagtggacagcaacacaagctcccagagcagtaactcagagagtgaaacagaagatgaaagagtaggtgaagatacgcctttcctgggcatacagaaccccctggcagccagtcttgaggcaacacctgccttccgcctggctgacagcaggactaacccagcaggccgcttctcgacacaggaagaaatccaggccaggctgtctagtgtaattgctaaccaagaccctattgctgtataaaacctaaataaacacatagattcacctgtaaaactttattttatataataaagtattccaccttaaattaaacaatttattttattttagcagttctgcaaatagaaaacaggaaaaaaacttttataaattaaatatatgtatgtaaaaatgtgttatgtgccatatgtagcaattttttacagtatttc

SEQ ID NO: 344652 - DNA, 1036 bp, Homo sapiens
gggcgacagagcgagactccatctcaaaatacaaacaaacaaacaaaaaagaaagaagaatgatctcaaataaatgacccaatcttccaccttaagaactagaaaaagaagaatgaactaaacccaaagcaaacagggaaggaaataataaagattagagtggtgataaacagaacgggaaatagaaatacaacagagagaatcaatgaaaccgaaaccagtttttcaaagtgatcaacaaaattgacaaacttttagctagactattaaaaaaaagagagatgactcaaataactaaaatcaggattgaaagtgtgagctttacaatgatcttacagaaataaggattataagaaaatagtataagcaattgtatgccgaacaaattagacaacatagttgaaatgtgcaaatttttagaaacacataatttgccaaaactgaataaaaaggaaatatttggatagagtgataacaagtaaagatattgaattaataatgaaaaaacctccaaccacaaaaaacccagcaccagatggcttcaatggtgaattctaccaaatgtttaaagaattaagagcaatctttctcaaattattccaaaaaattgaggaggggagaatactgtctaattaattctatgaggtccatattactctgataccaaagccaaatacagtacaagaaaattgtagaccaacatcccttatgaatacagatgcaaaaatcctcaacaaaatgttagcaaacaaaatctagtggccaggtgtggttacgcacgcctgtaatcccagcactttggaaggctgaggtggttggatcacctgaggtcaggagttcatgaccagcctgactaacatggtgaatccccatctctattaaatacaaaaaaattagccaggcatggtggtgcatgcctgtaatccgagctacttgggaggctgagagaggagaatcacttgtacctgggaggcagaggtttcactgagccaagatcgcgccattgcactccagcctgggcaacaagagcaaaact

SEQ ID NO: 344653 - DNA, 468 bp, Homo sapiens
ccagtgtcttcctttttggcctcatctacattatttaaaagagttttctattttcataattgcttttatgccaaaaataagttttatgcaaacaaagattttgtgatgatgccaaaatttggcattcaggttgaaaatagatacagcttatgagtcaaatacacttttggagaatagggaatctgatgtatatagtaaaaagtaaatgataatatcagttcattggatttccactataactcgtaagtttcatgaagctattaaaaaactcttcttaaatcctgcttttacagtttcataattacatacctcaaactaggtttactcattttcagatatagattatgtttgcagaatgaatacatgattaattatggtatacctctttaatccttcatttctggtgtgggtgttttcacagcactcagataagtgattggttgaacatggtcaaacagtctaacccct

SEQ ID NO: 344654 - DNA, 352 bp, Homo sapiens
agacagagttttggtggcctatggcctgatgtcctcactgtgggtcatgggggcttggtgctgggtggcgagggagaagtcaaacaggccttttgattagccgagcatggtggcgcatgcctgtaatcccagctactcaggaggctgaggcaggaaaattgcgtgaacccgggaggcggaggttgcagtgagccgagatcgccccactgcactctagcttggcaacagagcgagactccgtctcagaaaaaaaaaaaaaagggccttttgtcaatcatcattctcttgtttcaggggtttggtgtatctaatctcccagacatcaatgatacctaaagtcttctttctacgg

SEQ ID NO: 344655 - DNA, 616 bp, Homo sapiens
attttaaccccaattcttttgctgctcttgtacttgaggaggtggattggttctctgagctctgggaagcagccatggagatgggggttctgttttttatgggctacatgttgattccttctgagaagaggatgcctaagaaggacattattgctccttctaccaaaagctgccccctgcttgtttgtctgtgaccatcttcagaacatccttattttggagtggatcaagagaattgagggaaattttgagctctctacacagattaaagggagtgtgccactaagaaattcctccagatggaaaaatagaaatctttactcctgcacacatcagaacaagactagggaggacatcagtggaaagaagcgacaaaactgtgagaggcctttgaaaacttaattacagtctctaggttttcttatctgtaaaacgggaataataacctgcttatatattagttatggaagaaaaaatgagataacatgtgctgatcatagtgtctggcgtttatagtttggagtattacatagaaaatatttgttttggaataggatatagaaaatataaattatatttagcttcacttaactttcaactgtaattcagtttgatt

SEQ ID NO: 344656 - DNA, 392 bp, Homo sapiens
agatgggtggacagacaaaggaataaataaagtggacccactggacagagaagactttggttcaaaaggctcataaggtgccccaggcaccctaacccccaaccaggtgtaccccataagattacaggattgccttccgattgtccctccctgatagggatgaaaattctgccaaaatgtcttccttgggtaatgtttgttcaggagttaattgggcaattcagagactccaatcgggaaacacagggcctgctgccagatgaccttgagagaagcaagagccaagtccctggaccctgatcataacctcttcctgagaaactcactgagtgcaggtaaggaagagggcatgcctggtcctggacactgtatgcctccatcctgctcaataa

SEQ ID NO: 344657 - DNA, 312 bp, Homo sapiens
tgaaatattgcctttgaggaatttttatactagttgaaagataagtcaaatatgcaaatagctatagctaggacagatgaagtgcaataaaagaaatacttcctttgcactggaagttcaaagaaacaaaacagaaaacatagtgaagtgatcaggtaagaggtggttttgggttgtctttgctgatgttcttctctaattttttaaaatttttattattatgggcatatcagagttatgtatatttacaggaaacattatgttttgataagtgcacacaatgtgtaatgatcaaattagggtagttagaat

SEQ ID NO: 344658 - DNA, 364 bp, Homo sapiens
gctctgagaatctacagactcgaatggtggagacaggtcctcgagggcagcttcagccctggggaaagaaacagaaaaggggggctcaagtctctgcggctgaacacacatacacacacacacaccccccccacacacacacaccacacacacacacacacacacacacacacacacacacacacacacaccagctctgggcccagctgtgactctttgcagccacaggcaagtctgttgacttctctgtgtttcttggtctactcatatgaaatggggatcagttctacttgctgtatttatgtcacaggaatgaaatttacatggaagagaggtcaaagtattatttaagcacaaaccaatg

SEQ ID NO: 344659 - DNA, 600 bp, Homo sapiens
ggttgagggtgatagaggttcccaatgtgagagggctggcaggatcttaccaggggtgaaggtcacccagaccacgaggtagcaggcggggtctcaaggactcccctggaccagcgctgctccctccccattacccactaacttgtgggccctgagctgatgccccacgcaaagatactgtgcccgaggggctccaccaccctggtgccccgctgctgcctccaggagctgcccgaatccatcgtcctctgctccatgccagcccaccctgcatgaggccccttcctccaagtgaccatgcatgggacgctcatttctcactctgagctagacaggttggtggggggagtcttagctctctgaagcccacccaaaacccccgactaagcacccaagtgagcatgtgagctcctgagggctggggtagcatgtcccttgtttggaacccccacgtcctcagccattgcagctcccactcaggatgctggtttttcagttctcagttcacacctgctctggagcagggctgggagaaagacacggccttcctgcctcagcggcactcccgagcaacacgtgccgagcagggacccacagggt

SEQ ID NO: 344660 - DNA, 602 bp, Homo sapiens
tgggcacaccatcccccagagtgcctgatattggtgaccttgctgcatggcggatgctaatgggtattgactgaagggacaaggtgccttctccacccatgcttggtcattagcacatggttaggtgggcacgcgtggcctcctcttccacctctcttttggccattttccttgccctctcccccaccccctgacctctggcagcccagagctcccctcagcagtgctcacccaactccctcagggcctgaatttccagggtgagagtcccctctctacaccgtctcagtgggtgcttctgccagggtgggatctcgccagggattatgcttgcatcttaacaggaatttactggggatggaagtattaacccaaatggagttaccacagaggggatttcacatgtttctcaaataatgccagagtgagccaaggtttacataaccagtacgaggtgaggggggtgggaagagggcaagcatttccttgcgaggctcctggcagctttatttctgacttgcgagtggttcaagaagcctccatcctcccacgcatggagaagaccagcattgactgcagccccgctatgtccccgcgctggc

SEQ ID NO: 344661 - DNA, 377 bp, Homo sapiens
tatccccatggcccactcctgtcccctcttcttagagcctgcagtcctgcagactgcctccacccgtgacatgtgacatgtgagcctgctgcctcccctcttcatcccctacccctcccctgactaattaggccaacatgcaacttccagggcctggcagatgaggagccaagaatgccatggacaggggccaagtgtttttgttgacattgctcaagtatagctttgtggagcggcctctttgctgtagcagagaaatccaaggaagctggagaggtgagcgaggggagagcagggaggatagccagtgtgggcgcctctccgtatccccttcaccttcccaccctccaagccttcccagctgcccaccctctgcc

SEQ ID NO: 344662 - DNA, 399 bp, Homo sapiens
atgaattaaacagactactggaatttcactgcatcccatatccaaatgtgtactacagtcatctgtacatattttaatcaagaaatggtcaaagttgcatttgctaatgaatctgtgttaaactacaagtgtgtcatccttataagcatcatttgtagtatggattttaaataataataatggttgagcccaaatgactctgtgaggaactataatagagacatagtacataaaagaaaaagagaaggaaagcgaccacaactgaggagagaagcaatggggaagaagtagagggtcagggtaggaagagtgctggcctggaagctcccagccactagctgtgtcctcaggcaagtccttccaacccttgggtctttattgcttacatcacaagagtag

SEQ ID NO: 344663 - DNA, 742 bp, Homo sapiens
  misc_feature (247)..(247): n is a, c, g, or t
cagcgggcctctgcgtgggcggcgggaatccgcggacatcgggtcgggtctaggctcccgagtccgcgctcctgggcgggagcccttgtctgggtctcgcggggggctgccagatgcgtaggccacactgactagttccttcttgtcgcttttcccagcaaatggcggatgacgccggtgcagcgggggggcccgggggccctggtggccctgggatggggaaccgcggtggcttccgcggaggggnctttttccccgggggccccgggggggaaaaggcgggcttttttcggcagtggcatccggggccggggtcgcggccgtggacggggccggggccgaggccgcggagctcgcggaggcaaggccgaggataaggagtggatgcccgtcaccaagttgggccgcttggtcaaggacatgaagatcaagtccctggaggagatctatctcttctccctgcccattaaggaatcagagatcattgatttcttccttttttttcccccctttgggggggcggggggggggggcccccccttttccttccgtgccaaagggggaatttgcaggtttcttgaagattatgccagtgcagaagcagacccgtgccggccagcgcaccaggttcaaggcattgtttgccttaaattccgggggcggaacctttaaaccaaaaaattttgggggccccaaaacgggttccggggttcctggggggtggtttaaaagtggcgtccca

SEQ ID NO: 344664 - DNA, 179 bp, Homo sapiens
  misc_feature (6)..(7): n is a, c, g, or t
gggggnntttttgtggaatattccccccccaaagttcccccctaccagggaggttcccctgccccatctcgtcaagacccacaccagagtctccgtgcagcggactcaggctccagctgtggctacaacatagggtttttatacaagaaaaataaagtgaattaagcgtgaaaaaaaaa

SEQ ID NO: 344665 - DNA, 1089 bp, Homo sapiens
cagcgggcctctgcgtgggcggcgggaatccgcggacatcgggtcgggtctaggctcccgagtccgcgctcctgggcgggagcccttgtctgggtctcgcggggggctgccagatgcgtaggccacactgactagttccttcttgtcgcttttcccagcaaatggcggatgacgccggtgcagcgggggggcccgggggccctggtggccctgggatggggaaccgcggtggcttccgcggaggtttcggcagtggcatccggggccggggtcgcggccgtggacggggccggggccgaggccgcggagctcgcggaggcaaggccgaggataaggagtggatgcccgtcaccaagttgggccgcttggtcaaggacatgaagatcaagtccctggaggagatctatctcttctccctgcccattaaggaatcagagatcattgatttcttcctgggggcctctctcaaggatgaggttttgaagattatgccagtgcagaagcagacccgtgccggccagcgcaccaggttcaaggcgtttgttgctatcggggactacaatggccacgtcggtttgggtgttaagtgctccaaggaggtggccaccgccatctgtggggccatcatcctggccaagctctccattgtccccgtgcgcagaggctactgggggaacaagatcggcaagccccacactgtcccttgcaaggtgacaggccgctgcggctctgtgctggtacgcctcatccctgcacccaggggcactggcatcgtctccgcacctgtgcctaagaagctgctcatgatggctggtatcgatgactgctacacctcagcccggggctgcactgccaccctgggcaacttcgccaaggccacctttgatgccatttttaagacctacagctacctgacccccgacctctggaaggagactgtattcaccaagtctccctatcaggagttcactgaccacctcgtcaagacccacaccagagtctccgtgcagcggactcaggctccagctgtggctacaacatagggtttttatacaagaaaaataaagtgaattaagcgtgaaaaaaaaa

SEQ ID NO: 344666 - DNA, 426 bp, Homo sapiens
caaagactacaagacttcagagtcacagctggctacaaacccaccccctgcacccagtaccactagctggagacactggaagatgctcttgttattctcggatcaccgcctacccccaaaacccatcctccctgctgccttacctgagaagttgaaccccagagacagaaaggatcacctgcactccttgtactgggccttcccatcggccaacgtgtggcatgaacgaggctgcatccctcttccatagcacctgcactcgtaggctctgcaaatttcatccccacctttggcccttcaggcctagggcaagtcacagctccccagaactgttcatccccaggtgtctcgccatccctagatagcacctgtaagcctgactacacctctgtaaagcgtgcccttcattaaattttcttctgttaa

SEQ ID NO: 344667 - DNA, 287 bp, Homo sapiens
tgagactctgtttcaaaaaaaaaaaaaaatgcaggatgtgttttctcttttttaaatttaatcagggtatgtgtttcacacagctcccctgctggacccagtggcagtcatttctaagcaatcttggggttccttgttattgagcatggaggtaaacctcatgcctcttacttcagctgtccaggccctcaattcttaaagtatcatccaagcaacattggcatttgcagggagtttgttacaaaatgcagattctcaggccccaccccagatctaccaaattagac

SEQ ID NO: 344668 - DNA, 689 bp, Homo sapiens
ctccagtatttatcacttctttgtgttgggaatatttcaagccttctcttttaacatttattttattttattttaagttctggggtacatgtgcagaatgtgcaggtttgttacataagtaaacatatgccatggtggtctgctgcacctaccaacccatcacctaggtattaagtccggcatgcattaggtatttttcctgatgttctccccactcgtgtatgtctttattagcatcatcagaatgaactaatacatatgttcaacagaagatgtctatgaaatagcttaaatgatacaaaagagcatacactgaaaaatattcctttttttttctttgagacagtttcactctgtcacccaggctggagtgcagtggtgcgatcttggctcaatgcaacctctgcctcccacgtttaagcaattctcctgcctcagccgcccaaatagctgggtttcagttacgtgccaccacacccagataatttttgtatttttggtagagatgaggtttcaccatgttggccggactggtattgaactcctgacctcaagtgatctgcccgcttcggtctcccaaagtgctgggactaggctgggcgcagtggctcacgcctgcaccacggcttctgagcctttgatggactgttctctgctaatgttttaattcagtctccggtcccctcttt

SEQ ID NO: 344669 - DNA, 614 bp, Homo sapiens
gggcaagtgggggcgtgggggtttccactagagggagggaagtttctgtttcccatgtgttagttgtagttgtctttgtgcttcaccagaaaagaggtagagtgcgcaccttcacactaagagcccgaaattgtggtcagtaccataccaggaacgactgtctggccttggcatctatcagattcgaatcagttctaacacagccctacccaactctttgaaggtttctctctctatctagtgtgagaccactgttgagcttatctctggtttggtggcttggtcaccccactgtggggcccatacagaagtagttcactcaataccttgttagtaagttgcagactcatctggtcactggcaaagaacaacatcagaaaaaaaaaaaaaaatcgccaccatttaataataggcggtggggggcggaggcgggtatggtgttgacaatgtaaaagaagtatactaatgccttctctgtttggtcctttaagaggagctgttcagctcagaacacaccctgcacatcctgccaaggcacaaagtgacaaggccatctaacctacaagaagcaaaaaatgatggtatgttttcaaggatcacaggttaatataagc

SEQ ID NO: 344670 - DNA, 595 bp, Homo sapiens
gtgtgtagctctatgtaagtgtatgtaactgtaattgtatgtgtgtgtaggtgtatgtaggtgtaagtgtatataggtgtgtatgtaggtgtgtgtaggtgtaagtgtatgaaagtgtgtgtaggtgtacctacatatgtgtaggtatacctaggggtgtgtaggtgtatttaggtgtgtgggtgtgtgtttaggtgtgtgtagatataagtaagcgtaagtgtgtgtaggtgtatgtagctgtaagtggtgtgtgtgtagttgtatgtaggtgtatgtgtatataagtgtatagtatacgtaggtgtgtatatgtatgtgtatgtaggtgtaagtgtatgtacatgtaggtgtctgtatgtgggtgtatgtactgtaggtgggtatgtgtgtatgtaggtgtgtgtaagtgtatgtatatgtaggtgtctgtatgtatgtgtatgcaggtgtatgtactgtatccaggtgtgtatgtgtgtatgtaggggtgtgtgtgtgtgtgtaagtgtatgtatatgtacattcacacacacataccctaactctgtccactgaaagggcctgggagccataacaccccaaaagcaacaag

SEQ ID NO: 344671 - DNA, 210 bp, Homo sapiens
cactaccatcctttgctactccacaaacagtgccgccagttactgtgttatatggtgtgtgtagatataagtaagcgtaagtgtgtgtaggtgtatgtagctgtaagtggtgtgtgtgtagttgtatgtaggtgtatgtgtatataagtgtatagtatacgtaggtgtgtatatgtatgtgtatgtaggtgtaagtgtatgtacatgtag

SEQ ID NO: 344672 - DNA, 335 bp, Homo sapiens
ggtgagccaccgttgaatgacattcttgagaatggcctcaaggcgagctaactaactcttgtcatatttgggttacattttgttttgctgttttctcttagagacagcgtctcactctgttgcccaggctggagtgcagtggcgcgatcatcactcactgcagcctcaaactcctgggctcaagtgagcctcccacctcagccttccgagtagctgggactacaagtgtgcaccatcatgcctaatttttttttttttttttgagacggaatcttgccctgttgcctaggctgtactgcagtggtgcgatctcggttcaccacaacctccgcctc

SEQ ID NO: 344673 - DNA, 723 bp, Homo sapiens
tttagctttgcaatgtaaaatttaccatatcagccctccctgacctcagtagagccaattttgcttaagagtagtcaattatatgcatctgtgatcatcccttgtcatagatgcaataaggagaagcatcagcatatactggaatatactttagactttataagtacatgtgcatatcacagcatatagcatatgaatatagtattcctctgtgtatcctaaacaacagacatatacttagtaatagaaataatagcaaatggttacacttttcaaaataacctactccatccaatacaaacattcttggtgttcagtattaatggtcacattttgtacatgtgcaataatccttttcaagcaaaaggccaacctttgttgaaacagaccaaacattatgaatcatgaataagaggatatttaatgatctgtggcatggtttgattaatggacttacctttaataaggaagcagtttattaaatttcttctggaatgatgacatttcccaaaatcagctttaaatataaaatttaattctttgagaaatatgaatgcttggccaggagcagtggtttatgcctgtaatcccagcactttgggaggcagaggcgggctgatcatgaggtcaagagatcaagaccatcctggccaacatagtgaagtcccgtctctactaaaaatacaaaaattagctgggtgtggtggcacgtgcctgtaatcc

SEQ ID NO: 344674 - DNA, 378 bp, Homo sapiens
agtgtgcaataattaaactttaatgtgaatttccaaatgacctacacttggtttatgaactgcctataaatatggagatattttctattaaagaaaacatgaaatatcagttcacatgcctaaaaaggaacagtagttttgcatctcacataatagccctttttctataaataccaaagtatgtatggagtgtttggaaagcatttaatactatgttgaacatgaaattatttttaaatcaggcatttgaccctttaaaaaaatctcaaaatgtcagaacctgacttataatgtttatgatattgtttttaaattaaattagcaaaaactgagaagactttagggaaattttatattgatttttaaatatataaattc

SEQ ID NO: 344675 - DNA, 533 bp, Homo sapiens
tccgtctcaaaaaaagaaaaaaaaaaaaaaagaatgagaaaaccacaggatatacacacaaaaagcatttccccctcattacttctgcctccacaaagatggttttgttttgtttttttatttttcaacatgaactgttctactacaggagaggtttttctatttatctaaattgatcactataaagaaagaagatttgggaagtatagacatggacccaaaaaatcacaaattctaaagaagtttattttaaaattaatttcagagagctcatcctccagaacgcttagaccattctatgtgtctgagcttactcaacaaaaaaataagagccgggcagggttgatataaaaacaagtactgagaagctataggaactgttttatgggcaggatcaagagacttgtttgtgtatctaataattaagtcaaaattaaagagtgaaacatatgagcacatacttcttttacgagatgtagacagagaactatttagagatgcaaacaaaataaagttgacctaaaaaatcagaa

SEQ ID NO: 344676 - DNA, 416 bp, Homo sapiens
ctggaagggagtagttctggaatcctcctacctgtccctcaatttttcactttactaagattataacttatagcttccttgagatagaaatgactctgcagagcccatcctgaatggaaatcataataaataattcctatatccagggaagtctgaaaactaatcttgtttcctgtttttggagcacagtaactggcaaaatacatttggggtgagtttgacttttagagggtggttctgaagcattcttatatgttagattcccttgataaaatggcagattcttgagcttcagcattacaaattgatctggagcgggctctaggaatctaccactttttaattttttgtttgcttgttttatttatttattgtttattattttttattatttttaaatttttttagactgagtt

SEQ ID NO: 344677 - DNA, 747 bp, Homo sapiens
agcatataaaaggatataaccataaaaataggccacaagcagccctcagggctactctatctatagagaagctattcttttattcctttattttcctaataaacttgctttcactttatgctatggactccccctgaattctttcttgcttgagattcaagaatcctctcttggggtctggataaggagcctttcctgtaacagctttctggtgatgatgaagggactgtagtgaggaaacgctggaaagaaaggataactttgggtaagtgttggggtcctgtaacatcttcctggcaaaccctgaagggatgatactaagaagacctccccccaacccaaggaaatagactgcagcaccgattggacaactttggaaaacttgagagctgatgggactgctggaaaagatccttcacaaccatcatgcggccacctgaaccgttcagtgtcactgcaatggaaaacttgagagctgatgggaccgctggaaaagatccttcacaaccatcacgtggccacctgaactgttcagtgtcactgcaacgggtgggtctttctctgttgtctccgagtgcctcctcttccccaccctgcctcaggcaatgctttcctctttaactttttgtgtaaaatgttgctgatcttttgttttgtgtttcagagtcaaggaaacttttgagctattacagcttttagcaattgagtaaagtatacatgtgtgaacaaaattgagagcatattttt

SEQ ID NO: 344678 - DNA, 744 bp, Homo sapiens
agcatataaaaggatataaccataaaaataggccacaagcagccctcagggctactctatctatagagaagctattcttttattcctttattttcctaataaacttgctttcactttatgctatggactccccctgaattctttcttgcttgagattcaagaatcctctcttggggtctggataaggagcctttcctgtaacagctttctggtgatgatgaagggactgtagtgaggaaacgctggaaagaaaggataactttgggtaagtgttggggtcctgtaacatcttcctggcaaaccctgaagggatgatactaagaagacctccccccaacccaaggaaatagactgcagcaccgattggacaactttggaaaacttgagagctgatgggactgctggaaaagatccttcacaaccatcatgcggccacctgaaccgttcagtgtcactgcaatggaaaacttgagagctgatgggaccgctggaaaagatccttcacaaccatcacgtggccacctgaactgttcagtgtcactgcaacggatatcacctttcgtcaggactcaagagttctgaatggccttcatcatactgaagctttctgactgagctcctctttaccctgaacacaagagaccataatagtcaggcagaaatatcattgcccctattcagcctgaagaagttacagaagatgaatctttgtccttctacaaccttaggattaagggttctttt

SEQ ID NO: 344679 - DNA, 436 bp, Homo sapiens
gagaaaaattggatgagatttttttttgtcttgcatgtccttgggagcttgaagctgtaaccatgtggccatgttttcgcttttcacaatggcatcctgtgttcagggttctattcctgcctcaggggatgagtttttttatattcctatgtaaaacttgagagctgatgggaccgctggaaaagatccttcacaaccatcacgtggccacctgaactgttcagtgtcactgcaacgggtgggtctttctctgttgtctccgagtgcctcctcttccccaccctgcctcaggcaatgctttcctctttaactttttgtgtaaaatgttgctgatcttttgttttgtgtttcagagtcaaggaaacttttgagctattacagcttttagcaattgagtaaagtatacatgtgtgaacaaaattgagagcatattttt

SEQ ID NO: 344680 - DNA, 716 bp, Homo sapiens
ctcgtgatccgcccacctcggcctcccaaagtgctgggattacaggcgtgagccaccgcgcccagctactctagaattacttttaataaataaaattatttcattttctctaagtttccaggattttaaaaacttagaaaatgtttcacttatttctgtttaacagccaagactaatagtgaggaaagattcaacataagtgtggcattaggctgggagtcaaatgataagattctagtcctggctctgaacctattttgctttgaacatgtcacttccacccttggcatcatggagctcatccataaaataactcagacatgatcatctcaaagtctctgtctcgttctgaagttatacaatattatgacctttatagtgagtaaactccctcaatgtgacaggttccctattcttacaaaagctacagtcatacagtactgtggataaacccaaacaaaatgtgccaagtcaggagtgttgaagcaaatgtgatggaagatactggcttgaaatatgggctgaaatacacattaaagtatctcaagagtctttcctgtctacaaaacatcaacattatatgctacagctaaagctctgaaaaactgtgagaaacttaacgattcaaccaagacaacgatctctgctgactcttgaacataagggaaaagctctgaataataatttgacacccaacacccgtagcacccatcctc

SEQ ID NO: 344681 - DNA, 662 bp, Homo sapiens
atggtgacacatgcctgtaatcccagttactcaggaggctgaggcaggagactcacttgaacccgagaggcggaggttgcagtgagccaagatcacaccactgcactccagcctgggcaacagagtgaggaaagattcaacataagtgtggcattaggctgggagtcaaatgataagattctagtcctggctctgaacctattttgctttgaacatgtcacttccacccttggcatcatggagctcatccataaaataactcagacatgatcatctcaaagtctctgtctcgttctgaagttatacaatattatgacctttatagtgagtaaactccctcaatgtgacaggttccctattcttacaaaagctacagtcatacagtactgtggataaacccaaacaaaatgtgccaagtcaggagtgttgaagcaaatgtgatggaagatactggcttgaaatatgggctgaaatacacattaaagtatctcaagagtctttcctgtctacaaaacatcaacattatatgctacagctaaagctctgaaaaactgtgagaaacttaacgattcaaccaagacaacgatctctgctgactcttgaacataagggaaaagctctgaataataatttgacacccaacacccgtagcacccatcctc

SEQ ID NO: 344682 - DNA, 335 bp, Homo sapiens
cacctggccaagagaaaaggaaaatttattgtttcatgtaaccagatctctctctcatttttctctttctttctctaacaggtgttgtggctgttgagctgaagtctcaccatcatagcttgtgttgtaaagcaaggagcagcaagctacgggtctgcaggccaaatttagcctgctgcttgttttgtaaataaagttttaccggcacacagtcatgctcatttgtttctacattgtctatggctgctttcttgctataatggtagatgcagagactgtagggttcataaaacctgaaacatttactctctggccttttacagaaaaagtttacc

SEQ ID NO: 344683 - DNA, 352 bp, Homo sapiens
gctggactgtaatggtgcaatcttggctcaccgcaacctccacatcccgggttcaagtgattctcctgtgtcagcctccagagtagctgggattgcaggtgttgtggctgttgagctgaagtctcaccatcatagcttgtgttgtaaagcaaggagcagcaagctacgggtctgcaggccaaatttagcctgctgcttgttttgtaaataaagttttaccggcacacagtcatgctcatttgtttctacattgtctatggctgctttcttgctataatggtagatgcagagactgtagggttcataaaacctgaaacatttactctctggccttttacagaaaaagtttacc

SEQ ID NO: 344684 - DNA, 321 bp, Homo sapiens
gctggactgtaatggtgcaatcttggctcaccgcaacctccacatcccgggttcaacagcctccagagtagctgggattgcaggtgttgtggctgttgagctgaagtctcaccatcatagcttgtgttgtaaagcaaggtctgcaggccaaatttagcctgctgcttgttttgtaaataaagttttaccggcacacagtcatgctcatttgtttctacattgtctatggctgctttcttgctataatggtagatgcagagactgtagggttcataaaacctgaaacatttactctctggccttttacagaaaaagtttacc

SEQ ID NO: 344685 - DNA, 276 bp, Homo sapiens
tgctgggattacaggcgtgagccactgcgcccggctgcagaatatttttctcgaatttagaaagaacatatataagatcgtggacattaagcaaggaagaagtctaattgcttttaagatatcctctttagctgtatagattaaaaagtaggctgggcacagtgactcatgcctgtaatcctagcactttgggaggccaaggcagcaggatcacttgaagtcaggagtttgagaccagcctggacaacataatgagacctcatctgtacaaattaa

SEQ ID NO: 344686 - DNA, 698 bp, Homo sapiens
agatagggttttaccattggccgggctggtcttgaattcctggcctcaggtggtccgcccacctcggcctcccaaggtgctgcgattacaggcttgagccgccgcacccggccattaatttatattttcagtacgatacatatcatccccccatactaaacaaatcaacccaaaaattttgatttcgcttaatttcgcctaacaaatatctaacatgtatatagcactttatagattaagtgtgttactattttctgtgcagtgggcaggaattataacttctacagatggaaaatggtctcttattgagaagttttttgtcaaaagataaccgtcaaaaggattcatgtccgggtttcatcactgtgtagtcccatactgtttatcactccatcacaatttgaaggctgtctgaaatatccatgaactccactggtaattcatggagttcaactctcttaaccaccctcctccctgacccatgatttttaccctaacagccatgagagtttccaaaaatgttatgttttacttttctagtgtatgtcaaaagacattttgtactgttttaaaattactattcttgctattcaaagaataaaaagtattgtttttcagatgatgggtggatcatgctataaaatggtaacaaagttttggaaataatagctttagattattccaaaaagaaaaaaaaa

SEQ ID NO: 344687 - DNA, 1262 bp, Homo sapiens
tttttgagacggagttttgctcttgtatcccaggctggagtgcaatggcaccatcttggcttactgcaacctccgcctcccgggttcacgccattctcctgctactcggcctcccgagtagctgggattacaggcgtgcatcaccacacccagctaatttttgtatttttagcagagaccaggttttaccatgttggccaggctggtctcgaactcctgacctcaagtgatccccctgccttggcctcccaaagtgctaggattataggcgtgagccaccacgcctggccattttctttcctgtacaattttgtgtgtttgtttttgagttaataatggccgtttttttcatttgattaaatattttactttccaacttaaatcttcccatattcttcagctcaatagagtgcttgtgaatattcttctcctcactgtaaaacctcttggataaagtattttttctctggaagacatgtgtcctgaagtcttccatattcccactctggttgaaacagttactctttaggcatcctgtggtactgggtgccttggagctggtgtgtgtggtactggcatgctgtgtaactgggcgcagtggtactgggtgctgttattgggtgccatggtactgggtgttgtgttattgggtgccatggtactgggtgctgtgttattggcatgcagtggtactgggtgctatgttattgttgtgccgtggtactgggtgctgtgttattggcgtgctgtggtactgagtgctatgttattggtgtgctgtggtactgggtgctgtgtaattagtgtgccgtggtactgggtgctgtgtaattagcgtgccatgatactgggtgctgcattattggcatgctgtggtactgtgtgctgtgttattagtgtgtcctggtacagactagtggccgaggtgtgcctgtgtggagatctgagggtgacgtaagtagaggcactggcgtgagggcccctcatgcagtgtcaggcttgcacctttgcttggaaattccattagctttggaatttatagcttcgtggtgcagtgtggagttatgttggagataccacaaagataaagcatttccatggtgaacaaaaaagtttacaaataaaagcagtccaggccgtttttattttggctttgttatgtgtccacttactgctgtgcattctatacgccaatgggagtgttttgtagattctcatgagttggttgcgtttggttcatttgggtaaagtgaaactccttt

SEQ ID NO: 344688 - DNA, 398 bp, Homo sapiens
cacatatagtgcctattgtgcactaatgtatgttctgagccctttatatgtattagctgatttaagattcaaatatccctgtgaattatgttcatgctatttcatggatgagaaaactgaggcatgtaggtttattagaggaaaatatatcgctgtgtaaaaattggtaaccgatgttcactataagacccagttgacctttgctcatgctgtaactccaagattcaagttggtttcagatatttttaaaactaattaatgtaatatcagaactgactcatctgcactatataatttgaatacatcattgctagtgccagcttgactcttcaacttaattttgcattaatagaaaccttgcagtttataccttaactataagaagaatgaatagtcat

SEQ ID NO: 344689 - DNA, 613 bp, Homo sapiens
cctgggccatggatgggtaccagtagattaggaaccaagttgcacagcaggaggtgagcaggcgagcgaagcttcatctgtatttacagccaccccacaacacttgcattacagcctgagctccgcctcctgtcaggtcagctgtggcattcaactctcataggagcagaaccctattgggaactgcacatgtgagggatctaggttgtgtgctcctgagaatctaatgcccaatgatctgttgatcatcacccccagatgggaccatctagttgcaggaaaacaagctcagggctcccactgactttacattatggtgagctgtgtaattatttcattatatattgcaatgtaataataatagaaaaaaagtgcacagtaaatgtaatgtgcttcaatcatcctgaaaccatcccccttcacctccagtccatggaaaaattatcttccatgaaaccagtccctgatgtcaaaaaggctggggactgctgacctagtggatggtctggggcacagctcttttagggaatagtctattgttgttgttgtttgtttataatttgtataaatttgtgaggcacaagtgcaatttcattacatacataggattgca

SEQ ID NO: 344690 - DNA, 720 bp, Homo sapiens
ttttattgtgcattctgattttaggttgaattcatggttttatggccttaatcatctagcagatacaatacaaacctatttgaccaacaaacccagaagtaacctggccaggcgcagtggcatacacctgtaattccaacacagtgggaggatctcttgatgccaagagtgcaagaccagcctgggcaacatagtcagtggcccggacaatgcttttgatgaacagatgatgagtgacaatgcaagatgaactgtgacaaggatcccgtgggttgtcaaatgagttaagaggaaggaaaaattcctttgggttgccgaggccaagacaagcttcatttcaagcttagtcttgaagatgagtgggattaagataaaaaataaagaatggaaatgagcatgaacaaaaacgtgatggtgaaagcatatttgctattttcaaaagccaggagcagtgctatcagtgacaggcaaacaggcctggaaaagaaggtaccaagacaaggatatcttcaaaatacaggcttgagcacttaatctaaagccagaaaaaaacattggcttcaactgtccatcaaactctattaaatataagaaagtttcctaaatatatcatttttccctgttagaattcattgtctctactgatttcaaaatcagcaaatatttattggaaaaaagaaagaaaaatacttgttaaaatctatttcttaaaaactactg

SEQ ID NO: 344691 - DNA, 286 bp, Homo sapiens
accaggcttttacctgtttatcaaatgcacaattgtcaccccctcttttcctggcattgttttagaccactggcaaggggctgctcagcttgccaaaaggataggattaaatgattggtttttgagattccagtttaccacttaccagccatgtagctttggttattcatttattctttctaagcagccactcacaatgagacaacattttatccttctatgtaaaattggaataatgagtccattgatccttgagtgtccctaaagattaagtcaactcgcacct

SEQ ID NO: 344692 - DNA, 718 bp, Homo sapiens
gcagctgtaacaagacacgatgcaggatctcagctcataactgtgagcagtacggggaagcaacagggccagtcctagccattagggaaacttgggctgctgtttggagaggcagagtgtgagtaggggcggggatggggtggctctgcctggtgtgggatgcagccaccaccagtgctagaagcaaacaccacccccaggatttgagcacgattaattgccctggaggcttaagtcttgagctggatggggcttatatgacccgaccctgggatgatttagggactaggcaagaactgcagagttctgactgaacagcagggacaagaggaaggaactccgcctggactggggcatgaaaggaacacaactcactcctgggaccaggcccaacttccccatggcaggatctcagcagtggcactcatccctcacccaagcattttgccagcagcctgaagatcattccaccccgcctatcatgacattacaccactgtgggggcctgagtgcaagctttcccagtccagctctaccaggctttgacctggctgagaaacagtgcaggatccaggttaccaggggattccacaaccaaacccactacctgaaacactctgaaacaccagagtacttctcccaggggacagaggtcagggataacaccctaccagtaccgcctcagctgcctcatgcctgcaagtaccaccttactggc

SEQ ID NO: 344693 - DNA, 593 bp, Homo sapiens
aaatctttctggtttatgggcgcttgatcctcctttggctttgtggggctgggggggacagatgtggagtggaggatgagggtgggaaactggaatctgatcatgttacatgcccaagggctctcactgaaagtaggcctcaccatcttccccattgcacctctgaaccatgtcattacatgtctaccttagaaaggcctgaaattaaaaaataataataaataaaaaataaattcaaaaaccactccataagaagctgaaaatctgtacttcacatttctttccctgagccctgaggtggtctaagtcttccttcattcattcccacggcctcccgggaaccgtgtcttcatcctgagttatttctgcagtgttccatcaggcatctgcgggtctttaaaggaaatgtgaaaaggtagcaaagacacatctgtgcagcagagacatgtggcacaggaaagaagtgcagaaatcaaagccagggagaagcctgctagccacctagaaatcaaattgtgtcagggagaaagcctgcgtggaaaatagattagaaaggcactgaacaagagagaagaaagaaaggcagcccctgc

SEQ ID NO: 344694 - DNA, 257 bp, Homo sapiens
cctggcatcagggacactgcgctcctgctctcgtctggctgtggctgctccttctcaatctccctagctgctctccatccatctttccttaatgctgcaccaccttccctgccctgggctttttggtcccggtctccttctggccctcaccctgggagagcccatctattctcaggctttgactaccacatgctccttggcccctcccacagggcttcagccctgatgtcagctcagaagtcctcagacccacagac

SEQ ID NO: 344695 - DNA, 583 bp, Homo sapiens
gtttaggagagctaattaaaagacaaaaatattagactgaatttgaaaaatatacaactatgagcttcatgcaagagatacagaaaaataccaatcagaagaaagttggtagatttacattaatagcagatgtgatagttttgtttgtttgtttgttttgggttttgttttgttttgtttttgtggcaatgagggtctcacttcattgcccaggctggtcttgaattcctggcttcaagagatccactcacctttacctcccaaagtgctgggattatggggagacatgatagtttttaaggcaaacaaacaaaagctataaaaatgataaagcaggtcccttcattaggaaaaagtttatttcttccagtaagattgttaattttaaatttatatgtacattaataataaaatgtcataagatataaagtaaaacctgacattattataaaaaggaacaaggaaattcacaatcatagtggaaaaattaacacatctaattcagtaattatagagacaccagtatagatctagaagtatacacaaaataattacaaaaaaagttgtagatatattcatgaac

SEQ ID NO: 344696 - DNA, 1206 bp, Homo sapiens
ctctggatgcttgggggggacggcctgagaaagggcacagcggtgggaggggctgtcttgttccagtgggtcattcacaagtgagttgtatgaagatcttagaacagttcctgcctcctaataagtgctgtatgtgtttctgatgttaattaatattttggggtgctttctctgagccaggcactttgtcagtgctgggattcaaacagttcttgcctcacgtaccttaaattctgtgaggaggagaccaataataaacacatattcaaatgcctgtgttggctggtgataagttgtgtgtagacagtaaagcaaggagcgggagttctgggaagcgggagattgccgttgtattcagggtgatccaggaactcttaggaagtctaattggaaacagcgaccagaaggagggcagggggtgagccacaccggtatctgaggggtggcaagtgtctgagaaagtgtgttccaggcagagggagcagcaggcgcagaggccctggggtgggccatgcctggcctgtgggaggagtgacacggagctgctgtggcctgagtggaggaaggaacgaggatggaagaagacgggaaagcacgggccacaccacagggagcagtgacttctgcacgaagtgttttatttcagtttatcacttgcttattttcaaaacgttttactttgggaattttcaaacataacacaaaagaagagaagataatgtaatgaactgctgcggtgtcatcacccagctttttaagaactcgaaccctggccagtctggcgtcatctctgccagcagcagttctttaaccccctcttcccaggttaccagacagcgtagctcagatctcgtctgatttcctgcatcagtatttcagaatgtcattctaagagaggaagttctcattcacgtttgtggggttcaaaatggtcccatctttggccagtaggaatccctttgggttggcccctgtacccttgtgagagtgccccatggtctttgacagcttccattgttttaagcatgagacaccccagacccattttagacattccttagcccagacttggcatcagccatttctctaaggatccctggttccttttggtgggaaatggcattcacatttggaggccaaatctggatggtagggatggttattgctacagggttatcattgcatctagaaattttcagtgaacag

SEQ ID NO: 344697 - DNA, 365 bp, Homo sapiens
cttttggctgttgtgaataatgctgctttgaatattaatgtacaaatactggtgtgtccttgctttcacttcttttgggtatctacccagaaatggaattgctggatcatatggtaatttctattttttattttttgaggagcccctctatactgttttctatagtggctatgccattttacattcccaccaaccatgcacaaggattttaatttctccacatccttgccaagacttgttattttgttttttttttttactattacattagacattcaaatgggtatgaggtggtaagtcattgatatttagagaccatcattttttttttttttttgtccccgagacgaagtctcgctctgtca

SEQ ID NO: 344698 - DNA, 1084 bp, Homo sapiens
cctcgaactcctgacctcaagtgatccacctgcctcccaaagtgggattacagatacatgaagttatgaatttaagatgtgaagatttacagcttgataaaccagcttcaggagacatgatcttatgaattcaacacatgaagatttacaacttgataaaccagcttcaggagatcagaacttcttataatacaactgacgttactcagcctagaacaaatacaacagggattgtgctgcattctgacttggattctgccatcgaacacagaatgccctgatccttagatgcagaggcagctcttcagcctatgggggctgctgtaaaatattacaggcatactttggagatgttacgggtttggttccacatcactgcaataaagccttccagatatacagtcatatttcttatattacacgactccagcgggaggaagaagaggcctttgccagcagtcagagcagccaaggggcccaatccctcacattctccaagtttgaaggaaagaaaaccaacgagaagacccgcaagattaccacagtgaagaaatcttcagtacgtcttccagggtcggatcaaagaaggtgcctccagaatgagttgagaagataaatggatcagattgaaaagtacatcatgactcatctctataaatatgtgttctgtccagaaactactgatgatgagatgaaagatcttgccattcaaaagaggatcagagtggaagctgctctgtggtgtcagaaagacaaggaatgtggtgacctcacctatccatctccctcaaggcagcttttgagcccttcactgggttacacctcagatgctgtgtgtccctgttaatgaagacatcccagaagtgtctgatacggtgttgaaggcaatcacagggattgtgctgcattctgacttagattctgccatcaaaaacagaatgccctgatccttagaggcagaggcagctcttcagcctatgggcttaagctcttggactcactgaggcagtaaaagaaccatatcctgtgtttgaatcaaaccccgagttcctgtatgtttagaaggtttgccagacaggattcc

SEQ ID NO: 344699 - DNA, 1029 bp, Homo sapiens
cctcgaactcctgacctcaagtgatccacctgcctcccaaagtgggattacagatacatgaagttatgaatttaagatgtgaagatttacagcttgataaaccagcttcaggagacatgatcttatgaattcaacacatgaagatttacaacttgataaaccagcttcaggagggattgtgctgcattctgacttggattctgccatcgaacacagaatgccctgatccttagatgcagaggcagctcttcagcctatgggggctgctgtaaaatattacaggcatactttggagatgttacgggtttggttccacatcactgcaataaagccttccagatatacagtcatatttcttatattacacgactccagcgggaggaagaagaggcctttgccagcagtcagagcagccaaggggcccaatccctcacattctccaagtttgaaggaaagaaaaccaacgagaagacccgcaagattaccacagtgaagaaatcttcagtacgtcttccagggtcggatcaaagaaggtgcctccagaatgagttgagaagataaatggatcagattgaaaagtacatcatgactcatctctataaatatgtgttctgtccagaaactactgatgatgagatgaaagatcttgccattcaaaagaggatcagagtggaagctgctctgtggtgtcagaaagacaaggaatgtggtgacctcacctatccatctccctcaaggcagcttttgagcccttcactgggttacacctcagatgctgtgtgtccctgttaatgaagacatcccagaagtgtctgatacggtgttgaaggcaatcacagggattgtgctgcattctgacttagattctgccatcaaaaacagaatgccctgatccttagaggcagaggcagctcttcagcctatgggcttaagctcttggactcactgaggcagtaaaagaaccatatcctgtgtttgaatcaaaccccgagttcctgtatgtttagaaggtttgccagacaggattcc

SEQ ID NO: 344700 - DNA, 845 bp, Homo sapiens
agaagatagtccttacaaaattatttattgctacagtgcacaacaatgaaagaggggaagcaacccaaatgcacagcggtagaggagagttgaataagtcagttaatataatgcaatgctataaagccaccaaaaatgtttggtgggttagataaatagaagtgtccataaaatatgtaaattatcaaaacatgcattaaatctatttaagagtatgtagatatagcaaaaagaatgagatggtcatggtgagacaccactaggtaggaaggggtccccagaaaaactccagctggcctgtgcactggggtggaacttgaagtttgcaccgttgatagcggggaggagcctggcacctcttcttactgtgtaaaacccattattctagctgctggcagaaagcactctagcagggactctggccttgtgagagtcccaataaaaccctgccttactcaccattcaaaccgtctgtaagcctaaatttttgtggccttgagacggacaaggaccccgtccttagctgaactaaggaaaaatcctgcaacagtggatactggaaataatgttaatggatgggttttactctcctgaaggattaatataatctgtgagtacttttatgcttactgccagtacaaggagtggcttacttactatcagtacaaggagtatatatactctcttgagcttttctgtttggctatttcagtgcctccagaatgagttgagaagataaatggatcagattgaaaagtacatcatgactcatctctataaatatgtgttctgtccagaaactactgatgatgagatgaaagatcttgccattcaaaagaggatca

SEQ ID NO: 344701 - DNA, 609 bp, Homo sapiens
tgtgggcctgggattgtctgagtggtcagtgatgcctcaggctttccctaaactgaaggaggtgacaagacgaatggtcacggtttgtccttggagctcttgtttactgtctctctccctttagagcccttcactgggttacacctcagatgctgtgtgtccctgttaatgaagacatcccagaagtgtctgatacggtgttgaaggcaatcacaggtcagtgaaaccaagagcctttttattgggatgttttccccttaaagttaacattttactgtaatattagtgtataactttgtaaaatgcagattattgaaggtacattggaatgtagtaaaagtgatttgtaagattgttagttttatgaatttgatggcattcagaagagcaggttaactcttttccccctttattttcagggattatggtctcgtttcttgggcattgaactaaactaaggtcaaatacagatagaataattttttttgttctttttttatgtagttttttaaattcagctgactgttcccatgatagaacaaatttcttaagattcagttgcatttatatattcaaaataattttggagagaggaagggaactggtaag

SEQ ID NO: 344702 - DNA, 429 bp, Homo sapiens
ttgatttttcagtgacccttcagaaggccagtccctttggctcctacgtggcactacaggttccatacacctgggatgctgaggccaagccagagcttctcggagtctcgggctacggcttttccctagtgcaatggagacagcaggagacaggtccctaagcaagatgcctggatggtttttggagctgtccatcctacccaggtggggctcattaaccataccaccttggtgagcagctatggagcacatcctaaccctcacgggctaactacctgagatagcctctcaagcttttggagagcctcatacttgtcttgggacctaaacaatgaatgacaggccagcaagcgctgatttcatgctttgtgtggtcaggatgatgtgctcaaggggctggtggaaagatccgatttctctggtgcatga

SEQ ID NO: 344703 - DNA, 374 bp, Homo sapiens
ttggtgtgtatgtacgtatgggaagagaaagagatctctccttgtaaggccaccaattctatcagattagaagcctacctttatgacttcatttaactttaattacctcctaaaagctttatctccaaatacagtcgtattgggggttagagcttcaaaatataaattttgcaggaaaatacaattcagtctgtaacagaggtaatgcccttttgggttgggagtgagtatgattattttgttccagtgagacttgttttctctacgtggaaataatccacagaatataataagcaaaaggggtataatcagggtcctgcagtgatctattaaacacactgcccatgtagaacataagtaagtgcacagtagtg

SEQ ID NO: 344704 - DNA, 356 bp, Homo sapiens
ggaaccaatccttgccttcatggaaccttcattctagttaggggagacagatactagtaaacataattaaaaatgcatagtatattggaaggtgaaagtaatacagaaaaacaacaggagataagggagctttgggaatgtctcaagagtgtaattttaaagtaagtgagtaggagagttgtaatattaaagtgggtgattaagtatcagctttattgagctgatatttgagcaaagttttaagggagttggaagttaaccatgtagttatctgggggaagaacattccaggcagaggaaacaactagtacaaagaccttatggctgaagtgtctttcatatttgaggaatagaag

SEQ ID NO: 344705 - DNA, 139 bp, Homo sapiens
tgaaatacattatttgttaattttgttctttatacaaaaagcagaagttttataactaatgaaacatttatgtaaaagcttctgattttgagtagtaaaatctagtacactaagcagtttgaagggagaatgaatgtta

SEQ ID NO: 344706 - DNA, 399 bp, Homo sapiens
atggaagacattgtgattttgaccttgttggatgctgcacctgaaggtggaggaagaggaagagccttgggggctaccattctggctggagaagcggcacgaggctccctcttgtggatgcagcaaggactgttaaaaaactcccaaagcagggactttcaggcccacatgcacttagcctcctcttcccacctcctgttcctctccgtgtctaatgttccactgccatcgctgccaggaagttctgcagagaagagtgaagaagaaccgtgtgatcctaaacatgttctctgaagatattatcaacccaccattggccttatttactggaatgtttttataaccttcatttgacacctcttcccatcatttaaaataaatctggtgcttccctgaata

SEQ ID NO: 344707 - DNA, 163 bp, Homo sapiens
ctcccactggcactgctcccaggatctccttcctcacttccctaaaatcacagaaaaggggagccactgtcactgggaaaagctagctgttgctcaataatcttcaaagtactacagagtagactgggtcaccaaatgaatttcaggttaaaggctgcaaaat

SEQ ID NO: 344708 - DNA, 402 bp, Homo sapiens
aatcctgggctcaagtcattctcctgcctaggctgtgattacagtgctgggattacaagcatgagccacaggtatttccaattttggttgacactacgtatcactcaattctaaatttcttcattggtggtagatttttaccacagttagtgacttttaactagacagaaaaatatggttagcaatgaaaatatgtacaacacaggtatttaacccaattcatgacatttacccatttttatactcaatgttgtgataaaattaaattttttttttctaaaacaatgtcactatgagacattgtttccaggggaggtacttcaaagtgttgactaatgtatctatatgcgtggtatgggagacaagcaagggcacactaaaggtttttcatgttctattaat

SEQ ID NO: 344709 - DNA, 347 bp, Homo sapiens
agtgagaggctagtcagtagcatcatatggtccactctccagaggagaagacagatgaaggttaagaaaagactccactaggtttggtggttttgaggtcactgatggcctttaagaagatagttttaatactatgatgtgggtgaactaatccaagaagttaaagaataggtacattttaaagaataaactttccaacacagactactctttcaaggatttaggagatgaatgggaggatagagatgaaatgttagctataggatcactagggtcaagggaagacttttttcttttctctttaaattgaaaaaagtaagcatatttgtaggcagaggtaaaggagt

SEQ ID NO: 344710 - DNA, 235 bp, Homo sapiens
ccacccccagccttctttacctgtcttctgtgcctaacaggaaactgcagtgaaagctgctgcccgtacccttcttttcaaggctttctcaaattttggcattgctggacgtttctcatgctttcctgatgtattttctatatatttaaaagtatatttactaaaatatatccaacatttctgcctgtttcttagtttttctgttgttgtttgtttgtttgtttgtttgtttttt

SEQ ID NO: 344711 - DNA, 2015 bp, Homo sapiens
cgcctgtccctcattcccattcaccctgtctgtagtgtcgtttcctttcttctcttctctcttcatgaaattaggggctgtgtgctggaaataaagaagtatgacttatacagcctctcagccacaattcagaactacaaggaagtacaataaaggtgcaggaaaacgtcatgaggttagatgccactcctggtgctgaggaatacacagggggaatgaacacacttggtgaagtaaatcttcaggtgtagcttgagctctgtgacataaaagacttccagttctctccatgacattgaaaactaccttgcttaagtcctttattttactaccatgtaaaacatccaggccggtccttgagatgaaataaatatacaataaatggcagtactcagtctcaggacaaaaccgccatttggcaatttcactttttgccacaagagggcgctttctaaaatagtatttagtccaaccttgacttaattaggtccaaccccagtcctgttgcctgatcgtggacctttcaagttagcatgatcgtggaacttcttaatctgaatatagggtagagtagcgtgaactctatgaaagctgaaaccttcccttgataattcaggtattctcagtgttctagggctgttgtgttcaatgacagtttgtcattgtttagggctaggatatgtatgtggattaaatacagtaaaggtctgaacatgtgctcatctctaaacatatttcttcccacttttaaaaatagggtgcaacaaaattatagttaattgaggtttccatggactgttttttggctaaaataatctaacagtgtcctagctcacaagatactctatcttggtcttgctgaagctttcacggaagaggcgttttcctgccaaccttgaagaaaatgttgagttttgtttgtttttcagaatttagacttaaagagctgaagcagacctcagacatcagctattcctaccacttcacattataggtagtgacactgagacccacagagttaaaaggcctcctcacagctggtacagagctggtcagagcagccatctcattttgtccctttgagggtcagatgtatgcttcttctgcttaaggcacagcctttagggctgccatctggatttctacagagctcatgcaggagaaaaatagccagagcttaagtgctgttgcatagttcagtttatacacctattgtcccatgcctgtttgtgtgtgaggcttccctcgctccgtgggagcaccaggctcatgccctttcataaacctatttgacagaatagagagttttccctcattggtgtagtcaagacaacatgtgtgttcagcatggaaaaaaggtttcaggtcataaacccccttatccctaatgcttactttcataaagaacaacagtggctccactgtattctaaaaggaaaaaggagctctaatgagaaatacgcaattaaacagctatttaggcggcttagaccctttcaggaacaaataaataaatccgtggttttacaaccctgaagtttgataatagctctcttggatttttgtggttacctcatggcaatctcactaagaagcaggggagcaagctcttggcacatgaaggaataggctcatgaagattcatttcttttcccgcttggccttttggttctctaataagctgtgagctgaggtccatgcagggaaaacaaggagggtaacggcaaatgtaaagtgaatttttctggagaaggatgctgattattttatagcatctacactatcctatgatgaaagaggcatagagccgggtggcaatgtgagttcttgggtgatttaataagccatcgagtggatttaatttctaagtaagacatttgtttattctttgtacaagtccatggagttgtgatcttaaagagttctgtgttatttgcattgtgcctcatttctccccatcaaccttagcttgagatttggatgaataaaataaataactggagaaggttaaagta

SEQ ID NO: 344712 - DNA, 430 bp, Homo sapiens
ggcttggcatgaagctgggaccctctagtctgtgaggctgtgctgctcctgggagggctggggaagctccccaccaggctcctccttcctcctaggacagtgccagggaagagactctcacaggcccttgatcccagaggtgcctcagggtgggatggagaccagagtcaaagcacaaaacaaagctggtctgaactgatgaaaaatgaagcatctcaacagaggcaaaataaattttaaaaaaccagccccgagaggccaccaccccatcggacaggtgggattcccgtggataaagtgcccccggcaggtgtgctcctgccatagtgacaacgtctggggaaaacctgtcacagagagaggcacctcccaacacagggacctctgcagccgctggacgaggaattccagagaaacccaaaagatgtaa

SEQ ID NO: 344713 - DNA, 498 bp, Homo sapiens
ctttcagtttttattacattgatggactctctcagcagagaatctaaggagctgtgcacagggtgtggagacactgtgttcttccgatgggggcagagggctgagagcaggggcgtgggagggagaccagaccctgctgtgtgggctgggcaggctgtccagggtgggctgtccagggggcgctgtccagggtgggctgtttggcggggctgtccaggccgtgctctccagcactgacagccacagcaccagggagcagacacagctctcgcttgttgacacaacctagagaaaggcagagggccaggggcacaggcccgaggcccctcagcaggtcagggctggaagtataaacaatgcaacccagacctcaaaatcatatcacagaaattaaagactggggagaaccttggcttcagaacagaaagtattccagtgcccaggagaaactgggtctgcagaggtggaccctggagccagtgttcagccagaggagaa

SEQ ID NO: 344714 - DNA, 399 bp, Homo sapiens
gatttctagaaacacagtttgcaatgccttgaaagtagatgtcaaacaccagctaatgataataactgatatttattaagtactccatgtgcgtgaagttcctctcagcactttacatgtattaattcaaatagaaccaactactttctgaggaggatactgttattattgtccgtattttacagctgaggagaagttgaatgatttgcttcaggtcacagttctagtcaggggagaatagtttacggttccaaccctagcagtcttagacactgcgctctcttagctgctaattaatactgtctctatcatggaacttttatacaaaacataaacttgtagttagtcagcaaaagtaaattttgccaaaaagaaatttggccattttaaccttttttt

SEQ ID NO: 344715 - DNA, 1130 bp, Homo sapiens
gacatgtgaacacctagcgagctccatgggctctgcgtgtgtacgtctttgctgactcagtggccccacacagcaacccgagggccagggcagaaagcacaggaggagccaccacgggtgctgcagggcctcaggctgggcatccatcctctacctgtccttctgccgtccatctgtgggttctccctcaggtgccacgcaaggctggtccttcacaatggcccaggccctcaaactcagtggtcaggagggttcccaccacctcagggcttagcggcagtcaaggtaacctcaggtcctcaggctacctttgcaaataggtccttgcaaagaccctaattcacattcacagatactgggagttaggacttcaacatcttttaggcgggccatgattcaacccatgcatctgggcctaggaagtggaactgccccagtgagcgatgccctgggcactgtgcagttctgggggacacagccctgacagccggaggggggctttctgggcacagagctgtctgggatccgccaaggcaacacaggaaggagtccagagctcacctgggtgagacccgagagctgtcagtgacagcagaatccagagggagcccacatctccaagccaggtccagagctcttccaacaggatagcagtcttgtcaggcactctgggaggccaaagtgggaggatcactttggggccaggagttcgagcaacctgggcaacatagcaagatccctatctctacaaacaaaccaaaaacctcagtagcatctttgttgttttttctcttctgtcaggtattttggtagtagtgatcttctgattttacattccctttttttttttttccatgtagaaatctctatggccatttcctcttgtgaattaattgagtttctaaagtgaactagctgcatgttagaaccaggacttttttgagccctttagagcatgctggcaggcgtcatccccaagccccagggtgggtcatatttctggatgatggaggcagggggtgcaggggtcccctatctgcacattgttctgagtctgatgtgattcctcaactcctccatgaaacaggggccatgcttgtcctcgtctggggcaaactgcagttggagag

SEQ ID NO: 344716 - DNA, 776 bp, Homo sapiens
acgccactgcactccagcctgggtgacagagtgagactctagtctaaaaaaaaaaaaaaattctatccagtccatgaatatttgggaaagaggaatcttcaggttatagaagatgcacaagtttttttcttagtagtttttttgttttgagtaaatatagcggtctggcgatatttaatatagatccttcctaaattacaaatgcattcagaacaaatatacctttctccttttttattataaaacagatacaaggtaaaattcaaatgcagcagtagggtgtcctttgagaatcttttatgcctgtgtgtatcctttaaagtttggtcaaccacactactgtttagatttcctttaataacaaaaagaattataggcttttatgttgatatgactcagtaagctaactgcatctgttttgggtcactttaaaacacctttgcttttgaaaaggaaaagtttctttacagaattgagtatgtaactcttgaagtttactctttcaaagatttgcttttctcctttttcctttcaggagctgctgctcaagaggtcatcaaaataatcaccaaacaatttgtaatttttaataatacttacatttacagtggcatgtcacaaacttcagcaactttccagttgtagagtaagcaagcaccttaagtagtgtgttaatgattgaaactgtaattgccttcgggttgtgctttagtctgtaaaattctaaaggagagctgctaaattgttttcttaataaacatttttctcatttgtaa

SEQ ID NO: 344717 - DNA, 785 bp, Homo sapiens
tcattaagttcttctatcaaataattattaagcactatgtgccagatgcttttctagacagtgaatatgatgcaattaataaagatttaattaaattcaaatttttactaggttttagttggtctctgattataggtttgtgatatgtgcaaatattggtctcatactttgttatttttgttcttcagtttcatacatattttgactagaacatctgaaactagattaaataaaggagttggccattaattttgaatcacatttattttaatgaaaactaacttttatttttaggagtatctaactatcaagttgaagaagatataggaaagttgaagtcttgtctcactggcttccttcaggaatatggtttatctgtaatggtgaaagatgattatgtccacgaattgtgagtattttttagggtatctaggagatgattccacacctgtcataaggctaatcaaaattcatgtctctgtggtctcctttagttgccgatatggagctgctgagccacataccattgctgcattcttggggggagctgctgctcaagaggtcatcaaaataatcaccaaacaatttgtaatttttaataatacttacatttacagtggcatgtcacaaacttcagcaactttccagttgtagagtaagcaagcaccttaagtagtgtgttaatgattgaaactgtaattgccttcgggttgtgctttagtctgtaaaattctaaaggagagctgctaaattgttttcttaataaacatttttctcatttgtaa

SEQ ID NO: 344718 - DNA, 876 bp, Homo sapiens
  misc_feature (712)..(712): n is a, c, g, or t
  misc_feature (717)..(717): n is a, c, g, or t
agcggagtgcgcctgcgcgcttgtggagctggtggcggcgctccgcaggggctcggctgttttccgcgcggcaggcgcggccatggcgcagctgggaaagctgctcaaggagcagaagtacgaccggcagctgaggttgtggggtgatcatgggcaagaggctttagaatctgctcatgtttgcctaataaatgcaacagccacaggaactgaaattcttaaaaacttggtactaccaggtattggttcgtttacaattattgatggaaatcaggtcagcggagaagatgctggaaacaatttcttccttcaaagaagcagtatcggcaagaaccgagctgaagctgccatggaattcttacaagaattaaatagcgatgtctctggaagttttgtggaagagagtccagaaaaccttctagacaatgatccctcatttttctgtaggtttactgttgtagttgcaactcagcttcctgaaagcacttcactacgcttagcagatgtcctctggaattcccagattcctcttttgatctgtaggacatatggactagttggttatatgaggatcattataaaagaacatccagtaatagaatctcatccagataatgcattagaggatctacgactagataagccatttcctgaactgagagaacattttcagtcctatgatttggatcatatggaaaaaaaggaccacagncatantccatggattcgtgactcataggttacatactttaccccagtggcactcgcggcacctccctgtgccgcatccctttagccggttcagcgccacgcgtgcctctcccgctttggctcgcaccgggactctccactggccccggcgcccctcacctacca

SEQ ID NO: 344719 - DNA, 789 bp, Homo sapiens
agagggtgtggcactgcctctgtgcttctttagagggagctgtcatttccctgcctaatgggatagcttgtgataaggaaacaagatatttttaaagtgctctcccagctcttggagaaagccttcccatctcacagtgattggctttgtgccgcaccctttgttaatcttctcttttaaactggaacagaatctgtatttatctctttacaggcaccagagtccatttcagagaaagaattaaaattactctgcagcaattctgcatttcttcgagtggtaagatgtcgatccttagctgaagaatatggtttggatacaattaacaaggatgaaattatttctagcatggacaatccagataatgaaatagtgttgtacttaatgttacgggctgttgatagatttcataaacaacagggtagatatccaggagtatctaactatcaagttgaagaagatataggaaagttgaagtcttgtctcactggcttccttcaggaatatggtttatctgtaatggtgaaagatgattatgtccacgaattgagctgctgctcaagaggtcatcaaaataatcaccaaacaatttgtaatttttaataatacttacatttacagtggcatgtcacaaacttcagcaactttccagttgtagagtaagcaagcaccttaagtagtgtgttaatgattgaaactgtaattgccttcgggttgtgctttagtctgtaaaattctaaaggagagctgctaaattgttttcttaataaacatttttctcatttgtaa

SEQ ID NO: 344720 - DNA, 313 bp, Homo sapiens
  misc_feature (34)..(34): n is a, c, g, or t
  misc_feature (40)..(40): n is a, c, g, or t
catttcaatggcttttggggtacaaagggctttnggtcanaagtttcccaaactatgctgcattcttggggggagctgctgctcaagaggtcatcaaaataatcaccaaacaatttgtaatttttaataatacttacatttacagtggcatgtcacaaacttcagcaactttccagttgtagagtaagcaagcaccttaagtagtgtgttaatgattgaaactgtaattgccttcgggttgtgctttagtctgtaaaattctaaaggagagctgctaaattgttttcttaataaacatttttctcatttgtaa

SEQ ID NO: 344721 - DNA, 2262 bp, Homo sapiens
  misc_feature (1836)..(1836): n is a, c, g, or t
agcggagtgcgcctgcgcgcttgtggagctggtggcggcgctccgcaggggctcggctgttttccgcgcggcaggcgcggccatggcgcagctgggaaagctgctcaaggagcagaagtacgaccggcagctgaggttgtggggtgatcatgggcaagaggctttagaatctgctcatgtttgcctaataaatgcaacagccacaggaactgaaattcttaaaaacttggtactaccaggtattggttcgtttacaattattgatggaaatcaggtcagcggagaagatgctggaaacaatttcttccttcaaagaagcagtatcggcaagaaccgagctgaagctgccatggaattcttacaagaattaaatagcgatgtctctggaagttttgtggaagagagtccagaaaaccttctagacaatgatccctcatttttctgtaggtttactgttgtagttgcaactcagcttcctgaaagcacttcactacgcttagcagatgtcctctggaattcccagattcctcttttgatctgtaggacatatggactagttggttatatgaggatcattataaaagaacatccagtaatagaatctcatccagataatgcattagaggatctacgactagataagccatttcctgaactgagagaacattttcagtcctatgatttggatcatatggaaaaaaaggaccacagtcatactccatggattgtgatcatagctaaatatttagcacagtggtatagtgaaacaaatggacgaatacctaaaacgtataaagaaaaagaggacttcagagatttgattagacaaggaattctaaaaaatgaaaatggggctccagaagatgaagagaattttgaagaagctattaaaaatgtgaacacagcactaaatacaactcagatcccaagcagtattgaagatatatttaatgatgatcgctgcataaatatcaccaaacagactccatcattttggattttagctcgtgccttaaaggaatttgtggccaaagagggtcaaggaaatttacctgttcgaggcacaattcctgatatgattgcagattcaggcaaatatataaaactgcaaaacgtttaccgtgaaaaagcaaagaaagatgctgccgctgtgggtaatcatgttgccaaattgctgcagtccattggccaggcaccagagtccatttcagagaaagaattaaaattactctgcagcaattctgcatttcttcgagtggtaagatgtcgatccttagctgaagaatatggtttggatacaattaacaaggatgaaattatttctagcatggacaatccagataatgaaatagtgttgtacttaatgttacgggctgttgatagatttcataaacaacagggtagatatccaggagtatctaactatcaagttgaagaagatataggaaagttgaagtcttgtctcactggcttccttcaggaatatggtttatctgtaatggtgaaagatgattatgtccacgaattttgccgatatggagctgctgagccacataccattgctgcattcttggggggagctgctgctcaagaggtcatcaaaataatcaccaaacaatttgtaatttttaataatacttacatttacagtggcatgtcacaaacttcagcaactttccagttgtagagtaagcaagcaccttaagtagtgtgttaatgattgaaactgtaattgccttcgggttgtgctttagtctgtaaaattctaaaggagagctgctaaattgttttcttaataaacatttttctcatttgtaaaaaaaaaaacaaaaaaanaaaaaaaaaaaggggggggcgccgcgcgctcaaaaaagttttccccgcggggggccccaagtttagcgcgcgttccccgagtttttttgttcccaagggggcccccctaataggggagccggttttaaaaaaggcaaggacacggggcccggcgcgttttacacaactgctcgggcagtgggggaaaacctgttaaccttggggagaccctttggtgagaagaggaccctttacttctctgggggcggtcgaccattctttggggccaaactatacctaccaggagaattttcaagcgcctcatagagggagcaactttacaacattttcacggtgcttctacgtgcgttaacccacacgcggcatatattgctgcgcggcgtagaaaggttggctgcccgggatatgacttttgactattttttt

SEQ ID NO: 344722 - DNA, 1903 bp, Homo sapiens
agcggagtgcgcctgcgcgcttgtggagctggtggcggcgctccgcaggggctcggctgttttccgcgcggcaggcgcggccatggcgcagctgggaaagctgctcaaggagcagaagtacgaccggcagctgaggttgtggggtgatcatgggcaagaggctttagaatctgctcatgtttgcctaataaatgcaacagccacaggaactgaaattcttaaaaacttggtactaccaggtattggttcgtttacaattattgatggaaatcaggtcagcggagaagatgctggaaacaatttcttccttcaaagaagcagtatcggcaagaaccgagctgaagctgccatggaattcttacaagaattaaatagcgatgtctctggaagttttgtggaagagagtccagaaaaccttctagacaatgatccctcatttttctgtaggtttactgttgtagttgcaactcagcttcctgaaagcacttcactacgcttagcagatgtcctctggaattcccagattcctcttttgatctgtaggacatatggactagttggttatatgaggatcattataaaagaacatccagtaatagaatctcatccagataatgcattagaggatctacgactagataagccatttcctgaactgagagaacattttcagtcctatgatttggatcatatggaaaaaaaggaccacagtcatactccatggattgtgatcatagctaaatatttagcacagtggtatagtgaaacaaatggacgaatacctaaaacgtataaagaaaaagaggacttcagagatttgattagacaaggaattctaaaaaatgaaaatggggctccagaagatgaagagaattttgaagaagctattaaaaatgtgaacacagcactaaatacaactcagatcccaagcagtattgaagatatatttaatgatgatcgctgcataaatatcaccaaacagactccatcattttggattttagctcgtgccttaaaggaatttgtggccaaagagggtcaaggaaatttacctgttcgaggcacaattcctgatatgattgcagattcaggcaaatatataaaactgcaaaacgtttaccgtgaaaaagcaaagaaagatgctgccgctgtgggtaatcatgttgccaaattgctgcagtccattggccaggcaccagagtccatttcagagaaagaattaaaattactctgcagcaattctgcatttcttcgagtggtaagatgtcgatccttagctgaagaatatggtttggatacaattaacaaggatgaaattatttctagcatggacaatccagataatgaaatagtgttgtacttaatgttacgggctgttgatagatttcataaacaacagggtagatatccaggagtatctaactatcaagttgaagaagatataggaaagttgaagtcttgtctcactggcttccttcaggaatatggtttatctgtaatggtgaaagatgattatgtccacgaattgtgagtattttttagggtatctaggagatgattccacacctgtcataaggctaatcaaaattcatgtctctgtggtctcctttagttgccgatatggagctgctgagccacataccattgctgcattcttggggggagctgctgctcaagaggtcatcaaaataatcaccaaacaatttgtaatttttaataatacttacatttacagtggcatgtcacaaacttcagcaactttccagttgtagagtaagcaagcaccttaagtagtgtgttaatgattgaaactgtaattgccttcgggttgtgctttagtctgtaaaattctaaaggagagctgctaaattgttttcttaataaacatttttctcatttgtaa

SEQ ID NO: 344723 - DNA, 1916 bp, Homo sapiens
agcggagtgcgcctgcgcgcttgtggagctggtggcggcgctccgcaggggctcggctgttttccgcgcggcaggcgcggccatggcgcagctgggaaagctgctcaaggagcagaagtacgaccggcagctgaggcgattcctccatacatttgacagctgtctgggcccttatggagcatacagtggagtggaaagatggatgctcagcaaacaaaaacaaatgaagccaggttgtggggtgatcatgggcaagaggctttagaatctgctcatgtttgcctaataaatgcaacagccacaggaactgaaattcttaaaaacttggtactaccaggtattggttcgtttacaattattgatggaaatcaggtcagcggagaagatgctggaaacaatttcttccttcaaagaagcagtatcggcaagaaccgagctgaagctgccatggaattcttacaagaattaaatagcgatgtctctggaagttttgtggaagagagtccagaaaaccttctagacaatgatccctcatttttctgtaggtttactgttgtagttgcaactcagcttcctgaaagcacttcactacgcttagcagatgtcctctggaattcccagattcctcttttgatctgtaggacatatggactagttggttatatgaggatcattataaaagaacatccagtaatagaatctcatccagataatgcattagaggatctacgactagataagccatttcctgaactgagagaacattttcagtcctatgatttggatcatatggaaaaaaaggaccacagtcatactccatggattgtgatcatagctaaatatttagcacagtggtatagtgaaacaaatggacgaatacctaaaacgtataaagaaaaagaggacttcagagatttgattagacaaggaattctaaaaaatgaaaatggggctccagaagatgaagagaattttgaagaagctattaaaaatgtgaacacagcactaaatacaactcagatcccaagcagtattgaagatatatttaatgatgatcgctgcataaatatcaccaaacagactccatcattttggattttagctcgtgccttaaaggaatttgtggccaaagagggtcaaggaaatttacctgttcgaggcacaattcctgatatgattgcagattcaggcaaatatataaaactgcaaaacgtttaccgtgaaaaagcaaagaaagatgctgccgctgtgggtaatcatgttgccaaattgctgcagtccattggccaggcaccagagtccatttcagagaaagaattaaaattactctgcagcaattctgcatttcttcgagtggtaagatgtcgatccttagctgaagaatatggtttggatacaattaacaaggatgaaattatttctagcatggacaatccagataatgaaatagtgttgtacttaatgttacgggctgttgatagatttcataaacaacagggtagatatccaggagtatctaactatcaagttgaagaagatataggaaagttgaagtcttgtctcactggcttccttcaggaatatggtttatctgtaatggtgaaagatgattatgtccacgaattttgccgatatggagctgctgagccacataccattgctgcattcttggggggagctgctgctcaagaggtcatcaaaataatcaccaaacaatttgtaatttttaataatacttacatttacagtggcatgtcacaaacttcagcaactttccagttgtagagtaagcaagcaccttaagtagtgtgttaatgattgaaactgtaattgccttcgggttgtgctttagtctgtaaaattctaaaggagagctgctaaattgttttcttaataaacatttttctcatttgtaa

SEQ ID NO: 344724 - DNA, 1827 bp, Homo sapiens
accgcagagtcggctgcgtcagcaggcaatggccttggagcaccggcctgagctacccagggagacggtggatctccaggaaaccgcgagtgcctaggagcccctccccaccttttccggggaagccctggtcggagcgagccggttgtggggtgatcatgggcaagaggctttagaatctgctcatgtttgcctaataaatgcaacagccacaggaactgaaattcttaaaaacttggtactaccaggtattggttcgtttacaattattgatggaaatcaggtcagcggagaagatgctggaaacaatttcttccttcaaagaagcagtatcggcaagaaccgagctgaagctgccatggaattcttacaagaattaaatagcgatgtctctggaagttttgtggaagagagtccagaaaaccttctagacaatgatccctcatttttctgtaggtttactgttgtagttgcaactcagcttcctgaaagcacttcactacgcttagcagatgtcctctggaattcccagattcctcttttgatctgtaggacatatggactagttggttatatgaggatcattataaaagaacatccagtaatagaatctcatccagataatgcattagaggatctacgactagataagccatttcctgaactgagagaacattttcagtcctatgatttggatcatatggaaaaaaaggaccacagtcatactccatggattgtgatcatagctaaatatttagcacagtggtatagtgaaacaaatggacgaatacctaaaacgtataaagaaaaagaggacttcagagatttgattagacaaggaattctaaaaaatgaaaatggggctccagaagatgaagagaattttgaagaagctattaaaaatgtgaacacagcactaaatacaactcagatcccaagcagtattgaagatatatttaatgatgatcgctgcataaatatcaccaaacagactccatcattttggattttagctcgtgccttaaaggaatttgtggccaaagagggtcaaggaaatttacctgttcgaggcacaattcctgatatgattgcagattcaggcaaatatataaaactgcaaaacgtttaccgtgaaaaagcaaagaaagatgctgccgctgtgggtaatcatgttgccaaattgctgcagtccattggccaggcaccagagtccatttcagagaaagaattaaaattactctgcagcaattctgcatttcttcgagtggtaagatgtcgatccttagctgaagaatatggtttggatacaattaacaaggatgaaattatttctagcatggacaatccagataatgaaatagtgttgtacttaatgttacgggctgttgatagatttcataaacaacagggtagatatccaggagtatctaactatcaagttgaagaagatataggaaagttgaagtcttgtctcactggcttccttcaggaatatggtttatctgtaatggtgaaagatgattatgtccacgaattttgccgatatggagctgctgagccacataccattgctgcattcttggggggagctgctgctcaagaggtcatcaaaataatcaccaaacaatttgtaatttttaataatacttacatttacagtggcatgtcacaaacttcagcaactttccagttgtagagtaagcaagcaccttaagtagtgtgttaatgattgaaactgtaattgccttcgggttgtgctttagtctgtaaaattctaaaggagagctgctaaattgttttcttaataaacatttttctcatttgtaa

SEQ ID NO: 344725 - DNA, 1981 bp, Homo sapiens
agcggagtgcgcctgcgcgcttgtggagctggtggcggcgctccgcaggggctcggctgttttccgcgcggcaggcgcggccatggcgcagctgggaaagctgctcaaggagcagaagtacgaccggcagctgaggtgtcttctacgtgccatactttgatggagaaaacaggcgtttacggtccatctggttcttctaggcgattcctccatacatttgacagctgtctgggcccttatggagcatacagtggagtggaaagatggatgctcagcaaacaaaaacaaatgaagccaggttgtggggtgatcatgggcaagaggctttagaatctgctcatgtttgcctaataaatgcaacagccacaggaactgaaattcttaaaaacttggtactaccaggtattggttcgtttacaattattgatggaaatcaggtcagcggagaagatgctggaaacaatttcttccttcaaagaagcagtatcggcaagaaccgagctgaagctgccatggaattcttacaagaattaaatagcgatgtctctggaagttttgtggaagagagtccagaaaaccttctagacaatgatccctcatttttctgtaggtttactgttgtagttgcaactcagcttcctgaaagcacttcactacgcttagcagatgtcctctggaattcccagattcctcttttgatctgtaggacatatggactagttggttatatgaggatcattataaaagaacatccagtaatagaatctcatccagataatgcattagaggatctacgactagataagccatttcctgaactgagagaacattttcagtcctatgatttggatcatatggaaaaaaaggaccacagtcatactccatggattgtgatcatagctaaatatttagcacagtggtatagtgaaacaaatggacgaatacctaaaacgtataaagaaaaagaggacttcagagatttgattagacaaggaattctaaaaaatgaaaatggggctccagaagatgaagagaattttgaagaagctattaaaaatgtgaacacagcactaaatacaactcagatcccaagcagtattgaagatatatttaatgatgatcgctgcataaatatcaccaaacagactccatcattttggattttagctcgtgccttaaaggaatttgtggccaaagagggtcaaggaaatttacctgttcgaggcacaattcctgatatgattgcagattcaggcaaatatataaaactgcaaaacgtttaccgtgaaaaagcaaagaaagatgctgccgctgtgggtaatcatgttgccaaattgctgcagtccattggccaggcaccagagtccatttcagagaaagaattaaaattactctgcagcaattctgcatttcttcgagtggtaagatgtcgatccttagctgaagaatatggtttggatacaattaacaaggatgaaattatttctagcatggacaatccagataatgaaatagtgttgtacttaatgttacgggctgttgatagatttcataaacaacagggtagatatccaggagtatctaactatcaagttgaagaagatataggaaagttgaagtcttgtctcactggcttccttcaggaatatggtttatctgtaatggtgaaagatgattatgtccacgaattttgccgatatggagctgctgagccacataccattgctgcattcttggggggagctgctgctcaagaggtcatcaaaataatcaccaaacaatttgtaatttttaataatacttacatttacagtggcatgtcacaaacttcagcaactttccagttgtagagtaagcaagcaccttaagtagtgtgttaatgattgaaactgtaattgccttcgggttgtgctttagtctgtaaaattctaaaggagagctgctaaattgttttcttaataaacatttttctcatttgtaa

SEQ ID NO: 344726 - DNA, 1183 bp, Homo sapiens
agcggagtgcgcctgcgcgcttgtggagctggtggcggcgctccgcaggggctcggctgttttccgcgcggcaggcgcggccatggcgcagctgggaaagctgctcaaggagcagaagtacgaccggcagctgaggttgtggggtgatcatgggcaagaggctttagaatctgctcatgtttgcctaataaatgcaacagccacaggaactgaaattcttaaaaacttggtactaccaggtattggttcgtttacaattattgatggaaatcaggtcagcggagaagatgctggaaacaatttcttccttcaaagaagcagtatcggcaagaaccgagctgaagctgccatggaattcttacaagaattaaatagcgatgtctctggaagttttgtggaagagagtccagaaaaccttctagacaatgatccctcatttttctgtaggtttactgttgtagttgcaactcagcttcctgaaagcacttcactacgcttagcagatgtcctctggaattcccagattcctcttttgatctgtaggacatatggactagttggttatatgaggatcattataaaagaacatccagtaatagaatctcatccagataatgcattagaggatctacgactagataagccatttcctgaactgagagaacattttcagtcctatgatttggatcatatggaaaaaaaggaccacagtcatactccatggattgtgatcatagctaaatatttagcacagtggtatagtgaaacaaatggacgaatacctaaaacgtataaagaaaaagaggacttcagagatttgattagacaaggaattctaaaaaatgaaaatggggctccagaagatgaagagaattttgaagaagctattaaaaatgtgaacacagcactaaatacaactcagatcccaagcagtattgaagatatatttaatgatgatcgctgcataaatatcaccaaacagattccatcattgtggattagctcggtgcttaaaggattgtggggccaagaggttcaggaatctacctgttcgagggaaatccggatatgttggcgaatcagggcaatttttacatggaaacgtttccgtgaaagcaaggaaagaggttgcgctggggaaaattgggccaatgtgtggcatgtgcgggcgagtctttaaaaa

SEQ ID NO: 344727 - DNA, 1550 bp, Homo sapiens
agcggagtgcgcctgcgcgcttgtggagctggtggcggcgctccgcaggggctcggctgttttccgcgcggcaggcgcggccatggcgcagctgggaaagctgctcaaggagcagaagtacgaccggcagctgagagtccagaaaaccttctagacaatgatccctcatttttctgtaggtttactgttgtagttgcaactcagcttcctgaaagcacttcactacgcttagcagatgtcctctggaattcccagattcctcttttgatctgtaggacatatggactagttggttatatgaggatcattataaaagaacatccagtaatagaatctcatccagataatgcattagaggatctacgactagataagccatttcctgaactgagagaacattttcagtcctatgatttggatcatatggaaaaaaaggaccacagtcatactccatggattgtgatcatagctaaatatttagcacagtggtatagtgaaacaaatggacgaatacctaaaacgtataaagaaaaagaggacttcagagatttgattagacaaggaattctaaaaaatgaaaatggggctccagaagatgaagagaattttgaagaagctattaaaaatgtgaacacagcactaaatacaactcagatcccaagcagtattgaagatatatttaatgatgatcgctgcataaatatcaccaaacagactccatcattttggattttagctcgtgccttaaaggaatttgtggccaaagagggtcaaggaaatttacctgttcgaggcacaattcctgatatgattgcagattcaggcaaatatataaaactgcaaaacgtttaccgtgaaaaagcaaagaaagatgctgccgctgtgggtaatcatgttgccaaattgctgcagtccattggccaggcaccagagtccatttcagagaaagaattaaaattactctgcagcaattctgcatttcttcgagtggtaagatgtcgatccttagctgaagaatatggtttggatacaattaacaaggatgaaattatttctagcatggacaatccagataatgaaatagtgttgtacttaatgttacgggctgttgatagatttcataaacaacagggtagatatccaggagtatctaactatcaagttgaagaagatataggaaagttgaagtcttgtctcactggcttccttcaggaatatggtttatctgtaatggtgaaagatgattatgtccacgaattttgccgatatggagctgctgagccacataccattgctgcattcttggggggagctgctgctcaagaggtcatcaaaataatcaccaaacaatttgtaatttttaataatacttacatttacagtggcatgtcacaaacttcagcaactttccagttgtagagtaagcaagcaccttaagtagtgtgttaatgattgaaactgtaattgccttcgggttgtgctttagtctgtaaaattctaaaggagagctgctaaattgttttcttaataaacatttttctcatttgtaa

SEQ ID NO: 344728 - DNA, 1897 bp, Homo sapiens
agcggagtgcgcctgcgcgcttgtggagctggtggcggcgctccgcaggggctcggctgttttccgcgcggcaggcgcggccatggcgcagctgggaaagctgctcaaggagcagaagtacgaccggcagctgaggttgtggggtgatcatgggcaagaggctttagaatctgctcatgtttgcctaataaatgcaacagccacaggaactgaaattcttaaaaacttggtactaccaggtattggttcgtttacaattattgatggaaatcaggtcagcggagaagatgctggaaacaatttcttccttcaaagaagcagtatcggcaagaaccgagctgaagctgccatggaattcttacaagaattaaatagcgatgtctctggaagttttgtggaagagagtccagaaaaccttctagacaatgatccctcatttttctgtaggtttactgttgtagttgcaactcagcttcctgaaagcacttcactacgcttagcagatgtcctctggaattcccagattcctcttttgatctgtaggacatatggactagttggttatatgaggatcattataaaagaacatccagtaatagaatctcatccagataatgcattagaggatctacgactagataagccatttcctgaactgagagaacattttcattttttagaattccttgtctaatcaaatctctgaagtcctctttttctttatacgttttaggtattcgtccatttgtttcactataccactgtgctaaatatttagctatgatcacaatccatggagtatgactgtggtcatagctaaatatttagcacagtggtatagtgaaacaaatggacgaatacctaaaacgtataaagaaaaagaggacttcagagatttgattagacaaggaattctaaaaaatgaaaatggggctccagaagatgaagagaattttgaagaagctattaaaaatgtgaacacagcactaaatacaactcagatcccaagcagtattgaagatatatttaatgatgatcgctgcataaatatcaccaaacagactccatcattttggattttagctcgtgccttaaaggaatttgtggccaaagagggtcaaggaaatttacctgttcgaggcacaattcctgatatgattgcagattcaggcaaatatataaaactgcaaaacgtttaccgtgaaaaagcaaagaaagatgctgccgctgtgggtaatcatgttgccaaattgctgcagtccattggccaggcaccagagtccatttcagagaaagaattaaaattactctgcagcaattctgcatttcttcgagtggtaagatgtcgatccttagctgaagaatatggtttggatacaattaacaaggatgaaattatttctagcatggacaatccagataatgaaatagtgttgtacttaatgttacgggctgttgatagatttcataaacaacagggtagatatccaggagtatctaactatcaagttgaagaagatataggaaagttgaagtcttgtctcactggcttccttcaggaatatggtttatctgtaatggtgaaagatgattatgtccacgaattttgccgatatggagctgctgagccacataccattgctgcattcttggggggagctgctgctcaagaggtcatcaaaataatcaccaaacaatttgtaatttttaataatacttacatttacagtggcatgtcacaaacttcagcaactttccagttgtagagtaagcaagcaccttaagtagtgtgttaatgattgaaactgtaattgccttcgggttgtgctttagtctgtaaaattctaaaggagagctgctaaattgttttcttaataaacatttttctcatttgtaa

SEQ ID NO: 344729 - DNA, 1141 bp, Homo sapiens
tgctcatacacgattacacaactgtccatttatcggtttttgggttataatattctactgacgccaagttacaggaaccatcatcccctccgacaacatataacagaccattaactgcactaactcctgcatttcttctgcacatgttcatatctgcaacctgtctccatgcgttagtggtgggatcatatacttcaacactttttcgtactaaagggccatcatgacctcctacagcatacaataaattgtttaacacaccaacacctgctccactccgcctggtgctcatttctgctataaagactccatcattttggattttagctcgtgccttaaaggaatttgtggccaaagagggtcaaggaaatttacctgttcgaggcacaattcctgatatgattgcagattcaggcaaatatataaaactgcaaaacgtttaccgtgaaaaagcaaagaaagatgctgccgctgtgggtaatcatgttgccaaattgctgcagtccattggccaggcaccagagtccatttcagagaaagaattaaaattactctgcagcaattctgcatttcttcgagtggtaagatgtcgatccttagctgaagaatatggtttggatacaattaacaaggatgaaattatttctagcatggacaatccagataatgaaatagtgttgtacttaatgttacgggctgttgatagatttcataaacaacagggtagatatccaggagtatctaactatcaagttgaagaagatataggaaagttgaagtcttgtctcactggcttccttcaggaatatggtttatctgtaatggtgaaagatgattatgtccacgaattttgccgatatggagctgctgagccacataccattgctgcattcttggggggagctgctgctcaagaggtcatcaaaataatcaccaaacaatttgtaatttttaataatacttacatttacagtggcatgtcacaaacttcagcaactttccagttgtagagtaagcaagcaccttaagtagtgtgttaatgattgaaactgtaattgccttcgggttgtgctttagtctgtaaaattctaaaggagagctgctaaattgttttcttaataaacatttttctcatttgtaa

SEQ ID NO: 344730 - DNA, 839 bp, Homo sapiens
agagggtgtggcactgcctctgtgcttctttagagggagctgtcatttccctgcctaatgggatagcttgtgataaggaaacaagatatttttaaagtgctctcccagctcttggagaaagccttcccatctcacagtgattggctttgtgccgcaccctttgttaatcttctcttttaaactggaacagaatctgtatttatctctttacaggcaccagagtccatttcagagaaagaattaaaattactctgcagcaattctgcatttcttcgagtggtaagatgtcgatccttagctgaagaatatggtttggatacaattaacaaggatgaaattatttctagcatggacaatccagataatgaaatagtgttgtacttaatgttacgggctgttgatagatttcataaacaacagggtagatatccaggagtatctaactatcaagttgaagaagatataggaaagttgaagtcttgtctcactggcttccttcaggaatatggtttatctgtaatggtgaaagatgattatgtccacgaattttgccgatatggagctgctgagccacataccattgctgcattcttggggggagctgctgctcaagaggtcatcaaaataatcaccaaacaatttgtaatttttaataatacttacatttacagtggcatgtcacaaacttcagcaactttccagttgtagagtaagcaagcaccttaagtagtgtgttaatgattgaaactgtaattgccttcgggttgtgctttagtctgtaaaattctaaaggagagctgctaaattgttttcttaataaacatttttctcatttgtaa

SEQ ID NO: 344731 - DNA, 733 bp, Homo sapiens
accgcagagtcggctgcgtcagcaggcaatggccttggagcaccggcctgagctacccagggagacggtggatctccaggaaaccgcgagtgcctaggagcccctccccaccttttccggggaagccctggtcggagcgagccggttgtggggtgatcatgggcaagaggctttagaatctgctcatgtttgcctaataaatgcaacagccacaggaactgaaattcttaaaaacttggtactaccaggtattggttcgtttacaattattgatggaaatcaggtcagcggagaagatgctggaaacaagtatgttctattctcttcaaatatattcacgttaaggaaggcaaggcctgagtcttagcttcacctcctcagtcagggtgactcgactctcagtggaaatcatccttatgtttgggattatggtgaggaagtgagataatataggtaaagtgctagtacagcatctggcaaatagggcattaataaatgttacccatcattactgtctttattgttattaatacaaaggagtagtcgttattcctttattcatggaatatgggcacttcctaagctcttgtattgatccgtaggtgttagcatataattaacaataatgcctgttgtttgtgatgtcttttaggcttagtctaggggtatctctctttacagtgtcaacaaaaatgctgttttaaagatggcctgtatattattctttaaagat

SEQ ID NO: 344732 - DNA, 214 bp, Homo sapiens
aaggtgattcatgttctagtgctttctctgctattagaaccaaggagaaaacatttcttcacattctcatgtctgagaagggtatacacataattctctgttcttaaagtcacctgtgattcataatattcaccagtcacagtcattacttccagaatatctttcctctgttcaggcagcaattctgcatttcttcgagtggtaagatgtcgat

SEQ ID NO: 344733 - DNA, 1818 bp, Homo sapiens
agcggagtgcgcctgcgcgcttgtggagctggtggcggcgctccgcaggggctcggctgttttccgcgcggcaggcgcggccatggcgcagctgggaaagctgctcaaggagcagaagtacgaccggcagctgaggttgtggggtgatcatgggcaagaggctttagaatctgctcatgtttgcctaataaatgcaacagccacaggaactgaaattcttaaaaacttggtactaccaggtattggttcgtttacaattattgatggaaatcaggtcagcggagaagatgctggaaacaatttcttccttcaaagaagcagtatcggcaagaaccgagctgaagctgccatggaattcttacaagaattaaatagcgatgtctctggaagttttgtggaagagagtccagaaaaccttctagacaatgatccctcatttttctgtaggtttactgttgtagttgcaactcagcttcctgaaagcacttcactacgcttagcagatgtcctctggaattcccagattcctcttttgatctgtaggacatatggactagttggttatatgaggatcattataaaagaacatccagtaatagaatctcatccagataatgcattagaggatctacgactagataagccatttcctgaactgagagaacattttcagtcctatgatttggatcatatggaaaaaaaggaccacagtcatactccatggattgtgatcatagctaaatatttagcacagtggtatagtgaaacaaatggacgaatacctaaaacgtataaagaaaaagaggacttcagagatttgattagacaaggaattctaaaaaatgaaaatggggctccagaagatgaagagaattttgaagaagctattaaaaatgtgaacacagcactaaatacaactcagatcccaagcagtattgaagatatatttaatgatgatcgctgcataaatatcaccaaacagactccatcattttggattttagctcgtgccttaaaggaatttgtggccaaagagggtcaaggaaatttacctgttcgaggcacaattcctgatatgattgcagattcaggcaaatatataaaactgcaaaacgtttaccgtgaaaaagcaaagaaagatgctgccgctgtgggtaatcatgttgccaaattgctgcagtccattggccaggcaccagagtccatttcagagaaagaattaaaattactctgcagcaattctgcatttcttcgagtggtaagatgtcgatccttagctgaagaatatggtttggatacaattaacaaggatgaaattatttctagcatggacaatccagataatgaaatagtgttgtacttaatgttacgggctgttgatagatttcataaacaacagggtagatatccaggagtatctaactatcaagttgaagaagatataggaaagttgaagtcttgtctcactggcttccttcaggaatatggtttatctgtaatggtgaaagatgattatgtccacgaattttgccgatatggagctgctgagccacataccattgctgcattcttggggggagctgctgctcaagaggtcatcaaaataatcaccaaacaatttgtaatttttaataatacttacatttacagtggcatgtcacaaacttcagcaactttccagttgtagagtaagcaagcaccttaagtagtgtgttaatgattgaaactgtaattgccttcgggttgtgctttagtctgtaaaattctaaaggagagctgctaaattgttttcttaataaacatttttctcatttgtaa

SEQ ID NO: 344734 - DNA, 2365 bp, Homo sapiens
  misc_feature (1836)..(1836): n is a, c, g, or t
agcggagtgcgcctgcgcgcttgtggagctggtggcggcgctccgcaggggctcggctgttttccgcgcggcaggcgcggccatggcgcagctgggaaagctgctcaaggagcagaagtacgaccggcagctgaggttgtggggtgatcatgggcaagaggctttagaatctgctcatgtttgcctaataaatgcaacagccacaggaactgaaattcttaaaaacttggtactaccaggtattggttcgtttacaattattgatggaaatcaggtcagcggagaagatgctggaaacaatttcttccttcaaagaagcagtatcggcaagaaccgagctgaagctgccatggaattcttacaagaattaaatagcgatgtctctggaagttttgtggaagagagtccagaaaaccttctagacaatgatccctcatttttctgtaggtttactgttgtagttgcaactcagcttcctgaaagcacttcactacgcttagcagatgtcctctggaattcccagattcctcttttgatctgtaggacatatggactagttggttatatgaggatcattataaaagaacatccagtaatagaatctcatccagataatgcattagaggatctacgactagataagccatttcctgaactgagagaacattttcagtcctatgatttggatcatatggaaaaaaaggaccacagtcatactccatggattgtgatcatagctaaatatttagcacagtggtatagtgaaacaaatggacgaatacctaaaacgtataaagaaaaagaggacttcagagatttgattagacaaggaattctaaaaaatgaaaatggggctccagaagatgaagagaattttgaagaagctattaaaaatgtgaacacagcactaaatacaactcagatcccaagcagtattgaagatatatttaatgatgatcgctgcataaatatcaccaaacagactccatcattttggattttagctcgtgccttaaaggaatttgtggccaaagagggtcaaggaaatttacctgttcgaggcacaattcctgatatgattgcagattcaggcaaatatataaaactgcaaaacgtttaccgtgaaaaagcaaagaaagatgctgccgctgtgggtaatcatgttgccaaattgctgcagtccattggccaggcaccagagtccatttcagagaaagaattaaaattactctgcagcaattctgcatttcttcgagtggtaagatgtcgatccttagctgaagaatatggtttggatacaattaacaaggatgaaattatttctagcatggacaatccagataatgaaatagtgttgtacttaatgttacgggctgttgatagatttcataaacaacagggtagatatccaggagtatctaactatcaagttgaagaagatataggaaagttgaagtcttgtctcactggcttccttcaggaatatggtttatctgtaatggtgaaagatgattatgtccacgaattttgccgatatggagctgctgagccacataccattgctgcattcttggggggagctgctgctcaagaggtcatcaaaataatcaccaaacaatttgtaatttttaataatacttacatttacagtggcatgtcacaaacttcagcaactttccagttgtagagtaagcaagcaccttaagtagtgtgttaatgattgaaactgtaattgccttcgggttgtgctttagtctgtaaaattctaaaggagagctgctaaattgttttcttaataaacatttttctcatttgtaaaaaaaaaaacaaaaaaanaaaaaaaaaaaaaaaaaaaaaaaaaaagaaaagaaaaaagaaaagaagacaagcagagagaaaaaaaaaaaaacaaaagagaaaggaagagcagagagaatgaaaagcacgacaacagcagcagtagagcaccaggagtgagcacctaaacaagagggagctcagagaaaacgagaagcactagcgacggcgagacaagcaacacgggggagaaaaaacacaagcacacactgagcaaagaggaaaggaaccagaagacaagaagagggacaaacaagacgaaagaaaaagcaaaggagaaaagcgcagaacacaaataggaaccaaaaaaacaaagaacacgcgtaagccaaaataagctgacacagaaacaacacgagataaatacgaagaggaagcaaagaggaaaaaaaagcatcaagagatgacacagatgacagaacaataaaacatacagaggaggctgaagaagagaatgcaaacgagagaacaagacagaaccaccaacaacaacagcagacagcgagaa

SEQ ID NO: 344735 - DNA, 1854 bp, Homo sapiens
agcggagtgcgcctgcgcgcttgtggagctggtggcggcgctccgcaggggctcggctgttttccgcgcggcaggcgcggccatggcgcagctgggaaagctgctcaaggagcagaagtacgaccggcagctgaggttgtggggtgatcatgggcaagaggctttagaatctgctcatgtttgcctaataaatgcaacagccacaggaactgaaattcttaaaaacttggtactaccaggtattggttcgtttacaattattgatggaaatcaggtcagcggagaagatgctggaaacaatttcttccttcaaagaagcagtatcggcaagaaccgagctgaagctgccatggaattcttacaagaattaaatagcgatgtctctggaagttttgtggaagagagtccagaaaaccttctagacaatgatccctcatttttctgtaggtttactgttgtagttgcaactcagcttcctgaaagcacttcactacgcttagcagatgtcctctggaattcccagattcctcttttgatctgtaggacatatggactagttggttatatgaggatcattataaaagaacatccagtaatagaatctcatccagataatgcattagaggatctacgactagataagccatttcctgaactgagagaacattttcagtcctatgatttggatcatatggaaaaaaaggaccacagtcatactccatggattgtgatcatagctaaatatttagcacagtggtatagtgaaacaaatggacgaatacctaaaacgtataaagaaaaagaggacttcagagatttgattagacaaggaattctaaaaaatgaaaatggggctccagaagatgaagagaattttgaagaagctattaaaaatgtgaacacagcactaaatacaactcagatcccaagcagtattgaagatatatttaatgatgatcgctgcataaatatcaccaaacagactccatcattttggattttagctcgtgccttaaaggaatttgtggccaaagagggtcaaggaaatttacctgttcgaggcacaattcctgatatgattgcagattcaggcaaatatataaaactgcaaaacgtttaccgtgaaaaagcaaagaaagatgctgccgctgtgggtaatcatgttgccaaattgctgcagtccattggccaggcaccagagtccatttcagagaaagaattaaaattactctgcagcaattctgcatttcttcgagtggtaagatgtcgatccttagctgaagaatatggtttggatacaattaacaaggatgaaattatttctagcatggacaatccagataatgaaatagtgttgtacttaatgttacgggctgttgatagatttcataaacaacagggtagatatccaggagtatctaactatcaagttgaagaagatataggaaagttgaagtcttgtctcactggcttccttcaggaatatggtttatctgtaatggtgaaagatgattatgtccacgaattgctaatcaaaattcatgtctctgtggtctcctttagttgccgatatggagctgctgagccacataccattgctgcattcttggggggagctgctgctcaagaggtcatcaaaataatcaccaaacaatttgtaatttttaataatacttacatttacagtggcatgtcacaaacttcagcaactttccagttgtagagtaagcaagcaccttaagtagtgtgttaatgattgaaactgtaattgccttcgggttgtgctttagtctgtaaaattctaaaggagagctgctaaattgttttcttaataaacatttttctcatttgtaa

SEQ ID NO: 344736 - DNA, 1301 bp, Homo sapiens
  misc_feature (1210)..(1210): n is a, c, g, or t
agcggagtgcgcctgcgcgcttgtggagctggtggcggcgctccgcaggggctcggctgttttccgcgcggcaggcgcggccatggcgcagctgggaaagctgctcaaggagcagaagtacgaccggcagctgaggttgtggggtgatcatgggcaagaggctttagaatctgctcatgtttgcctaataaatgcaacagccacaggaactgaaattcttaaaaacttggtactaccaggtattggttcgtttacaattattgatggaaatcaggtcagcggagaagatgctggaaacaatttcttccttcaaagaagcagtatcggcaagaaccgagctgaagctgccatggaattcttacaagaattaaatagcgatgtctctggaagttttgtggaagagagtccagaaaaccttctagacaatgatccctcatttttctgtaggtttactgttgtagttgcaactcagcttcctgaaagcacttcactacgcttagcagatgtcctctggaattcccagattcctcttttgatctgtaggacatatggactagttggttatatgaggatcattataaaagaacatccagtaatagaatctcatccagataatgcattagaggatctacgactagataagccatttcctgaactgagagaacattttcagtcctatgatttggatcatatggaaaaaaaggaccacagtcatactccatggattgtgatcatagctaaatatttagcacagtggtatagtgaaacaaatggacgaatacctaaaacgtataaagaaaaagaggacttcagagatttgattagacaaggaattctaaaaaatgaaaatggggctccagaagatgaagagaattttgaagaagctattaaaaatgtgaacacagcactaaatacaactcagatcccaagcagtattgaagatatatttaatgatgatcgctgcataaatatcaccaaacagactccatcattttggattttagctcgtgccttaaaggaatttgtggccaaagagggtcaaggaaatttacctgttcgaggcacaattcctgatatgattgcagattcaggcaaatatataaaactgcaaaacgtttaccgtgaaaaagcaaagaaagatgctgccgctgtgggtaatcatgttgccaaattgctgcagtccattggccaggcaccagagtccatttcngagtatagaacttttactactctgcagctattccgctttcttcgcgtggtccgtgtcacccttccctgttgatcctgtcccggtctccgcc

SEQ ID NO: 344737 - DNA, 1714 bp, Homo sapiens
agcggagtgcgcctgcgcgcttgtggagctggtggcggcgctccgcaggggctcggctgttttccgcgcggcaggcgcggccatggcgcagctgggaaagctgctcaaggagcagaagtacgaccggcagctgaggtattggttcgtttacaattattgatggaaatcaggtcagcggagaagatgctggaaacaatttcttccttcaaagaagcagtatcggcaagaaccgagctgaagctgccatggaattcttacaagaattaaatagcgatgtctctggaagttttgtggaagagagtccagaaaaccttctagacaatgatccctcatttttctgtaggtttactgttgtagttgcaactcagcttcctgaaagcacttcactacgcttagcagatgtcctctggaattcccagattcctcttttgatctgtaggacatatggactagttggttatatgaggatcattataaaagaacatccagtaatagaatctcatccagataatgcattagaggatctacgactagataagccatttcctgaactgagagaacattttcagtcctatgatttggatcatatggaaaaaaaggaccacagtcatactccatggattgtgatcatagctaaatatttagcacagtggtatagtgaaacaaatggacgaatacctaaaacgtataaagaaaaagaggacttcagagatttgattagacaaggaattctaaaaaatgaaaatggggctccagaagatgaagagaattttgaagaagctattaaaaatgtgaacacagcactaaatacaactcagatcccaagcagtattgaagatatatttaatgatgatcgctgcataaatatcaccaaacagactccatcattttggattttagctcgtgccttaaaggaatttgtggccaaagagggtcaaggaaatttacctgttcgaggcacaattcctgatatgattgcagattcaggcaaatatataaaactgcaaaacgtttaccgtgaaaaagcaaagaaagatgctgccgctgtgggtaatcatgttgccaaattgctgcagtccattggccaggcaccagagtccatttcagagaaagaattaaaattactctgcagcaattctgcatttcttcgagtggtaagatgtcgatccttagctgaagaatatggtttggatacaattaacaaggatgaaattatttctagcatggacaatccagataatgaaatagtgttgtacttaatgttacgggctgttgatagatttcataaacaacagggtagatatccaggagtatctaactatcaagttgaagaagatataggaaagttgaagtcttgtctcactggcttccttcaggaatatggtttatctgtaatggtgaaagatgattatgtccacgaattttgccgatatggagctgctgagccacataccattgctgcattcttggggggagctgctgctcaagaggtcatcaaaataatcaccaaacaatttgtaatttttaataatacttacatttacagtggcatgtcacaaacttcagcaactttccagttgtagagtaagcaagcaccttaagtagtgtgttaatgattgaaactgtaattgccttcgggttgtgctttagtctgtaaaattctaaaggagagctgctaaattgttttcttaataaacatttttctcatttgtaa

SEQ ID NO: 344738 - DNA, 1796 bp, Homo sapiens
accgcagagtcggctgcgtcagcaggcaatggccttggagcaccggcctgagctacccagggagacggtggatctccaggaaaccgcgagtgcctaggagcccctccccaccttttccggggaagccctggtcggagcgagccggttgtggggtgatcatgggcaagaggctttagaatctgctcatgtttgcctaataaatgcaacagccacaggaactgaaattcttaaaaacttggtactaccaggtattggttcgtttacaattattgatggaaatcaggtcagcggagaagatgctggaaacaaaaccgagctgaagctgccatggaattcttacaagaattaaatagcgatgtctctggaagttttgtggaagagagtccagaaaaccttctagacaatgatccctcatttttctgtaggtttactgttgtagttgcaactcagcttcctgaaagcacttcactacgcttagcagatgtcctctggaattcccagattcctcttttgatctgtaggacatatggactagttggttatatgaggatcattataaaagaacatccagtaatagaatctcatccagataatgcattagaggatctacgactagataagccatttcctgaactgagagaacattttcagtcctatgatttggatcatatggaaaaaaaggaccacagtcatactccatggattgtgatcatagctaaatatttagcacagtggtatagtgaaacaaatggacgaatacctaaaacgtataaagaaaaagaggacttcagagatttgattagacaaggaattctaaaaaatgaaaatggggctccagaagatgaagagaattttgaagaagctattaaaaatgtgaacacagcactaaatacaactcagatcccaagcagtattgaagatatatttaatgatgatcgctgcataaatatcaccaaacagactccatcattttggattttagctcgtgccttaaaggaatttgtggccaaagagggtcaaggaaatttacctgttcgaggcacaattcctgatatgattgcagattcaggcaaatatataaaactgcaaaacgtttaccgtgaaaaagcaaagaaagatgctgccgctgtgggtaatcatgttgccaaattgctgcagtccattggccaggcaccagagtccatttcagagaaagaattaaaattactctgcagcaattctgcatttcttcgagtggtaagatgtcgatccttagctgaagaatatggtttggatacaattaacaaggatgaaattatttctagcatggacaatccagataatgaaatagtgttgtacttaatgttacgggctgttgatagatttcataaacaacagggtagatatccaggagtatctaactatcaagttgaagaagatataggaaagttgaagtcttgtctcactggcttccttcaggaatatggtttatctgtaatggtgaaagatgattatgtccacgaattttgccgatatggagctgctgagccacataccattgctgcattcttggggggagctgctgctcaagaggtcatcaaaataatcaccaaacaatttgtaatttttaataatacttacatttacagtggcatgtcacaaacttcagcaactttccagttgtagagtaagcaagcaccttaagtagtgtgttaatgattgaaactgtaattgccttcgggttgtgctttagtctgtaaaattctaaaggagagctgctaaattgttttcttaataaacatttttctcatttgtaa

SEQ ID NO: 344739 - DNA, 1390 bp, Homo sapiens
  misc_feature (37)..(37): n is a, c, g, or t
acgcgcggggtttccccgcacgaagaggatccccccngttcctgcttctagaaagcacttcactacgcttagcagatgtcctctggaattcccagattcctcttttgatctgtaggacatatggactagttggttatatgaggatcattataaaagaacatccagtaatagaatctcatccagataatgcattagaggatctacgactagataagccatttcctgaactgagagaacattttcagtcctatgatttggatcatatggaaaaaaaggaccacagtcatactccatggattgtgatcatagctaaatatttagcacagtggtatagtgaaacaaatggacgaatacctaaaacgtataaagaaaaagaggacttcagagatttgattagacaaggaattctaaaaaatgaaaatggggctccagaagatgaagagaattttgaagaagctattaaaaatgtgaacacagcactaaatacaactcagatcccaagcagtattgaagatatatttaatgatgatcgctgcataaatatcaccaaacagactccatcattttggattttagctcgtgccttaaaggaatttgtggccaaagagggtcaaggaaatttacctgttcgaggcacaattcctgatatgattgcagattcaggcaaatatataaaactgcaaaacgtttaccgtgaaaaagcaaagaaagatgctgccgctgtgggtaatcatgttgccaaattgctgcagtccattggccaggcaccagagtccatttcagagaaagaattaaaattactctgcagcaattctgcatttcttcgagtggtaagatgtcgatccttagctgaagaatatggtttggatacaattaacaaggatgaaattatttctagcatggacaatccagataatgaaatagtgttgtacttaatgttacgggctgttgatagatttcataaacaacagggtagatatccaggagtatctaactatcaagttgaagaagatataggaaagttgaagtcttgtctcactggcttccttcaggaatatggtttatctgtaatggtgaaagatgattatgtccacgaattttgccgatatggagctgctgagccacataccattgctgcattcttggggggagctgctgctcaagaggtcatcaaaataatcaccaaacaatttgtaatttttaataatacttacatttacagtggcatgtcacaaacttcagcaactttccagttgtagagtaagcaagcaccttaagtagtgtgttaatgattgaaactgtaattgccttcgggttgtgctttagtctgtaaaattctaaaggagagctgctaaattgttttcttaataaacatttttctcatttgtaa

SEQ ID NO: 344740 - DNA, 1121 bp, Homo sapiens
  misc_feature (840)..(840): n is a, c, g, or t
  misc_feature (846)..(848): n is a, c, g, or t
  misc_feature (1121)..(1121): n is a, c, g, or t
agcggagtgcgcctgcgcgcttgtggagctggtggcggcgctccgcaggggctcggctgttttccgcgcggcaggcgcggccatggcgcagctgggaaagctgctcaaggagcagaagtacgaccggcagctgaggttgtggggtgatcatgggcaagaggctttagaatctgctcatgtttgcctaataaatgcaacagccacaggaactgaaattcttaaaaacttggtactaccaggtattggttcgtttacaattattgatggaaatcaggtcagcggagaagatgctggaaacaatttcttccttcaaagaagcagtatcggcaagaaccgagctgaagctgccatggaattcttacaagaattaaatagcgatgtctctggaagttttgtggaagagagtccagaaaaccttctagacaatgatccctcatttttctgtaggtttactgttgtagttgcaactcagcttcctgaaagcacttcactacgcttagcagatgtcctctggaattcccagattcctcttttgatctgtaggacatatggactagttggttatatgaggatcattataaaagaacatccagtaatagaatctcatccagataatgcattagaggatctacgactagataagccatttcctgaactgagagaacattttcagtcctatgatttggatcatatggaaaaaaaggaccacagtcatactccatggattgtgatcatagctaaatatttagcacagtggtatagtgaaacaaatggacgaatacctaaaacgtataaagaaaaagaggacttcagagatttgattagacaaggaattctaanaaatgnnnatggggctccagaagatgaccgcagactctgcgccgcacgctactctcccatgtgaacacagccactaacatacatctccagatcccaagccgctctgaagatattttagctgatgatcgctgcattaatctccccaaccgactccatcacttcggatttgagctcgtgccttcaggactctgtggccgggagggttcagggacttttcccgtccgggccaatcctgttgatgccttccgcccatttcgccggcccggttcgggaacgccgcn

SEQ ID NO: 344741 - DNA, 940 bp, Homo sapiens
agcggagtgcgcctgcgcgcttgtggagctggtggcggcgctccgcaggggctcggctgttttccgcgcggcaggcgcggccatggcgcagctgggaaagctgctcaaggagcagaagtacgaccggcagctgaggttgtggggtgatcatgggcaagaggctttagaatctgctcatgtttgcctaataaatgcaacagccacaggaactgaaattcttaaaaacttggtactaccaggtattggttcgtttacaattattgatggaaatcaggtcagcggagaagatgctggaaacaatttcttccttcaaagaagcagtatcggcaagaaccgagctgaagctgccatggaattcttacaagaattaaatagcgatgtctctggaagttttgtggaagagagtccagaaaaccttctagacaatgatccctcatttttctgtaggtttactgttgtagttgcaactcagcttcctgaaagcacttcactacgcttagcagatgtcctctggaattcccagattcctcttttgatctgtaggacatatggactagttggttatatgaggatcattataaaagaacatccagtaatagaatctcatccagataatgcattagaggatgttcttttccaaatgattgcccatgtgccaagtacttccagttcacggcatctcttttaaaaattgctgaccaaaaagatgtctgaagaaagatattttagaaaatatcatttaaacacccatctacctactctcataaaagtagactcagatttccacttggtccaactaccaagtgatctactgctagaagttaactgctaaactagtactattttctgttttaaatgatattgaacaataaataacctcatttcatttttaatcactgaggcaaaggcaatataaatcaccagttcccaccataattaa

SEQ ID NO: 344742 - DNA, 687 bp, Homo sapiens
ccacttgtctgtttcggcttttgttccttgtgcttttgggggtcatatccaaacaaagattgctgaggggccaaattttaaattgtgtataattttaatgacttcagatttaaatagctgcatttggcttatggagtcttttgagcagcatggttttaaaaaggtttttgccaagtggggttctaatggacacctatgcttgtagagctctgatgtgagtgatctgctgtagaaattacttcttttgatttagtatattattttaaaatgcaggtgatgcactggtttcttggtgagggaagctggtttttcctggctgagcttctgtagggtggagggctggagtccaggctctcgctgggcagggaaggcagcttgagtgtgccttccagtcctcctgagggcccacatttttctgggatcacctgttttctgtaatgtgcattgaacacacgggccaggagaagagggaagtagaggagctttgtcctctgtgctcatcctcacagtgctgggcgggccagaaggattcagggccaaccttagggagatgaaggccagttaaaatgttttattgccacaaatggtgtcttttaagaaatgaatccatgtattttacacttaaatgatattaggctactccgggcacactgcctatggggtagccctgctctgcaaggagtagta

SEQ ID NO: 344743 - DNA, 1230 bp, Homo sapiens
tgtatgtaacagagttcctgcatgtcctactttctaatgtgtattctggatataataaaagtgatatcaaatcagagcagtttagaaacagctaaagaaaggaagggaaaagctaggaagctattaaaaccaaatacataggcaagtgagatataatagatgactttctgatagagagcaataagattgaagagccttagaaagtgtttatatgtaaaattcctccaaattataacacttgtgagtattatacatagcaaaactagtttttagaacaccaaaacactgtgaaataattgataatgatttccatgggagggttaaattgggagacaagtgtgaaatacatttaaaagttctattgaaatatctaagaaaaaagttttgccatatctattactgactctgattatggtgtttttttttgtttttgtttttgtttttgttttttgagacgaattcttgttctgtcacccaggctggcgtgcagtggcgcaatctcggctcactgcaacctccgcctcccaggttcaagtgattctcctgcctcagcttccctagtagctgagactacaggcatgtgccaccacgcccggctaattttttgtatttttagtagagactgggtttcaccatgttagcaaggctggtcttgatctcctgaacttgtgatctgcctgcctcagcctcccaaagtgctgagattacaggcatgagccaccatgcctggcctgattatggtgatttttgctgtctagattcccgccccccgcaatatgtctactgaattcctgtccattcctccaaatattttctactaaaatttactacttattattgattgtgtttttccctgttattgtggaatattttttggtcatactcattttgtaaagttaatttaaaattgcattttatgttctagcatattcactaaaccctgcctagttagtgtcatcttaaaatatgaagatctaggccaggtgctgtgtctcacacctctagtcctagcaccttgggaggccaaggcgggtggatcgcttgagctcaggagtttaagaccagcctgggcaacatggcgaaaccctatctttaaaaaaaaaaaacattgcagctacttgtgggggctgaggagggaggattgcttgaacccaggaagtcgaggctgcagtgagctgagatcgtgccgcggcactccagcctgggtgacaaagtgagaccctaattaaa

SEQ ID NO: 344744 - DNA, 550 bp, Homo sapiens
tgtatgtaacagagttcctgcatgtcctactttctaatgtgtattctggatataataaaagtgatatcaaatcagagcagtttagaaacagctaaagaaaggaagggaaaagctaggaagctattaaaaccaaatacataggcaagtgagatataatagatgactttctgatagagagcaataagattgaagagccttagaaagtgtttatatgtaaaattcctccaaattataacacttgtgagtattatacatagcaaaactagtttttagaacaccaaaacactgtgaaataattgataatgatttccatgggagggttaaattgggagacaagtgtgaaatacatttaaaagttctattgaaatatctaagaaaaaagttttgccatatctattactgactctgattatggtgtttttttttgtttttgtttttgtttttgttttttgagacgaattcttgttctgtcacccaggctggcgctgcagtgagctgagatcgtgccgcggcactccagcctgggtgacaaagtgagaccctaattaaa

SEQ ID NO: 344745 - DNA, 705 bp, Homo sapiens
tgaatacagttggtaaatggatgagtccagactcaaatataaggattataggacacaaaagcctacaccctttaaatagcaacatgttctctctccaccacagggaacaaagactaaaggggaaaaagaaagaaccccacaacatggaaacaagcaccagcatccctgcagattagccaaagtattgaaaaggtttaatcttccagttttcctatgttcttcacacaaaccacccagcacatggcaccactgcaataatccccacttttcccaggaaacacagcactgagaactgttcctgttcgaatcgcacactcagctataaaatgggcaggaacgtgggctccagaagatagaaaaatctgtacccttcactcttttattgactttttatctacagtgataaaactttcagcattacaccattaaatttagcctcagatatagtaaaagctaagcatcagactagtttaaatacatggcaaggccaacgaccctacctcaaagcttcatctctggttctgagatcaactgtaccatttaaggctcagaatcacacgctgctcatcaaacacatgctcggctcatatccacttgacacatccatccatccttccaaatgccaccctgctccacacttctgcttgccctgttagcattcccagagcccctcctggcaaggttagtgcttcctccacccccatg

SEQ ID NO: 344746 - DNA, 1467 bp, Homo sapiens
tctgcctgctgtcgggggcgggctggccaggccgaggccggagcaggcaggcatcccccggagttgtctcttttcatgccagcgccaacaggaggctgtctggacacactgattactcactcaccagcctccctcttttgtccaccagcccagcctgactcctggagattgtgaatagctccatccagcctgagaaacaagccgggtggctgagccaggctgtgcacggagtgcctgacgggcccaacagacccatgctgcatccagagacctcccctggccgggggcatctcctggctgtgctcctggccctccttggcaccgcctgggcagaggtgtggccaccccagctgcaggagcaggctccgatggccggagccctgaacaggaaggagagtttcttgctcctctccctgcacaaccgcctgcgcagctgggtccagccccctgcggctgacatgcggaggctggactggagtgacagcctggcccaactggctcaagccagggcagccctctgtggaatcccaaccccgagcctggcgtccggcctgtggcgcaccctgcaagtgggctggaacatgcagctgctgcccgcgggcttggcgtcctttgttgaagtggtcagcctatggtttgcagaggggcagcggtacagccacgcggcaggagagtgtgctcgcaacgccacctgcacccactacacgcagctcgtgtgggccacctcaagccagctgggctgtgggcggcacctgtgctctgcaggccaggcagcgatagaagcctttgtctgtgcctactcccccagaggcaactgggaggtcaacgggaagacaatcgtcccctataagaagggtgcctggtgttcgctctgcacagccagtgtctcaggctgcttcaaagcctgggaccatgcaggggggctctgtgaggtccccaggaatccttgtcgcatgagctgccagaaccatggacgtctcaacatcagcacctgccactgccactgtccccctggctacacgggcagatactgccaagtgaggtgcagcctgcagtgtgtgcacggccggttccgggaggaggagtgctcgtgcgtctgtgacatcggctacgggggagcccagtgtgccaccaaggtgcattttcccttccacacctgtgacctgaggatcgacggagactgcttcatggtgtcttcagaggcagacacctattacagagccaggatgaaatgtcagaggaaaggcggggtgctggcccagatcaagagccagaaagtgcaggacatcctcgccttctatctgggccgcctggagaccaccaacgaggtgattgacagtgacttcgagaccaggaacttctggatcgggctcacctacaagaccgccaaggactccttccgctgggccacaggggagcaccaggccttcaccagttttgcctttgggcagcctgacaaccacgggt

SEQ ID NO: 344747 - DNA, 404 bp, Homo sapiens
ttttcttttgacaaagtgaaatttcaggattaggacaggcaggagcaagagaggctgaaggtgcatctcccccctgggacttcccaaggcccgtcctgcccagtgtcctgtcctcccaggaggagagtggcttcaaatttcaaggttaccatttccagttctcccaggagactctaacctccagcctaggagccacaggtgggggtccagacaggtgccccagctcagggagcgcttttccaggatggaccttggggcctcagaatcactgctgggcggggtgggggtgacaggggcagggttgtgagggctcacagccccatggccatggactgcttccaaacgacaggtgccttctgttgggctcgtagagtgttttatgtttttttgaaagtacgaagttt

SEQ ID NO: 344748 - DNA, 845 bp, Homo sapiens
aagaactggggaataaggattcagagtcctcatttatttcagtttgacatgttcacttgtgcgttattcattgagccatttattcagtggacttatattgaggagtcctgagcatgtgccagaccctgtgctatgcctggaggcaaagcagtaaacaaaagcagactggcccctgcgctcatggaatttagagttgacaagggtgacagatagaaggcaaacattcaggaagcctcaacatgtgtcaggtgctgccctagccctggagatagaacaggaacaaggcagctatgagctgtcctcctggagatggtgatctcatttcagaagggcacgtggcaggtgctgtgggagcaaatcattttacctctcggaacctcggtttccttttctgtaaaataaagatcctcaatagcttcccagcctacttttcagagttgtcatgagaaccaggaaagtgtgtaagaaacttagaagaaagtgttttgtataccctcttcaagatgtgaaaaacctatggacttaatattcttgtcctgcctcggatgttccttctttgcatgatgtcttcagattcaagagttggttttcctttagcttagaagagggaactgtattatcttagaactggaagtaaccctagcggtgattgggtgtaaggccattggagtaatgacctgaggcttagagaggttaggtgactcacccagatcgtgctcctgaagatggactagccagactttgcctgggacctccagtgttcttttcctcctgtgtaacatcctgcctgtttgggaccctgactgttttaactgttgtctcaggtgctctgcagatctgtatgt

SEQ ID NO: 344749 - DNA, 448 bp, Homo sapiens
gtaaccagccagaagtcacacagctagtaggtgatgtagcaaagatggagcccagatggctcagctccagggtccccactcataaccattacttggtgaacacaggaggggatttatcacccaacgtgtccagggctagctgatatcaggcagagtgtaaatgtgagagagctcagacagacacagacacatcctttctggctgatagaggtatggaagtgacgggcacttgagttgggcccctaagggtgaaaagggctcagaggagtttgtcatatgagggcagaaaagtaagaaagcaggcgtggtcaggagagggatcttcgaggggagctgagatcagtacccagagactcctcatccaggccccgcaacttcccagtgaggaaacattgagaggggccaaggatctgcctccacctaaggccaagccaggagtagaagccca

SEQ ID NO: 344750 - DNA, 242 bp, Homo sapiens
aggatattgttgatcacctgctctgggtcgtagtggtagtactccaggcaggccaggatgaagcccccaccctcagccagctggaccgcaacctagagaaatgaaaccagaccctacacccctgctgacgtctcgccacaacgtcttccagaatgacgagtttgatgtgttcagcagggactcagtagacctgagccgggtgcacaagggcaagaggtgagtgcagtgggccatggggttcc

SEQ ID NO: 344751 - DNA, 3017 bp, Homo sapiens
ggggccaggccgagacttcctgtctgctcctgcggaatcgcagtttgaccccggaagtgcgggcgctcagggagctgtcaccgtggtcggcggcggcggcggcggcggcggcacagagccggtggtggagccgccgaggccacctcgtgtatgcagagaccatgtgtgtctgatctgctgggatcctagagctggaacaggagggtcacgcagcacaatgccagctctgcccctggaccaactccagatcacccacaaggacccgaagacaggaaagctgaggacttcaccagcgctgatttgtacctgtaactccatgatacaaatttgatttaaatgggagggggtcctgcagacccacatgagaggtggccttgaagaatccttgtggtacccacaggctctacagtttggaaactcgccaccccgagcagaaggcagaccggtattttgtgttatacaaaccgccccctaaagacaacattcccgccctagtggaggagtacctggaacgcgccaccttcgtagccaatgacctcgactggctcctggccttgcctcacgataaattctggtgccaggtgatctttgacgagactctacagaagtgcctggactcctacctgcgctatgtcccccgcaaattcgacgagggggtggcctcagcccctgaggttgttgacatgcagaagcgcctccatcgaagtgtttttctcaccttcctccgcatgtccactcacaaggaatccaaagatcacttcatttccccttctgcgtttggagaaatcctctacaataacttcctctttgacattccaaagatcctggacctctgcgtgctctttggaaaaggcaactcaccactgctccagaagatgataggaaacatctttacacagcagccaagttactacagtgacctggatgaaaccctgcctaccatccttcaggtcttcagcaatatcctccagcactgtggtttgcaaggggacggggccaataccacaccccagaagcttgaggagaggggccgattgacccccagtgacatgcctctcctggaattaaaggacattgttctctacctttgtgatacctgcaccacactttgggcctttctggatatcttccctttggcttgccagaccttccagaagcacgacttttgttacagactagcttccttctacgaagcagcaattcccgaaatggagtctgcaattaagaagaggaggcttgaagatagcaagcttcttggtgacctgtggcagaggctctcccattccaggaagaagctaatggagattttccacatcatcctgaaccagatctgcctccttcccatcctagaaagcagctgtgacaacattcagggcttcatcgaagagttccttcagatcttcagctccttgctgcaggagaagaggttcctccgggactatgatgcactcttccccgtggccgaagacatcagcttgctgcagcaggcctcatcagtcttggacgagacgcggactgcctacatcctccaggcagtcgagagtgcatgggaaggggtggacagacggaaagccacagatgctaaagacccatcggtgattgaggagcctaatggggagcctaacggggtcacggtgacagcagaggcagtcagtcaagcatcatcacatccggagaactcggaggaagaggagtgcatgggagcagccgcggctgtgggccctgccatgtgtggggtggaactggactctctcatctcccaagtgaaggacctgctgccagaccttggtgagggcttcatcctggcctgcctggagtactaccactacgacccagagcaggtgatcaacaatatcctggaggagcggctggcccccaccctcagccagctggaccgcaacctagacagagaaatgaaaccagaccctacacccctgctgacgtctcgccacaacgtcttccagaatgacgagtttgatgtgttcagcagggactcagtagacctgagccgggtgcacaagggcaagagcaccaggaaggaggaaaacacgcggagtttgctgaacgacaagcgtgcagtggcggcacagcggcagcgctacgagcagtacagcgtggtggtggaggaggtgccactgcagccaggcgagagcctgccctaccacagtgtctactacgaggatgagtacgatgacacatacgatggcaaccaggtgggcgccaatgatgcagactctgatgacgagctcatcagccgcaggccattcaccatccctcaggtgctgagaaccaaagtgcctagagaagggcaggaggaggatgacgacgatgaggaagacgatgctgacgaggaggctcccaagcccgaccattttgttcaggaccctgcagtgctgagagagaaggcagaagccaggcgcatggcctttctcgccaagaaagggtaccggcatgacagctcaacagcagtggccggcagcccccgaggccatgggcagagccgcgagacaacccaggaacgcaggaagaaggaagccaacaaggcgacaagagccaaccacaaccggagaaccatggccgaccgcaagaggagcaaaggcatgatcccatcctgagacctggtgcagggccagtggggaggcagcggcaccagactcaccaggccgcgctcccatcgcctggggcctcctcactaggggccccaagttcaactcaacccctcaacagcctcagctttgcagcccctgagaaggccgcctctcatctaccagccagccatgagcgccttcctgcagaacacacagtgccttatgccacagccgaagaatccgtggggccggcaagcaggcaccttcccccagctgcgctagcgggaaagagatggggatggagtcccaaggcaagcgccccaaacctcgggccacaagacaccacttcccctttaccctggacagcaggaaacctgtatattcaaaaacacaaaaagtcctgctaataaaatttttgaccctttcaaa

SEQ ID NO: 344752 - DNA, 2672 bp, Homo sapiens
ggggccaggccgagacttcctgtctgctcctgcggaatcgcagtttgaccccggaagtgcgggcgctcagggagctgtcaccgtggtcggcggcggcggcggcggcggcggcacagagccggtggtggagccgccgaggagggtcacgcagcacaatgccagctctgcccctggaccaactccagatcacccacaaggacccgaagacaggaaagctgaggacttcaccagcgctggtgatctttgacgagactctacagaagtgcctggactcctacctgcgctatgtcccccgcaaattcgacgagggggtggcctcagcccctgaggttgttgacatgcagaagcgcctccatcgaagtgtttttctcaccttcctccgcatgtccactcacaaggaatccaaagatcacttcatttccccttctgcgtttggagaaatcctctacaataacttcctctttgacattccaaagatcctggacctctgcgtgctctttggaaaaggcaactcaccactgctccagaagatgataggaaacatctttacacagcagccaagttactacagtgacctggatgaaaccctgcctaccatccttcaggtcttcagcaatatcctccagcactgtggtttgcaaggggacggggccaataccacaccccagaagcttgaggagaggggccgattgacccccagtgacatgcctctcctggaattaaaggacattgttctctacctttgtgatacctgcaccacactttgggcctttctggatatcttccctttggcttgccagaccttccagaagcacgacttttgttacagactagcttccttctacgaagcagcaattcccgaaatggagtctgcaattaagaagaggaggcttgaagatagcaagcttcttggtgacctgtggcagaggctctcccattccaggaagaagctaatggagattttccacatcatcctgaaccagatctgcctccttcccatcctagaaagcagctgtgacaacattcagggcttcatcgaagagttccttcagatcttcagctccttgctgcaggagaagaggttcctccgggactatgatgcactcttccccgtggccgaagacatcagcttgctgcagcaggcctcatcagtcttggacgagacgcggactgcctacatcctccaggcagtcgagagtgcatgggaaggggtggacagacggaaagccacagatgctaaagacccatcggtgattgaggagcctaatggggagcctaacggggtcacggtgacagcagaggcagtcagtcaagcatcatcacatccggagaactcggaggaagaggagtgcatgggagcagccgcggctgtgggccctgccatgtgtggggtggaactggactctctcatctcccaagtgaaggacctgctgccagaccttggtgagggcttcatcctggcctgcctggagtactaccactacgacccagagcaggtgatcaacaatatcctggaggagcggctggcccccaccctcagccagctggaccgcaacctagacagagaaatgaaaccagaccctacacccctgctgacgtctcgccacaacgtcttccagaatgacgagtttgatgtgttcagcagggactcagtagacctgagccgggtgcacaagggcaagagcaccaggaaggaggaaaacacgcggagtttgctgaacgacaagcgtgcagtggcggcacagcggcagcgctacgagcagtacagcgtggtggtggaggaggtgccactgcagccaggcgagagcctgccctaccacagtgtctactacgaggatgagtacgatgacacatacgatggcaaccaggtgggcgccaatgatgcagactctgatgacgagctcatcagccgcaggccattcaccatccctcaggtgctgagaaccaaagtgcctagagaagggcaggaggaggatgacgacgatgaggaagacgatgctgacgaggaggctcccaagcccgaccattttgttcaggaccctgcagtgctgagagagaaggcagaagccaggcgcatggcctttctcgccaagaaagggtaccggcatgacagctcaacagcagtggccggcagcccccgaggccatgggcagagccgcgagacaacccaggaacgcaggaagaaggaagccaacaaggcgacaagagccaaccacaaccggagaaccatggccgaccgcaagaggagcaaaggcatgatcccatcctgagacctggtgcagggccagtggggaggcagcggcaccagactcaccaggccgcgctcccatcgcctggggcctcctcactaggggccccaagttcaactcaacccctcaacagcctcagctttgcagcccctgagaaggccgcctctcatctaccagccagccatgagcgccttcctgcagaacacacagtgccttatgccacagccgaagaatccgtggggccggcaagcaggcaccttcccccagctgcgctagcgggaaagagatggggatggagtcccaaggcaagcgccccaaacctcgggccacaagacaccacttcccctttaccctggacagcaggaaacctgtatattcaaaaacacaaaaagtcctgctaataaaatttttgaccctttcaaa

SEQ ID NO: 344753 - DNA, 2537 bp, Homo sapiens
aatagggcagggctgatgggcattgagtccctgcacagtccacccacaagcccctggggcctaagggataaatcctcgctctcctctgtctcctggtttaggtgatctttgacgagactctacagaagtgcctggactcctacctgcgctatgtcccccgcaaattcgacgagggggtggcctcagcccctgaggttgttgacatgcagaagcgcctccatcgaagtgtttttctcaccttcctccgcatgtccactcacaaggaatccaaagatcacttcatttccccttctgcgtttggagaaatcctctacaataacttcctctttgacattccaaagatcctggacctctgcgtgctctttggaaaaggcaactcaccactgctccagaagatgataggaaacatctttacacagcagccaagttactacagtgacctggatgaaaccctgcctaccatccttcaggtcttcagcaatatcctccagcactgtggtttgcaaggggacggggccaataccacaccccagaagcttgaggagaggggccgattgacccccagtgacatgcctctcctggaattaaaggacattgttctctacctttgtgatacctgcaccacactttgggcctttctggatatcttccctttggcttgccagaccttccagaagcacgacttttgttacagactagcttccttctacgaagcagcaattcccgaaatggagtctgcaattaagaagaggaggcttgaagatagcaagcttcttggtgacctgtggcagaggctctcccattccaggaagaagctaatggagattttccacatcatcctgaaccagatctgcctccttcccatcctagaaagcagctgtgacaacattcagggcttcatcgaagagttccttcagatcttcagctccttgctgcaggagaagaggttcctccgggactatgatgcactcttccccgtggccgaagacatcagcttgctgcagcaggcctcatcagtcttggacgagacgcggactgcctacatcctccaggcagtcgagagtgcatgggaaggggtggacagacggaaagccacagatgctaaagacccatcggtgattgaggagcctaatggggagcctaacggggtcacggtgacagcagaggcagtcagtcaagcatcatcacatccggagaactcggaggaagaggagtgcatgggagcagccgcggctgtgggccctgccatgtgtggggtggaactggactctctcatctcccaagtgaaggacctgctgccagaccttggtgagggcttcatcctggcctgcctggagtactaccactacgacccagagcaggtgatcaacaatatcctggaggagcggctggcccccaccctcagccagctggaccgcaacctagacagagaaatgaaaccagaccctacacccctgctgacgtctcgccacaacgtcttccagaatgacgagtttgatgtgttcagcagggactcagtagacctgagccgggtgcacaagggcaagagcaccaggaaggaggaaaacacgcggagtttgctgaacgacaagcgtgcagtggcggcacagcggcagcgctacgagcagtacagcgtggtggtggaggaggtgccactgcagccaggcgagagcctgccctaccacagtgtctactacgaggatgagtacgatgacacatacgatggcaaccaggtgggcgccaatgatgcagactctgatgacgagctcatcagccgcaggccattcaccatccctcaggtgctgagaaccaaagtgcctagagaagggcaggaggaggatgacgacgatgaggaagacgatgctgacgaggaggctcccaagcccgaccattttgttcaggaccctgcagtgctgagagagaaggcagaagccaggcgcatggcctttctcgccaagaaagggtaccggcatgacagctcaacagcagtggccggcagcccccgaggccatgggcagagccgcgagacaacccaggaacgcaggaagaaggaagccaacaaggcgacaagagccaaccacaaccggagaaccatggccgaccgcaagaggagcaaaggcatgatcccatcctgagacctggtgcagggccagtggggaggcagcggcaccagactcaccaggccgcgctcccatcgcctggggcctcctcactaggggccccaagttcaactcaacccctcaacagcctcagctttgcagcccctgagaaggccgcctctcatctaccagccagccatgagcgccttcctgcagaacacacagtgccttatgccacagccgaagaatccgtggggccggcaagcaggcaccttcccccagctgcgctagcgggaaagagatggggatggagtcccaaggcaagcgccccaaacctcgggccacaagacaccacttcccctttaccctggacagcaggaaacctgtatattcaaaaacacaaaaagtcctgctaataaaatttttgaccctttcaaa

SEQ ID NO: 344754 - DNA, 2189 bp, Homo sapiens
acagggtcctgctctgtcaccgaggctagagtgcagtggcacaatcatagctcactgcagccttgaactcctgggctcagttgatcctcccacctcagcctctcaagtagctgggattacaggtcttcagcaatatcctccagcactgtggtttgcaaggggacggggccaataccacaccccagaagcttgaggagaggggccgattgacccccagtgacatgcctctcctggaattaaaggacattgttctctacctttgtgatacctgcaccacactttgggcctttctggatatcttccctttggcttgccagaccttccagaagcacgacttttgttacagactagcttccttctacgaagcagcaattcccgaaatggagtctgcaattaagaagaggaggcttgaagatagcaagcttcttggtgacctgtggcagaggctctcccattccaggaagaagctaatggagattttccacatcatcctgaaccagatctgcctccttcccatcctagaaagcagctgtgacaacattcagggcttcatcgaagagttccttcagatcttcagctccttgctgcaggagaagaggttcctccgggactatgatgcactcttccccgtggccgaagacatcagcttgctgcagcaggcctcatcagtcttggacgagacgcggactgcctacatcctccaggcagtcgagagtgcatgggaaggggtggacagacggaaagccacagatgctaaagacccatcggtgattgaggagcctaatggggagcctaacggggtcacggtgacagcagaggcagtcagtcaagcatcatcacatccggagaactcggaggaagaggagtgcatgggagcagccgcggctgtgggccctgccatgtgtggggtggaactggactctctcatctcccaagtgaaggacctgctgccagaccttggtgagggcttcatcctggcctgcctggagtactaccactacgacccagagcaggtgatcaacaatatcctggaggagcggctggcccccaccctcagccagctggaccgcaacctagacagagaaatgaaaccagaccctacacccctgctgacgtctcgccacaacgtcttccagaatgacgagtttgatgtgttcagcagggactcagtagacctgagccgggtgcacaagggcaagagcaccaggaaggaggaaaacacgcggagtttgctgaacgacaagcgtgcagtggcggcacagcggcagcgctacgagcagtacagcgtggtggtggaggaggtgccactgcagccaggcgagagcctgccctaccacagtgtctactacgaggatgagtacgatgacacatacgatggcaaccaggtgggcgccaatgatgcagactctgatgacgagctcatcagccgcaggccattcaccatccctcaggtgctgagaaccaaagtgcctagagaagggcaggaggaggatgacgacgatgaggaagacgatgctgacgaggaggctcccaagcccgaccattttgttcaggaccctgcagtgctgagagagaaggcagaagccaggcgcatggcctttctcgccaagaaagggtaccggcatgacagctcaacagcagtggccggcagcccccgaggccatgggcagagccgcgagacaacccaggaacgcaggaagaaggaagccaacaaggcgacaagagccaaccacaaccggagaaccatggccgaccgcaagaggagcaaaggcatgatcccatcctgagacctggtgcagggccagtggggaggcagcggcaccagactcaccaggccgcgctcccatcgcctggggcctcctcactaggggccccaagttcaactcaacccctcaacagcctcagctttgcagcccctgagaaggccgcctctcatctaccagccagccatgagcgccttcctgcagaacacacagtgccttatgccacagccgaagaatccgtggggccggcaagcaggcaccttcccccagctgcgctagcgggaaagagatggggatggagtcccaaggcaagcgccccaaacctcgggccacaagacaccacttcccctttaccctggacagcaggaaacctgtatattcaaaaacacaaaaagtcctgctaataaaatttttgaccctttcaaa

SEQ ID NO: 344755 - DNA, 2888 bp, Homo sapiens
ggggccaggccgagacttcctgtctgctcctgcggaatcgcagtttgaccccggaagtgcgggcgctcagggagctgtcaccgtggtcggcggcggcggcggcggcggcggcacagagccggtggtggagccgccgaggccacctcgtgtatgcagagaccatgtgtgtctgatctgctgggatcctagagctggaacaggagggtcacgcagcacaatgccagctctgcccctggaccaactccagatcacccacaaggacccgaagacaggaaagctgaggacttcaccagcgctgatttgtacctgtaactccatgatacaaatttgatttaaatgggagggggtcctgcagacccacatgagaggtggccttgaagaatccttgtggtacccacaggctctacagtttggaaactcgccaccccgagcagaaggcagaccggtattttgtgttatacaaaccgccccctaaagacaacattcccgccctagtggaggagtacctggaacgcgccaccttcgtagccaatgacctcgactggctcctggccttgcctcacgataaattctggtgccaggtgatctttgacgagactctacagaagtgcctggactcctacctgcgctatgtcccccgcaaattcgacgagggggtggcctcagcccctgaggttgttgacatgcagaagcgcctccatcgaagtgtttttctcaccttcctccgcatgtccactcacaaggaatccaaagatcacttcatttccccttctgcgtttggagaaatcctctacaataacttcctctttgacattccaaagatcctggacctctgcgtgctctttggaaaaggcaactcaccactgctccagaagatgataggaaacatctttacacagcagccaagttactacagtgacctggatgaaaccctgcctaccatccttcaggtcttcagcaatatcctccagcactgtggtttgcaaggggacggggccaataccacaccccagaagcttgaggagaggggccgattgacccccagtgacatgcctctcctggaattaaaggacattgttctctacctttgtgatacctgcaccacactttgggcctttctggatatcttccctttggcttgccagaccttccagaagcacgacttttgttacagactagcttccttctacgaagcagcaattcccgaaatggagtctgcaattaagaagaggaggcttgaagatagcaagcttcttggtgacctgtggcagaggctctcccattccaggaagaagctaatggagattttccacatcatcctgaaccagatctgcctccttcccatcctagaaagcagctgtgacaacattcagggcttcatcgaagagttccttcagatcttcagctccttgctgcaggagaagaggttcctccgggactatgatgcactcttccccgtggccgaagacatcagcttgctgcagcaggcctcatcagtcttggacgagacgcggactgcctacatcctccaggcagtcgagagtgcatgggaaggggtggacagacggaaagccacagatgctaaagacccatcggtgattgaggagcctaatggggagcctaacggggtcacggtgacagcagaggcagtcagtcaagcatcatcacatccggagaactcggaggaagaggagtgcatgggagcagccgcggctgtgggccctgccatgtgtggggtggaactggactctctcatctcccaagtgaaggacctgctgccagaaatgaaaccagaccctacacccctgctgacgtctcgccacaacgtcttccagaatgacgagtttgatgtgttcagcagggactcagtagacctgagccgggtgcacaagggcaagagcaccaggaaggaggaaaacacgcggagtttgctgaacgacaagcgtgcagtggcggcacagcggcagcgctacgagcagtacagcgtggtggtggaggaggtgccactgcagccaggcgagagcctgccctaccacagtgtctactacgaggatgagtacgatgacacatacgatggcaaccaggtgggcgccaatgatgcagactctgatgacgagctcatcagccgcaggccattcaccatccctcaggtgctgagaaccaaagtgcctagagaagggcaggaggaggatgacgacgatgaggaagacgatgctgacgaggaggctcccaagcccgaccattttgttcaggaccctgcagtgctgagagagaaggcagaagccaggcgcatggcctttctcgccaagaaagggtaccggcatgacagctcaacagcagtggccggcagcccccgaggccatgggcagagccgcgagacaacccaggaacgcaggaagaaggaagccaacaaggcgacaagagccaaccacaaccggagaaccatggccgaccgcaagaggagcaaaggcatgatcccatcctgagacctggtgcagggccagtggggaggcagcggcaccagactcaccaggccgcgctcccatcgcctggggcctcctcactaggggccccaagttcaactcaacccctcaacagcctcagctttgcagcccctgagaaggccgcctctcatctaccagccagccatgagcgccttcctgcagaacacacagtgccttatgccacagccgaagaatccgtggggccggcaagcaggcaccttcccccagctgcgctagcgggaaagagatggggatggagtcccaaggcaagcgccccaaacctcgggccacaagacaccacttcccctttaccctggacagcaggaaacctgtatattcaaaaacacaaaaagtcctgctaataaaatttttgaccctttcaaa

SEQ ID NO: 344756 - DNA, 3277 bp, Homo sapiens
ggggccaggccgagacttcctgtctgctcctgcggaatcgcagtttgaccccggaagtgcgggcgctcagggagctgtcaccgtggtcggcggcggcggcggcggcggcggcacagagccggtggtggagccgccgaggagggtcacgcagcacaatgccagctctgcccctggaccaactccagatcacccacaaggacccgaagacaggaaagctgaggacttcaccagcgctgcaccccgagcagaaggcagaccggtattttgtgttatacaaaccgccccctaaagacaacattcccgccctagtggaggagtacctggaacgcgccaccttcgtagccaatgacctcgactggctcctggccttgcctcacgataaattctggtgccaggtgatctttgacgagactctacagaagtgcctggactcctacctgcgctatgtcccccgcaaattcgacgagggggtggcctcagcccctgaggttgttgacatgcagaagcgcctccatcgaagtgtttttctcaccttcctccgcatgtccactcacaaggaatccaaagatcacttcatttccccttctgcgtttggagaaatcctctacaataacttcctctttgacattccaaagatcctggacctctgcgtgctctttggaaaaggcaactcaccactgctccagaagatgataggaaacatctttacacagcagccaagttactacagtgacctggatgaaaccctgcctaccatccttcaggtcttcagcaatatcctccagcactgtggtttgcaaggggacggggccaataccacaccccagaagcttgaggagaggggccgattgacccccagtgacatgcctctcctggaattaaaggacattgttctctacctttgtgatacctgcaccacactttgggcctttctggatatcttccctttggcttgccagaccttccagaagcacgacttttgttacagactagcttccttctacgaagcagcaattcccgaaatggagtctgcaattaagaagaggaggcttgaagatagcaagcttcttggtgacctgtggcagaggctctcccattccaggaagaagctaatggagattttccacatcatcctgaaccagatctgcctccttcccatcctagaaagcagctgtgacaacattcagggcttcatcgaagagttccttcagatcttcagctccttgctgcaggagaagaggttcctccgggactatgatgcactcttccccgtggccgaagacatcagcttgctgcagcaggcctcatcagtcttggacgagacgcggactgcctacatcctccaggcagtcgagagtgcatgggaaggggtggacagacggaaagccacagatgctaaagacccatcggtgattgaggagcctaatggggagcctaacggggtcacggtgacagcagaggcagtcagtcaagcatcatcacatccggagaactcggaggaagaggagtgcatgggagcagccgcggctgtgggccctgccatgtgtggggtggaactggactctctcatctcccaagtgaaggacctgctgccagaccttggtgagggcttcatcctggcctgcctggagtactaccactacgacccagagcaggtgatcaacaatatcctggaggagcggctggcccccaccctcagccagctggaccgcaacctagacagagaaatgaaaccagaccctacacccctgctgacgtctcgccacaacgtcttccagaatgacgagtttgatgtgttcagcagggactcagtagacctgagccgggtgcacaagggcaagagcaccaggaaggaggaaaacacgcggagtttgctgaacgacaagcgtgcagtggcggcacagcggcagcgctacgagcagtacagcgtggtggtggaggaggtgccactgcagccaggcgagagcctgccctaccacagtgtctactacgaggatgagtacgatgacacatacgatggcaaccaggtgggcgccaatgatgcagactctgatgacgagctcatcagccgcaggccattcaccatccctcaggtgctgagaaccaaagtgcctagagaagggcaggaggaggatgacgacgatgaggaagacgatgctgacgaggaggctcccaagcccgaccattttgttcaggaccctgcagtgctgagagagaaggcagaagccaggcgcatggcctttctcgccaagaaagggtaccggcatgacagctcaacagcagtggccggcagcccccgaggccatgggcagagccgcgagacaacccaggaacgcaggaagaaggaagccaacaaggcgacaagagccaaccacaaccggagaaccatggccgaccgcaagaggagcaaaggcatgatcccatcctgagacctggtgcagggccagtggggaggcagcggcaccagactcaccaggccgcgctcccatcgcctggggcctcctcactaggggccccaagttcaactcaacccctcaacagcctcagctttgcagcccctgagaaggccgcctctcatctaccagccagccatgagcgccttcctgcagaacacacagtgccttatgccacagccgaagaatccgtggggccggcaagcaggcaccttcccccagctgcgctagcgggaaagagatggggatggagtcccaaggcaagcgccccaaacctcgggccacaagacaccacttcccctttaccctggacagcaggaaacctgtatattcaaaaacacaaaaagtcctgctaataaaatttttgaccctttcaaaaaaaaacaagaagagtaaagaggaagagagaaacacaggaagcacaaacaagggggggggagaaaagaggatccccaggggggaggacacagggagagaggacaacacagaatgtgcgatcaaaaagggcgacaccacaagggcagacacgaaatgaaaggacaggccggcgcgagcgagtataaacaagagctcagagaggaaaaacagtgcaagtgtagcaaccttctgatgagaaggaccctctataattgtgggagggtaacacatagtgagcgaaaccactaccctcaacgaaaattttaagagccctagagggtagcaaatataacattatcagcggtgtatatctgtgttgaacacaaagggtggtatattatcttacttgtatcatacaatttgtggcaagtgacgatgataatacggatcagtagaacttttttccg

SEQ ID NO: 344757 - DNA, 1518 bp, Homo sapiens
agctcggtaccccaacgatggtcctcagctccctttggcttgccagaccttccagaagcacgacttttgttacaggcttcttggtgacctgtggcagaggctctcccattccaggaagaagctaatggggtcacggtgacagcagaggcagtcagtcaagcatcatcacatccggagaactcggaggaagaggagtgcatgggagcagccgcggctgtgggccctgccatgtgtggggtggaactggactctctcatctcccaagtgaaggacctgctgccagaccttggtgagggcttcatcctggcctgcctggagtactaccactacgacccagagcaggtgatcaacaatatcctggaggagcggctggcccccaccctcagccagctggaccgcaacctagacagagaaatgaaaccagaccctacacccctgctgacgtctcgccacaacgtcttccagaatgacgagtttgatgtgttcagcagggactcagtagacctgagccgggtgcacaagggcaagagcaccaggaaggaggaaaacacgcggagtttgctgaacgacaagcgtgcagtggcggcacagcggcagcgctacgagcagtacagcgtggtggtggaggaggtgccactgcagccaggcgagagcctgccctaccacagtgtctactacgaggatgagtacgatgacacatacgatggcaaccaggtgggcgccaatgatgcagactctgatgacgagctcatcagccgcaggccattcaccatccctcaggtgctgagaaccaaagtgcctagagaagggcaggaggaggatgacgacgatgaggaagacgatgctgacgaggaggctcccaagcccgaccattttgttcaggaccctgcagtgctgagagagaaggcagaagccaggcgcatggcctttctcgccaagaaagggtaccggcatgacagctcaacagcagtggccggcagcccccgaggccatgggcagagccgcgagacaacccaggaacgcaggaagaaggaagccaacaaggcgacaagagccaaccacaaccggagaaccatggccgaccgcaagaggagcaaaggcatgatcccatcctgagacctggtgcagggccagtggggaggcagcggcaccagactcaccaggccgcgctcccatcgcctggggcctcctcactaggggccccaagttcaactcaacccctcaacagcctcagctttgcagcccctgagaaggccgcctctcatctaccagccagccatgagcgccttcctgcagaacacacagtgccttatgccacagccgaagaatccgtggggccggcaagcaggcaccttcccccagctgcgctagcgggaaagagatggggatggagtcccaaggcaagcgccccaaacctcgggccacaagacaccacttcccctttaccctggacagcaggaaacctgtatattcaaaaacacaaaaagtcctgctaataaaatttttgaccctttcaaa

SEQ ID NO: 344758 - DNA, 3363 bp, Homo sapiens
ggggccaggccgagacttcctgtctgctcctgcggaatcgcagtttgaccccggaagtgcgggcgctcagggagctgtcaccgtggtcggcggcggcggcggcggcggcggcacagagccggtggtggagccgccgaggagggtcacgcagcacaatgccagctctgcccctggaccaactccagatcacccacaaggacccgaagacaggaaagctgaggacttcaccagcgctgcaccccgagcagaaggcagaccggtattttgtgttatacaaaccgccccctaaagacaacattcccgccctagtggaggagtacctggaacgcgccaccttcgtagccaatgacctcgactggctcctggccttgcctcacgataaattctggtgccaggtgatctttgacgagactctacagaagtgcctggactcctacctgcgctatgtcccccgcaaattcgacgagggggtggcctcagcccctgaggttgttgacatgcagaagcgcctccatcgaagtgtttttctcaccttcctccgcatgtccactcacaaggaatccaaagatcacttcatttccccttctgcgtttggagaaatcctctacaataacttcctctttgacattccaaagatcctggacctctgcgtgctctttggaaaaggcaactcaccactgctccagaagatgataggaaacatctttacacagcagccaagttactacagtgacctggatgaaaccctgcctaccatccttcaggtcttcagcaatatcctccagcactgtggtttgcaaggggacggggccaataccacaccccagaagcttgaggagaggggccgattgacccccagtgacatgcctctcctggaattaaaggacattgttctctacctttgtgatacctgcaccacactttgggcctttctggatatcttccctttggcttgccagaccttccagaagcacgacttttgttacagactagcttccttctacgaagcagcaattcccgaaatggagtctgcaattaagaagaggaggcttgaagatagcaagcttcttggtgacctgtggcagaggctctcccattccaggaagaagctaatggagattttccacatcatcctgaaccagatctgcctccttcccatcctagaaagcagctgtgacaacattcagggcttcatcgaagagttccttcagatcttcagctccttgctgcaggagaagaggttcctccgggactatgatgcactcttccccgtggccgaagacatcagcttgctgcagcaggcctcatcagtcttggacgagacgcggactgcctacatcctccaggcagtcgagagtgcatgggaaggggtggacagacggaaagccacagatgctaaagacccatcggtgattgaggagcctaatggggagcctaacggggtcacggtgacagcagaggcagtcagtcaagcatcatcacatccggagaactcggaggaagaggagtgcatgggagcagccgcggctgtgggccctgccatgtgtggggtggaactggactctctcatctcccaagtgaaggacctgctgccagaccttggtgagggcttcatcctggcctgcctggagtactaccactacgacccagagcaggtgatcaacaatatcctggaggagcggctggcccccaccctcagccagctggaccgcaacctagacagagaaatgaaaccagaccctacacccctgctgacgtctcgccacaacgtcttccagaatgacgagtttgatgtgttcagcagggactcagtagacctgagccgggtgcacaagggcaagagcaccaggaaggaggaaaacacgcggagtttgctgaacgacaagcgtgcagtggcggcacagcggcagcgctacgagcagtacagcgtggtggtggaggaggtaggccaccaaggccaggtctctgctgggccagggaaaccaggccagcccctgagccccccagacccatgcttatgccattgcaggtgccactgcagccaggcgagagcctgccctaccacagtgtctactacgaggatgagtacgatgacacatacgatggcaaccaggtgggcgccaatgatgcagactctgatgacgagctcatcagccgcaggccattcaccatccctcaggtgctgagaaccaaagtgcctagagaagggcaggaggaggatgacgacgatgaggaagacgatgctgacgaggaggctcccaagcccgaccattttgttcaggaccctgcagtgctgagagagaaggcagaagccaggcgcatggcctttctcgccaagaaagggtaccggcatgacagctcaacagcagtggccggcagcccccgaggccatgggcagagccgcgagacaacccaggaacgcaggaagaaggaagccaacaaggcgacaagagccaaccacaaccggagaaccatggccgaccgcaagaggagcaaaggcatgatcccatcctgagacctggtgcagggccagtggggaggcagcggcaccagactcaccaggccgcgctcccatcgcctggggcctcctcactaggggccccaagttcaactcaacccctcaacagcctcagctttgcagcccctgagaaggccgcctctcatctaccagccagccatgagcgccttcctgcagaacacacagtgccttatgccacagccgaagaatccgtggggccggcaagcaggcaccttcccccagctgcgctagcgggaaagagatggggatggagtcccaaggcaagcgccccaaacctcgggccacaagacaccacttcccctttaccctggacagcaggaaacctgtatattcaaaaacacaaaaagtcctgctaataaaatttttgaccctttcaaaaaaaaacaagaagagtaaagaggaagagagaaacacaggaagcacaaacaagggggggggagaaaagaggatccccaggggggaggacacagggagagaggacaacacagaatgtgcgatcaaaaagggcgacaccacaagggcagacacgaaatgaaaggacaggccggcgcgagcgagtataaacaagagctcagagaggaaaaacagtgcaagtgtagcaaccttctgatgagaaggaccctctataattgtgggagggtaacacatagtgagcgaaaccactaccctcaacgaaaattttaagagccctagagggtagcaaatataacattatcagcggtgtatatctgtgttgaacacaaagggtggtatattatcttacttgtatcatacaatttgtggcaagtgacgatgataatacggatcagtagaacttttttccg

SEQ ID NO: 344759 - DNA, 2742 bp, Homo sapiens
ggggccaggccgagacttcctgtctgctcctgcggaatcgcagtttgaccccggaagtgcgggcgctcagggagctgtcaccgtggtcggcggcggcggcggcggcggcggcacagagccggtggtggagccgccgaggagggtcacgcagcacaatgccagctctgcccctggaccaactccagatcacccacaaggacccgaagacaggaaagctgaggacttcaccagcgctgcaccccgagcagaaggcagaccggtattttgtgttatacaaaccgccccctaaagacaacattcccgccctagtggaggagtacctggaacgcgccaccttcgtagccaatgacctcgactggctcctggccttgcctcacgataaattctggtgccaggtgatctttgacgagactctacagaagtgcctggactcctacctgcgctatgtcccccgcaaattcgacgagggggtggcctcagcccctgaggttgttgacatgcagaagcgcctccatcgaagtgtttttctcaccttcctccgcatgtccactcacaaggaatccaaagatcacttcatttccccttctgcgtttggagaaatcctctacaataacttcctctttgacattccaaagatcctggacctctgcgtgctctttggaaaaggcaactcaccactgctccagaagatgataggaaacatctttacacagcagccaagttactacagtgacctggatgaaaccctgcctaccatccttcaggtcttcagcaatatcctccagcactgtggtttgcaaggggacggggccaataccacaccccagaagcttgaggagaggggccgattgacccccagtgacatgcctctcctggaattaaaggacattgttctctacctttgtgatacctgcaccacactttgggcctttctggatatcttccctttggcttgccagaccttccagaagcacgacttttgttacagactagcttccttctacgaagcagcaattcccgaaatggagtctgcaattaagaagaggaggcttgaagatagcaagcttcttggtgacctgtggcagaggctctcccattccaggaagaagctaatggagattttccacatcatcctgaaccagatctgcctccttcccatcctagaaagcagctgtgacaacattcagggcttcatcgaagagttccttcagatcttcagctccttgctgcaggagaagaggttcctccgggactatgatgcactcttccccgtggccgaagacatcagcttgctgcagcaggcctcatcagtcttggacgagacgcggactgcctacatcctccaggcagtcgagagtgcatgggaaggggtggacagacggaaagccacagatgctaaagacccatcggtgattgaggagcctaatggggagcctaacggggtcacggtgacagcagaggcagtcagtcaagcatcatcacatccggagaactcggaggaagaggagtgcatgggagcagccgcggctgtgggccctgccatgtgtggggtggaactggactctctcatctcccaagtgaaggacctgctgccagaccttggtgagggcttcatcctggcctgcctggagtactaccactacgacccagagcaggtgatcaacaatatcctggaggagcggctggcccccaccctcagccagctggaccgcaacctagacagagaaatgaaaccagaccctacacccctgctgacgtctcgccacaacgtcttccagaatgacgagtttgatgtgttcagcagggactcagtagacctgagccgggtgcacaagggcaagagcaccaggaaggaggaaaacacgcggagtttgctgaacgacaagcgtgcagtggcggcacagcggcagcgctacgagcagtacagcgtggtggtggaggaggtgccactgcagccaggcgagagcctgccctaccacagtgtctactacgaggatgagtacgatgacacatacgatggcaaccaggtgggcgccaatgatgcagactctgatgacgagctcatcagccgcaggccattcaccatccctcaggtgctgagaaccaaagtgcctagagaagggcaggaggaggatgacgacgatgaggaagacgatgctgacgaggaggctcccaagcccgaccattttgttcaggaccctgcagtgctgagagagaaggcagagccgcgagacaacccaggaacgcaggaagaaggaagccaacaaggcgacaagagccaaccacaaccggagaaccatggccgaccgcaagaggagcaaaggcatgatcccatcctgagacctggtgcagggccagtggggaggcagcggcaccagactcaccaggccgcgctcccatcgcctggggcctcctcactaggggccccaagttcaactcaacccctcaacagcctcagctttgcagcccctgagaaggccgcctctcatctaccagccagccatgagcgccttcctgcagaacacacagtgccttatgccacagccgaagaatccgtggggccggcaagcaggcaccttcccccagctgcgctagcgggaaagagatggggatggagtcccaaggcaagcgccccaaacctcgggccacaagacaccacttcccctttaccctggacagcaggaaacctgtatattcaaaaacacaaaaagtcctgctaataaaatttttgaccctttcaaa

SEQ ID NO: 344760 - DNA, 1195 bp, Homo sapiens
  misc_feature (15)..(15): n is a, c, g, or t
acatccggagactcnggaggaagaggagtgcggactggactctctcatctcctgtgcctgcctggagtactaccactacgacccagaagaaatgaaaccagaccctacacccctgctgacgtctcgccacaacgtcttccagaatgacgagtttgatgtgttcagcagggactcagtagacctgagccgggtgcacaagggcaagagcaccaggaaggaggaaaacacgcggagtttgctgaacgacaagcgtgcagtggcggcacagcggcagcgctacgagcagtacagcgtggtggtggaggaggtgccactgcagccaggcgagagcctgccctaccacagtgtctactacgaggatgagtacgatgacacatacgatggcaaccaggtgggcgccaatgatgcagactctgatgacgagctcatcagccgcaggccattcaccatccctcaggtgctgagaaccaaagtgcctagagaagggcaggaggaggatgacgacgatgaggaagacgatgctgacgaggaggctcccaagcccgaccattttgttcaggaccctgcagtgctgagagagaaggcagaagccaggcgcatggcctttctcgccaagaaagggtaccggcatgacagctcaacagcagtggccggcagcccccgaggccatgggcagagccgcgagacaacccaggaacgcaggaagaaggaagccaacaaggcgacaagagccaaccacaaccggagaaccatggccgaccgcaagaggagcaaaggcatgatcccatcctgagacctggtgcagggccagtggggaggcagcggcaccagactcaccaggccgcgctcccatcgcctggggcctcctcactaggggccccaagttcaactcaacccctcaacagcctcagctttgcagcccctgagaaggccgcctctcatctaccagccagccatgagcgccttcctgcagaacacacagtgccttatgccacagccgaagaatccgtggggccggcaagcaggcaccttcccccagctgcgctagcgggaaagagatggggatggagtcccaaggcaagcgccccaaacctcgggccacaagacaccacttcccctttaccctggacagcaggaaacctgtatattcaaaaacacaaaaagtcctgctaataaaatttttgaccctttcaaa

SEQ ID NO: 344761 - DNA, 1618 bp, Homo sapiens
ggggccaggccgagacttcctgtctgctcctgcggaatcgcagtttgaccccggaagtgcgggcgctcagggagctgtcaccgtggtcggcggcggcggcggcggcggcggcacagagccggtggtggagccgccgaggccacctcgtgtatgcagagaccatgtgtgtctgatctgctgggatcctagagctggaacaggagggtcacgcagcacaatgccagctctgcccctggaccaactccagatcacccacaaggacccgaagacaggaaagctgaggacttcaccagcgctgatttgtacctgtaactccatgatacaaatttgatttaaatgggagggggtcctgcagacccacatgagaggtggccttgaagaatccttgtggtacccacaggctctacagtttggaaactcgccaccccgagcagaaggcagaccggtattttgtgttatacaaaccgccccctaaagacaacattcccgccctagtggaggagtacctggaacgcgccaccttcgtagccaatgacctcgactggctcctggccttgcctcacgataaattctggtgccaggtgatctttgacgagactctacagaagtgcctggactcctacctgcgctatgtcccccgcaaattcgacgagggggtggcctcagcccctgaggttgttgacatgcagaagcgcctccatcgaagtgtttttctcaccttcctccgcatgtccactcacaaggaatccaaagatcacttcatttccccttctgcgtttggagaaatcctctacaataacttcctctttgacattccaaagatcctggacctctgcgtgctctttggaaaaggcaactcacgccattcaccatccctcaggtgctgagaaccaaagtgcctagagaagggcaggaggaggatgacgacgatgaggaagacgatgctgacgaggaggctcccaagcccgaccattttgttcaggaccctgcagtgctgagagagaaggcagaagccaggcgcatggcctttctcgccaagaaagggtaccggcatgacagctcaacagcagtggccggcagcccccgaggccatgggcagagccgcgagacaacccaggaacgcaggaagaaggaagccaacaaggcgacaagagccaaccacaaccggagaaccatggccgaccgcaagaggagcaaaggcatgatcccatcctgagacctggtgcagggccagtggggaggcagcggcaccagactcaccaggccgcgctcccatcgcctggggcctcctcactaggggccccaagttcaactcaacccctcaacagcctcagctttgcagcccctgagaaggccgcctctcatctaccagccagccatgagcgccttcctgcagaacacacagtgccttatgccacagccgaagaatccgtggggccggcaagcaggcaccttcccccagctgcgctagcgggaaagagatggggatggagtcccaaggcaagcgccccaaacctcgggccacaagacaccacttcccctttaccctggacagcaggaaacctgtatattcaaaaacacaaaaagtcctgctaataaaatttttgaccctttcaaa

SEQ ID NO: 344762 - DNA, 1413 bp, Homo sapiens
ggggccaggccgagacttcctgtctgctcctgcggaatcgcagtttgaccccggaagtgcgggcgctcagggagctgtcaccgtggtcggcggcggcggcggcggcggcggcacagagccggtggtggagccgccgaggagggtcacgcagcacaatgccagctctgcccctggaccaactccagatcacccacaaggacccgaagacaggaaagctgaggacttcaccagcgctgcaccccgagcagaaggcagaccggtattttgtgttatacaaaccgccccctaaagacaacattcccgccctagtggaggagtacctggaacgcgccaccttcgtagccaatgacctcgactggctcctggccttgcctcacgataaattctggtgccaggtgatctttgacgagactctacagaagtgcctggactcctacctgcgctatgtcccccgcaaattcgacgagggggtggcctcagcccctgaggttgttgacatgcagaagcgcctccatcgaagtgtttttctcaccttcctccgcatgtccactcacaaggaatccaaagatcacttcatttccccttctgcgtttggagaaatcctctacaataacttcctctttgacattccaaagatcctggacctctgcgtgctctttggaaaaggcaactcaccactgctccagaagatgataggaaacatctttacacagcagccaagttactacagtgacctggatgaaaccctgcctaccatccttcaggtcttcagcaatatcctccagcactgtggtttgcaaggggacggggccaataccacaccccagaagcttgaggagaggggccgattgacccccagtgacatgcctctcctggaattaaaggacattgttctctacctttgtgatacctgcaccacactttgggcctttctggatatcttccctttggcttgccagaccttccagaagcacgacttttgttacagactagcttccttctacgaagcagcaattcccgaaatggagtctgcaattaagaagaggaggcttgaagatagcaagcttcttggtgacctgtggcagaggctctcccattccaggaagaagctaatggagattttccacatcatcctgaaccagatctgcctccttcccatcctagaaagcagccatgagcgccttcctgcagaacacacagtgccttatgccacagccgaagaatccgtggggccggcaagcaggcaccttcccccagctgcgctagcgggaaagagatggggatggagtcccaaggcaagcgccccaaacctcgggccacaagacaccacttcccctttaccctggacagcaggaaacctgtatattcaaaaacacaaaaagtcctgctaataaaatttttgaccctttcaaa

SEQ ID NO: 344763 - DNA, 1167 bp, Homo sapiens
ggggccaggccgagacttcctgtctgctcctgcggaatcgcagtttgaccccggaagtgcgggcgctcagggagctgtcaccgtggtcggcggcggcggcggcggcggcggcacagagccggtggtggagccgccgaggagggtcacgcagcacaatgccagctctgcccctggaccaactccagatcacccacaaggacccgaagacaggaaagctgaggacttcaccagcgctgcaccccgagcagaaggcagaccggtattttgtgttatacaaaccgccccctaaagacaacattcccgccctagtggaggagtacctggaacgcgccaccttcgtagccaatgacctcgactggctcctggccttgcctcacgataaattctggtgccaggtgatctttgacgagactctacagaagtgcctggactcctacctgcgctatgtcccccgcaaattcgacgagggggtggcctcagcccctgaggttgttgacatgcagaagcgcctccatcgaagtgtttttctcaccttcctccgcatgtccactcacaaggaatccaaagatcacttcatttccccttctgcgtttggagaaatcctctacaataacttcctctttgacattccaaagatcctggacctctgcgtgctctttggaaaaggcaactcaccactgctccagaagatgataggaaacatctttacacagcagccaagttactacagtgacctggatgaaaccctgcctaccatccttcaggtcttcagcaatatcctccagcactgtggtttgcaaggggacggggccaataccacaccccagaagcttgaggagaggggccgattgacccccagtgacatgcctctcctggaattaaaggacattgttctctacctttgtgatacctgcaccacactttgggcctttctggatatcttccctttggcttgccagaccttccagaagcacgacttttgttacagactagcttccttctacgaagcagcaattcccgaaatggagtctgcaattaagaagaggaggcttgaagatagcaagcttcttggtgacctgtggcagaggctctcccattccaggaagaagctaatgcagatctggttcaggatgatgtggaaaatctccattagcttcttcctggaat

SEQ ID NO: 344764 - DNA, 800 bp, Homo sapiens
ggggccaggccgagacttcctgtctgctcctgcggaatcgcagtttgaccccggaagtgcgggcgctcagggagctgtcaccgtggtcggcggcggcggcggcggcggcggcacagagccggtggtggagccgccgaggccacctcgtgtatgcagagaccatgtgtgtctgatctgctgggatcctagagctggaacaggtgtcaaggactaggcagactggtcctctcttattactccttctagggtggggatcttcacagtctttataacaggccagaaccaaggttccttgggtaccaggctgtttccacctccttgcctttgctctgctgtttcctctgcctggggcacccttcttccctggccagtctctattatcaagactactcagactctcctctagaagtgctttgactttcactccaccccttcaccccgtctcacccctaagtttaactaaactagacacagtatagtgaatagttaagaaccagcctgcttcaccacccactaactgtgagaccttgggcaagtttcttattttctgtgagcctctgttttgtcactgataaaatgaggataataatagaactaaccttagactttttgtgagcattaatacatgtaaagccagttaacagggcaagtaagttaatgctgagaagagcacttagaggccaggcgctcacacctataatcccagcactttgggaagccaaggtgggcgtattgcttgagcttgggagtttgaaaccagcctgggcaacatggtgaaaccccgtctctatttaaaaaaa

SEQ ID NO: 344765 - DNA, 1097 bp, Homo sapiens
ggggccaggccgagacttcctgtctgctcctgcggaatcgcagtttgaccccggaagtgcgggcgctcagggagctgtcaccgtggtcggcggcggcggcggcggcggcggcacagagccggtggtggagccgccgaggccacctcgtgtatgcagagaccatgtgtgtctgatctgctgggatcctagagctggaacaggagggtcacgcagcacaatgccagctctgcccctggaccaactccagatcacccacaaggacccgaagacaggaaagctgaggacttcaccagcgctgatttgtacctgtaactccatgatacaaatttgatttaaatgggagggggtcctgcagacccacatgagaggtggccttgaagaatccttgtggtacccacaggctctacagtttggaaactcgccaccccgagcagaaggcagaccggtattttgtgttatacaaaccgccccctaaagacaacattcccgccctagtggaggagtacctggaacgcgccaccttcgtagccaatgacctcgactggctcctggccttgcctcacgataaattctggtgccaggtgatctttgacgagactctacagaagtgcctggactcctacctgcgctatgtcccccgcaaattcgacgagggggtggcctcagcccctgaggttgttgacatgcagaagcgcctccatcgaagtgtttttctcaccttcctccgcatgtccactcacaaggaatccaaagatcacttcatttccccttctgcgtttggagaaatcctctacaataacttcctctttgacattccaaagatcctggacctctgcgtgctctttggaaaaggcaactcaccactgctccagaagatgataggtgtgtaggatgcaggactgggaggatgcaccaagatggcccccacatgccaaactaaaggttgcaaaggccagcgctttgacagtgcccagggactcagggcgataggggcagggagtcttgggaaattgcttaacagatatatgagtgtcacctcaaaatgactaggtagtgacactacctagggaggtggaaataaaactgtgtaccagaca

SEQ ID NO: 344766 - DNA, 435 bp, Homo sapiens
gtaaccagccagaagtcacacagctagtaggtgatgtagcaaagatggagcccagatggctcagctccagggtccccactcataaccattacttggtgaacacaggaggggatttatcacccaacgtgtccagggctagctgatatcaggcagagtgtaaatgtgagagagccgcctctcatctaccagccagccatgagcgccttcctgcagaacacacagtgccttatgccacagccgaagaatccgtggggccggcaagcaggcaccttcccccagctgcgctagcgggaaagagatggggatggagtcccaaggcaagcgccccaaacctcgggccacaagacaccacttcccctttaccctggacagcaggaaacctgtatattcaaaaacacaaaaagtcctgctaataaaatttttgaccctttcaaa

SEQ ID NO: 344767 - DNA, 712 bp, Homo sapiens
tcctcctgtgtaacatcctgcctgtttgggaccctgactgttttaactgttgtctcaggtgctctgcagatctgtatgtgtggacagaggagaataatgcagtgtattcttttggcaacaggaattaaaggacattgttctctacctttgtgatacctgcaccacactttgggcctttctggatatcttccctttggcttgccagaccttccagaagcacgacttttgttacaggtaaggcggtagttctggctgttgaaatagagatactggcttatgtactaatttaacaaatatttactcatttaacaaatatttactgggtgcttagaatgtaccagtccctcttccagcctggggatgcagcagtgaaaacgacagataagcctcctgcttgtgtggcgcctgcattttagaagcactcctgtttttggccaagaccaggatagggcagggaaaaaaaatacacacacacatacaatgggctgggcgcgttggctcatgcctgtcatcctagcactttgggaggccgaggcgggtggatcacctgaggtcaggagttcaagaccagcctgaccaatatggtgacaccccatctctactaaaaatacaaaaattactgggcatggcagcatgcacctgtattcccagctactgaggaggctgaaacaggagaatcacttgaacccaggtggcggaggttgcagtgagc

SEQ ID NO: 344768 - DNA, 960 bp, Homo sapiens
  misc_feature (849)..(849): n is a, c, g, or t
  misc_feature (854)..(854): n is a, c, g, or t
  misc_feature (856)..(856): n is a, c, g, or t
  misc_feature (863)..(863): n is a, c, g, or t
ggggccaggccgagacttcctgtctgctcctgcggaatcgcagtttgaccccggaagtgcgggcgctcagggagctgtcaccgtggtcggcggcggcggcggcggcggcggcacagagccggtggtggagccgccgaggccacctcgtgtatgcagagaccatgtgtgtctgatctgctgggatcctagagctggaacaggagggtcacgcagcacaatgccagctctgcccctggaccaactccagatcacccacaaggacccgaagacaggaaagctgaggacttcaccagcgctgcaccccgagcagaaggcagaccggtattttgtgttatacaaaccgccccctaaagacaacattcccgccctagtggaggagtacctggaacgcgccaccttcgtagccaatgacctcgactggctcctggccttgcctcacgataaattctggtgccaggtgatctttgacgagactctacagaagtgcctggactcctacctgcgctatgtcccccgcaaattcgacgagggggtggcctcagcccctgaggttgttgacatgcagaagcgcctccatcgaagtgtttttctcaccttcctccgcatgtccactcacaaggaatccaaagatcacttcatttccccttctgcgtttggagaaatcctctacaataacttcctctttgacattccaaagatcctggacctctgcgtgctctttggaaaaggcaactcaccactgctccagaagatgataggaaacatctttacacagcagccaagttactacagtgacctggatgaaaccctgcctaccatccttcagcttcagaatatcctcagcactgnggttngnaggggcnggggcaaaaccaccccggagtgggggagggccgtggccccagaaatgcccccggaataaggatggcctcctgggactggccactgggctggaattcc

SEQ ID NO: 344769 - DNA, 2831 bp, Homo sapiens
ggggccaggccgagacttcctgtctgctcctgcggaatcgcagtttgaccccggaagtgcgggcgctcagggagctgtcaccgtggtcggcggcggcggcggcggcggcggcacagagccggtggtggagccgccgaggagggtcacgcagcacaatgccagctctgcccctggaccaactccagatcacccacaaggacccgaagacaggaaagctgaggacttcaccagcgctgcaccccgagcagaaggcagaccggtattttgtgttatacaaaccgccccctaaagacaacattcccgccctagtggaggagtacctggaacgcgccaccttcgtagccaatgacctcgactggctcctggccttgcctcacgataaattctggtgccaggtgatctttgacgagactctacagaagtgcctggactcctacctgcgctatgtcccccgcaaattcgacgagggggtggcctcagcccctgaggttgttgacatgcagaagcgcctccatcgaagtgtttttctcaccttcctccgcatgtccactcacaaggaatccaaagatcacttcatttccccttctgcgtttggagaaatcctctacaataacttcctctttgacattccaaagatcctggacctctgcgtgctctttggaaaaggcaactcaccactgctccagaagatgataggaaacatctttacacagcagccaagttactacagtgacctggatgaaaccctgcctaccatccttcaggtcttcagcaatatcctccagcactgtggtttgcaaggggacggggccaataccacaccccagaagcttgaggagaggggccgattgacccccagtgacatgcctctcctggaattaaaggacattgttctctacctttgtgatacctgcaccacactttgggcctttctggatatcttccctttggcttgccagaccttccagaagcacgacttttgttacagactagcttccttctacgaagcagcaattcccgaaatggagtctgcaattaagaagaggaggcttgaagatagcaagcttcttggtgacctgtggcagaggctctcccattccaggaagaagctaatggagattttccacatcatcctgaaccagatctgcctccttcccatcctagaaagcagctgtgacaacattcagggcttcatcgaagagttccttcagatcttcagctccttgctgcaggagaagaggttcctccgggactatgatgcactcttccccgtggccgaagacatcagcttgctgcagcaggcctcatcagtcttggacgagacgcggactgcctacatcctccaggcagtcgagagtgcatgggaaggggtggacagacggaaagccacagatgctaaagacccatcggtgattgaggagcctaatggggagcctaacggggtcacggtgacagcagaggcagtcagtcaagcatcatcacatccggagaactcggaggaagaggagtgcatgggagcagccgcggctgtgggccctgccatgtgtggggtggaactggactctctcatctcccaagtgaaggacctgctgccagaccttggtgagggcttcatcctggcctgcctggagtactaccactacgacccagagcaggtgatcaacaatatcctggaggagcggctggcccccaccctcagccagctggaccgcaacctagacagagaaatgaaaccagaccctacacccctgctgacgtctcgccacaacgtcttccagaatgacgagtttgatgtgttcagcagggactcagtagacctgagccgggtgcacaagggcaagagcaccaggaaggaggaaaacacgcggagtttgctgaacgacaagcgtgcagtggcggcacagcggcagcgctacgagcagtacagcgtggtggtggaggaggtgccactgcagccaggcgagagcctgccctaccacagtgtctactacgaggatgagtacgatgacacatacgatggcaaccaggtgggcgccaatgatgcagactctgatgacgagctcatcagccgcaggccattcaccatccctcaggtgctgagaaccaaagtgcctagagaagggcaggaggaggatgacgacgatgaggaagacgatgctgacgaggaggctcccaagcccgaccattttgttcaggaccctgcagtgctgagagagaaggcagaagccaggcgcatggcctttctcgccaagaaagggtaccggcatgacagctcaacagcagtggccggcagcccccgaggccatgggcagagccgcgagacaacccaggaacgcaggaagaaggaagccaacaaggcgacaagagccaaccacaaccggagaaccatggccgaccgcaagaggagcaaaggcatgatcccatcctgagacctggtgcagggccagtggggaggcagcggcaccagactcaccaggccgcgctcccatcgcctggggcctcctcactaggggccccaagttcaactcaacccctcaacagcctcagctttgcagcccctgagaaggccgcctctcatctaccagccagccatgagcgccttcctgcagaacacacagtgccttatgccacagccgaagaatccgtggggccggcaagcaggcaccttcccccagctgcgctagcgggaaagagatggggatggagtcccaaggcaagcgccccaaacctcgggccacaagacaccacttcccctttaccctggacagcaggaaacctgtatattcaaaaacacaaaaagtcctgctaataaaatttttgaccctttcaaa

SEQ ID NO: 344770 - DNA, 2967 bp, Homo sapiens
ggggccaggccgagacttcctgtctgctcctgcggaatcgcagtttgaccccggaagtgcgggcgctcagggagctgtcaccgtggtcggcggcggcggcggcggcggcggcacagagccggtggtggagccgccgaggccacctcgtgtatgcagagaccatgtgtgtctgatctgctgggatcctagagctggaacaggccaagtgatattgtgaaaagaacactggacagcaagacaggagaccttggatctgccactcactgactgtgaggagggtcacgcagcacaatgccagctctgcccctggaccaactccagatcacccacaaggacccgaagacaggaaagctgaggacttcaccagcgctgcaccccgagcagaaggcagaccggtattttgtgttatacaaaccgccccctaaagacaacattcccgccctagtggaggagtacctggaacgcgccaccttcgtagccaatgacctcgactggctcctggccttgcctcacgataaattctggtgccaggtgatctttgacgagactctacagaagtgcctggactcctacctgcgctatgtcccccgcaaattcgacgagggggtggcctcagcccctgaggttgttgacatgcagaagcgcctccatcgaagtgtttttctcaccttcctccgcatgtccactcacaaggaatccaaagatcacttcatttccccttctgcgtttggagaaatcctctacaataacttcctctttgacattccaaagatcctggacctctgcgtgctctttggaaaaggcaactcaccactgctccagaagatgataggaaacatctttacacagcagccaagttactacagtgacctggatgaaaccctgcctaccatccttcaggtcttcagcaatatcctccagcactgtggtttgcaaggggacggggccaataccacaccccagaagcttgaggagaggggccgattgacccccagtgacatgcctctcctggaattaaaggacattgttctctacctttgtgatacctgcaccacactttgggcctttctggatatcttccctttggcttgccagaccttccagaagcacgacttttgttacagactagcttccttctacgaagcagcaattcccgaaatggagtctgcaattaagaagaggaggcttgaagatagcaagcttcttggtgacctgtggcagaggctctcccattccaggaagaagctaatggagattttccacatcatcctgaaccagatctgcctccttcccatcctagaaagcagctgtgacaacattcagggcttcatcgaagagttccttcagatcttcagctccttgctgcaggagaagaggttcctccgggactatgatgcactcttccccgtggccgaagacatcagcttgctgcagcaggcctcatcagtcttggacgagacgcggactgcctacatcctccaggcagtcgagagtgcatgggaaggggtggacagacggaaagccacagatgctaaagacccatcggtgattgaggagcctaatggggagcctaacggggtcacggtgacagcagaggcagtcagtcaagcatcatcacatccggagaactcggaggaagaggagtgcatgggagcagccgcggctgtgggccctgccatgtgtggggtggaactggactctctcatctcccaagtgaaggacctgctgccagaccttggtgagggcttcatcctggcctgcctggagtactaccactacgacccagagcaggtgatcaacaatatcctggaggagcggctggcccccaccctcagccagctggaccgcaacctagacagagaaatgaaaccagaccctacacccctgctgacgtctcgccacaacgtcttccagaatgacgagtttgatgtgttcagcagggactcagtagacctgagccgggtgcacaagggcaagagcaccaggaaggaggaaaacacgcggagtttgctgaacgacaagcgtgcagtggcggcacagcggcagcgctacgagcagtacagcgtggtggtggaggaggtgccactgcagccaggcgagagcctgccctaccacagtgtctactacgaggatgagtacgatgacacatacgatggcaaccaggtgggcgccaatgatgcagactctgatgacgagctcatcagccgcaggccattcaccatccctcaggtgctgagaaccaaagtgcctagagaagggcaggaggaggatgacgacgatgaggaagacgatgctgacgaggaggctcccaagcccgaccattttgttcaggaccctgcagtgctgagagagaaggcagaagccaggcgcatggcctttctcgccaagaaagggtaccggcatgacagctcaacagcagtggccggcagcccccgaggccatgggcagagccgcgagacaacccaggaacgcaggaagaaggaagccaacaaggcgacaagagccaaccacaaccggagaaccatggccgaccgcaagaggagcaaaggcatgatcccatcctgagacctggtgcagggccagtggggaggcagcggcaccagactcaccaggccgcgctcccatcgcctggggcctcctcactaggggccccaagttcaactcaacccctcaacagcctcagctttgcagcccctgagaaggccgcctctcatctaccagccagccatgagcgccttcctgcagaacacacagtgccttatgccacagccgaagaatccgtggggccggcaagcaggcaccttcccccagctgcgctagcgggaaagagatggggatggagtcccaaggcaagcgccccaaacctcgggccacaagacaccacttcccctttaccctggacagcaggaaacctgtatattcaaaaacacaaaaagtcctgctaataaaatttttgaccctttcaaa

SEQ ID NO: 344771 - DNA, 2733 bp, Homo sapiens
ggggccaggccgagacttcctgtctgctcctgcggaatcgcagtttgaccccggaagtgcgggcgctcagggagctgtcaccgtggtcggcggcggcggcggcggcggcggcacagagccggtggtggagccgccgagcaccccgagcagaaggcagaccggtattttgtgttatacaaaccgccccctaaagacaacattcccgccctagtggaggagtacctggaacgcgccaccttcgtagccaatgacctcgactggctcctggccttgcctcacgataaattctggtgccaggtgatctttgacgagactctacagaagtgcctggactcctacctgcgctatgtcccccgcaaattcgacgagggggtggcctcagcccctgaggttgttgacatgcagaagcgcctccatcgaagtgtttttctcaccttcctccgcatgtccactcacaaggaatccaaagatcacttcatttccccttctgcgtttggagaaatcctctacaataacttcctctttgacattccaaagatcctggacctctgcgtgctctttggaaaaggcaactcaccactgctccagaagatgataggaaacatctttacacagcagccaagttactacagtgacctggatgaaaccctgcctaccatccttcaggtcttcagcaatatcctccagcactgtggtttgcaaggggacggggccaataccacaccccagaagcttgaggagaggggccgattgacccccagtgacatgcctctcctggaattaaaggacattgttctctacctttgtgatacctgcaccacactttgggcctttctggatatcttccctttggcttgccagaccttccagaagcacgacttttgttacagactagcttccttctacgaagcagcaattcccgaaatggagtctgcaattaagaagaggaggcttgaagatagcaagcttcttggtgacctgtggcagaggctctcccattccaggaagaagctaatggagattttccacatcatcctgaaccagatctgcctccttcccatcctagaaagcagctgtgacaacattcagggcttcatcgaagagttccttcagatcttcagctccttgctgcaggagaagaggttcctccgggactatgatgcactcttccccgtggccgaagacatcagcttgctgcagcaggcctcatcagtcttggacgagacgcggactgcctacatcctccaggcagtcgagagtgcatgggaaggggtggacagacggaaagccacagatgctaaagacccatcggtgattgaggagcctaatggggagcctaacggggtcacggtgacagcagaggcagtcagtcaagcatcatcacatccggagaactcggaggaagaggagtgcatgggagcagccgcggctgtgggccctgccatgtgtggggtggaactggactctctcatctcccaagtgaaggacctgctgccagaccttggtgagggcttcatcctggcctgcctggagtactaccactacgacccagagcaggtgatcaacaatatcctggaggagcggctggcccccaccctcagccagctggaccgcaacctagacagagaaatgaaaccagaccctacacccctgctgacgtctcgccacaacgtcttccagaatgacgagtttgatgtgttcagcagggactcagtagacctgagccgggtgcacaagggcaagagcaccaggaaggaggaaaacacgcggagtttgctgaacgacaagcgtgcagtggcggcacagcggcagcgctacgagcagtacagcgtggtggtggaggaggtgccactgcagccaggcgagagcctgccctaccacagtgtctactacgaggatgagtacgatgacacatacgatggcaaccaggtgggcgccaatgatgcagactctgatgacgagctcatcagccgcaggccattcaccatccctcaggtgctgagaaccaaagtgcctagagaagggcaggaggaggatgacgacgatgaggaagacgatgctgacgaggaggctcccaagcccgaccattttgttcaggaccctgcagtgctgagagagaaggcagaagccaggcgcatggcctttctcgccaagaaagggtaccggcatgacagctcaacagcagtggccggcagcccccgaggccatgggcagagccgcgagacaacccaggaacgcaggaagaaggaagccaacaaggcgacaagagccaaccacaaccggagaaccatggccgaccgcaagaggagcaaaggcatgatcccatcctgagacctggtgcagggccagtggggaggcagcggcaccagactcaccaggccgcgctcccatcgcctggggcctcctcactaggggccccaagttcaactcaacccctcaacagcctcagctttgcagcccctgagaaggccgcctctcatctaccagccagccatgagcgccttcctgcagaacacacagtgccttatgccacagccgaagaatccgtggggccggcaagcaggcaccttcccccagctgcgctagcgggaaagagatggggatggagtcccaaggcaagcgccccaaacctcgggccacaagacaccacttcccctttaccctggacagcaggaaacctgtatattcaaaaacacaaaaagtcctgctaataaaatttttgaccctttcaaa

SEQ ID NO: 344772 - DNA, 2772 bp, Homo sapiens
gaaatatatcagaagtcatctggggaagtatttcttctacaattgagaactgctttatgcaaaaaaagtcactttggctgggttagtaggtgcatgaaccaggtcctgaaccacaacaggagcctcctaaggcgagaggttgaagcttctcttctgactctgggatcagccccagagcaggccctgcccccaggagtctgtgtgtctgctctcttcttcccatccatattcctttcaggagggtcacgcagcacaatgccagctctgcccctggaccaactccagatcacccacaaggacccgaagacaggaaagctgaggacttcaccagcgctggtgatctttgacgagactctacagaagtgcctggactcctacctgcgctatgtcccccgcaaattcgacgagggggtggcctcagcccctgaggttgttgacatgcagaagcgcctccatcgaagtgtttttctcaccttcctccgcatgtccactcacaaggaatccaaagatcacttcatttccccttctgcgtttggagaaatcctctacaataacttcctctttgacattccaaagatcctggacctctgcgtgctctttggaaaaggcaactcaccactgctccagaagatgataggaaacatctttacacagcagccaagttactacagtgacctggatgaaaccctgcctaccatccttcaggtcttcagcaatatcctccagcactgtggtttgcaaggggacggggccaataccacaccccagaagcttgaggagaggggccgattgacccccagtgacatgcctctcctggaattaaaggacattgttctctacctttgtgatacctgcaccacactttgggcctttctggatatcttccctttggcttgccagaccttccagaagcacgacttttgttacagactagcttccttctacgaagcagcaattcccgaaatggagtctgcaattaagaagaggaggcttgaagatagcaagcttcttggtgacctgtggcagaggctctcccattccaggaagaagctaatggagattttccacatcatcctgaaccagatctgcctccttcccatcctagaaagcagctgtgacaacattcagggcttcatcgaagagttccttcagatcttcagctccttgctgcaggagaagaggttcctccgggactatgatgcactcttccccgtggccgaagacatcagcttgctgcagcaggcctcatcagtcttggacgagacgcggactgcctacatcctccaggcagtcgagagtgcatgggaaggggtggacagacggaaagccacagatgctaaagacccatcggtgattgaggagcctaatggggagcctaacggggtcacggtgacagcagaggcagtcagtcaagcatcatcacatccggagaactcggaggaagaggagtgcatgggagcagccgcggctgtgggccctgccatgtgtggggtggaactggactctctcatctcccaagtgaaggacctgctgccagaccttggtgagggcttcatcctggcctgcctggagtactaccactacgacccagagcaggtgatcaacaatatcctggaggagcggctggcccccaccctcagccagctggaccgcaacctagacagagaaatgaaaccagaccctacacccctgctgacgtctcgccacaacgtcttccagaatgacgagtttgatgtgttcagcagggactcagtagacctgagccgggtgcacaagggcaagagcaccaggaaggaggaaaacacgcggagtttgctgaacgacaagcgtgcagtggcggcacagcggcagcgctacgagcagtacagcgtggtggtggaggaggtgccactgcagccaggcgagagcctgccctaccacagtgtctactacgaggatgagtacgatgacacatacgatggcaaccaggtgggcgccaatgatgcagactctgatgacgagctcatcagccgcaggccattcaccatccctcaggtgctgagaaccaaagtgcctagagaagggcaggaggaggatgacgacgatgaggaagacgatgctgacgaggaggctcccaagcccgaccattttgttcaggaccctgcagtgctgagagagaaggcagaagccaggcgcatggcctttctcgccaagaaagggtaccggcatgacagctcaacagcagtggccggcagcccccgaggccatgggcagagccgcgagacaacccaggaacgcaggaagaaggaagccaacaaggcgacaagagccaaccacaaccggagaaccatggccgaccgcaagaggagcaaaggcatgatcccatcctgagacctggtgcagggccagtggggaggcagcggcaccagactcaccaggccgcgctcccatcgcctggggcctcctcactaggggccccaagttcaactcaacccctcaacagcctcagctttgcagcccctgagaaggccgcctctcatctaccagccagccatgagcgccttcctgcagaacacacagtgccttatgccacagccgaagaatccgtggggccggcaagcaggcaccttcccccagctgcgctagcgggaaagagatggggatggagtcccaaggcaagcgccccaaacctcgggccacaagacaccacttcccctttaccctggacagcaggaaacctgtatattcaaaaacacaaaaagtcctgctaataaaatttttgaccctttcaaa

SEQ ID NO: 344773 - DNA, 2756 bp, Homo sapiens
ggggccaggccgagacttcctgtctgctcctgcggaatcgcagtttgaccccggaagtgcgggcgctcagggagctgtcaccgtggtcggcggcggcggcggcggcggcggcacagagccggtggtggagccgccgaggagggtcacgcagcacaatgccagctctgcccctggaccaactccagatcacccacaaggacccgaagacaggaaagctgaggacttcaccagcgctgcaccccgagcagaaggcagaccggtattttgtgttatacaaaccgccccctaaagacaacattcccgccctagtggaggagtacctggaacgcgccaccttcgtagccaatgacctcgactggctcctggccttgcctcacgataaattctggtgccaggtgatctttgacgagactctacagaagtgcctggactcctacctgcgctatgtcccccgcaaattcgacgagggggtggcctcagcccctgaggttgttgacatgcagaagcgcctccatcgaagtgtttttctcaccttcctccgcatgtccactcacaaggaatccaaagatcacttcatttccccttctgcgtttggagaaatcctctacaataacttcctctttgacattccaaagatcctggacctctgcgtgctctttggaaaaggcaactcaccactgctccagaagatgataggaaacatctttacacagcagccaagttactacagtgacctggatgaaaccctgcctaccatccttcaggtcttcagcaatatcctccagcactgtggtttgcaaggggacggggccaataccacaccccagaagcttgaggagaggggccgattgacccccagtgacatgcctctcctggaattaaaggacattgttctctacctttgtgatacctgcaccacactttgggcctttctggatatcttccctttggcttgccagaccttccagaagcacgacttttgttacaggcttcttggtgacctgtggcagaggctctcccattccaggaagaagctaatggagattttccacatcatcctgaaccagatctgcctccttcccatcctagaaagcagctgtgacaacattcagggcttcatcgaagagttccttcagatcttcagctccttgctgcaggagaagaggttcctccgggactatgatgcactcttccccgtggccgaagacatcagcttgctgcagcaggcctcatcagtcttggacgagacgcggactgcctacatcctccaggcagtcgagagtgcatgggaaggggtggacagacggaaagccacagatgctaaagacccatcggtgattgaggagcctaatggggagcctaacggggtcacggtgacagcagaggcagtcagtcaagcatcatcacatccggagaactcggaggaagaggagtgcatgggagcagccgcggctgtgggccctgccatgtgtggggtggaactggactctctcatctcccaagtgaaggacctgctgccagaccttggtgagggcttcatcctggcctgcctggagtactaccactacgacccagagcaggtgatcaacaatatcctggaggagcggctggcccccaccctcagccagctggaccgcaacctagacagagaaatgaaaccagaccctacacccctgctgacgtctcgccacaacgtcttccagaatgacgagtttgatgtgttcagcagggactcagtagacctgagccgggtgcacaagggcaagagcaccaggaaggaggaaaacacgcggagtttgctgaacgacaagcgtgcagtggcggcacagcggcagcgctacgagcagtacagcgtggtggtggaggaggtgccactgcagccaggcgagagcctgccctaccacagtgtctactacgaggatgagtacgatgacacatacgatggcaaccaggtgggcgccaatgatgcagactctgatgacgagctcatcagccgcaggccattcaccatccctcaggtgctgagaaccaaagtgcctagagaagggcaggaggaggatgacgacgatgaggaagacgatgctgacgaggaggctcccaagcccgaccattttgttcaggaccctgcagtgctgagagagaaggcagaagccaggcgcatggcctttctcgccaagaaagggtaccggcatgacagctcaacagcagtggccggcagcccccgaggccatgggcagagccgcgagacaacccaggaacgcaggaagaaggaagccaacaaggcgacaagagccaaccacaaccggagaaccatggccgaccgcaagaggagcaaaggcatgatcccatcctgagacctggtgcagggccagtggggaggcagcggcaccagactcaccaggccgcgctcccatcgcctggggcctcctcactaggggccccaagttcaactcaacccctcaacagcctcagctttgcagcccctgagaaggccgcctctcatctaccagccagccatgagcgccttcctgcagaacacacagtgccttatgccacagccgaagaatccgtggggccggcaagcaggcaccttcccccagctgcgctagcgggaaagagatggggatggagtcccaaggcaagcgccccaaacctcgggccacaagacaccacttcccctttaccctggacagcaggaaacctgtatattcaaaaacacaaaaagtcctgctaataaaatttttgaccctttcaaa

SEQ ID NO: 344774 - DNA, 1912 bp, Homo sapiens
agctcggtaccccaacgatggtcctcagctccttggctgccagaccttccagaagcacgactttgttacactagcttccttctacgaagcagcaattcccgaaatggagtctgcaattaagaagaggaggcttgaagatagcaagcttcttggtgacctgtggcagaggctctcccattccaggaagaagctaatggagattttccacatcatcctgaaccagatctgcctccttcccatcctagaaagcagctgtgacaacattcagggcttcatcgaagagttccttcagatcttcagctccttgctgcaggagaagaggttcctccgggactatgatgcactcttccccgtggccgaagacatcagcttgctgcagcaggcctcatcagtcttggacgagacgcggactgcctacatcctccaggcagtcgagagtgcatgggaaggggtggacagacggaaagccacagatgctaaagacccatcggtgattgaggagcctaatggggagcctaacggggtcacggtgacagcagaggcagtcagtcaagcatcatcacatccggagaactcggaggaagaggagtgcatgggagcagccgcggctgtgggccctgccatgtgtggggtggaactggactctctcatctcccaagtgaaggacctgctgccagaccttggtgagggcttcatcctggcctgcctggagtactaccactacgacccagagcaggtgatcaacaatatcctggaggagcggctggcccccaccctcagccagctggaccgcaacctagacagagaaatgaaaccagaccctacacccctgctgacgtctcgccacaacgtcttccagaatgacgagtttgatgtgttcagcagggactcagtagacctgagccgggtgcacaagggcaagagcaccaggaaggaggaaaacacgcggagtttgctgaacgacaagcgtgcagtggcggcacagcggcagcgctacgagcagtacagcgtggtggtggaggaggtgccactgcagccaggcgagagcctgccctaccacagtgtctactacgaggatgagtacgatgacacatacgatggcaaccaggtgggcgccaatgatgcagactctgatgacgagctcatcagccgcaggccattcaccatccctcaggtgctgagaaccaaagtgcctagagaagggcaggaggaggatgacgacgatgaggaagacgatgctgacgaggaggctcccaagcccgaccattttgttcaggaccctgcagtgctgagagagaaggcagaagccaggcgcatggcctttctcgccaagaaagggtaccggcatgacagctcaacagcagtggccggcagcccccgaggccatgggcagagccgcgagacaacccaggaacgcaggaagaaggaagccaacaaggcgacaagagccaaccacaaccggagaaccatggccgaccgcaagaggagcaaaggcatgatcccatcctgagacctggtgcagggccagtggggaggcagcggcaccagactcaccaggccgcgctcccatcgcctggggcctcctcactaggggccccaagttcaactcaacccctcaacagcctcagctttgcagcccctgagaaggccgcctctcatctaccagccagccatgagcgccttcctgcagaacacacagtgccttatgccacagccgaagaatccgtggggccggcaagcaggcaccttcccccagctgcgctagcgggaaagagatggggatggagtcccaaggcaagcgccccaaacctcgggccacaagacaccacttcccctttaccctggacagcaggaaacctgtatattcaaaaacacaaaaagtcctgctaataaaatttttgaccctttcaaa

SEQ ID NO: 344775 - DNA, 2917 bp, Homo sapiens
ggggccaggccgagacttcctgtctgctcctgcggaatcgcagtttgaccccggaagtgcgggcgctcagggagctgtcaccgtggtcggcggcggcggcggcggcggcggcacagagccggtggtggagccgccgaggagggtcacgcagcacaatgccagctctgcccctggaccaactccagatcacccacaaggacccgaagacaggaaagctgaggacttcaccagcgctgcaccccgagcagaaggcagaccggtattttgtgttatacaaaccgccccctaaagacaacattcccgccctagtggaggagtacctggaacgcgccaccttcgtagccaatgacctcgactggctcctggccttgcctcacgataaattctggtgccaggtgatctttgacgagactctacagaagtgcctggactcctacctgcgctatgtcccccgcaaattcgacgagggggtggcctcagcccctgaggttgttgacatgcagaagcgcctccatcgaagtgtttttctcaccttcctccgcatgtccactcacaaggaatccaaagatcacttcatttccccttctgcgtttggagaaatcctctacaataacttcctctttgacattccaaagatcctggacctctgcgtgctctttggaaaaggcaactcaccactgctccagaagatgataggaaacatctttacacagcagccaagttactacagtgacctggatgaaaccctgcctaccatccttcaggtcttcagcaatatcctccagcactgtggtttgcaaggggacggggccaataccacaccccagaagcttgaggagaggggccgattgacccccagtgacatgcctctcctggaattaaaggacattgttctctacctttgtgatacctgcaccacactttgggcctttctggatatcttccctttggcttgccagaccttccagaagcacgacttttgttacagactagcttccttctacgaagcagcaattcccgaaatggagtctgcaattaagaagaggaggcttgaagatagcaagcttcttggtgacctgtggcagaggctctcccattccaggaagaagctaatggagattttccacatcatcctgaaccagatctgcctccttcccatcctagaaagcagctgtgacaacattcagggcttcatcgaagagttccttcagatcttcagctccttgctgcaggagaagaggttcctccgggactatgatgcactcttccccgtggccgaagacatcagcttgctgcagcaggcctcatcagtcttggacgagacgcggactgcctacatcctccaggcagtcgagagtgcatgggaaggggtggacagacggaaagccacagatgctaaagacccatcggtgattgaggagcctaatggggagcctaacggggtcacggtgacagcagaggcagtcagtcaagcatcatcacatccggagaactcggaggaagaggagtgcatgggagcagccgcggctgtgggccctgccatgtgtggggtggaactggactctctcatctcccaagtgaaggacctgctgccagaccttggtgagggcttcatcctggcctgcctggagtactaccactacgacccagagcaggtgatcaacaatatcctggaggagcggctggcccccaccctcagccagctggaccgcaacctagacagagaaatgaaaccagaccctacacccctgctgacgtctcgccacaacgtcttccagaatgacgagtttgatgtgttcagcagggactcagtagacctgagccgggtgcacaagggcaagagcaccaggaaggaggaaaacacgcggagtttgctgaacgacaagcgtgcagtggcggcacagcggcagcgctacgagcagtacagcgtggtggtggaggaggtaggccaccaaggccaggtctctgctgggccagggaaaccaggccagcccctgagccccccagacccatgcttatgccattgcaggtgccactgcagccaggcgagagcctgccctaccacagtgtctactacgaggatgagtacgatgacacatacgatggcaaccaggtgggcgccaatgatgcagactctgatgacgagctcatcagccgcaggccattcaccatccctcaggtgctgagaaccaaagtgcctagagaagggcaggaggaggatgacgacgatgaggaagacgatgctgacgaggaggctcccaagcccgaccattttgttcaggaccctgcagtgctgagagagaaggcagaagccaggcgcatggcctttctcgccaagaaagggtaccggcatgacagctcaacagcagtggccggcagcccccgaggccatgggcagagccgcgagacaacccaggaacgcaggaagaaggaagccaacaaggcgacaagagccaaccacaaccggagaaccatggccgaccgcaagaggagcaaaggcatgatcccatcctgagacctggtgcagggccagtggggaggcagcggcaccagactcaccaggccgcgctcccatcgcctggggcctcctcactaggggccccaagttcaactcaacccctcaacagcctcagctttgcagcccctgagaaggccgcctctcatctaccagccagccatgagcgccttcctgcagaacacacagtgccttatgccacagccgaagaatccgtggggccggcaagcaggcaccttcccccagctgcgctagcgggaaagagatggggatggagtcccaaggcaagcgccccaaacctcgggccacaagacaccacttcccctttaccctggacagcaggaaacctgtatattcaaaaacacaaaaagtcctgctaataaaatttttgaccctttcaaa

SEQ ID NO: 344776 - DNA, 1331 bp, Homo sapiens
  misc_feature (26)..(26): n is a, c, g, or t
atccccggtcatacctggacttctanaggcagtcagtcaagcatcatcacatccggagaactcggaggaagaggagtgcatgggagcagccgcggctgtgggccctgccatgtgtggggtggaactggactctctcatctcccaagtgaaggacctgctgccagaccttggtgagggcttcatcctggcctgcctggagtactaccactacgacccagagcagagaaatgaaaccagaccctacacccctgctgacgtctcgccacaacgtcttccagaatgacgagtttgatgtgttcagcagggactcagtagacctgagccgggtgcacaagggcaagagcaccaggaaggaggaaaacacgcggagtttgctgaacgacaagcgtgcagtggcggcacagcggcagcgctacgagcagtacagcgtggtggtggaggaggtgccactgcagccaggcgagagcctgccctaccacagtgtctactacgaggatgagtacgatgacacatacgatggcaaccaggtgggcgccaatgatgcagactctgatgacgagctcatcagccgcaggccattcaccatccctcaggtgctgagaaccaaagtgcctagagaagggcaggaggaggatgacgacgatgaggaagacgatgctgacgaggaggctcccaagcccgaccattttgttcaggaccctgcagtgctgagagagaaggcagaagccaggcgcatggcctttctcgccaagaaagggtaccggcatgacagctcaacagcagtggccggcagcccccgaggccatgggcagagccgcgagacaacccaggaacgcaggaagaaggaagccaacaaggcgacaagagccaaccacaaccggagaaccatggccgaccgcaagaggagcaaaggcatgatcccatcctgagacctggtgcagggccagtggggaggcagcggcaccagactcaccaggccgcgctcccatcgcctggggcctcctcactaggggccccaagttcaactcaacccctcaacagcctcagctttgcagcccctgagaaggccgcctctcatctaccagccagccatgagcgccttcctgcagaacacacagtgccttatgccacagccgaagaatccgtggggccggcaagcaggcaccttcccccagctgcgctagcgggaaagagatggggatggagtcccaaggcaagcgccccaaacctcgggccacaagacaccacttcccctttaccctggacagcaggaaacctgtatattcaaaaacacaaaaagtcctgctaataaaatttttgaccctttcaaa

SEQ ID NO: 344777 - DNA, 1103 bp, Homo sapiens
ctattccaggccagcatggccctctgtagctccagcggtgggcaaggggcagacaaggggtcctccaggctggcgagaagcctggccccctgctccaatccaggaagcctgattgcaccaggaaggaggaaaacacgcggagtttgctgaacgacaagcgtgcagtggcggcacagcggcagcgctacgagcagtacagcgtggtggtggaggaggtgccactgcagccaggcgagagcctgccctaccacagtgtctactacgaggatgagtacgatgacacatacgatggcaaccaggtgggcgccaatgatgcagactctgatgacgagctcatcagccgcaggccattcaccatccctcaggtgctgagaaccaaagtgcctagagaagggcaggaggaggatgacgacgatgaggaagacgatgctgacgaggaggctcccaagcccgaccattttgttcaggaccctgcagtgctgagagagaaggcagaagccaggcgcatggcctttctcgccaagaaagggtaccggcatgacagctcaacagcagtggccggcagcccccgaggccatgggcagagccgcgagacaacccaggaacgcaggaagaaggaagccaacaaggcgacaagagccaaccacaaccggagaaccatggccgaccgcaagaggagcaaaggcatgatcccatcctgagacctggtgcagggccagtggggaggcagcggcaccagactcaccaggccgcgctcccatcgcctggggcctcctcactaggggccccaagttcaactcaacccctcaacagcctcagctttgcagcccctgagaaggccgcctctcatctaccagccagccatgagcgccttcctgcagaacacacagtgccttatgccacagccgaagaatccgtggggccggcaagcaggcaccttcccccagctgcgctagcgggaaagagatggggatggagtcccaaggcaagcgccccaaacctcgggccacaagacaccacttcccctttaccctggacagcaggaaacctgtatattcaaaaacacaaaaagtcctgctaataaaatttttgaccctttcaaa

SEQ ID NO: 344778 - DNA, 869 bp, Homo sapiens
tgggcaaccatgagttgtatatgcgccgcaggaagcctgacaccatcgaggtgcagcagatgaaagcccaggcccgggaggagaaagcatcagaagcagctggagcggcaacagctggaaacagagaagaaaaggagagaaccaaagtgcctagagaagggcaggaggaggatgacgacgatgaggaagacgatgctgacgaggaggctcccaagcccgaccattttgttcaggaccctgcagtgctgagagagaaggcagaagccaggcgcatggcctttctcgccaagaaagggtaccggcatgacagctcaacagcagtggccggcagcccccgaggccatgggcagagccgcgagacaacccaggaacgcaggaagaaggaagccaacaaggcgacaagagccaaccacaaccggagaaccatggccgaccgcaagaggagcaaaggcatgatcccatcctgagacctggtgcagggccagtggggaggcagcggcaccagactcaccaggccgcgctcccatcgcctggggcctcctcactaggggccccaagttcaactcaacccctcaacagcctcagctttgcagcccctgagaaggccgcctctcatctaccagccagccatgagcgccttcctgcagaacacacagtgccttatgccacagccgaagaatccgtggggccggcaagcaggcaccttcccccagctgcgctagcgggaaagagatggggatggagtcccaaggcaagcgccccaaacctcgggccacaagacaccacttcccctttaccctggacagcaggaaacctgtatattcaaaaacacaaaaagtcctgctaataaaatttttgaccctttcaaa

SEQ ID NO: 344779 - DNA, 930 bp, Homo sapiens
ggggccaggccgagacttcctgtctgctcctgcggaatcgcagtttgaccccggaagtgcgggcgctcagggagctgtcaccgtggtcggcggcggcggcggcggcggcggcacagagccggtggtggagccgccgaggagggtcacgcagcacaatgccagctctgcccctggaccaactccagatcacccacaaggacccgaagacaggaaagctgaggacttcaccagcgctgcaccccgagcagaaggcagaccggtattttgtgttatacaaaccgccccctaaagacaacattcccgccctagtggaggagtacctggaacgcgccaccttcgtagccaatgacctcgactggctcctggccttgcctcacgataaattctggtgccaggtgatctttgacgagactctacagaagtgcctggactcctacctgcgctatgtcccccgcaaattcgacgagggggtggcctcagcccctgaggttgttgacatgcagaagcgcctccatcgaagtgtttttctcaccttcctccgcatgtccactcacaaggaatccaaagatcacttcatttccccttctgcgtttggagaaatcctctacaataacttcctctttgacattccaaagatcctggacctctgcgtgctctttggaaaaggcaactcaccactgctccagaagatgataggaaacatctttacacagcagccaagttactacagtgacctggatgaaaccctgcctaccatccttcaggtcttcagcaatatcctccagcactgtggtttgcaaggggacggggccaataccacaccccagaagcttgaggagaggggccgattgacccccagtgacatgcctctcctggataaagacacgagacacgaatgttcaggtacacgagctcgaattgtatatgtat

SEQ ID NO: 344780 - DNA, 1393 bp, Homo sapiens
ggggccaggccgagacttcctgtctgctcctgcggaatcgcagtttgaccccggaagtgcgggcgctcagggagctgtcaccgtggtcggcggcggcggcggcggcggcggcacagagccggtggtggagccgccgaggccacctcgtgtatgcagagaccatgtgtgtctgatctgctgggatcctagagctggaacaggagggtcacgcagcacaatgccagctctgcccctggaccaactccagatcacccacaaggacccgaagacaggaaagctgaggacttcaccagcgctgatttgtacctgtaactccatgatacaaatttgatttaaatgggagggggtcctgcagacccacatgagaggtggccttgaagaatccttgtggtacccacaggctctacagtttggaaactcgccaccccgagcagaaggcagaccggtattttgtgttatacaaaccgccccctaaagacaacattcccgccctagtggaggagtacctggaacgcgccaccttcgtagccaatgacctcgactggctcctggccttgcctcacgataaattctggtgccaggtgatctttgacgagactctacagaagtgcctggactcctacctgcgctatgtcccccgcaaattcgacgagggggtggcctcagcccctgaggttgttgacatgcagaagcgcctccatcgaagtgtttttctcaccttcctccgcatgtccactcacaaggaatccaaagatcacttcatttccccttctgcgtttggagaaatcctctacaataacttcctctttgacattccaaagatcctggacctctgcgtgctctttggaaaaggcaactcaccactgctccagaagatgataggtgtgtaggatgcaggactgggaggatgcaccaagatggcccccacatgccaaactaaaggttgcaaaggccagcgctttgacagtgcccagggactcagggcgataggggcagggagtcttgggaaattgcttaacagatatatgagtgtcacctcaaaatgactaggtagtgacactacctagggaggtggaaataaaactgtgtaccagacagttccccagggatctggaaattttttgtttttgttttttttcaggagaatcacttgaacctgggaggcagaagttgcagtgtttgagatggagcaagactccatctcaaaaaaaaaaaaaaaaaaaagacaaagccttgctctgtcactcaggcaagagtgcagtggcgcaatcatatttcactgcagcttcacattcctggagtaaagctatccccccaactcagcctcccaggtacctgggactacaggtgcacaccaccatgcctggcgaattaaaaaaaaaatttttttagt

SEQ ID NO: 344781 - DNA, 1053 bp, Homo sapiens
ggggccaggccgagacttcctgtctgctcctgcggaatcgcagtttgaccccggaagtgcgggcgctcagggagctgtcaccgtggtcggcggcggcggcggcggcggcggcacagagccggtggtggagccgccgaggccacctcgtgtatgcagagaccatgtgtgtctgatctgctgggatcctagagctggaacaggccaagtgatattgtgaaaagaacactggacagcaagacaggagaccttggatctgccactcactgactgtgaggtcagtttgtgcctttgtagaaaggagcttgcactgtcagttttctatgaattatctttttccctggtccttctctttttccacgtccttcttcccttcttccatgtccttcttcccttcttctcatgtcgttctattcttccacgtacttcttccctgaagcctagaaaggttgcaaaatcttaacatcctccacaagtgaggaaaggcccatggcttcaaccctcaaaagacttaaaatctggctagagttttaaaaggagtgtcctcatatgtagtcattcttcaaacatttggtgaggccacctctgtaccaatcctgtgctcacagaaaagatagcaagaggagagccctgggcattgtcttcatagagctcacaggctactgagctcacagagctggagccataataaagggaatctacatatttttagccagtacttctcaaagtgggtggaaacaggctgggcacagaggctcacacctgtgagcgctttgggaggttgaggcagcactttgggaggccaagacaggaggatcatttgagcccaggagtttgagaccagcccgagtgatgtagtaagaactcatctatcaaaaaataaaacctgtctctacaaaaaattaaaaaattagctggccgtagtggtgcatgcctgtagtcccagctactcagcaggctgaggtgggaggattgctttagctcaagagttagaggccacagtgagctatgatctcaccacttcactggacaacagagtaagactctgtctcttta

SEQ ID NO: 344782 - DNA, 353 bp, Homo sapiens
taacttggtattttcatgaaatttaaggaaatcgttgacccttcaaattagaatgtatcttctgcttctcttctcttctcaggatgttgaaaaaatgacagtactacattatttgattaaatatcaccaggtataattctctcaaagcagttttcagaagttgttatctgaagagtagattcattatttattacacaatattctccctccttatccccattctcccccacaaaaaactcatcagaatgagcttaatacaagcaagattaagactctgacataggggagctggcaagatggccaaataggaagagctctggtctgcagctcccaatgagaccaatgcagagggt

SEQ ID NO: 344783 - DNA, 201 bp, Homo sapiens
tatcatcaggaggtaatattattgaggctcaaggtctgcctattctcttatcacttactataaataactaatttttcctcattttggtatgagaaaggttaacaatgagtctgtgaataaaacagagattatggaacagatcatcactaccctttttcttattcctttcatcttgacattcaacttggaaataataagaat

SEQ ID NO: 344784 - DNA, 710 bp, Homo sapiens
tctcatcctaccaggcttcggaataatctcccatattgtaacttactactccggaaaaaaagaaccatttggatacataggtatggtctgagctatgatatcaattggcttcctagggtttatcgtgtgagcacaccatatatttacagtaggaatagacgtagacacacgagcatatttcacctccactaccataatcatcgctatccccaccggcgtcaaagtatttagctgactcgccacactccacggaagcaatatgaaatgatctgctgcagtgctctgagccctaggatttatttttcttttcaccgtaggtggcctgactggcattgtattagcaaactcatcactagacatcgtactacacgacacgtactacgttgtagcccacttccactatgtcctatcaataggagctgtatttgccatcataggaggcttcattcactgatttcccctattctcaggctacaccctagaccaaacctacgccaaaatccatttcgctatcatattcatcggcgtaaatctaactttcttcccacaacactttctcggcctatccggaatgccccgacgttactcggactatcccgatgcatacaccacatgaaatatcctatcatctgtaggctcattcatttctctaacagcagtaatattaataattttcatgtggtgtatgcatcggggtagtccgagtaacg

SEQ ID NO: 344785 - DNA, 437 bp, Homo sapiens
ctagaggatccccacctgcaccggtgtccacacctgcaccgggtccatcatccacaaccttaacaatgaacaagatattcgaaaaataggaggactactcaaaaccatacctctcacttcaacctccctcaccattggcagcctagcattagcaggaatacctttcctcacaggtttctactccaaagaccacatcatcgaaaccgcaaacatatcatacacaaacgcctgagcccctatcatattcatcggcgtaaatctaactttcttcccacaacactttctcggcctatccggaatgccccgacgttactcggactatcccgatgcatacaccacatgaaatatcctatcatctgtaggctcattcatttctctaacagcagtaatattaataattttcatgtggtgtatgcatcggggtagtccgagtaacg

SEQ ID NO: 344786 - DNA, 443 bp, Homo sapiens
tcccctgctgctggaaacgctcacagcacaaacacctgctgggttttggtgtcgtatcaatgaaaatctccataattatatcaaaaagctatttattaaaaatatgcttccattttcccactagattttttttttgtatacttcaactagaacaacatatttaccacagactgatgcaggaacagcgaggagaaccctgctgtcttctatgaagccacacattaatggggtttgtacaattttaaggaaatgctcctctaattgctatttgttgttgttgctgttgtttttgggacggagttttactctgtcgcccaggctggagtgcaatggcgccatcttggctcactgcaacctccgcctcccaggttgcgataagctgagatcgcaccactgcactctagcctgagcgacagagcgagactctgactctggtctccaga

SEQ ID NO: 344787 - DNA, 2262 bp, Homo sapiens
aggggagaggaaggaagcgagaccggggctggaggcgggccgaggccgcgagttgagcctcaggaagcagaaggggcgcggaaagatgcgattgacgtcgcaagcgaaccaatgacgagcgagctgtggcaggcctccagccaatgggcagtgaggcctgacgcggggggcggacgctggggccgagggtagcttgagcgcggcggcggcgttgttcagtcagagcgagaacattccagaggtcgcccagctccggcgctgacgggtgtggaccgcggacgtcgctgggacagcccctccccgctgctcggcggcggcacctggcccggccgctcctcgctgcgcttcgcctccgcctcctcggactcggactcgggtttatatcgcgcctcacttcatcccagtcccgggcgagcagcgttgggtttatgtctttatttgacgaaaacgagctgttgcgcagccattggtacctgtattggggaaacatagcatacaagcaagaagcttacagcctcagtggcgaaaattttttcatgtcagagaccgagaactcttgcagtcgtttatgtcatcccttcttctccagacagaagataccaaaaagttgcaatcaaagatctcttcatcttattgataaagccactaataagccaaaatgtctgtcaatgtcaaccgcagcgtgtcagaccagttctatcgctacaagatgccccgtctgattgccaaggttgagggcaaaggcaatggaatcaagacagttatagtcaacatggttgacgttgcaaaggcgcttaatcggcctccaacgtatcccaccaaatattttggttgtgagctgggagcacagacccagtttgatgttaagaatgaccgttacattgtcaatggatctcatgaggcgaataagctgcaagacatgttggatggattcattaaaaaatttgttctctgtcctgaatgtgagaatcctgaaacagatttgcatgtcaatccaaagaagcaaacaataggtaattcttgtaaagcctgtggctatcgaggcatgcttgacacacatcataaactctgcacattcattctcaaaaacccacctgagaatagtgacagtggtacaggaaagaaagaaaaagaaaagaaaaacagaaagggcaaagacaaggaaaatggctccgtatccagcagtgagacaccaccaccaccaccaccaccaaatgaaattaatcctcctccacatacaatggaagaagaggaggatgatgactggggagaagatacaactgaggaagctcaaaggcgtcgaatggatgaaatcagtgaccatgcaaaagttctgacactcagtgatgatttggaaagaacaattgaggagagggtcaatatcctctttgattttgttaagaaaaagaaagaagagggtgttattgattcatctgacaaagaaatcgttgctgaagcagaaagactggatgtaaaagccatgggccctcttgttctaactgaagttctttttaatgagaagattagagaacagattaagaaatacaggcgccatttcctacgattttgtcacaacaacaaaaaagcccaacggtaccttcttcatggtttggagtgtgtggtagcaatgcatcaagctcagcttatctccaagattccacatatcttgaaggagatgtacgatgcagaccttttagaagaagaggtcatcatcagctggtcggaaaaggcctctaagaaatatgtctccaaagaacttgccaaagagattcgtgtcaaagcagaaccatttataaaatggttgaaggaggcagaggaagaatcttctggtggcgaagaagaagatgaagatgagaacattgaggtggtgtattcgaaggctgccagtgtaccgaaagttgagactgtaaagtcagacaacaaggatgacgacatcgatattgatgccatttaaagggatggatgcaacctagcttaacagtataatgctgcaaattttcctccattatcagccagaagtgcaacatgtatgtgcaaaagctaaaatggcttaacatcatgctacactttacactaaaaatctattactgtgagtggtctgttattaagcccaatgagacatctagggagtccatacacatcagtgagcagatgtagtttgcttatttatagcatgtttctttttgaaaaactagtggtggacacatttggatcacatttatacagttataaaaataaaggtttgattttggtcgttcttca

SEQ ID NO: 344788 - DNA, 873 bp, Homo sapiens
aggggagaggaaggaagcgagaccggggctggaggcgggccgaggccgcgagttgagcctcaggaagcagaaggggcgcggaaagatgcgattgacgtcgcaagcgaaccaatgacgagcgagctgtggcaggcctccagccaatgggcagtgaggcctgacgcggggggcggacgctggggccgagggtagcttgagcgcggcggcggcgttgttcagtcagagcgagaacattccagaggtcgcccagctccggcgctgacgggtgtggaccgcggacgtcgctgggacagcccctccccgctgctcggcggcggcacctggcccggccgctcctcgctgcgcttcgcctccgcctcctcggactcggactcgggtttatatcgcgcctcacttcatcccagtcccgggcgagcagcgttgggtttatgtctttatttgacgaaaacgagctgttgcgcagccattggtacctgtattggggaaacatagcatacaagcaagaagcttacagcctcagtggcgaaaattttttcatgtcagagaccgagaactcttgcagtcgtttatgtcatcccttcttctccagacagaagataccaaaaagttgcaatcaaagatctcttcatcttattgataaagccactaataagccaaaatgtctgtcaatgtcaaccgcagcgtgtcagaccagttctatcgctacaagatgccccgtctgattgccaaggttgagggcaaaggcaatggaatcaagacagttatagtcaacatggttgacgttgcaaaggcgcttaatcggcctccaacgtgtaagtaaagcttggaaaagtccacagggcatattatggatagagtcttcaaagtctttga

SEQ ID NO: 344789 - DNA, 5805 bp, Homo sapiens
cccattactaatctttgaagacagtcttcaattaactggccaaagaagaatataaagaagtcaggtgtggtgcaaaatgatagtcagagcgagaacattccagagaggtcgcccagctccggcgctgacgggtgtggaccgcggacgtcgctgggacagcccctccccgctgctcggcggcggcacctggcccggccgctcctcgctgcgcttcgcctccgcctcctcggactcggactcgggtttatatcgcgcctcacttcatcccagtcccgggcgagcagcgttgggtttatgtctttatttgacgaaaacgagctgttgcgcagccattggtacctgtattggggaaacatagcatacaagcaagaagcttacagcctcagtggcgaaaattttttcatgtcagagaccgagaactcttgcagtcgtttatgtcatcccttcttctccagacagaagataccaaaaagttgcaatcaaagatctcttcatcttattgataaagccactaataagccaaaatgtctgtcaatgtcaaccgcagcgtgtcagaccagttctatcgctacaagatgccccgtctgattgccaaggttgagggcaaaggcaatggaatcaagacagttatagtcaacatggttgacgttgcaaaggcgcttaatcggcctccaacgtatcccaccaaatattttggttgtgagctgggagcacagacccagtttgatgttaagaatgaccgttacattgtcaatggatctcatgaggcgaataagctgcaagacatgttggatggattcattaaaaaatttgttctctgtcctgaatgtgagaatcctgaaacagatttgcatgtcaatccaaagaagcaaacaataggtaattcttgtaaagcctgtggctatcgaggcatgcttgacacacatcataaactctgcacattcattctcaaaaacccacctgagaatagtgacagtggtacaggaaagaaagaaaaagaaaagaaaaacagaaagggcaaagacaaggaaaatggctccgtatccagcagtgagacaccaccaccaccaccaccaccaaatgaaattaatcctcctccacatacaatggaagaagaggaggatgatgactggggagaagatacaactgaggaagctcaaaggcgtcgaatggatgaaatcagtgaccatgcaaaagttctgacactcagtgatgatttggaaagaacaattgaggagagggtcaatatcctctttgattttgttaagaaaaagaaagaagagggtgttattgattcatctgacaaagaaatcgttgctgaagcagaaagactggatgtaaaagccatgggccctcttgttctaactgaagttctttttaatgagaagattagagaacagattaagaaatacaggcgccatttcctacgattttgtcacaacaacaaaaaagcccaacggtaccttcttcatggtttggagtgtgtggtagcaatgcatcaagctcagcttatctccaagattccacatatcttgaaggagatgtacgatgcagaccttttagaagaagaggtcatcatcagctggtcggaaaaggcctctaagaaatatgtctccaaagaacttgccaaagagattcgtgtcaaagcagaaccatttataaaatggttgaaggaggcagaggaagaatcttctggtggcgaagaagaagatgaagatgagaacattgaggtggtgtattcgaaggctgccagtgtaccgaaagttgagactgtaaagtcagacaacaaggatgacgacatcgatattgatgccatttaaagggatggatgcaacctagcttaacagtataatgctgcaaattttcctccattatcagccagaagtgcaacatgtatgtgcaaaagctaaaatggcttaacatcatgctacactttacactaaaaatctattactgtgagtggtctgttattaagcccaatgagacatctagggagtccatacacatcagtgagcagatgtagtttgcttatttatagcatgtttctttttgaaaaactagtggtggacacatttggatcacatttatacagttataaaaataaaggtttgattttggtcgttcttcagatgtttggctctgaatgacttaagctgaagtaactggctccttactttaaatgttctgccatcatttcacctgatgagcattcttggagcctgccagatattgttaggtcctggggctgcaaagaggtcctcaacaggatgtaaagcaaacttaattgtaattaatttattcagcccattaagaaagtactaaagttttatctctgtagttcctcaaattggcatctggtaatgtacattgtgaggtagactgataatgaaatgacagtgcaacatcttaaccaagaagtaaatatgacctcagtgtcctataaataatgtaagagcaggatttgaaacttggagagctgttttctcatttcatgtacacttgccccaaattgtctttgaagtcgtgtgcattgcacgttggatgagccagggaaattattacattaacaagcattttgtgtgtacgtagtagttactttgtactgagagaacttgctttggggtgcaattaataaactgattttatttgggagaaacaaggaagggtgcacttaactagcaacctaagcatgatttttcagcttttgcccttagggtttaaattacaattccaaaatgttagacatactgtattttttcgttcagtgtggctttaattttcccctcttgcagtttgttctgtaatgccttttacatttggacacatagtttatgctttttagattttggttgctttcttgccaaaataagtgttaactgtgtttcaaacttgattttctttcctttttcttttttttttcttccagaatgtcttatttaaaaagaaagctaaaagcatacttctaagtcagagcctctattttggtgtaagacttgggatattttttacttcacattgaatatagccaggcacccaagaagtctgatggccacctgagtgcaggtgacaaggacctgacagagcccatgcagggctttagatttggacacacaagagttgataacttcctcatgaactccttgcctgatctaaactcatattatgggttctgactgtttgagtaatcatcttcaaggttaaacctcttggcagttacccttttcacaaagtgcacagtgggaatcgagaatcgatagggttaattttggagcagtggcttataccattcacctctgtttttttgtgattatttcacagataatgagaccttaataacaaataggcgtaaaaaaattttcacattgaaatgatagaaacatttgatgtaataaaacttggttggcttgatattttaaggaattgaaacctagcaatcttattggagagacaagaattggtctccagctgcctttgatcaagattcgggtgcaagtggagcaggagccatatacctggagggaatgtgctttgtcacaccaaagaggatttttttttcttcaaacttgtatgttgcctaggtttcaaattctttgccgcaaggctgatctgctttcattaactggaattctgtaggagatactggtgacctaagctaagttgcactcagcatactcagtgtcaagctaatgaggttctattataaaggttctacttttaatctgagggaaaacatgttcagggcttctagaacactaaaaaatttggcttaaaccagtgttcagtctggtgccaaacttcgaatggaatacaaattcacataatctgaactttgttcacaggttatcctaatagagtaattcttcactttgctctattgaactgtcttaaggatttgtttaaacagctaagttacttgattaaaataatgataaaattgtattttgtctttgctttaatattaaagttaacaagttttcattttataatgagatcaaagcattggaatctgccctgttttgtagccgttgctttggatttgtgttggatgtatcctgcagttacacttgccagccccactcacaaaagttgttcatttcattgggtcactggctttatttgctagtcttgtctgtgaactgagcatctgcctcagttttattacttgaaatcttggcaggtgcttaatagggaacatacatacagctatgtaactgtgaataattgtatatatctctagttaagaatgagggaatggggaggtttgctttctaaacaagtgcattctgaaattgacttaaaaatttttagtgtgggtcctaaagtttagagatgggcaaggaggtctctaatccaccgcttcccgcttgagaagggaggggtatcaaaattgagccccaagctgtttgttccagtgtaccaagcactgactttatgcctttggcctggagatggcagaagtgaaagctggccatctgcaaaaagcagataagtgagtttgaaccttttgcattttgttagctcagtcagtcctcatcgtggtcctgaggcataggtactgttgtaccaaggtcacttatctaacaaaataacccttcatgtattttaaatttatttgacaagtctgcagacaatccttatctaaccagctattttcttaattgctacagcttgacctaccagtattccggagtaaccagcaaatgcaaagttgaccttgttcctgcatcatctttttgatggttcaaatttcagcctccctgactactacaaagccagagcagtcttagtaccagaaacagtgttgcactttcgttgcatgtgctgtgtgaccccaaggggacagggagtcactttgggtcatctctgtccccagtacagatcttggattcataggtggacattccataagtggggtgacagcaaatgacttgcaggtagtctcattgtaggtttgtgcaccagagtgaccctgtgagcctttgttaataggttgggagctcagggtgtttatgtccacctgtctggtctagccaaacagtttttttctgggaatcaaatttctgtggtttttatggccagaaattttaaggacttgtgtgtgctgggatatgagaatagaagctacagagttcttttcttgggacctagactgggaggtgcaatgtcaggacctccaggtgaatggtaggatctgagttgaccctgcagttcggttatgcagtcaattatttctttttaagaggaggaggattcacttgggtgttgggatcaaatttggattctgtcccaggccttactgtaaaactaggggattgcctttccatatctgctgggggtggagacccttatgtgcagcactcaatcccactggaagcctaatgctgcagtcagaagcaatgcctggctggggcagtaggggaaattccacccaattttgctatgagcctaaaacctctttaaaaacggtcagttaactaaaaaataaaaatcaagtctttaggagagtagaaaacacaattaactaaaaagcagggacatctgaaagagacgtattaagttaacatttttaaaaatccaaatgaaagtaaatggaataaatgtatcaggtaaaggacaagttgtaagcttggatttttaggtctagcaatacactgtttacaagagcatcacctaaaatgtgacaaaagatgttgaaaggatgaaaaaaggtatagtagacatacactaaccaaaaatgtagctctttgaatctcagaaaaaagtagattttaataaagtgtgaaagttgtcaatcaaaaaaaaaaa

SEQ ID NO: 344790 - DNA, 3927 bp, Homo sapiens
ctaggtcaggccggtttaatcggccgagggttcagtcagagcgagaacattccagaggtcgcccagctccggcgctgacgggtgtggaccgcggacgtcgctgggacagcccctccccgctgctcggcggcggcacctggcccggccgctcctcgctgcgcttcgcctccgcctcctcggactcggactcgggtttatatcgcgcctcacttcatcccagtcccgggcgagcagcgttgggtttatgtctttatttgacgaaaacgagctgttgcgcagccattggtacctgtattggggaaacatagcatacaagcaagaagcttacagcctcagtggcgaaaattttttcatgtcagagaccgagaactcttgcagtcgtttatgtcatcccttcttctccagacagaagataccaaaaagttgcaatcaaagatctcttcatcttattgataaagccactaataagccaaaatgtctgtcaatgtcaaccgcagcgtgtcagaccagttctatcgctacaagatgccccgtctgattgccaaggttgagggcaaaggcaatggaatcaagacagttatagtcaacatggttgacgttgcaaaggcgcttaatcggcctccaacgtatcccaccaaatattttggttgtgagctgggagcacagacccagtttgatgttaagaatgaccgttacattgtcaatggatctcatgaggcgaataagctgcaagacatgttggatggattcattaaaaaatttgttctctgtcctgaatgtgagaatcctgaaacagatttgcatgtcaatccaaagaagcaaacaataggtaattcttgtaaagcctgtggctatcgaggcatgcttgacacacatcataaactctgcacattcattctcaaaaacccacctgagaatagtgacagtggtacaggaaagaaagaaaaagaaaagaaaaacagaaagggcaaagacaaggaaaatggctccgtatccagcagtgagacaccaccaccaccaccaccaccaaatgaaattaatcctcctccacatacaatggaagaagaggaggatgatgactggggagaagatacaactgaggaagctcaaaggcgtcgaatggatgaaatcagtgaccatgcaaaagttctgacactcagtgatgatttggaaagaacaattgaggagagggtcaatatcctctttgattttgttaagaaaaagaaagaagagggtgttattgattcatctgacaaagaaatcgttgctgaagcagaaagactggatgtaaaagccatgggccctcttgttctaactgaagttctttttaatgagaagattagagaacagattaagaaatacaggcgccatttcctacgattttgtcacaacaacaaaaaagcccaacggtaccttcttcatggtttggagtgtgtggtagcaatgcatcaagctcagcttatctccaagattccacatatcttgaaggagatgtacgatgcagaccttttagaagaagaggtcatcatcagctggtcggaaaaggcctctaagaaatatgtctccaaagaacttgccaaagagattcgtgtcaaagcagaaccatttataaaatggttgaaggaggcagaggaagaatcttctggtggcgaagaagaagatgaagatgagaacattgaggtggtgtattcgaaggctgccagtgtaccgaaagttgagactgtaaagtcagacaacaaggatgacgacatcgatattgatgccatttaaagggatggatgcaacctagcttaacagtataatgctgcaaattttcctccattatcagccagaagtgcaacatgtatgtgcaaaagctaaaatggcttaacatcatgctacactttacactaaaaatctattactgtgagtggtctgttattaagcccaatgagacatctagggagtccatacacatcagtgagcagatgtagtttgcttatttatagcatgtttctttttgaaaaactagtggtggacacatttggatcacatttatacagttataaaaataaaggtttgattttggtcgttcttcagatgtttggctctgaatgacttaagctgaagtaactggctccttactttaaatgttctgccatcatttcacctgatgagcattcttggagcctgccagatattgttaggtcctggggctgcaaagaggtcctcaacaggatgtaaagcaaacttaattgtaattaatttattcagcccattaagaaagtactaaagttttatctctgtagttcctcaaattggcatctggtaatgtacattgtgaggtagactgataatgaaatgacagtgcaacatcttaaccaagaagtaaatatgacctcagtgtcctataaataatgtaagagcaggatttgaaacttggagagctgttttctcatttcatgtacacttgccccaaattgtctttgaagtcgtgtgcattgcacgttggatgagccagggaaattattacattaacaagcattttgtgtgtacgtagtagttactttgtactgagagaacttgctttggggtgcaattaataaactgattttatttgggagaaacaaggaagggtgcacttaactagcaacctaagcatgatttttcagcttttgcccttagggtttaaattacaattccaaaatgttagacatactgtattttttcgttcagtgtggctttaattttcccctcttgcagtttgttctgtaatgccttttacatttggacacatagtttatgctttttagattttggttgctttcttgccaaaataagtgttaactgtgtttcaaacttgattttctttcctttttcttttttttttcttccagaatgtcttatttaaaaagaaagctaaaagcatacttctaagtcagagcctctattttggtgtaagacttgggatattttttacttcacattgaatatagccaggcacccaagaagtctgatggccacctgagtgcaggtgacaaggacctgacagagcccatgcagggctttagatttggacacacaagagttgataacttcctcatgaactccttgcctgatctaaactcatattatgggttctgactgtttgagtaatcatcttcaaggttaaacctcttggcagttacccttttcacaaagtgcacagtgggaatcgagaatcgatagggttaattttggagcagtggcttataccattcacctctgtttttttgtgattatttcacagataatgagaccttaataacaaataggcgtaaaaaaattttcacattgaaatgatagaaacatttgatgtaataaaacttggttggcttgatattttaaggaattgaaacctagcaatcttattggagagacaagaattggtctccagctgcctttgatcaagattcgggtgcaagtggagcaggagccatatacctggagggaatgtgctttgtcacaccaaagaggatttttttttcttcaaacttgtatgttgcctaggtttcaaattctttgccgcaaggctgatctgctttcattaactggaattctgtaggagatactggtgacctaagctaagttgcactcagcatactcagtgtcaagctaatgaggttctattataaaggttctacttttaatctgagggaaaacatgttcagggcttctagaacactaaaaaatttggcttaaaccagtgttcagtctggtgccaaacttcgaatggaatacaaattcacataatctgaactttgttcacaggttatcctaatagagtaattcttcactttgctctattgaactgtcttaaggatttgtttaaacagctaagttacttgattaaaataatgataaaattgtaaaaaaaaaaagcaaacagacaagcattcctggccgtcg

SEQ ID NO: 344791 - DNA, 3944 bp, Homo sapiens
ctaggtcaggccggtttaatcggccgagggttcagtcagagcgagaacattccagaggtcgcccagctccggcgctgacgggtgtggaccgcggacgtcgctgggacagcccctccccgctgctcggcggcggcacctggcccggccgctcctcgctgcgcttcgcctccgcctcctcggactcggactcgggtttatatcgcgcctcacttcatcccagtcccgggcgagcagcgttgggtttatgtctttatttgacgaaaacgagctgttgcgcagccattggtacctgtattggggaaacatagcatacaagcaagaagcttacagcctcagtggcgaaaattttttcatgtcagagaccgagaactcttgcagtcgtttatgtcatcccttcttctccagacagaagataccaaaaagttgcaatcaaagatctcttcatcttattgataaagccactaataagccaaaatgtctgtcaatgtcaaccgcagcgtgtcagaccagttctatcgctacaagatgccccgtctgattgccaaggttgagggcaaaggcaatggaatcaagacagttatagtcaacatggttgacgttgcaaaggcgcttaatcggcctccaacgtatcccaccaaatattttggttgtgagctgggagcacagacccagtttgatgttaagaatgaccgttacattgtcaatggatctcatgaggcgaataagctgcaagacatgttggatggattcattaaaaaatttgttctctgtcctgaatgtgagaatcctgaaacagatttgcatgtcaatccaaagaagcaaacaataggtaattcttgtaaagcctgtggctatcgaggcatgcttgacacacatcataaactctgcacattcattctcaaaaacccacctgagaatagtgacagtggtacaggaaagaaagaaaaagaaaagaaaaacagaaagggcaaagacaaggaaaatggctccgtatccagcagtgagacaccaccaccaccaccaccaccaaatgaaattaatcctcctccacatacaatggaagaagaggaggatgatgactggggagaagatacaactgaggaagctcaaaggcgtcgaatggatgaaatcagtgaccatgcaaaagttctgacactcagtgatgatttggaaagaacaattgaggagagggtcaatatcctctttgattttgttaagaaaaagaaagaagagggtgttattgattcatctgacaaagaaatcgttgctgaagcagaaagactggatgtaaaagccatgggccctcttgttctaactgaagttctttttaatgagaagattagagaacagattaagaaatacaggcgccatttcctacgattttgtcacaacaacaaaaaagcccaacggtaccttcttcatggtttggagtgtgtggtagcaatgcatcaagctcagcttatctccaagattccacatatcttgaaggagatgtacgatgcagaccttttagaagaagaggtcatcatcagctggtcggaaaaggcctctaagaaatatgtctccaaagaacttgccaaagagattcgtgtcaaagcagaaccatttataaaatggttgaaggaggcagaggaagaatcttctggtggcgaagaagaagatgaagatgagaacattgaggtggtgtattcgaaggctgccagtgtaccgaaagttgagactgtaaagtcagacaacaaggatgacgacatcgatattgatgccatttaaagggatggatgcaacctagcttaacagtataatgctgcaaattttcctccattatcagccagaagtgcaacatgtatgtgcaaaagctaaaatggcttaacatcatgctacactttacactaaaaatctattactgtgagtggtctgttattaagcccaatgagacatctagggagtccatacacatcagtgagcagatgtagtttgcttatttatagcatgtttctttttgaaaaactagtggtggacacatttggatcacatttatacagttataaaaataaaggtttgattttggtcgttcttcagatgtttggctctgaatgacttaagctgaagtaactggctccttactttaaatgttctgccatcatttcacctgatgagcattcttggagcctgccagatattgttaggtcctggggctgcaaagaggtcctcaacaggatgtaaagcaaacttaattgtaattaatttattcagcccattaagaaagtactaaagttttatctctgtagttcctcaaattggcatctggtaatgtacattgtgaggtagactgataatgaaatgacagtgcaacatcttaaccaagaagtaaatatgacctcagtgtcctataaataatgtaagagcaggatttgaaacttggagagctgttttctcatttcatgtacacttgccccaaattgtctttgaagtcgtgtgcattgcacgttggatgagccagggaaattattacattaacaagcattttgtgtgtacgtagtagttactttgtactgagagaacttgctttggggtgcaattaataaactgattttatttgggagaaacaaggaagggtgcacttaactagcaacctaagcatgatttttcagcttttgcccttagggtttaaattacaattccaaaatgttagacatactgtattttttcgttcagtgtggctttaattttcccctcttgcagtttgttctgtaatgccttttacatttggacacatagtttatgctttttagattttggttgctttcttgccaaaataagtgttaactgtgtttcaaacttgattttctttcctttttcttttttttttcttccagaatgtcttatttaaaaagaaagctaaaagcatacttctaagtcagagcctctattttggtgtaagacttgggatattttttacttcacattgaatatagccaggcacccaagaagtctgatggccacctgagtgcaggtgacaaggacctgacagagcccatgcagggctttagatttggacacacaagagttgataacttcctcatgaactccttgcctgatctaaactcatattatgggttctgactgtttgagtaatcatcttcaaggttaaacctcttggcagttacccttttcacaaagtgcacagtgggaatcgagaatcgatagggttaattttggagcagtggcttataccattcacctctgtttttttgtgattatttcacagataatgagaccttaataacaaataggcgtaaaaaaattttcacattgaaatgatagaaacatttgatgtaataaaacttggttggcttgatattttaaggaattgaaacctagcaatcttattggagagacaagaattggtctccagctgcctttgatcaagattcgggtgcaagtggagcaggagccatatacctggagggaatgtgctttgtcacaccaaagaggatttttttttcttcaaacttgtatgttgcctaggtttcaaattctttgccgcaaggctgatctgctttcattaactggaattctgtaggagatactggtgacctaagctaagttgcactcagcatactcagtgtcaagctaatgaggttctattataaaggttctacttttaatctgagggaaaacatgttcagggcttctagaacactaaaaaatttggcttaaaccagtgttcagtctggtgccaaacttcgaatggaatacaaattcacataatctgaactttgttcacaggttatcctaatagagtaattcttcactttgctctattgaactgtcttaaggatttgtttaaacagctaagttacttgattaaaataatgataaaattgtattttgtctttgctttaatattaaagttaacaagttttcattttataatgagatca

SEQ ID NO: 344792 - DNA, 4226 bp, Homo sapiens
ctaggtcaggccggtttaatcggccgagggttcagtcagagcgagaacattccagaggtcgcccagctccggcgctgacgggtgtggaccgcggacgtcgctgggacagcccctccccgctgctcggcggcggcacctggcccggccgctcctcgctgcgcttcgcctccgcctcctcggactcggactcgggtttatatcgcgcctcacttcatcccagtcccgggcgagcagcgttgggtttatgtctttatttgacgaaaacgagctgttgcgcagccattggtacctgtattggggaaacatagcatacaagcaagaagcttacagcctcagtggcgaaaattttttcatgtcagagaccgagaactcttgcagtcgtttatgtcatcccttcttctccagacagaagataccaaaaagttgcaatcaaagatctcttcatcttattgataaagccactaataagccaaaatgtctgtcaatgtcaaccgcagcgtgtcagaccagttctatcgctacaagatgccccgtctgattgccaaggttgagggcaaaggcaatggaatcaagacagttatagtcaacatggttgacgttgcaaaggcgcttaatcggcctccaacgtatcccaccaaatattttggttgtgagctgggagcacagacccagtttgatgttaagaatgaccgttacattgtcaatggatctcatgaggcgaataagctgcaagacatgttggatggattcattaaaaaatttgttctctgtcctgaatgtgagaatcctgaaacagatttgcatgtcaatccaaagaagcaaacaataggtaattcttgtaaagcctgtggctatcgaggcatgcttgacacacatcataaactctgcacattcattctcaaaaacccacctgagaatagtgacagtggtacaggaaagaaagaaaaagaaaagaaaaacagaaagggcaaagacaaggaaaatggctccgtatccagcagtgagacaccaccaccaccaccaccaccaaatgaaattaatcctcctccacatacaatggaagaagaggaggatgatgactggggagaagatacaactgaggaagctcaaaggcgtcgaatggatgaaatcagtgaccatgcaaaagttctgacactcagtgatgatttggaaagaacaattgaggagagggtcaatatcctctttgattttgttaagaaaaagaaagaagagggtgttattgattcatctgacaaagaaatcgttgctgaagcagaaagactggatgtaaaagccatgggccctcttgttctaactgaagttctttttaatgagaagattagagaacagattaagaaatacaggcgccatttcctacgattttgtcacaacaacaaaaaagcccaacggtaccttcttcatggtttggagtgtgtggtagcaatgcatcaagctcagcttatctccaagattccacatatcttgaaggagatgtacgatgcagaccttttagaagaagaggtcatcatcagctggtcggaaaaggcctctaagaaatatgtctccaaagaacttgccaaagagattcgtgtcaaagcagaaccatttataaaatggttgaaggaggcagaggaagaatcttctggtggcgaagaagaagatgaagatgagaacattgaggtggtgtattcgaaggctgccagtgtaccgaaagttgagactgtaaagtcagacaacaaggatgacgacatcgatattgatgccatttaaagggatggatgcaacctagcttaacagtataatgctgcaaattttcctccattatcagccagaagtgcaacatgtatgtgcaaaagctaaaatggcttaacatcatgctacactttacactaaaaatctattactgtgagtggtctgttattaagcccaatgagacatctagggagtccatacacatcagtgagcagatgtagtttgcttatttatagcatgtttctttttgaaaaactagtggtggacacatttggatcacatttatacagttataaaaataaaggtttgattttggtcgttcttcagatgtttggctctgaatgacttaagctgaagtaactggctccttactttaaatgttctgccatcatttcacctgatgagcattcttggagcctgccagatattgttaggtcctggggctgcaaagaggtcctcaacaggatgtaaagcaaacttaattgtaattaatttattcagcccattaagaaagtactaaagttttatctctgtagttcctcaaattggcatctggtaatgtacattgtgaggtagactgataatgaaatgacagtgcaacatcttaaccaagaagtaaatatgacctcagtgtcctataaataatgtaagagcaggatttgaaacttggagagctgttttctcatttcatgtacacttgccccaaattgtctttgaagtcgtgtgcattgcacgttggatgagccagggaaattattacattaacaagcattttgtgtgtacgtagtagttactttgtactgagagaacttgctttggggtgcaattaataaactgattttatttgggagaaacaaggaagggtgcacttaactagcaacctaagcatgatttttcagcttttgcccttagggtttaaattacaattccaaaatgttagacatactgtattttttcgttcagtgtggctttaattttcccctcttgcagtttgttctgtaatgccttttacatttggacacatagtttatgctttttagattttggttgctttcttgccaaaataagtgttaactgtgtttcaaacttgattttctttcctttttcttttttttttcttccagaatgtcttatttaaaaagaaagctaaaagcatacttctaagtcagagcctctattttggtgtaagacttgggatattttttacttcacattgaatatagccaggcacccaagaagtctgatggccacctgagtgcaggtgacaaggacctgacagagcccatgcagggctttagatttggacacacaagagttgataacttcctcatgaactccttgcctgatctaaactcatattatgggttctgactgtttgagtaatcatcttcaaggttaaacctcttggcagttacccttttcacaaagtgcacagtgggaatcgagaatcgatagggttaattttggagcagtggcttataccattcacctctgtttttttgtgattatttcacagataatgagaccttaataacaaataggcgtaaaaaaattttcacattgaaatgatagaaacatttgatgtaataaaacttggttggcttgatattttaaggaattgaaacctagcaatcttattggagagacaagaattggtctccagctgcctttgatcaagattcgggtgcaagtggagcaggagccatatacctggagggaatgtgctttgtcacaccaaagaggatttttttttcttcaaacttgtatgttgcctaggtttcaaattctttgccgcaaggctgatctgctttcattaactggaattctgtaggagatactggtgacctaagctaagttgcactcagcatactcagtgtcaagctaatgaggttctattataaaggttctacttttaatctgagggaaaacatgttcagggcttctagaacactaaaaaatttggcttaaaccagtgttcagtctggtgccaaacttcgaatggaatacaaattcacataatctgaactttgttcacaggttatcctaatagagtaattcttcactttgctctattgaactgtcttaaggatttgtttaaacagctaagttacttgattaaaataatgataaaattgtaaaaaaaaaaaaaaaaaaaaaaaaaaaggggggggggggaaaaaaatttcccggggggggccccattttaggtgtcaccgctttttgtttgtcaaagagggggcggccatagagggggggcgaaattaaagaggagaagacgggggcgcggtttaaacagagcctgtagaggggaaaacggcagcaggcggaattggggagaagacaccttattgggggcgggtgcaaaatttgtggcagacaacacctagagaattaaaggtccgaggaactaaattgaggcgtaggggttaagcacggcatttgtgagggaagattagctacggaatgatgacatc

SEQ ID NO: 344793 - DNA, 5616 bp, Homo sapiens
ctaggtcaggccggtttaatcggccgagggttcagtcagagcgagaacattccagaggtcgcccagctccggcgctgacgggtgtggaccgcggacgtcgctgggacagcccctccccgctgctcggcggcggcacctggcccggccgctcctcgctgcgcttcgcctccgcctcctcggactcggactcgggtttatatcgcgcctcacttcatcccagtcccgggcgagcagcgttgggtttatgtctttatttgacgaaaacgacagaagataccaaaaagttgcaatcaaagatctcttcatcttattgataaagccactaataagccaaaatgtctgtcaatgtcaaccgcagcgtgtcagaccagttctatcgctacaagatgccccgtctgattgccaaggttgagggcaaaggcaatggaatcaagacagttatagtcaacatggttgacgttgcaaaggcgcttaatcggcctccaacgtatcccaccaaatattttggttgtgagctgggagcacagacccagtttgatgttaagaatgaccgttacattgtcaatggatctcatgaggcgaataagctgcaagacatgttggatggattcattaaaaaatttgttctctgtcctgaatgtgagaatcctgaaacagatttgcatgtcaatccaaagaagcaaacaataggtaattcttgtaaagcctgtggctatcgaggcatgcttgacacacatcataaactctgcacattcattctcaaaaacccacctgagaatagtgacagtggtacaggaaagaaagaaaaagaaaagaaaaacagaaagggcaaagacaaggaaaatggctccgtatccagcagtgagacaccaccaccaccaccaccaccaaatgaaattaatcctcctccacatacaatggaagaagaggaggatgatgactggggagaagatacaactgaggaagctcaaaggcgtcgaatggatgaaatcagtgaccatgcaaaagttctgacactcagtgatgatttggaaagaacaattgaggagagggtcaatatcctctttgattttgttaagaaaaagaaagaagagggtgttattgattcatctgacaaagaaatcgttgctgaagcagaaagactggatgtaaaagccatgggccctcttgttctaactgaagttctttttaatgagaagattagagaacagattaagaaatacaggcgccatttcctacgattttgtcacaacaacaaaaaagcccaacggtaccttcttcatggtttggagtgtgtggtagcaatgcatcaagctcagcttatctccaagattccacatatcttgaaggagatgtacgatgcagaccttttagaagaagaggtcatcatcagctggtcggaaaaggcctctaagaaatatgtctccaaagaacttgccaaagagattcgtgtcaaagcagaaccatttataaaatggttgaaggaggcagaggaagaatcttctggtggcgaagaagaagatgaagatgagaacattgaggtggtgtattcgaaggctgccagtgtaccgaaagttgagactgtaaagtcagacaacaaggatgacgacatcgatattgatgccatttaaagggatggatgcaacctagcttaacagtataatgctgcaaattttcctccattatcagccagaagtgcaacatgtatgtgcaaaagctaaaatggcttaacatcatgctacactttacactaaaaatctattactgtgagtggtctgttattaagcccaatgagacatctagggagtccatacacatcagtgagcagatgtagtttgcttatttatagcatgtttctttttgaaaaactagtggtggacacatttggatcacatttatacagttataaaaataaaggtttgattttggtcgttcttcagatgtttggctctgaatgacttaagctgaagtaactggctccttactttaaatgttctgccatcatttcacctgatgagcattcttggagcctgccagatattgttaggtcctggggctgcaaagaggtcctcaacaggatgtaaagcaaacttaattgtaattaatttattcagcccattaagaaagtactaaagttttatctctgtagttcctcaaattggcatctggtaatgtacattgtgaggtagactgataatgaaatgacagtgcaacatcttaaccaagaagtaaatatgacctcagtgtcctataaataatgtaagagcaggatttgaaacttggagagctgttttctcatttcatgtacacttgccccaaattgtctttgaagtcgtgtgcattgcacgttggatgagccagggaaattattacattaacaagcattttgtgtgtacgtagtagttactttgtactgagagaacttgctttggggtgcaattaataaactgattttatttgggagaaacaaggaagggtgcacttaactagcaacctaagcatgatttttcagcttttgcccttagggtttaaattacaattccaaaatgttagacatactgtattttttcgttcagtgtggctttaattttcccctcttgcagtttgttctgtaatgccttttacatttggacacatagtttatgctttttagattttggttgctttcttgccaaaataagtgttaactgtgtttcaaacttgattttctttcctttttcttttttttttcttccagaatgtcttatttaaaaagaaagctaaaagcatacttctaagtcagagcctctattttggtgtaagacttgggatattttttacttcacattgaatatagccaggcacccaagaagtctgatggccacctgagtgcaggtgacaaggacctgacagagcccatgcagggctttagatttggacacacaagagttgataacttcctcatgaactccttgcctgatctaaactcatattatgggttctgactgtttgagtaatcatcttcaaggttaaacctcttggcagttacccttttcacaaagtgcacagtgggaatcgagaatcgatagggttaattttggagcagtggcttataccattcacctctgtttttttgtgattatttcacagataatgagaccttaataacaaataggcgtaaaaaaattttcacattgaaatgatagaaacatttgatgtaataaaacttggttggcttgatattttaaggaattgaaacctagcaatcttattggagagacaagaattggtctccagctgcctttgatcaagattcgggtgcaagtggagcaggagccatatacctggagggaatgtgctttgtcacaccaaagaggatttttttttcttcaaacttgtatgttgcctaggtttcaaattctttgccgcaaggctgatctgctttcattaactggaattctgtaggagatactggtgacctaagctaagttgcactcagcatactcagtgtcaagctaatgaggttctattataaaggttctacttttaatctgagggaaaacatgttcagggcttctagaacactaaaaaatttggcttaaaccagtgttcagtctggtgccaaacttcgaatggaatacaaattcacataatctgaactttgttcacaggttatcctaatagagtaattcttcactttgctctattgaactgtcttaaggatttgtttaaacagctaagttacttgattaaaataatgataaaattgtattttgtctttgctttaatattaaagttaacaagttttcattttataatgagatcaaagcattggaatctgccctgttttgtagccgttgctttggatttgtgttggatgtatcctgcagttacacttgccagccccactcacaaaagttgttcatttcattgggtcactggctttatttgctagtcttgtctgtgaactgagcatctgcctcagttttattacttgaaatcttggcaggtgcttaatagggaacatacatacagctatgtaactgtgaataattgtatatatctctagttaagaatgagggaatggggaggtttgctttctaaacaagtgcattctgaaattgacttaaaaatttttagtgtgggtcctaaagtttagagatgggcaaggaggtctctaatccaccgcttcccgcttgagaagggaggggtatcaaaattgagccccaagctgtttgttccagtgtaccaagcactgactttatgcctttggcctggagatggcagaagtgaaagctggccatctgcaaaaagcagataagtgagtttgaaccttttgcattttgttagctcagtcagtcctcatcgtggtcctgaggcataggtactgttgtaccaaggtcacttatctaacaaaataacccttcatgtattttaaatttatttgacaagtctgcagacaatccttatctaaccagctattttcttaattgctacagcttgacctaccagtattccggagtaaccagcaaatgcaaagttgaccttgttcctgcatcatctttttgatggttcaaatttcagcctccctgactactacaaagccagagcagtcttagtaccagaaacagtgttgcactttcgttgcatgtgctgtgtgaccccaaggggacagggagtcactttgggtcatctctgtccccagtacagatcttggattcataggtggacattccataagtggggtgacagcaaatgacttgcaggtagtctcattgtaggtttgtgcaccagagtgaccctgtgagcctttgttaataggttgggagctcagggtgtttatgtccacctgtctggtctagccaaacagtttttttctgggaatcaaatttctgtggtttttatggccagaaattttaaggacttgtgtgtgctgggatatgagaatagaagctacagagttcttttcttgggacctagactgggaggtgcaatgtcaggacctccaggtgaatggtaggatctgagttgaccctgcagttcggttatgcagtcaattatttctttttaagaggaggaggattcacttgggtgttgggatcaaatttggattctgtcccaggccttactgtaaaactaggggattgcctttccatatctgctgggggtggagacccttatgtgcagcactcaatcccactggaagcctaatgctgcagtcagaagcaatgcctggctggggcagtaggggaaattccacccaattttgctatgagcctaaaacctctttaaaaacggtcagttaactaaaaaataaaaatcaagtctttaggagagtagaaaacacaattaactaaaaagcagggacatctgaaagagacgtattaagttaacatttttaaaaatccaaatgaaagtaaatggaataaatgtatcaggtaaaggacaagttgtaagcttggatttttaggtctagcaatacactgtttacaagagcatcacctaaaatgtgacaaaagatgttgaaaggatgaaaaaaggtatagtagacatacactaaccaaaaatgtagctctttgaatctcagaaaaaagtagattttaataaagtgtgaaagttgtcaatcaaaaaaaaaaa

SEQ ID NO: 344794 - DNA, 5595 bp, Homo sapiens
ctaggtcaggccggtttaatcggccgagggttcagtcagagcgagaacattccagaggtcgcccagctccggcgctgacgggtgtggaccgcggacgtcgctgggacagcccctccccgctgctcggcggcggcacctggcccggccgctcctcgctgcgcttcgcctccgcctcctcggactcggactcgggtttatatcgcgcctcacttcatcccagtcccgggcgagcagcgttgggtttatgtctttatttgacgaaaacgagctgttgcgcagccattggtacctgtattggggaaacatagcatacaagcaagaagcttacagcctcagtggcgaaaattttttcatgtcagagaccgagaactcttgcagtcgtttatgtcatcccttcttctccagacagaagataccaaaaagttgcaatcaaagatctcttcatcttattgataaagccactaataagccaaaatgtctgtcaatgtcaaccgcagcgtgtcagaccagttctatcgctacaagatgccccgtctgattgccaaggttgagggcaaaggcaatggaatcaagacagttatagtcaacatggttgacgttgcaaaggcgcttaatcggcctccaacgtatcccaccaaatattttggttgtgagctgggagcacagacccagtttgatgttaagaatgaccgttacattgtcaatggatctcatgaggcgaataagctgcaagacatgttggatggattcattaaaaaatttgttctctgtcctgaatgtgagaatcctgaaacagatttgcatgtcaatccaaagaagcaaacaataggtaattcttgtaaagcctgtggctatcgaggcatgcttgacacacatcataaactctgcacattcattctcaaaaacccacctgagaatagtgacagtggtacaggaaagaaagaaaaagaaaagaaaaacagaaagggcaaagacaaggaaaatggctccgtatccagcagtgagacaccaccaccaccaccaccaccaaatgaaattaatcctcctccacatacaatggaagaagaggaggatgatgactggggagaagatacaactgaggaagctcaaaggcgtcgaatggatgaaatcagtgaccatgcaaaagttctgacactcagtgatgatttggaaagaacaattgaggagagggtcaatatcctctttgattttgttaagaaaaagaaagaagagggtgttattgattcatctgacaaagaaatcgttgctgaagcagaaagactggatgtaaaagccatgggccctcttgttctaactgaagttctttttaatgagaagattagagaacagattaagaaatacaggcgccatttcctacgattttgtcacaacaacaaaaaagcccaacggtaccttcttcatggtttggagtgtgtggtagcaatgcatcaagctcagcttatctccaagattccacatatcttgaaggagatgtacgatgcagaccttttagaagaagaggtcatcatcagctggtcggaaaaggcctctaagaaatatgtctccaaagaacttgccaaagagattcgtgtcaaagcagaaccatttataaaatggttgaaggaggcagaggaagaatcttctggtggcgaagaagaagatgaagatgagaacattgaggtggtgtattcgaaggctgccagtgtaccgaaagttgagactgtaaagtcagacaacaaggatgacgacatcgatattgatgccatttaaagggatggatgcaacctagcttaacagtataatgctgcaaattttcctccattatcagccagaagtgcaacatgtatgtgcaaaagctaaaatggcttaacatcatgctacactttacactaaaaatctattactgtgagtggtctgttattaagcccaatgagacatctagggagtccatacacatcagtgagcagatgtagtttgcttatttatagcatgtttctttttgaaaaactagtggtggacacatttggatcacatttatacagttataaaaataaaggtttgattttggtcgttcttcagatgtttggctctgaatgacttaagctgaagtaactggctccttactttaaatgttctgccatcatttcacctgatgagcattcttggagcctgccagatattgttaggtcctggggctgcaaagaggtcctcaacaggatgtaaagcaaacttaattgtaattaatttattcagcccattaagaaagtactaaagttttatctctgtagttcctcaaattggcatctggtaatgtacattgtgaggtagactgataatgaaatgacagtgcaacatcttaaccaagaagtaaatatgacctcagtgtcctataaataatgtaagagcaggatttgaaacttggagagctgttttctcatttcatgtacacttgccccaaattgtctttgaagtcgtgtgcattgcacgttggatgagccagggaaattattacattaacaagcattttgtgtgtacgtagtagttactttgtactgagagaacttgctttggggtgcaattaataaactgattttatttgggagaaacaaggaagggtgcacttaactagcaacctaagcatgatttttcagcttttgcccttagggtttaaattacaattccaaaatgttagacatactgtattttttcgttcagtgtggctttaattttcccctcttgcagtttgttctgtaatgccttttacatttggacacatagtttatgctttttagattttggttgctttcttgccaaaataagtgttaactgtgtttcaaacttgattttctttcctttttcttttttttttcttccagaatgtcttatttaaaaagaaagctaaaagcatacttctaagtcagagcctctattttggtgtaagacttgggatattttttacttcacattgaatatagccaggcacccaagaagtctgatggccacctgagtgcaggtgacaaggacctgacagagcccatgcagggctttagatttggacacacaagagttgataacttcctcatgaactccttgcctgatctaaactcatattatgggttctgactgtttgagtaatcatcttcaaggttaaacctcttggcagttacccttttcacaaagtgcacagtgggaatcgagaatcgatagggttaattttggagcagtggcttataccattcacctctgtttttttgtgattatttcacagataatgagaccttaataacaaataggcgtaaaaaaattttcacattgaaatgatagaaacatttgatgtaataaaacttggttggcttgatattgcctaggtttcaaattctttgccgcaaggctgatctgctttcattaactggaattctgtaggagatactggtgacctaagctaagttgcactcagcatactcagtgtcaagctaatgaggttctattataaaggttctacttttaatctgagggaaaacatgttcagggcttctagaacactaaaaaatttggcttaaaccagtgttcagtctggtgccaaacttcgaatggaatacaaattcacataatctgaactttgttcacaggttatcctaatagagtaattcttcactttgctctattgaactgtcttaaggatttgtttaaacagctaagttacttgattaaaataatgataaaattgtattttgtctttgctttaatattaaagttaacaagttttcattttataatgagatcaaagcattggaatctgccctgttttgtagccgttgctttggatttgtgttggatgtatcctgcagttacacttgccagccccactcacaaaagttgttcatttcattgggtcactggctttatttgctagtcttgtctgtgaactgagcatctgcctcagttttattacttgaaatcttggcaggtgcttaatagggaacatacatacagctatgtaactgtgaataattgtatatatctctagttaagaatgagggaatggggaggtttgctttctaaacaagtgcattctgaaattgacttaaaaatttttagtgtgggtcctaaagtttagagatgggcaaggaggtctctaatccaccgcttcccgcttgagaagggaggggtatcaaaattgagccccaagctgtttgttccagtgtaccaagcactgactttatgcctttggcctggagatggcagaagtgaaagctggccatctgcaaaaagcagataagtgagtttgaaccttttgcattttgttagctcagtcagtcctcatcgtggtcctgaggcataggtactgttgtaccaaggtcacttatctaacaaaataacccttcatgtattttaaatttatttgacaagtctgcagacaatccttatctaaccagctattttcttaattgctacagcttgacctaccagtattccggagtaaccagcaaatgcaaagttgaccttgttcctgcatcatctttttgatggttcaaatttcagcctccctgactactacaaagccagagcagtcttagtaccagaaacagtgttgcactttcgttgcatgtgctgtgtgaccccaaggggacagggagtcactttgggtcatctctgtccccagtacagatcttggattcataggtggacattccataagtggggtgacagcaaatgacttgcaggtagtctcattgtaggtttgtgcaccagagtgaccctgtgagcctttgttaataggttgggagctcagggtgtttatgtccacctgtctggtctagccaaacagtttttttctgggaatcaaatttctgtggtttttatggccagaaattttaaggacttgtgtgtgctgggatatgagaatagaagctacagagttcttttcttgggacctagactgggaggtgcaatgtcaggacctccaggtgaatggtaggatctgagttgaccctgcagttcggttatgcagtcaattatttctttttaagaggaggaggattcacttgggtgttgggatcaaatttggattctgtcccaggccttactgtaaaactaggggattgcctttccatatctgctgggggtggagacccttatgtgcagcactcaatcccactggaagcctaatgctgcagtcagaagcaatgcctggctggggcagtaggggaaattccacccaattttgctatgagcctaaaacctctttaaaaacggtcagttaactaaaaaataaaaatcaagtctttaggagagtagaaaacacaattaactaaaaagcagggacatctgaaagagacgtattaagttaacatttttaaaaatccaaatgaaagtaaatggaataaatgtatcaggtaaaggacaagttgtaagcttggatttttaggtctagcaatacactgtttacaagagcatcacctaaaatgtgacaaaagatgttgaaaggatgaaaaaaggtatagtagacatacactaaccaaaaatgtagctctttgaatctcagaaaaaagtagattttaataaagtgtgaaagttgtcaatcaaaaaaaaaaa

SEQ ID NO: 344795 - DNA, 4722 bp, Homo sapiens
ctaggtcaggccggtttaatcggccgagggttcagtcagagcgagaacattccagaggtcgcccagctccggcgctgacgggtgtggaccgcggacgtcgctgggacagcccctccccgctgctcggcggcggcacctggcccggccgctcctcgctgcgcttcgcctccgcctcctcggactcggactcgggtttatatcgcgcctcacttcatcccagtcccgggcgagcagcgttgggtttatgtctttatttgacgaaaacgagctgttgcgcagccattggtacctgtattggggaaacatagcatacaagcaagaagcttacagcctcagtggcgaaaattttttcatgtcagagaccgagaactcttgcagtcgtttatgtcatcccttcttctccagacagaagataccaaaaagttgcaatcaaagatctcttcatcttattgataaagccactaataagccaaaatgtctgtcaatgtcaaccgcagcgtgtcagaccagttctatcgctacaagatgccccgtctgattgccaaggttgagggcaaaggcaatggaatcaagacagttatagtcaacatggttgacgttgcaaaggcgcttaatcggcctccaacgtatcccaccaaatattttggttgtgagctgggagcacagacccagtttgatgttaagaatgaccgttacattgtcaatggatctcatgaggcgaataagctgcaagacatgttggatggattcattaaaaaatttgttctctgtcctgaatgtgagaatcctgaaacagatttgcatgtcaatccaaagaagcaaacaataggtaattcttgtaaagcctgtggctatcgaggcatgcttgacacacatcataaactctgcacattcattctcaaaaacccacctgagaatagtgacagtggtacaggaaagaaagaaaaagaaaagaaaaacagaaagggcaaagacaaggaaaatggctccgtatccagcagtgagacaccaccaccaccaccaccaccaaatgaaattaatcctcctccacatacaatggaagaagaggaggatgatgactggggagaagatacaactgaggaagctcaaaggcgtcgaatggatgaaatcagtgaccatgcaaaagttctgacactcagtgatgatttggaaagaacaattgaggagagggtcaatatcctctttgattttgttaagaaaaagaaagaagagggtgttattgattcatctgacaaagaaatcgttgctgaagcagaaagactggatgtaaaagccatgggccctcttgttctaactgaagttctttttaatgagaagattagagaacagattaagaaatacaggcgccatttcctacgattttgtcacaacaacaaaaaagcccaacggtaccttcttcatggtttggagtgtgtggtagcaatgcatcaagctcagcttatctccaagattccacatatcttgaaggagatgtacgatgcagaccttttagaagaagaggtcatcatcagctggtcggaaaaggcctctaagaaatatgtctccaaagaacttgccaaagagattcgtgtcaaagcagaaccatttataaaatggttgaaggaggcagaggaagaatcttctggtggcgaagaagaagatgaagatgagaacattgaggtggtgtattcgaaggctgccagtgtaccgaaagttgagactgtaaagtcagacaacaaggatgacgacatcgatattgatgccatttaaagggatggatgcaacctagcttaacagtataatgctgcaaattttcctccattatcagccagaagtgcaacataatgtcttatttaaaaagaaagctaaaagcatacttctaagtcagagcctctattttggtgtaagacttgggatattttttacttcacattgaatatagccaggcacccaagaagtctgatggccacctgagtgcaggtgacaaggacctgacagagcccatgcagggctttagatttggacacacaagagttgataacttcctcatgaactccttgcctgatctaaactcatattatgggttctgactgtttgagtaatcatcttcaaggttaaacctcttggcagttacccttttcacaaagtgcacagtgggaatcgagaatcgatagggttaattttggagcagtggcttataccattcacctctgtttttttgtgattatttcacagataatgagaccttaataacaaataggcgtaaaaaaattttcacattgaaatgatagaaacatttgatgtaataaaacttggttggcttgatattttaaggaattgaaacctagcaatcttattggagagacaagaattggtctccagctgcctttgatcaagattcgggtgcaagtggagcaggagccatatacctggagggaatgtgctttgtcacaccaaagaggatttttttttcttcaaacttgtatgttgcctaggtttcaaattctttgccgcaaggctgatctgctttcattaactggaattctgtaggagatactggtgacctaagctaagttgcactcagcatactcagtgtcaagctaatgaggttctattataaaggttctacttttaatctgagggaaaacatgttcagggcttctagaacactaaaaaatttggcttaaaccagtgttcagtctggtgccaaacttcgaatggaatacaaattcacataatctgaactttgttcacaggttatcctaatagagtaattcttcactttgctctattgaactgtcttaaggatttgtttaaacagctaagttacttgattaaaataatgataaaattgtattttgtctttgctttaatattaaagttaacaagttttcattttataatgagatcaaagcattggaatctgccctgttttgtagccgttgctttggatttgtgttggatgtatcctgcagttacacttgccagccccactcacaaaagttgttcatttcattgggtcactggctttatttgctagtcttgtctgtgaactgagcatctgcctcagttttattacttgaaatcttggcaggtgcttaatagggaacatacatacagctatgtaactgtgaataattgtatatatctctagttaagaatgagggaatggggaggtttgctttctaaacaagtgcattctgaaattgacttaaaaatttttagtgtgggtcctaaagtttagagatgggcaaggaggtctctaatccaccgcttcccgcttgagaagggaggggtatcaaaattgagccccaagctgtttgttccagtgtaccaagcactgactttatgcctttggcctggagatggcagaagtgaaagctggccatctgcaaaaagcagataagtgagtttgaaccttttgcattttgttagctcagtcagtcctcatcgtggtcctgaggcataggtactgttgtaccaaggtcacttatctaacaaaataacccttcatgtattttaaatttatttgacaagtctgcagacaatccttatctaaccagctattttcttaattgctacagcttgacctaccagtattccggagtaaccagcaaatgcaaagttgaccttgttcctgcatcatctttttgatggttcaaatttcagcctccctgactactacaaagccagagcagtcttagtaccagaaacagtgttgcactttcgttgcatgtgctgtgtgaccccaaggggacagggagtcactttgggtcatctctgtccccagtacagatcttggattcataggtggacattccataagtggggtgacagcaaatgacttgcaggtagtctcattgtaggtttgtgcaccagagtgaccctgtgagcctttgttaataggttgggagctcagggtgtttatgtccacctgtctggtctagccaaacagtttttttctgggaatcaaatttctgtggtttttatggccagaaattttaaggacttgtgtgtgctgggatatgagaatagaagctacagagttcttttcttgggacctagactgggaggtgcaatgtcaggacctccaggtgaatggtaggatctgagttgaccctgcagttcggttatgcagtcaattatttctttttaagaggaggaggattcacttgggtgttgggatcaaatttggattctgtcccaggccttactgtaaaactaggggattgcctttccatatctgctgggggtggagacccttatgtgcagcactcaatcccactggaagcctaatgctgcagtcagaagcaatgcctggctggggcagtaggggaaattccacccaattttgctatgagcctaaaacctctttaaaaacggtcagttaactaaaaaataaaaatcaagtctttaggagagtagaaaacacaattaactaaaaagcagggacatctgaaagagacgtattaagttaacatttttaaaaatccaaatgaaagtaaatggaataaatgtatcaggtaaaggacaagttgtaagcttggatttttaggtctagcaatacactgtttacaagagcatcacctaaaatgtgacaaaagatgttgaaaggatgaaaaaaggtatagtagacatacactaaccaaaaatgtagctctttgaatctcagaaaaaagtagattttaataaagtgtgaaagttgtcaatcaaaaaaaaaaa

SEQ ID NO: 344796 - DNA, 6021 bp, Homo sapiens
ctaggtcaggccggtttaatcggccgagggttcagtcagagcgagaacattccagaggtcgcccagctccggcgctgacgggtgtggaccgcggacgtcgctgggacagcccctccccgctgctcggcggcggcacctggcccggccgctcctcgctgcgcttcgcctccgcctcctcggactcggactcgggtttatatcgcgcctcacttcatcccagtcccgggcgagcagcgttgggtttatgtctttatttgacgaaaacgagctgttgcgcagccattggtacctgtattggggaaacatagcatacaagcaagaagcttacagcctcagtggcgaaaattttttcatgtcagagaccgagaactcttgcagtcgtttatgtcatcccttcttctccagacagaagataccaaaaagttgcaatcaaagatctcttcatcttattgataaagccactaataagccaaaatgtctgtcaatgtcaaccgcagcgtgtcagaccagttctatcgctacaagatgccccgtctgattgccaaggttgagggcaaaggcaatggaatcaagacagttatagtcaacatggttgacgttgcaaaggcgcttaatcggcctccaacgtatcccaccaaatattttggttgtgagctgggagcacagacccagtttgatgttaagaatgaccgttacattgtcaatggatctcatgaggcgaataagctgcaagacatgttggatggattcattaaaaaatttgttctctgtcctgaatgtgagaatcctgaaacagatttggtaagtgcttttgtggttgtcgaaagaaaaagccatatacctgcttctgtgataccgctaagtcaccttcctgagaaggcagagcaaatgtaattttaaatcaaacacaaaactccagttttcgagatatttccattcttttttttaaagtaggtcactgtgtgaaaaaagttttctttgcatgtgaagctgtctgtggtttagatgtcctctgattagatattttcatgttatattatggataacatttgttatttttttggcagcatgtcaatccaaagaagcaaacaataggtaattcttgtaaagcctgtggctatcgaggcatgcttgacacacatcataaactctgcacattcattctcaaaaacccacctgagaatagtgacagtggtacaggaaagaaagaaaaagaaaagaaaaacagaaagggcaaagacaaggaaaatggctccgtatccagcagtgagacaccaccaccaccaccaccaccaaatgaaattaatcctcctccacatacaatggaagaagaggaggatgatgactggggagaagatacaactgaggaagctcaaaggcgtcgaatggatgaaatcagtgaccatgcaaaagttctgacactcagtgatgatttggaaagaacaattgaggagagggtcaatatcctctttgattttgttaagaaaaagaaagaagagggtgttattgattcatctgacaaagaaatcgttgctgaagcagaaagactggatgtaaaagccatgggccctcttgttctaactgaagttctttttaatgagaagattagagaacagattaagaaatacaggcgccatttcctacgattttgtcacaacaacaaaaaagcccaacggtaccttcttcatggtttggagtgtgtggtagcaatgcatcaagctcagcttatctccaagattccacatatcttgaaggagatgtacgatgcagaccttttagaagaagaggtcatcatcagctggtcggaaaaggcctctaagaaatatgtctccaaagaacttgccaaagagattcgtgtcaaagcagaaccatttataaaatggttgaaggaggcagaggaagaatcttctggtggcgaagaagaagatgaagatgagaacattgaggtggtgtattcgaaggctgccagtgtaccgaaagttgagactgtaaagtcagacaacaaggatgacgacatcgatattgatgccatttaaagggatggatgcaacctagcttaacagtataatgctgcaaattttcctccattatcagccagaagtgcaacatgtatgtgcaaaagctaaaatggcttaacatcatgctacactttacactaaaaatctattactgtgagtggtctgttattaagcccaatgagacatctagggagtccatacacatcagtgagcagatgtagtttgcttatttatagcatgtttctttttgaaaaactagtggtggacacatttggatcacatttatacagttataaaaataaaggtttgattttggtcgttcttcagatgtttggctctgaatgacttaagctgaagtaactggctccttactttaaatgttctgccatcatttcacctgatgagcattcttggagcctgccagatattgttaggtcctggggctgcaaagaggtcctcaacaggatgtaaagcaaacttaattgtaattaatttattcagcccattaagaaagtactaaagttttatctctgtagttcctcaaattggcatctggtaatgtacattgtgaggtagactgataatgaaatgacagtgcaacatcttaaccaagaagtaaatatgacctcagtgtcctataaataatgtaagagcaggatttgaaacttggagagctgttttctcatttcatgtacacttgccccaaattgtctttgaagtcgtgtgcattgcacgttggatgagccagggaaattattacattaacaagcattttgtgtgtacgtagtagttactttgtactgagagaacttgctttggggtgcaattaataaactgattttatttgggagaaacaaggaagggtgcacttaactagcaacctaagcatgatttttcagcttttgcccttagggtttaaattacaattccaaaatgttagacatactgtattttttcgttcagtgtggctttaattttcccctcttgcagtttgttctgtaatgccttttacatttggacacatagtttatgctttttagattttggttgctttcttgccaaaataagtgttaactgtgtttcaaacttgattttctttcctttttcttttttttttcttccagaatgtcttatttaaaaagaaagctaaaagcatacttctaagtcagagcctctattttggtgtaagacttgggatattttttacttcacattgaatatagccaggcacccaagaagtctgatggccacctgagtgcaggtgacaaggacctgacagagcccatgcagggctttagatttggacacacaagagttgataacttcctcatgaactccttgcctgatctaaactcatattatgggttctgactgtttgagtaatcatcttcaaggttaaacctcttggcagttacccttttcacaaagtgcacagtgggaatcgagaatcgatagggttaattttggagcagtggcttataccattcacctctgtttttttgtgattatttcacagataatgagaccttaataacaaataggcgtaaaaaaattttcacattgaaatgatagaaacatttgatgtaataaaacttggttggcttgatattttaaggaattgaaacctagcaatcttattggagagacaagaattggtctccagctgcctttgatcaagattcgggtgcaagtggagcaggagccatatacctggagggaatgtgctttgtcacaccaaagaggatttttttttcttcaaacttgtatgttgcctaggtttcaaattctttgccgcaaggctgatctgctttcattaactggaattctgtaggagatactggtgacctaagctaagttgcactcagcatactcagtgtcaagctaatgaggttctattataaaggttctacttttaatctgagggaaaacatgttcagggcttctagaacactaaaaaatttggcttaaaccagtgttcagtctggtgccaaacttcgaatggaatacaaattcacataatctgaactttgttcacaggttatcctaatagagtaattcttcactttgctctattgaactgtcttaaggatttgtttaaacagctaagttacttgattaaaataatgataaaattgtattttgtctttgctttaatattaaagttaacaagttttcattttataatgagatcaaagcattggaatctgccctgttttgtagccgttgctttggatttgtgttggatgtatcctgcagttacacttgccagccccactcacaaaagttgttcatttcattgggtcactggctttatttgctagtcttgtctgtgaactgagcatctgcctcagttttattacttgaaatcttggcaggtgcttaatagggaacatacatacagctatgtaactgtgaataattgtatatatctctagttaagaatgagggaatggggaggtttgctttctaaacaagtgcattctgaaattgacttaaaaatttttagtgtgggtcctaaagtttagagatgggcaaggaggtctctaatccaccgcttcccgcttgagaagggaggggtatcaaaattgagccccaagctgtttgttccagtgtaccaagcactgactttatgcctttggcctggagatggcagaagtgaaagctggccatctgcaaaaagcagataagtgagtttgaaccttttgcattttgttagctcagtcagtcctcatcgtggtcctgaggcataggtactgttgtaccaaggtcacttatctaacaaaataacccttcatgtattttaaatttatttgacaagtctgcagacaatccttatctaaccagctattttcttaattgctacagcttgacctaccagtattccggagtaaccagcaaatgcaaagttgaccttgttcctgcatcatctttttgatggttcaaatttcagcctccctgactactacaaagccagagcagtcttagtaccagaaacagtgttgcactttcgttgcatgtgctgtgtgaccccaaggggacagggagtcactttgggtcatctctgtccccagtacagatcttggattcataggtggacattccataagtggggtgacagcaaatgacttgcaggtagtctcattgtaggtttgtgcaccagagtgaccctgtgagcctttgttaataggttgggagctcagggtgtttatgtccacctgtctggtctagccaaacagtttttttctgggaatcaaatttctgtggtttttatggccagaaattttaaggacttgtgtgtgctgggatatgagaatagaagctacagagttcttttcttgggacctagactgggaggtgcaatgtcaggacctccaggtgaatggtaggatctgagttgaccctgcagttcggttatgcagtcaattatttctttttaagaggaggaggattcacttgggtgttgggatcaaatttggattctgtcccaggccttactgtaaaactaggggattgcctttccatatctgctgggggtggagacccttatgtgcagcactcaatcccactggaagcctaatgctgcagtcagaagcaatgcctggctggggcagtaggggaaattccacccaattttgctatgagcctaaaacctctttaaaaacggtcagttaactaaaaaataaaaatcaagtctttaggagagtagaaaacacaattaactaaaaagcagggacatctgaaagagacgtattaagttaacatttttaaaaatccaaatgaaagtaaatggaataaatgtatcaggtaaaggacaagttgtaagcttggatttttaggtctagcaatacactgtttacaagagcatcacctaaaatgtgacaaaagatgttgaaaggatgaaaaaaggtatagtagacatacactaaccaaaaatgtagctctttgaatctcagaaaaaagtagattttaataaagtgtgaaagttgtcaatcaaaaaaaaaaa

SEQ ID NO: 344797 - DNA, 3742 bp, Homo sapiens
ctaggtcaggccggtttaatcggccgagggttcagtcagagcgagaacattccagaggtcgcccagctccggcgctgacgggtgtggaccgcggacgtcgctgggacagcccctccccgctgctcggcggcggcacctggcccggccgctcctcgctgcgcttcgcctccgcctcctcggactcggactcgggtttatatcgcgcctcacttcatcccagtcccgggcgagcagcgttgggtttatgtctttatttgacgaaaacgagctgttgcgcagccattggtacctgtattggggaaacatagcatacaagcaagaagcttacagcctcagtggcgaaaattttttcatgtcagagaccgagaactcttgcagtcgtttatgtcatcccttcttctccagacagaagataccaaaaagttgcaatcaaagatctcttcatcttattgataaagccactaataagccaaaatgtctgtcaatgtcaaccgcagcgtgtcagaccagttctatcgctacaagatgccccgtctgattgccaaggttgagggcaaaggcaatggaatcaagacagttatagtcaacatggttgacgttgcaaaggcgcttaatcggcctccaacgtatcccaccaaatattttggttgtgagctgggagcacagacccagtttgatgttaagaatgaccgttacattgtcaatggatctcatgaggcgaataagctgcaagacatgttggatggattcattaaaaaatttgttctctgtcctgaatgtgagaatcctgaaacagatttgcatgtcaatccaaagaagcaaacaataggtaattcttgtaaagcctgtggctatcgaggcatgcttgacacacatcataaactctgcacattcattctcaaaaacccacctgagaatagtgacagtggtacaggaaagaaagaaaaagaaaagaaaaacagaaagggcaaagacaaggaaaatggctccgtatccagcagtgagacaccaccaccaccaccaccaccaaatgaaattaatcctcctccacatacaatggaagaagaggaggatgatgactggggagaagatacaactgaggaagctcaaaggcgtcgaatggatgaaatcagtgaccatgcaaaagttctgacactcagtgatgatttggaaagaacaattgaggagagggtcaatatcctctttgattttgttaagaaaaagaaagaagagggtgttattgattcatctgacaaagaaatcgttgctgaagcagaaagactggatgtaaaagccatgggccctcttgttctaactgaagttctttttaatgagaagattagagaacagattaagaaatacaggcgccatttcctacgattttgtcacaacaacaaaaaagcccaacggtaccttcttcatggtttggagtgtgtggtagcaatgcatcaagctcagcttatctccaagattccacatatcttgaaggagatgtacgatgcagaccttttagaagaagaggtcatcatcagctggtcggaaaaggcctctaagaaatatgtctccaaagaacttgccaaagagattcgtgtcaaagcagaaccatttataaaatggttgaaggaggcagaggaagaatcttctggtggcgaagaagaagatgaagatgagaacattgaggtggtgtattcgaaggctgccagtgtaccgaaagttgagactgtaaagtcagacaacaaggatgacgacatcgatattgatgccatttaaagggatggatgcaacctagcttaacagtataatgctgcaaattttcctccattatcagccagaagtgcaacatgtatgtgcaaaagctaaaatggcttaacatcatgctacactttacactaaaaatctattactgtgagtggtctgttattaagcccaatgagacatctagggagtccatacacatcagtgagcagatgtagtttgcttatttatagcatgtttctttttgaaaaactagtggtggacacatttggatcacatttatacagttataaaaataaaggtttgattttggtcgttcttcagatgtttggctctgaatgacttaagctgaagtaactggctccttactttaaatgttctgccatcatttcacctgatgagcattcttggagcctgccagatattgttaggtcctggggctgcaaagaggtcctcaacaggatgtaaagcaaacttaattgtaattaatttattcagcccattaagaaagtactaaagttttatctctgtagttcctcaaattggcatctggtaatgtacattgtgaggtagactgataatgaaatgacagtgcaacatcttaaccaagaagtaaatatgacctcagtgtcctataaataatgtaagagcaggatttgaaacttggagagctgttttctcatttcatgtacacttgccccaaattgtctttgaagtcgtgtgcattgcacgttggatgagccagggaaattattacattaacaagcattttgtgtgtacgtagtagttactttgtactgagagaacttgctttggggtgcaattaataaactgattttatttgggagaaacaaggaagggtgcacttaactagcaacctaagcatgatttttcagcttttgcccttagggtttaaattacaattccaaaatgttagacatactgtattttttcgttcagtgtggctttaattttcccctcttgcagtttgttctgtaatgccttttacatttggacacatagtttatgctttttagattttggttgctttcttgccaaaataagtgttaactgtgtttcaaacttgattttctttcctttttcttttttttttcttccagaatgtcttatttaaaaagaaagctaaaagcatacttctaagtcagagcctctattttggtgtaagacttgggatattttttacttcacattgaatatagccaggcacccaagaagtctgatggccacctgagtgcaggtgacaaggacctgacagagcccatgcagggctttagatttggacacacaagagttgataacttcctcatgaactccttgcctgatctaaactcatattatgggttctgactgtttgagtaatcatcttcaaggttaaacctcttggcagttacccttttcacaaagtgcacagtgggaatcgagaatcgatagggttaattttggagcagtggcttataccattcacctctgtttttttgtgattatttcacagataatgagaccttaataacaaataggcgtaaaaaaattttcacattgaaatgatagaaacatttgatgtaataaaacttggttggcttgatattttaaggaattgaaacctagcaatcttattggagagacaagaattggtctccagctgcctttgatcaagattcgggtgcaagtggagcaggagccatatacctggagggaatgtgctttgtcacaccaaagaggatttttttttcttcaaacttgtatgaggagtgttttacttcaaatgatgtgatcaattttaaagtaagtgccatatggctatgagaagaatatatattctgttgtttctggatggagagttctgtagatgtctttcatgtccacttgatccagagctgagttcaggtcctgaatatctttgtgaattttctgtctcaatgatctaatatgagaggggtgctgaagtctcccatcatcttgtgctagg

SEQ ID NO: 344798 - DNA, 4764 bp, Homo sapiens
atcccccgggctgcaggattcggcacgagagagacaaggaaaatggctccgtatccagcagtgagacaccaccaccaccaccaccaccaaatgaaattaatcctcctccacatacaatggaagaagaggaggatgatgactggggagaagatacaactgaggaagctcaaaggcgtcgaatggatgaaatcagtgaccatgcaaaagttctgacactcagtgatgatttggaaagaacaattgaggagagggtcaatatcctctttgattttgttaagaaaaagaaagaagagggtgttattgattcatctgacaaagaaatcgttgctgaagcagaaagactggatgtaaaagccatgggccctcttgttctaactgaagttctttttaatgagaagattagagaacagattaagaaatacaggcgccatttcctacgatgtgtggtagcaatgcatcaagctcagcttatctccaagattccacatatcttgaaggagatgtacgatgcagaccttttagaagaagaggtcatcatcagctggtcggaaaaggcctctaagaaatatgtctccaaagaacttgccaaagagattcgtgtcaaagcagaaccatttataaaatggttgaaggaggcagaggaagaatcttctggtggcgaagaagaagatgaagatgagaacattgaggtggtgtattcgaaggctgccagtgtaccgaaagttgagactgtaaagtcagacaacaaggatgacgacatcgatattgatgccatttaaagggatggatgcaacctagcttaacagtataatgctgcaaattttcctccattatcagccagaagtgcaacatgtatgtgcaaaagctaaaatggcttaacatcatgctacactttacactaaaaatctattactgtgagtggtctgttattaagcccaatgagacatctagggagtccatacacatcagtgagcagatgtagtttgcttatttatagcatgtttctttttgaaaaactagtggtggacacatttggatcacatttatacagttataaaaataaaggtttgattttggtcgttcttcagatgtttggctctgaatgacttaagctgaagtaactggctccttactttaaatgttctgccatcatttcacctgatgagcattcttggagcctgccagatattgttaggtcctggggctgcaaagaggtcctcaacaggatgtaaagcaaacttaattgtaattaatttattcagcccattaagaaagtactaaagttttatctctgtagttcctcaaattggcatctggtaatgtacattgtgaggtagactgataatgaaatgacagtgcaacatcttaaccaagaagtaaatatgacctcagtgtcctataaataatgtaagagcaggatttgaaacttggagagctgttttctcatttcatgtacacttgccccaaattgtctttgaagtcgtgtgcattgcacgttggatgagccagggaaattattacattaacaagcattttgtgtgtacgtagtagttactttgtactgagagaacttgctttggggtgcaattaataaactgattttatttgggagaaacaaggaagggtgcacttaactagcaacctaagcatgatttttcagcttttgcccttagggtttaaattacaattccaaaatgttagacatactgtattttttcgttcagtgtggctttaattttcccctcttgcagtttgttctgtaatgccttttacatttggacacatagtttatgctttttagattttggttgctttcttgccaaaataagtgttaactgtgtttcaaacttgattttctttcctttttcttttttttttcttccagaatgtcttatttaaaaagaaagctaaaagcatacttctaagtcagagcctctattttggtgtaagacttgggatattttttacttcacattgaatatagccaggcacccaagaagtctgatggccacctgagtgcaggtgacaaggacctgacagagcccatgcagggctttagatttggacacacaagagttgataacttcctcatgaactccttgcctgatctaaactcatattatgggttctgactgtttgagtaatcatcttcaaggttaaacctcttggcagttacccttttcacaaagtgcacagtgggaatcgagaatcgatagggttaattttggagcagtggcttataccattcacctctgtttttttgtgattatttcacagataatgagaccttaataacaaataggcgtaaaaaaattttcacattgaaatgatagaaacatttgatgtaataaaacttggttggcttgatattttaaggaattgaaacctagcaatcttattggagagacaagaattggtctccagctgcctttgatcaagattcgggtgcaagtggagcaggagccatatacctggagggaatgtgctttgtcacaccaaagaggatttttttttcttcaaacttgtatgttgcctaggtttcaaattctttgccgcaaggctgatctgctttcattaactggaattctgtaggagatactggtgacctaagctaagttgcactcagcatactcagtgtcaagctaatgaggttctattataaaggttctacttttaatctgagggaaaacatgttcagggcttctagaacactaaaaaatttggcttaaaccagtgttcagtctggtgccaaacttcgaatggaatacaaattcacataatctgaactttgttcacaggttatcctaatagagtaattcttcactttgctctattgaactgtcttaaggatttgtttaaacagctaagttacttgattaaaataatgataaaattgtattttgtctttgctttaatattaaagttaacaagttttcattttataatgagatcaaagcattggaatctgccctgttttgtagccgttgctttggatttgtgttggatgtatcctgcagttacacttgccagccccactcacaaaagttgttcatttcattgggtcactggctttatttgctagtcttgtctgtgaactgagcatctgcctcagttttattacttgaaatcttggcaggtgcttaatagggaacatacatacagctatgtaactgtgaataattgtatatatctctagttaagaatgagggaatggggaggtttgctttctaaacaagtgcattctgaaattgacttaaaaatttttagtgtgggtcctaaagtttagagatgggcaaggaggtctctaatccaccgcttcccgcttgagaagggaggggtatcaaaattgagccccaagctgtttgttccagtgtaccaagcactgactttatgcctttggcctggagatggcagaagtgaaagctggccatctgcaaaaagcagataagtgagtttgaaccttttgcattttgttagctcagtcagtcctcatcgtggtcctgaggcataggtactgttgtaccaaggtcacttatctaacaaaataacccttcatgtattttaaatttatttgacaagtctgcagacaatccttatctaaccagctattttcttaattgctacagcttgacctaccagtattccggagtaaccagcaaatgcaaagttgaccttgttcctgcatcatctttttgatggttcaaatttcagcctccctgactactacaaagccagagcagtcttagtaccagaaacagtgttgcactttcgttgcatgtgctgtgtgaccccaaggggacagggagtcactttgggtcatctctgtccccagtacagatcttggattcataggtggacattccataagtggggtgacagcaaatgacttgcaggtagtctcattgtaggtttgtgcaccagagtgaccctgtgagcctttgttaataggttgggagctcagggtgtttatgtccacctgtctggtctagccaaacagtttttttctgggaatcaaatttctgtggtttttatggccagaaattttaaggacttgtgtgtgctgggatatgagaatagaagctacagagttcttttcttgggacctagactgggaggtgcaatgtcaggacctccaggtgaatggtaggatctgagttgaccctgcagttcggttatgcagtcaattatttctttttaagaggaggaggattcacttgggtgttgggatcaaatttggattctgtcccaggccttactgtaaaactaggggattgcctttccatatctgctgggggtggagacccttatgtgcagcactcaatcccactggaagcctaatgctgcagtcagaagcaatgcctggctggggcagtaggggaaattccacccaattttgctatgagcctaaaacctctttaaaaacggtcagttaactaaaaaataaaaatcaagtctttaggagagtagaaaacacaattaactaaaaagcagggacatctgaaagagacgtattaagttaacatttttaaaaatccaaatgaaagtaaatggaataaatgtatcaggtaaaggacaagttgtaagcttggatttttaggtctagcaatacactgtttacaagagcatcacctaaaatgtgacaaaagatgttgaaaggatgaaaaaaggtatagtagacatacactaaccaaaaatgtagctctttgaatctcagaaaaaagtagattttaataaagtgtgaaagttgtcaatcaaaaaaaaaaa

SEQ ID NO: 344799 - DNA, 1088 bp, Homo sapiens
ctaggtcaggccggtttaatcggccgagggttcagtcagagcgagaacattccagaggtcgcccagctccggcgctgacgggtgtggaccgcggacgtcgctgggacagcccctccccgctgctcggcggcggcacctggcccggccgctcctcgctgcgcttcgcctccgcctcctcggactcggactcgggtttatatcgcgcctcacttcatcccagtcccgggcgagcagcgttgggtttatgtctttatttgacgaaaacgagctgttgcgcagccattggtacctgtattggggaaacatagcatacaagcaagaagcttacagcctcagtggcgaaaattttttcatgtcagagaccgagaactcttgcagtcgtttatgtcatcccttcttctccagacagaagataccaaaaagttgcaatcaaagatctcttcatcttattgataaagccactaataagccaaaatgtctgtcaatgtcaaccgcagcgtgtcagaccagttctatcgctacaagatgccccgtctgattgccaaggttgagggcaaaggcaatggaatcaagacagttatagtcaacatggttgacgttgcaaaggcgcttaatcggcctccaacgtatcccaccaaatattttggttgtgagctgggagcacagacccagtttgatgttaagaatgaccgttacattgtcaatggatctcatgaggcgaataagctgcaagacatgttggatggattcattaaaaaatttgttctctgtcctgaatgtgagaatcctgaaacagatttgcatgtcaatccaaagaagcaaacaataggtaattcttgtaaagcctgtggctatcgaggcatgcttgacacacatcataaactctgcacattcattctcaaaaacccacctgagaatagtgacagtggtacaggaaagaaagaaaaagaaaagaaaaacagaaagggcaaagacaaggaaaatggctccgtatccagcagtgagacaccaccaccaccacagccatcatcctcctcttcttccattgtatgtggaggaggattaatttcatttggtggtggtggtgg

SEQ ID NO: 344800 - DNA, 2922 bp, Homo sapiens
atcccccgggctgcaggattcggcacgagagcaaaataagtgttaactgtgtttcaaacttgattttctttcctttttcttttttttttcttccagaatgtcttatttaaaaagaaagttttttacttcacattgaatatagccaggcacccaagaagtctgatggccacctgagtgcaggtgacaaggacctgacagagcccatgcagggctttagatttggacacacaagagttgataacttcctcatgaactccttgcctgatctaaactcatattatgggttctgactgtttgagtaatcatcttcaaggttaaacctcttggcagttacccttttcacaaagtgcacagtgggaatcgagaatcgatagggttaattttggagcagtggcttataccattcacctctgtttttttgtgattatttcacagataatgagaccttaataacaaataggcgtaaaaaaattttcacattgaaatgatagaaacatttgatgtaataaaacttggttggcttgatattttaaggaattgaaacctagcaatcttattggagagacaagaattggtctccagctgcctttgatcaagattcgggtgcaagtggagcaggagccatatacctggagggaatgtgctttgtcacaccaaagaggatttttttttcttcaaacttgtatgttgcctaggtttcaaattctttgccgcaaggctgatctgctttcattaactggaattctgtaggagatactggtgacctaagctaagttgcactcagcatactcagtgtcaagctaatgaggttctattataaaggttctacttttaatctgagggaaaacatgttcagggcttctagaacactaaaaaatttggcttaaaccagtgttcagtctggtgccaaacttcgaatggaatacaaattcacataatctgaactttgttcacaggttatcctaatagagtaattcttcactttgctctattgaactgtcttaaggatttgtttaaacagctaagttacttgattaaaataatgataaaattgtattttgtctttgctttaatattaaagttaacaagttttcattttataatgagatcaaagcattggaatctgccctgttttgtagccgttgctttggatttgtgttggatgtatcctgcagttacacttgccagccccactcacaaaagttgttcatttcattgggtcactggctttatttgctagtcttgtctgtgaactgagcatctgcctcagttttattacttgaaatcttggcaggtgcttaatagggaacatacatacagctatgtaactgtgaataattgtatatatctctagttaagaatgagggaatggggaggtttgctttctaaacaagtgcattctgaaattgacttaaaaatttttagtgtgggtcctaaagtttagagatgggcaaggaggtctctaatccaccgcttcccgcttgagaagggaggggtatcaaaattgagccccaagctgtttgttccagtgtaccaagcactgactttatgcctttggcctggagatggcagaagtgaaagctggccatctgcaaaaagcagataagtgagtttgaaccttttgcattttgttagctcagtcagtcctcatcgtggtcctgaggcataggtactgttgtaccaaggtcacttatctaacaaaataacccttcatgtattttaaatttatttgacaagtctgcagacaatccttatctaaccagctattttcttaattgctacagcttgacctaccagtattccggagtaaccagcaaatgcaaagttgaccttgttcctgcatcatctttttgatggttcaaatttcagcctccctgactactacaaagccagagcagtcttagtaccagaaacagtgttgcactttcgttgcatgtgctgtgtgaccccaaggggacagggagtcactttgggtcatctctgtccccagtacagatcttggattcataggtggacattccataagtggggtgacagcaaatgacttgcaggtagtctcattgtaggtttgtgcaccagagtgaccctgtgagcctttgttaataggttgggagctcagggtgtttatgtccacctgtctggtctagccaaacagtttttttctgggaatcaaatttctgtggtttttatggccagaaattttaaggacttgtgtgtgctgggatatgagaatagaagctacagagttcttttcttgggacctagactgggaggtgcaatgtcaggacctccaggtgaatggtaggatctgagttgaccctgcagttcggttatgcagtcaattatttctttttaagaggaggaggattcacttgggtgttgggatcaaatttggattctgtcccaggccttactgtaaaactaggggattgcctttccatatctgctgggggtggagacccttatgtgcagcactcaatcccactggaagcctaatgctgcagtcagaagcaatgcctggctggggcagtaggggaaattccacccaattttgctatgagcctaaaacctctttaaaaacggtcagttaactaaaaaataaaaatcaagtctttaggagagtagaaaacacaattaactaaaaagcagggacatctgaaagagacgtattaagttaacatttttaaaaatccaaatgaaagtaaatggaataaatgtatcaggtaaaggacaagttgtaagcttggatttttaggtctagcaatacactgtttacaagagcatcacctaaaatgtgacaaaagatgttgaaaggatgaaaaaaggtatagtagacatacactaaccaaaaatgtagctctttgaatctcagaaaaaagtagattttaataaagtgtgaaagttgtcaatcaaaaaaaaaaa

SEQ ID NO: 344801 - DNA, 2614 bp, Homo sapiens
  misc_feature (11)..(11): n is a, c, g, or t
tagaggatccnccaccactcctatagatcagtcacaaagtgcacagtgggaatcgagaatcgatagggttaattttggagcagtggcttataccattcacctctgtttttttgtgattatttcacagataatgagaccttaataacaaataggcgtaaaaaaattttcacattgaaatgatagaaacatttgatgtaataaaacttggttggcttgatattttaaggaattgaaacctagcaatcttattggagagacaagaattggtctccagctgcctttgatcaagattcgggtgcaagtggagcaggagccatatacctggagggaatgtgctttgtcacaccaaagaggatttttttttcttcaaacttgtatgttgcctaggtttcaaattctttgccgcaaggctgatctgctttcattaactggaattctgtaggagatactggtgacctaagctaagttgcactcagcatactcagtgtcaagctaatgaggttctattataaaggttctacttttaatctgagggaaaacatgttcagggcttctagaacactaaaaaatttggcttaaaccagtgttcagtctggtgccaaacttcgaatggaatacaaattcacataatctgaactttgttcacaggttatcctaatagagtaattcttcactttgctctattgaactgtcttaaggatttgtttaaacagctaagttacttgattaaaataatgataaaattgtattttgtctttgctttaatattaaagttaacaagttttcattttataatgagatcaaagcattggaatctgccctgttttgtagccgttgctttggatttgtgttggatgtatcctgcagttacacttgccagccccactcacaaaagttgttcatttcattgggtcactggctttatttgctagtcttgtctgtgaactgagcatctgcctcagttttattacttgaaatcttggcaggtgcttaatagggaacatacatacagctatgtaactgtgaataattgtatatatctctagttaagaatgagggaatggggaggtttgctttctaaacaagtgcattctgaaattgacttaaaaatttttagtgtgggtcctaaagtttagagatgggcaaggaggtctctaatccaccgcttcccgcttgagaagggaggggtatcaaaattgagccccaagctgtttgttccagtgtaccaagcactgactttatgcctttggcctggagatggcagaagtgaaagctggccatctgcaaaaagcagataagtgagtttgaaccttttgcattttgttagctcagtcagtcctcatcgtggtcctgaggcataggtactgttgtaccaaggtcacttatctaacaaaataacccttcatgtattttaaatttatttgacaagtctgcagacaatccttatctaaccagctattttcttaattgctacagcttgacctaccagtattccggagtaaccagcaaatgcaaagttgaccttgttcctgcatcatctttttgatggttcaaatttcagcctccctgactactacaaagccagagcagtcttagtaccagaaacagtgttgcactttcgttgcatgtgctgtgtgaccccaaggggacagggagtcactttgggtcatctctgtccccagtacagatcttggattcataggtggacattccataagtggggtgacagcaaatgacttgcaggtagtctcattgtaggtttgtgcaccagagtgaccctgtgagcctttgttaataggttgggagctcagggtgtttatgtccacctgtctggtctagccaaacagtttttttctgggaatcaaatttctgtggtttttatggccagaaattttaaggacttgtgtgtgctgggatatgagaatagaagctacagagttcttttcttgggacctagactgggaggtgcaatgtcaggacctccaggtgaatggtaggatctgagttgaccctgcagttcggttatgcagtcaattatttctttttaagaggaggaggattcacttgggtgttgggatcaaatttggattctgtcccaggccttactgtaaaactaggggattgcctttccatatctgctgggggtggagacccttatgtgcagcactcaatcccactggaagcctaatgctgcagtcagaagcaatgcctggctggggcagtaggggaaattccacccaattttgctatgagcctaaaacctctttaaaaacggtcagttaactaaaaaataaaaatcaagtctttaggagagtagaaaacacaattaactaaaaagcagggacatctgaaagagacgtattaagttaacatttttaaaaatccaaatgaaagtaaatggaataaatgtatcaggtaaaggacaagttgtaagcttggatttttaggtctagcaatacactgtttacaagagcatcacctaaaatgtgacaaaagatgttgaaaggatgaaaaaaggtatagtagacatacactaaccaaaaatgtagctctttgaatctcagaaaaaagtagattttaataaagtgtgaaagttgtcaatcaaaaaaaaaaa

SEQ ID NO: 344802 - DNA, 1835 bp, Homo sapiens
tacctgaccccagccatttcccttctagaaattgttctacagacatatgtaataacatatacaaaaggttattctttcagcagtgtttgtcagagcgagaacattccagagagctgttgcgcagccattggtacctgtattggggaaacatagcatacaagcaagaagcttacagcctcagtggcgaaaattttttcatgtcagagaccgagaactcttgcagtcgtttatgtcatcccttcttctccagacagaagataccaaaaagttgcaatcaaagatctcttcatcttattgataaagccactaataagccaaaatgtctgtcaatgtcaaccgcagcgtgtcagaccagttctatcgctacaagatgccccgtctgattgccaaggttgagggcaaaggcaatggaatcaagacagttatagtcaacatggttgacgttgcaaaggcgcttaatcggcctccaacgtatcccaccaaatattttggttgtgagctgggagcacagacccagtttgatgttaagaatgaccgttacattgtcaatggatctcatgaggcgaataagctgcaagacatgttggatggattcattaaaaaatttgttctctgtcctgaatgtgagaatcctgaaacagatttgcatgtcaatccaaagaagcaaacaataggtaattcttgtaaagcctgtggctatcgaggcatgcttgacacacatcataaactctgcacattcattctcaaaaacccacctgagaatagtgacagtggtacaggaaagaaagaaaaagaaaagaaaaacagaaagggcaaagacaaggaaaatggctccgtatccagcagtgagacaccaccaccaccaccaccaccaaatgaaattaatcctcctccacatacaatggaagaagaggaggatgatgactggggagaagatacaactgaggaagctcaaaggcgtcgaatggatgaaatcagtgaccatgcaaaagttctgacactcagtgatgatttggaaagaacaattgaggagagggtcaatatcctctttgattttgttaagaaaaagaaagaagagggtgttattgattcatctgacaaagaaatcgttgctgaagcagaaagactggatgtaaaagccatgggccctcttgttctaactgaagttctttttaatgagaagattagagaacagattaagaaatacaggcgccatttcctacgattttgtcacaacaacaaaaaagcccaacggtaccttcttcatggtttggagtgtgtggtagcaatgcatcaagctcagcttatctccaagattccacatatcttgaaggagatgtacgatgcagaccttttagaagaagaggtcatcatcagctggtcggaaaaggcctctaagaaatatgtctccaaagaacttgccaaagagattcgtgtcaaagcagaaccatttataaaatggttgaaggaggcagaggaagaatcttctggtggcgaagaagaagatgaagatgagaacattgaggtggtgtattcgaaggctgccagtgtaccgaaagttgagactgtaaagtcagacaacaaggatgacgacatcgatattgatgccatttaaagggatggatgcaacctagcttaacagtataatgctgcaaattttcctccattatcagccagaagtgcaacatgtatgtgcaaaagctaaaatggcttaacatcatgctacactttacactaaaaatctattactgtgagtgtgaaaaactagtggtggacacatttggatcacatttatacagttataaaaataaaggtttgattttggtcgttcttca

SEQ ID NO: 344803 - DNA, 5755 bp, Homo sapiens
ctaggtcaggccggtttaatcggccgagggttcagtcagagcgagaacattccagaggtcgcccagctccggcgctgacgggtgtggaccgcggacgtcgctgggacagcccctccccgctgctcggcggcggcacctggcccggccgctcctcgctgcgcttcgcctccgcctcctcggactcggactcgggtttatatcgcgcctcacttcatcccagtcccgggcgagcagcgttgggtttatgtctttatttgacgaaaacgagctgttgcgcagccattggtacctgtattggggaaacatagcatacaagcaagaagcttacagcctcagtggcgaaaattttttcatgtcagagaccgagaactcttgcagtcgtttatgtcatcccttcttctccagacagaagataccaaaaagttgcaatcaaagatctcttcatcttattgataaagccactaataagccaaaatgtctgtcaatgtcaaccgcagcgtgtcagaccagttctatcgctacaagatgccccgtctgattgccaaggttgagggcaaaggcaatggaatcaagacagttatagtcaacatggttgacgttgcaaaggcgcttaatcggcctccaacgtatcccaccaaatattttggttgtgagctgggagcacagacccagtttgatgttaagaatgaccgttacattgtcaatggatctcatgaggcgaataagctgcaagacatgttggatggattcattaaaaaatttgttctctgtcctgaatgtgagaatcctgaaacagatttgcatgtcaatccaaagaagcaaacaataggtaattcttgtaaagcctgtggctatcgaggcatgcttgacacacatcataaactctgcacattcattctcaaaaacccacctgagaatagtgacagtggtacaggaaagaaagaaaaagaaaagaaaaacagaaagggcaaagacaaggaaaatggctccgtatccagcagtgagacaccaccaccaccaccaccaccaaatgaaattaatcctcctccacatacaatggaagaagaggaggatgatgactggggagaagatacaactgaggaagctcaaaggcgtcgaatggatgaaatcagtgaccatgcaaaagttctgacactcagtgatgatttggaaagaacaattgaggagagggtcaatatcctctttgattttgttaagaaaaagaaagaagagggtgttattgattcatctgacaaagaaatcgttgctgaagcagaaagactggatgtaaaagccatgggccctcttgttctaactgaagttctttttaatgagaagattagagaacagattaagaaatacaggcgccatttcctacgattttgtcacaacaacaaaaaagcccaacggtaccttcttcatggtttggagtgtgtggtagcaatgcatcaagctcagcttatctccaagattccacatatcttgaaggagatgtacgatgcagaccttttagaagaagaggtcatcatcagctggtcggaaaaggcctctaagaaatatgtctccaaagaacttgccaaagagattcgtgtcaaagcagaaccatttataaaatggttgaaggaggcagaggaagaatcttctggtggcgaagaagaagatgaagatgagaacattgaggtggtgtattcgaaggctgccagtgtaccgaaagttgagactgtaaagtcagacaacaaggatgacgacatcgatattgatgccatttaaagggatggatgcaacctagcttaacagtataatgctgcaaattttcctccattatcagccagaagtgcaacatgtatgtgcaaaagctaaaatggcttaacatcatgctacactttacactaaaaatctattactgtgagtggtctgttattaagcccaatgagacatctagggagtccatacacatcagtgagcagatgtagtttgcttatttatagcatgtttctttttgaaaaactagtggtggacacatttggatcacatttatacagttataaaaataaaggtttgattttggtcgttcttcagatgtttggctctgaatgacttaagctgaagtaactggctccttactttaaatgttctgccatcatttcacctgatgagcattcttggagcctgccagatattgttaggtcctggggctgcaaagaggtcctcaacaggatgtaaagcaaacttaattgtaattaatttattcagcccattaagaaagtactaaagttttatctctgtagttcctcaaattggcatctggtaatgtacattgtgaggtagactgataatgaaatgacagtgcaacatcttaaccaagaagtaaatatgacctcagtgtcctataaataatgtaagagcaggatttgaaacttggagagctgttttctcatttcatgtacacttgccccaaattgtctttgaagtcgtgtgcattgcacgttggatgagccagggaaattattacattaacaagcattttgtgtgtacgtagtagttactttgtactgagagaacttgctttggggtgcaattaataaactgattttatttgggagaaacaaggaagggtgcacttaactagcaacctaagcatgatttttcagcttttgcccttagggtttaaattacaattccaaaatgttagacatactgtattttttcgttcagtgtggctttaattttcccctcttgcagtttgttctgtaatgccttttacatttggacacatagtttatgctttttagattttggttgctttcttgccaaaataagtgttaactgtgtttcaaacttgattttctttcctttttcttttttttttcttccagaatgtcttatttaaaaagaaagctaaaagcatacttctaagtcagagcctctattttggtgtaagacttgggatattttttacttcacattgaatatagccaggcacccaagaagtctgatggccacctgagtgcaggtgacaaggacctgacagagcccatgcagggctttagatttggacacacaagagttgataacttcctcatgaactccttgcctgatctaaactcatattatgggttctgactgtttgagtaatcatcttcaaggttaaacctcttggcagttacccttttcacaaagtgcacagtgggaatcgagaatcgatagggttaattttggagcagtggcttataccattcacctctgtttttttgtgattatttcacagataatgagaccttaataacaaataggcgtaaaaaaattttcacattgaaatgatagaaacatttgatgtaataaaacttggttggcttgatattttaaggaattgaaacctagcaatcttattggagagacaagaattggtctccagctgcctttgatcaagattcgggtgcaagtggagcaggagccatatacctggagggaatgtgctttgtcacaccaaagaggatttttttttcttcaaacttgtatgttgcctaggtttcaaattctttgccgcaaggctgatctgctttcattaactggaattctgtaggagatactggtgacctaagctaagttgcactcagcatactcagtgtcaagctaatgaggttctattataaaggttctacttttaatctgagggaaaacatgttcagggcttctagaacactaaaaaatttggcttaaaccagtgttcagtctggtgccaaacttcgaatggaatacaaattcacataatctgaactttgttcacaggttatcctaatagagtaattcttcactttgctctattgaactgtcttaaggatttgtttaaacagctaagttacttgattaaaataatgataaaattgtattttgtctttgctttaatattaaagttaacaagttttcattttataatgagatcaaagcattggaatctgccctgttttgtagccgttgctttggatttgtgttggatgtatcctgcagttacacttgccagccccactcacaaaagttgttcatttcattgggtcactggctttatttgctagtcttgtctgtgaactgagcatctgcctcagttttattacttgaaatcttggcaggtgcttaatagggaacatacatacagctatgtaactgtgaataattgtatatatctctagttaagaatgagggaatggggaggtttgctttctaaacaagtgcattctgaaattgacttaaaaatttttagtgtgggtcctaaagtttagagatgggcaaggaggtctctaatccaccgcttcccgcttgagaagggaggggtatcaaaattgagccccaagctgtttgttccagtgtaccaagcactgactttatgcctttggcctggagatggcagaagtgaaagctggccatctgcaaaaagcagataagtgagtttgaaccttttgcattttgttagctcagtcagtcctcatcgtggtcctgaggcataggtactgttgtaccaaggtcacttatctaacaaaataacccttcatgtattttaaatttatttgacaagtctgcagacaatccttatctaaccagctattttcttaattgctacagcttgacctaccagtattccggagtaaccagcaaatgcaaagttgaccttgttcctgcatcatctttttgatggttcaaatttcagcctccctgactactacaaagccagagcagtcttagtaccagaaacagtgttgcactttcgttgcatgtgctgtgtgaccccaaggggacagggagtcactttgggtcatctctgtccccagtacagatcttggattcataggtggacattccataagtggggtgacagcaaatgacttgcaggtagtctcattgtaggtttgtgcaccagagtgaccctgtgagcctttgttaataggttgggagctcagggtgtttatgtccacctgtctggtctagccaaacagtttttttctgggaatcaaatttctgtggtttttatggccagaaattttaaggacttgtgtgtgctgggatatgagaatagaagctacagagttcttttcttgggacctagactgggaggtgcaatgtcaggacctccaggtgaatggtaggatctgagttgaccctgcagttcggttatgcagtcaattatttctttttaagaggaggaggattcacttgggtgttgggatcaaatttggattctgtcccaggccttactgtaaaactaggggattgcctttccatatctgctgggggtggagacccttatgtgcagcactcaatcccactggaagcctaatgctgcagtcagaagcaatgcctggctggggcagtaggggaaattccacccaattttgctatgagcctaaaacctctttaaaaacggtcagttaactaaaaaataaaaatcaagtctttaggagagtagaaaacacaattaactaaaaagcagggacatctgaaagagacgtattaagttaacatttttaaaaatccaaatgaaagtaaatggaataaatgtatcaggtaaaggacaagttgtaagcttggatttttaggtctagcaatacactgtttacaagagcatcacctaaaatgtgacaaaagatgttgaaaggatgaaaaaaggtatagtagacatacactaaccaaaaatgtagctctttgaatctcagaaaaaagtagattttaataaagtgtgaaagttgtcaatcaaaaaaaaaaa

SEQ ID NO: 344804 - DNA, 3889 bp, Homo sapiens
ctaggtcaggccggtttaatcggccgagggttcagtcagagcgagaacattccagaggtcgcccagctccggcgctgacgggtgtggaccgcggacgtcgctgggacagcccctccccgctgctcggcggcggcacctggcccggccgctcctcgctgcgcttcgcctccgcctcctcggactcggactcgggtttatatcgcgcctcacttcatcccagtcccgggcgagcagcgttgggtttatgtctttatttgacgaaaacgagctgttgcgcagccattggtacctgtattggggaaacatagcatacaagcaagaagcttacagcctcagtggcgaaaattttttcatgtcagagaccgagaactcttgcagtcgtttatgtcatcccttcttctccagacagaagataccaaaaagttgcaatcaaagatctcttcatcttattgataaagccactaataagccaaaatgtctgtcaatgtcaaccgcagcgtgtcagaccagttctatcgctacaagatgccccgtctgattgccaaggttgagggcaaaggcaatggaatcaagacagttatagtcaacatggttgacgttgcaaaggcgcttaatcggcctccaacgtatcccaccaaatattttggttgtgagctgggagcacagacccagtttgatgttaagaatgaccgttacattgtcaatggatctcatgaggcgaataagctgcaagacatgttggatggattcattaaaaaatttgttctctgtcctgaatgtgagaatcctgaaacagatttgcatgtcaatccaaagaagcaaacaataggtaattcttgtaaagcctgtggctatcgaggcatgcttgacacacatcataaactctgcacattcattctcaaaaacccacctgagaatagtgacagtggtacaggaaagaaagaaaaagaaaagaaaaacagaaagggcaaagacaaggaaaatggctccgtatccagcagtgagacaccaccaccaccaccaccaccaaatgaaattaatcctcctccacatacaatggaagaagaggaggatgatgactggggagaagatacaactgaggaagctcaaaggcgtcgaatggatgaaatcagtgaccatgcaaaagttctgacactcagtgatgatttggaaagaacaattgaggagagggtcaatatcctctttgattttgttaagaaaaagaaagaagagggtgttattgattcatctgacaaagaaatcgttgctgaagcagaaagactggatgtaaaagccatgggccctcttgttctaactgaagttctttttaatgagaagattagagaacagattaagaaatacaggcgccatttcctacgattttgtcacaacaacaaaaaagcccaacggtaccttcttcatggtttggagtgtgtggtagcaatgcatcaagctcagcttatctccaagattccacatatcttgaaggagatgtacgatgcagaccttttagaagaagaggtcatcatcagctggtcggaaaaggcctctaagaaatatgtctccaaagaacttgccaaagagattcgtgtcaaagcagaaccatttataaaatggttgaaggaggcagaggaagaatcttctggtggcgaagaagaagatgaagatgagaacattgaggtggtgtattcgaaggctgccagtgtaccgaaagttgagactgtaaagtcagacaacaaggatgacgacatcgatattgatgccatttaaagggatggatgcaacctagcttaacagtataatgctgcaaattttcctccattatcagccagaagtgcaacatgtatgtgcaaaagctaaaatggcttaacatcatgctacactttacactaaaaatctattactgtgagtggtctgttattaagcccaatgagacatctagggagtccatacacatcagtgagcagatgtagtttgcttatttatagcatgtttctttttgaaaaactagtggtggacacatttggatcacatttatacagttataaaaataaaggtttgattttggtcgttcttcagatgtttggctctgaatgacttaagctgaagtaactggctccttactttaaatgttctgccatcatttcacctgatgagcattcttggagcctgccagatattgttaggtcctggggctgcaaagaggtcctcaacaggatgtaaagcaaacttaattgtaattaatttattcagcccattaagaaagtactaaagttttatctctgtagttcctcaaattggcatctggtaatgtacattgtgaggtagactgataatgaaatgacagtgcaacatcttaaccaagaagtaaatatgacctcagtgtcctataaataatgtaagagcaggatttgaaacttggagagctgttttctcatttcatgtacacttgccccaaattgtctttgaagtcgtgtgcattgcacgttggatgagccagggaaattattacattaacaagcattttgtgtgtacgtagtagttactttgtactgagagaacttgctttggggtgcaattaataaactgattttatttgggagaaacaaggaagggtgcacttaactagcaacctaagcatgatttttcagcttttgcccttagggtttaaattacaattccaaaatgttagacatactgtattttttcgttcagtgtggctttaattttcccctcttgcagtttgttctgtaatgccttttacatttggacacatagtttatgctttttagattttggttgctttcttgccaaaataagtgttaactgtgtttcaaacttgattttctttcctttttcttttttttttcttccagaatgtcttatttaaaaagaaagctaaaagcatacttctaagtcagagcctctattttggtgtaagacttgggatattttttacttcacattgaatatagccaggcacccaagaagtctgatggccacctgagtgcaggtgacaaggacctgacagagcccatgcagggctttagatttggacacacaagagttgataacttcctcatgaactccttgcctgatctaaactcatattatgggttctgactgtttgagtaatcatcttcaaggttaaacctcttggcagttacccttttcacaaagtgcacagtgggaatcgagaatcgatagggttaattttggagcagtggcttataccattcacctctgtttttttgtgattatttcacagataatgagaccttaataacaaataggcgtaaaaaaattttcacattgaaatgatagaaacatttgatgtaataaaacttggttggcttgatattttaaggaattgaaacctagcaatcttattggagagacaagaattggtctccagctgcctttgatcaagattcgggtgcaagtggagcaggagccatatacctggagggaatgtgctttgtcacaccaaagaggatttttttttcttcaaacttgtatgttgcctaggtttcaaattctttgccgcaaggctgatctgctttcattaactggaattctgtaggagatactggtgacctaagctaagttgcactcagcatactcagtgtcaagctaatgaggttctattataaaggttctacttttaatctgagggaaaacatgttcagggcttctagaacactaaaaaatttggcttaaaccagtgttcagtctggtgccaaacttcgaatggaatacaaattcacataatctgaactttgttcacaggttatcctaatagagtaattcttcactttgctctattgaactgtcttaaggatttgtttaaacagctaagttacttgattaaaataatgataaaattgta

SEQ ID NO: 344805 - DNA, 5177 bp, Homo sapiens
ctaggtcaggccggtttaatcggccgagggttcagtcagagcgagaacattccagaggtcgcccagctccggcgctgacgggtgtggaccgcggacgtcgctgggacagcccctccccgctgctcggcggcggcacctggcccggccgctcctcgctgcgcttcgcctccgcctcctcggactcggactcgggtttatatcgcgcctcacttcatcccagtcccgggcgagcagcgttgggtttatgtctttatttgacgaaaacgagctgttgcgcagccattggtacctgtattggggaaacatagcatacaagcaagaagcttacagcctcagtggcgaaaattttttcatgtcagagaccgagaactcttgcagtcgtttatgtcatcccttcttctccagacagaagataccaaaaagttgcaatcaaagatctcttcatcttattgataaagccactaataagccaaaatgtctgtcaatgtcaaccgcagcgtgtcagaccagttctatcgctacaagatgccccgtctgattgccaaggttgagggcaaaggcaatggaatcaagacagttatagtcaacatggttgacgttgcaaaggcgcttaatcggcctccaacgtatcccaccaaatattttggttgtgagctgggagcacagacccagtttgatgttaagaatgaccgttacattgtcaatggatctcatgaggcgaataagctgcaagacatgttggatggattcattaaaaaatttgttctctgtcctgaatgtgagaatcctgaaacagatttgcatgtcaatccaaagaagcaaacaataggtaattcttgtaaagcctgtggctatcgaggcatgcttgacacacatcataaactctgcacattcattctcaaaaacccacctgagaatagtgacagtggtacaggaaagaaagaaaaagaaaagaaaaacagaaagggcaaagacaaggaaaatggctccgtatccagcagtgagacaccaccaccaccaccaccaccaaatgaaattaatcctcctccacatacaatggaagaagaggaggatgatgactggggagaagatacaactgaggaagctcaaaggcgtcgaatggatgaaatcagtgaccatgcaaaagttctgacactcagtgatgatttggaaagaacaattgaggagagggtcaatatcctctttgattttgttaagaaaaagaaagaagagggtgttattgattcatctgacaaagaaatcgttgctgaagcagaaagactggatgtaaaagccatgggccctcttgttctaactgaagttctttttaatgagaagattagagaacagattaagaaatacaggcgccatttcctacgattttgtcacaacaacaaaaaagcccaacggtaccttcttcatggtttggagtgtgtggtagcaatgcatcaagctcagcttatctccaagattccacatatcttgaaggagatgtacgatgcagaccttttagaagaagaggtcatcatcagctggtcggaaaaggcctctaagaaatatgtctccaaagaacttgccaaagagattcgtgtcaaagcagaaccatttataaaatggttgaaggaggcagaggaagaatcttctggtggcgaagaagaagatgaagatgagaacattgaggtggtgtattcgaaggctgccagtgtaccgaaagttgagactgtaaagtcagacaacaaggatgacgacatcgatattgatgccatttaaagggatggatgcaacctagcttaacagtataatgctgcaaattttcctccattatcagccagaagtgcaacatgtatgtgcaaaagctaaaatggcttaacatcatgctacactttacactaaaaatctattactgtgagtggtctgttattaagcccaatgagacatctagggagtccatacacatcagtgagcagatgtagtttgcttatttatagcatgtttctttttgaaaaactagtggtggacacatttggatcacatttatacagttataaaaataaaggtttgattttggtcgttcttcagatgtttggctctgaatgacttaagctgaagtaactggctccttactttaaatgttctgccatcatttcacctgatgagcattcttggagcctgccagatattgttaggtcctggggctgcaaagaggtcctcaacaggatgtaaagcaaacttaattgtaattaatttattcagcccattaagaaagtactaaagttttatctctgtagttcctcaaattggcatctggtaatgtacattgtgaggtagactgataatgaaatgacagtgcaacatcttaaccaagaagtaaatatgacctcagtgtcctataaataatgtaagagcaggatttgaaacttggagagctgttttctcatttcatgtacacttgccccaaattgtctttgaagtcgtgtgcattgcacgttggatgagccagggaaattattacattaacaagcattttgtgtgtacgtagtagttactttgtactgagagaacttgctttggggtgcaattaataaactgattttatttgggagaaacaaggaagggtgcacttaactagcaacctaagcatgatttttcagcttttgcccttagggtttaaattacaattccaaaatgttagacatactgtattttttcgttcagtgtggctttaattttcccctcttgcagtttgttctgtaatgccttttacatttggacacatagtttatgctttttagattttggttgctttcttgccaaaataagtgttaactgtgtttcaaacttgattttctttcctttttcttttttttttcttccagaatgtcttatttaaaaagaaagctaaaagcatacttctaagtcagagcctctattttggtgtaagacttgggatattttttacttcacattgaatatagccaggcacccaagaagtctgatggccacctgagtgcaggtgacaaggacctgacagagcccatgcagggctttagatttggacacacaagagttgataacttcctcatgaactccttgcctgatctaaactcatattatgggttctgactgtttgagtaatcatcttcaaggttaaacctcttggcagttacccttttcacaaagtgcacagtgggaatcgagaatcgatagggttaattttggagcagtggcttataccattcacctctgtttttttgtgattatttcacagataatgagaccttaataacaaataggcgtaaaaaaattttcacattgaaatgatagaaacatttgatgtaataaaacttggttggcttgatattttaaggaattgaaacctagcaatcttattggagagacaagaattggtctccagctgcctttgatcaagattcgggtgcaagtggagcaggagccatatacctggagggaatgtgctttgtcacaccaaagaggatttttttttcttcaaacttgtatgttgcctaggtttcaaattctttgccgcaaggctgatctgctttcattaactggaattctgtaggagatactggtgacctaagctaagttgcactcagcatactcagtgtcaagctaatgaggttctattataaaggttctacttttaatctgagggaaaacatgttcagggcttctagaacactaaaaaatttggcttaaaccagtgttcagtctggtgccaaacttcgaatggaatacaaattcacataatctgaactttgttcacaggttatcctaatagagtaattcttcactttgctctattgaactgtcttaaggatttgtttaaacagctaagttacttgattaaaataatgataaaattgtattttgtctttgctttaatattaaagttaacaagttttcattttataatgagatcaaagcattggaatctgccctgttttgtagccgttgctttggatttgtgttggatgtatcctgcagttacacttgccagccccactcacaaaagttgttcatttcattgggtcactggctttatttgctagtcttgtctgtgaactgagcatctgcctcagttttattacttgaaatcttggcaggtgcttaatagggaacatacatacagctatgtaactgtgaataattgtatatatctctagttaagaatgagggaatggggaggtttgctttctaaacaagtgcattctgaaattgacttaaaaatttttagtgtgggtcctaaagtttagagatgggcaaggaggtctctaatccaccgcttcccgcttgagaagggaggggtatcaaaattgagccccaagctgtttgttccagtgtaccaagcactgactttatgcctttggcctggagatggcagaagtgaaagctggccatctgcaaaaagcagataagtgagtttgaaccttttgcattttgttagctcagtcagtcctcatcgtggtcctgaggcataggtactgttgtaccaaggtcacttatctaacaaaataacccttcatgtattttaaatttatttgacaagtctgcagacaatccttatctaaccagctattttcttaattgctacagcttgacctaccagtattccggagtaaccagcaaatgcaaagttgaccttgttcctgcatcatctttttgatggttcaaatttcagcctccctgactactacaaagccagagcagtcttagtaccagaaacagtgttgcactttcgttgcatgtgctgtgtgaccccaaggggacagggagtcactttgggtcatctctgtccccagtacagatcttggattcataggtggacattccataagtggggtgacagcaaatgacttgcaggtagtctcattgtaggtttgtgcaccagagtgaccctgtgagcctttgttaataggttgggagctcagggtgtttatgtccacctgtctggtcttccctgtgtgatgttgaccatcactgccatcacatcacctttttttaagtagtaagaataaagccactgtatgattctcttaatagctatacattaatcctggttttagtgctgactgtggacagccttctcggaactggagtctgtctctttcagtcatacatgtttgtttggttggttgttttttgagactgcctcg

SEQ ID NO: 344806 - DNA, 5594 bp, Homo sapiens
cccattactaatctttgaagacagtcttcaattaactggccaaagaagaatataaagaagtcaggtgtggtgcaaaatgatagtcagagcgagaacattccagagagctgttgcgcagccattggtacctgtattggggaaacatagcatacaagcaagaagcttacagcctcagtggcgaaaattttttcatgtcagagaccgagaactcttgcagtcgtttatgtcatcccttcttctccagacagaagataccaaaaagttgcaatcaaagatctcttcatcttattgataaagccactaataagccaaaatgtctgtcaatgtcaaccgcagcgtgtcagaccagttctatcgctacaagatgccccgtctgattgccaaggttgagggcaaaggcaatggaatcaagacagttatagtcaacatggttgacgttgcaaaggcgcttaatcggcctccaacgtatcccaccaaatattttggttgtgagctgggagcacagacccagtttgatgttaagaatgaccgttacattgtcaatggatctcatgaggcgaataagctgcaagacatgttggatggattcattaaaaaatttgttctctgtcctgaatgtgagaatcctgaaacagatttgcatgtcaatccaaagaagcaaacaataggtaattcttgtaaagcctgtggctatcgaggcatgcttgacacacatcataaactctgcacattcattctcaaaaacccacctgagaatagtgacagtggtacaggaaagaaagaaaaagaaaagaaaaacagaaagggcaaagacaaggaaaatggctccgtatccagcagtgagacaccaccaccaccaccaccaccaaatgaaattaatcctcctccacatacaatggaagaagaggaggatgatgactggggagaagatacaactgaggaagctcaaaggcgtcgaatggatgaaatcagtgaccatgcaaaagttctgacactcagtgatgatttggaaagaacaattgaggagagggtcaatatcctctttgattttgttaagaaaaagaaagaagagggtgttattgattcatctgacaaagaaatcgttgctgaagcagaaagactggatgtaaaagccatgggccctcttgttctaactgaagttctttttaatgagaagattagagaacagattaagaaatacaggcgccatttcctacgattttgtcacaacaacaaaaaagcccaacggtaccttcttcatggtttggagtgtgtggtagcaatgcatcaagctcagcttatctccaagattccacatatcttgaaggagatgtacgatgcagaccttttagaagaagaggtcatcatcagctggtcggaaaaggcctctaagaaatatgtctccaaagaacttgccaaagagattcgtgtcaaagcagaaccatttataaaatggttgaaggaggcagaggaagaatcttctggtggcgaagaagaagatgaagatgagaacattgaggtggtgtattcgaaggctgccagtgtaccgaaagttgagactgtaaagtcagacaacaaggatgacgacatcgatattgatgccatttaaagggatggatgcaacctagcttaacagtataatgctgcaaattttcctccattatcagccagaagtgcaacatgtatgtgcaaaagctaaaatggcttaacatcatgctacactttacactaaaaatctattactgtgagtggtctgttattaagcccaatgagacatctagggagtccatacacatcagtgagcagatgtagtttgcttatttatagcatgtttctttttgaaaaactagtggtggacacatttggatcacatttatacagttataaaaataaaggtttgattttggtcgttcttcagatgtttggctctgaatgacttaagctgaagtaactggctccttactttaaatgttctgccatcatttcacctgatgagcattcttggagcctgccagatattgttaggtcctggggctgcaaagaggtcctcaacaggatgtaaagcaaacttaattgtaattaatttattcagcccattaagaaagtactaaagttttatctctgtagttcctcaaattggcatctggtaatgtacattgtgaggtagactgataatgaaatgacagtgcaacatcttaaccaagaagtaaatatgacctcagtgtcctataaataatgtaagagcaggatttgaaacttggagagctgttttctcatttcatgtacacttgccccaaattgtctttgaagtcgtgtgcattgcacgttggatgagccagggaaattattacattaacaagcattttgtgtgtacgtagtagttactttgtactgagagaacttgctttggggtgcaattaataaactgattttatttgggagaaacaaggaagggtgcacttaactagcaacctaagcatgatttttcagcttttgcccttagggtttaaattacaattccaaaatgttagacatactgtattttttcgttcagtgtggctttaattttcccctcttgcagtttgttctgtaatgccttttacatttggacacatagtttatgctttttagattttggttgctttcttgccaaaataagtgttaactgtgtttcaaacttgattttctttcctttttcttttttttttcttccagaatgtcttatttaaaaagaaagctaaaagcatacttctaagtcagagcctctattttggtgtaagacttgggatattttttacttcacattgaatatagccaggcacccaagaagtctgatggccacctgagtgcaggtgacaaggacctgacagagcccatgcagggctttagatttggacacacaagagttgataacttcctcatgaactccttgcctgatctaaactcatattatgggttctgactgtttgagtaatcatcttcaaggttaaacctcttggcagttacccttttcacaaagtgcacagtgggaatcgagaatcgatagggttaattttggagcagtggcttataccattcacctctgtttttttgtgattatttcacagataatgagaccttaataacaaataggcgtaaaaaaattttcacattgaaatgatagaaacatttgatgtaataaaacttggttggcttgatattttaaggaattgaaacctagcaatcttattggagagacaagaattggtctccagctgcctttgatcaagattcgggtgcaagtggagcaggagccatatacctggagggaatgtgctttgtcacaccaaagaggatttttttttcttcaaacttgtatgttgcctaggtttcaaattctttgccgcaaggctgatctgctttcattaactggaattctgtaggagatactggtgacctaagctaagttgcactcagcatactcagtgtcaagctaatgaggttctattataaaggttctacttttaatctgagggaaaacatgttcagggcttctagaacactaaaaaatttggcttaaaccagtgttcagtctggtgccaaacttcgaatggaatacaaattcacataatctgaactttgttcacaggttatcctaatagagtaattcttcactttgctctattgaactgtcttaaggatttgtttaaacagctaagttacttgattaaaataatgataaaattgtattttgtctttgctttaatattaaagttaacaagttttcattttataatgagatcaaagcattggaatctgccctgttttgtagccgttgctttggatttgtgttggatgtatcctgcagttacacttgccagccccactcacaaaagttgttcatttcattgggtcactggctttatttgctagtcttgtctgtgaactgagcatctgcctcagttttattacttgaaatcttggcaggtgcttaatagggaacatacatacagctatgtaactgtgaataattgtatatatctctagttaagaatgagggaatggggaggtttgctttctaaacaagtgcattctgaaattgacttaaaaatttttagtgtgggtcctaaagtttagagatgggcaaggaggtctctaatccaccgcttcccgcttgagaagggaggggtatcaaaattgagccccaagctgtttgttccagtgtaccaagcactgactttatgcctttggcctggagatggcagaagtgaaagctggccatctgcaaaaagcagataagtgagtttgaaccttttgcattttgttagctcagtcagtcctcatcgtggtcctgaggcataggtactgttgtaccaaggtcacttatctaacaaaataacccttcatgtattttaaatttatttgacaagtctgcagacaatccttatctaaccagctattttcttaattgctacagcttgacctaccagtattccggagtaaccagcaaatgcaaagttgaccttgttcctgcatcatctttttgatggttcaaatttcagcctccctgactactacaaagccagagcagtcttagtaccagaaacagtgttgcactttcgttgcatgtgctgtgtgaccccaaggggacagggagtcactttgggtcatctctgtccccagtacagatcttggattcataggtggacattccataagtggggtgacagcaaatgacttgcaggtagtctcattgtaggtttgtgcaccagagtgaccctgtgagcctttgttaataggttgggagctcagggtgtttatgtccacctgtctggtctagccaaacagtttttttctgggaatcaaatttctgtggtttttatggccagaaattttaaggacttgtgtgtgctgggatatgagaatagaagctacagagttcttttcttgggacctagactgggaggtgcaatgtcaggacctccaggtgaatggtaggatctgagttgaccctgcagttcggttatgcagtcaattatttctttttaagaggaggaggattcacttgggtgttgggatcaaatttggattctgtcccaggccttactgtaaaactaggggattgcctttccatatctgctgggggtggagacccttatgtgcagcactcaatcccactggaagcctaatgctgcagtcagaagcaatgcctggctggggcagtaggggaaattccacccaattttgctatgagcctaaaacctctttaaaaacggtcagttaactaaaaaataaaaatcaagtctttaggagagtagaaaacacaattaactaaaaagcagggacatctgaaagagacgtattaagttaacatttttaaaaatccaaatgaaagtaaatggaataaatgtatcaggtaaaggacaagttgtaagcttggatttttaggtctagcaatacactgtttacaagagcatcacctaaaatgtgacaaaagatgttgaaaggatgaaaaaaggtatagtagacatacactaaccaaaaatgtagctctttgaatctcagaaaaaagtagattttaataaagtgtgaaagttgtcaatcaaaaaaaaaaa

SEQ ID NO: 344807 - DNA, 5701 bp, Homo sapiens
ctaggtcaggccggtttaatcggccgagggttcagtcagagcgagaacattccagaggtcgcccagctccggcgctgacgggtgtggaccgcggacgtcgctgggacagcccctccccgctgctcggcggcggcacctggcccggccgctcctcgctgcgcttcgcctccgcctcctcggactcggactcgggtttatatcgcgcctcacttcatcccagtcccgggcgagcagcgttgggtttatgtctttatttgacgaaaacgagctgttgcgcagccattggtacctgtattggggaaacatagcatacaagcaagaagcttacagcctcagtggcgaaaattttttcatgtcagagaccgagaactcttgcagtcgtttatgtcatcccttcttctccagacagaagataccaaaaagttgcaatcaaagatctcttcatcttattgataaagccactaataagccaaaatgtctgtcaatgtcaaccgcagcgtgtcagaccagttctatcgctacaagatgccccgtctgattgccaaggttgagggcaaaggcaatggaatcaagacagttatagtcaacatggttgacgttgcaaaggcgcttaatcggcctccaacgtatcccaccaaatattttggttgtgagctgggagcacagacccagtttgatgttaagaatgaccgttacattgtcaatggatctcatgaggcgaataagctgcaagacatgttggatggattcattaaaaaatttgttctctgtcctgaatgtgagaatcctgaaacagatttgcatgtcaatccaaagaagcaaacaataggtaattcttgtaaagcctgtggctatcgaggcatgcttgacacacatcataaactctgcacattcattctcaaaaacccacctgagaatagtgacagtggtacaggaaagaaagaaaaagaaaagaaaaacagaaagggcaaagacaaggaaaatggctccgtatccagcagtgagacaccaccaccaccaccaccaccaaatgaaattaatcctcctccacatacaatggaagaagaggaggatgatgactggggagaagatacaactgaggaagctcaaaggcgtcgaatggatgaaatcagtgaccatgcaaaagttctgacactcagtgatgatttggaaagaacaattgaggagagggtcaatatcctctttgattttgttaagaaaaagaaagaagagggtgttattgattcatctgacaaagaaatcgttgctgaagcagaaagactggatgtaaaagccatgggccctcttgttctaactgaagttctttttaatgagaagattagagaacagattaagaaatacaggcgccatttcctacgattttgtcacaacaacaaaaaagcccaacggtaccttcttcatggtttggagtgtgtggtagcaatgcatcaagctcagcttatctccaagattccacatatcttgaaggagatgtacgatgcagaccttttagaagaagaggtcatcatcagctggtcggaaaaggcctctaagaaatatgtctccaaagaacttgccaaagagattcgtgtcaaagcagaaccatttataaaatggttgaaggaggcagaggaagaatcttctggtggcgaagaagaagatgaagatgagaacattgaggtggtgtattcgaaggctgccagtgtaccgaaagttgagactgtaaagtcagacaacaaggatgacgacatcgatattgatgccatttaaagggatggatgcaacctagcttaacagtataatgctgcaaattttcctccattatcagccagaagtgcaacatgtatgtgcaaaagctaaaatggcttaacatcatgctacactttacactaaaaatctattactgtgagtggtctgttattaagcccaatgagacatctagggagtccatacacatcagtgagcagatgtagtttgcttatttatagcatgtttctttttgaaaaactagtggtggacacatttggatcacatttatacagttataaaaataaaggtttgattttggtcgttcttcagatgtttggctctgaatgacttaagctgaagtaactggctccttactttaaatgttctgccatcatttcacctgatgagcattcttggagcctgccagatattgttaggtcctggggctgcaaagaggtcctcaacaggatgtaaagcaaacttaattgtaattaatttattcagcccattaagaaagtactaaagttttatctctgtagttcctcaaattggcatctggtaatgtacattgtgaggtagactgataatgaaatgacagtgcaacatcttaaccaagaagtaaatatgacctcagtgtcctataaataatgtaagagcaggatttgaaacttggagagctgttttctcatttcatgtacacttgccccaaattgtctttgaagtcgtgtgcattgcacgttggatgagccagggaaattattacattaacaagcattttgtgtgtacgtagtagttactttgtactgagagaacttgctttggggtgcaattaataaactgattttatttgggagaaacaaggaagggtgcacttaactagcaacctaagcatgatttttcagcttttgcccttagggtttaaattacaattccaaaatgttagacatactgtattttttcgttcagtgtggctttaattttcccctcttgcagtttgttctgtaatgccttttacatttggacacatagtttatgctttttagattttggttgctttcttgccaaaataagtgttaactgtgtttcaaacttgattttctttcctttttcttttttttttcttccagaatgtcttatttaaaaagaaagctaaaagcatacttctaagtcagagcctctattttggtgtaagacttgggatattttttacttcacattgaatatagccaggcacccaagaagtctgatggccacctgagtgcaggtgacaaggacctgacagagcccatgcagggctttagatttggacacacaagagttgataacttcctcatgaactccttgcctgatctaaactcatattatgggttctgactgtttgagtaatcatcttcaaggttaaacctcttggcagttacccttttcacaaagtgcacagtgggaatcgagaatcgatagggttaattttggagcagtggcttataccattcacctctgtttttttgtgattatttcacagataatgagaccttaataacaaataggcgtaaaaaaattttcacattgaaatgatagaaacatttgatgtaataagacaagaattggtctccagctgcctttgatcaagattcgggtgcaagtggagcaggagccatatacctggagggaatgtgctttgtcacaccaaagaggatttttttttcttcaaacttgtatgttgcctaggtttcaaattctttgccgcaaggctgatctgctttcattaactggaattctgtaggagatactggtgacctaagctaagttgcactcagcatactcagtgtcaagctaatgaggttctattataaaggttctacttttaatctgagggaaaacatgttcagggcttctagaacactaaaaaatttggcttaaaccagtgttcagtctggtgccaaacttcgaatggaatacaaattcacataatctgaactttgttcacaggttatcctaatagagtaattcttcactttgctctattgaactgtcttaaggatttgtttaaacagctaagttacttgattaaaataatgataaaattgtattttgtctttgctttaatattaaagttaacaagttttcattttataatgagatcaaagcattggaatctgccctgttttgtagccgttgctttggatttgtgttggatgtatcctgcagttacacttgccagccccactcacaaaagttgttcatttcattgggtcactggctttatttgctagtcttgtctgtgaactgagcatctgcctcagttttattacttgaaatcttggcaggtgcttaatagggaacatacatacagctatgtaactgtgaataattgtatatatctctagttaagaatgagggaatggggaggtttgctttctaaacaagtgcattctgaaattgacttaaaaatttttagtgtgggtcctaaagtttagagatgggcaaggaggtctctaatccaccgcttcccgcttgagaagggaggggtatcaaaattgagccccaagctgtttgttccagtgtaccaagcactgactttatgcctttggcctggagatggcagaagtgaaagctggccatctgcaaaaagcagataagtgagtttgaaccttttgcattttgttagctcagtcagtcctcatcgtggtcctgaggcataggtactgttgtaccaaggtcacttatctaacaaaataacccttcatgtattttaaatttatttgacaagtctgcagacaatccttatctaaccagctattttcttaattgctacagcttgacctaccagtattccggagtaaccagcaaatgcaaagttgaccttgttcctgcatcatctttttgatggttcaaatttcagcctccctgactactacaaagccagagcagtcttagtaccagaaacagtgttgcactttcgttgcatgtgctgtgtgaccccaaggggacagggagtcactttgggtcatctctgtccccagtacagatcttggattcataggtggacattccataagtggggtgacagcaaatgacttgcaggtagtctcattgtaggtttgtgcaccagagtgaccctgtgagcctttgttaataggttgggagctcagggtgtttatgtccacctgtctggtctagccaaacagtttttttctgggaatcaaatttctgtggtttttatggccagaaattttaaggacttgtgtgtgctgggatatgagaatagaagctacagagttcttttcttgggacctagactgggaggtgcaatgtcaggacctccaggtgaatggtaggatctgagttgaccctgcagttcggttatgcagtcaattatttctttttaagaggaggaggattcacttgggtgttgggatcaaatttggattctgtcccaggccttactgtaaaactaggggattgcctttccatatctgctgggggtggagacccttatgtgcagcactcaatcccactggaagcctaatgctgcagtcagaagcaatgcctggctggggcagtaggggaaattccacccaattttgctatgagcctaaaacctctttaaaaacggtcagttaactaaaaaataaaaatcaagtctttaggagagtagaaaacacaattaactaaaaagcagggacatctgaaagagacgtattaagttaacatttttaaaaatccaaatgaaagtaaatggaataaatgtatcaggtaaaggacaagttgtaagcttggatttttaggtctagcaatacactgtttacaagagcatcacctaaaatgtgacaaaagatgttgaaaggatgaaaaaaggtatagtagacatacactaaccaaaaatgtagctctttgaatctcagaaaaaagtagattttaataaagtgtgaaagttgtcaatcaaaaaaaaaaa

SEQ ID NO: 344808 - DNA, 4066 bp, Homo sapiens
ctaggtcaggccggtttaatcggccgagggttcagtcagagcgagaacattccagaggtcgcccagctccggcgctgacgggtgtggaccgcggacgtcgctgggacagcccctccccgctgctcggcggcggcacctggcccggccgctcctcgctgcgcttcgcctccgcctcctcggactcggactcgggtttatatcgcgcctcacttcatcccagtcccgggcgagcagcgttgggtttatgtctttatttgacgaaaacgagctgttgcgcagccattggtacctgtattggggaaacatagcatacaagcaagaagcttacagcctcagtggcgaaaattttttcatgtcagagaccgagaactcttgcagtcgtttatgtcatcccttcttctccagacagaagataccaaaaagttgcaatcaaagatctcttcatcttattgataaagccactaataagccaaaatgtctgtcaatgtcaaccgcagcgtgtcagaccagttctatcgctacaagatgccccgtctgattgccaaggttgagggcaaaggcaatggaatcaagacagttatagtcaacatggttgacgttgcaaaggcgcttaatcggcctccaacgtatcccaccaaatattttggttgtgagctgggagcacagacccagtttgatgttaagaatgaccgttacattgtcaatggatctcatgaggcgaataagctgcaagacatgttggatggattcattaaaaaatttgttctctgtcctgaatgtgagaatcctgaaacagatttgcatgtcaatccaaagaagcaaacaataggtaattcttgtaaagcctgtggctatcgaggcatgcttgacacacatcataaactctgcacattcattctcaaaaacccacctgagaatagtgacagtggtacaggaaagaaagaaaaagaaaagaaaaacagaaagggcaaagacaaggaaaatggctccgtatccagcagtgagacaccaccaccaccaccaccaccaaatgaaattaatcctcctccacatacaatggaagaagaggaggatgatgactggggagaagatacaactgaggaagctcaaaggcgtcgaatggatgaaatcagtgaccatgcaaaagttctgacactcagtgatgatttggaaagaacaattgaggagagggtcaatatcctctttgattttgttaagaaaaagaaagaagagggtgttattgattcatctgacaaagaaatcgttgctgaagcagaaagactggatgtaaaagccatgggccctcttgttctaactgaagttctttttaatgagaagattagagaacagattaagaaatacaggcgccatttcctacgattttgtcacaacaacaaaaaagcccaacggtaccttcttcatggtttggagtgtgtggtagcaatgcatcaagctcagcttatctccaagattccacatatcttgaaggagatgtacgatgcagaccttttagaagaagaggtcatcatcagctggtcggaaaaggcctctaagaaatatgtctccaaagaacttgccaaagagattcgtgtcaaagcagaaccatttataaaatggttgaaggaggcagaggaagaatcttctggtggcgaagaagaagatgaagatgagaacattgaggtggtgtattcgaaggctgccagtgtaccgaaagttgagactgtaaagtcagacaacaaggatgacgacatcgatattgatgccatttaaagggatggatgcaacctagcttaacagtataatgctgcaaattttcctccattatcagccagaagtgcaacatgtatgtgcaaaagctaaaatggcttaacatcatgctacactttacactaaaaatctattactgtgagtggtctgttattaagcccaatgagacatctagggagtccatacacatcagtgagcagatgtagtttgcttatttatagcatgtttctttttgaaaaactagtggtggacacatttggatcacatttatacagttataaaaataaaggtttgattttggtcgttcttcagatgtttggctctgaatgacttaagctgaagtaactggctccttactttaaatgttctgccatcatttcacctgatgagcattcttggagcctgccagatattgttaggtcctggggctgcaaagaggtcctcaacaggatgtaaagcaaacttaattgtaattaatttattcagcccattaagaaagtactaaagttttatctctgtagttcctcaaattggcatctggtaatgtacattgtgaggtagactgataatgaaatgacagtgcaacatcttaaccaagaagtaaatatgacctcagtgtcctataaataatgtaagagcaggatttgaaacttggagagctgttttctcatttcatgtacacttgccccaaattgtctttgaagtcgtgtgcattgcacgttggatgagccagggaaattattacattaacaagcattttgtgtgtacgtagtagttactttgtactgagagaacttgctttggggtgcaattaataaactgattttatttgggagaaacaaggaagggtgcacttaactagcaacctaagcatgatttttcagcttttgcccttagggtttaaattacaattccaaaatgttagacatactgtattttttcgttcagtgtggctttaattttcccctcttgcagtttgttctgtaatgccttttacatttggacacatagtttatgctttttagattttggttgctttcttgccaaaataagtgttaactgtgtttcaaacttgattttctttcctttttcttttttttttcttccagaatgtcttatttaaaaagaaagctaaaagcatacttctaagtcagagcctctattttggtgtaagacttgggatattttttacttcacattgaatatagccaggcacccaagaagtctgatggccacctgagtgcaggtgacaaggacctgacagagcccatgcagggctttagatttggacacacaagagttgataacttcctcatgaactccttgcctgatctaaactcatattatgggttctgactgtttgagtaatcatcttcaaggttaaacctcttggcagttacccttttcacaaagtgcacagtgggaatcgagaatcgatagggttaattttggagcagtggcttataccattcacctctgtttttttgtgattatttcacagataatgagaccttaataacaaataggcgtaaaaaaattttcacattgaaatgatagaaacatttgatgtaataaaacttggttggcttgatattgcctaggtttcaaattctttgccgcaaggctgatctgctttcattaactggaattctgtaggagatactggtgacctaagctaagttgcactcagcatactcagtgtcaagctaatgaggttctattataaaggttctacttttaatctgagggaaaacatgttcagggcttctagaacactaaaaaatttggcttaaaccagtgttcagtctggtgccaaacttcgaatggaatacaaattcacataatctgaactttgttcacaggttatcctaatagagtaattcttcactttgctctattgaactgtcttaaggatttgtttaaacagctaagttacttgattaaaataatgataaaattgtaaaaaaaaaaaaaaaaaaaaaaaaaaaggggggggggggaaaaaaatttcccggggggggccccattttaggtgtcaccgctttttgtttgtcaaagagggggcggccatagagggggggcgaaattaaagaggagaagacgggggcgcggtttaaacagagcctgtagaggggaaaacggcagcaggcggaattggggagaagacaccttattgggggcgggtgcaaaatttgtggcagacaacacctagagaattaaaggtccgaggaactaaattgaggcgtaggggttaagcacggcatttgtgagggaagattagctacggaatgatgacatc

SEQ ID NO: 344809 - DNA, 2078 bp, Homo sapiens
ctaggtcaggccggtttaatcggccgagggttcagtcagagcgagaacattccagaggtcgcccagctccggcgctgacgggtgtggaccgcggacgtcgctgggacagcccctccccgctgctcggcggcggcacctggcccggccgctcctcgctgcgcttcgcctccgcctcctcggactcggactcgggtttatatcgcgcctcacttcatcccagtcccgggcgagcagcgttgggtttatgtctttatttgacgaaaacgagctgttgcgcagccattggtacctgtattggggaaacatagcatacaagcaagaagcttacagcctcagtggcgaaaattttttcatgtcagagaccgagaactcttgcagtcgtttatgtcatcccttcttctccagacagaagataccaaaaagttgcaatcaaagatctcttcatcttattgataaagccactaataagccaaaatgtctgtcaatgtcaaccgcagcgtgtcagaccagttctatcgctacaagatgccccgtctgattgccaaggttgagggcaaaggcaatggaatcaagacagttatagtcaacatggttgacgttgcaaaggcgcttaatcggcctccaacgtatcccaccaaatattttggttgtgagctgggagcacagacccagtttgatgttaagaatgaccgttacattgtcaatggatctcatgaggcgaataagctgcaagacatgttggatggattcattaaaaaatttgttctctgtcctgaatgtgagaatcctgaaacagatttgcatgtcaatccaaagaagcaaacaataggtaattcttgtaaagcctgtggctatcgaggcatgcttgacacacatcataaactctgcacattcattctcaaaaacccacctgagaatagtgacagtggtacaggaaagaaagaaaaagaaaagaaaaacagaaagggcaaagacaaggaaaatggctccgtatccagcagtgagacaccaccaccaccaccaccaccaaatgaaattaatcctcctccacatacaatggaagaagaggaggatgatgactggggagaagatacaactgaggaagctcaaaggcgtcgaatggatgaaatcagtgaccatgcaaaagttctgacactcagtgatgatttggaaagaacaattgaggagagggtcaatatcctctttgattttgttaagaaaaagaaagaagagggtgttattgattcatctgacaaagaaatcgttgctgaagcagaaagactggatgtaaaagccatgggccctcttgttctaactgaagttctttttaatgagaagattagagaacagattaagaaatacaggcgccatttcctacgattttgtcacaacaacaaaaaagcccaacggtaccttcttcatggtttggagtgtgtggtagcaatgcatcaagctcagcttatctccaagattccacatatcttgaaggagatgtacgatgcagaccttttagaagaagaggtcatcatcagctggtcggaaaaggcctctaagaaatatgtctccaaagaacttgccaaagagattcgtgtcaaagcagaaccatttataaaatggttgaaggaggcagaggaagaatcttctggtggcgaagaagaagatgaagatgagaacattgaggtggtgtattcgaaggctgccagtgtaccgaaagttgagactgtaaagtcagacaacaaggatgacgacatcgatattgatgccatttaaagggatggatgcaacctagcttaacagtataatgctgcaaattttcctccattatcagccagaagtgcaacatgtatgtgcaaaagctaaaatggcttaacatcatgctacactttacactaaaaatctattactgtgagtggtctgttattaagcccaatgagacatctagggagtccatacacatcagtgagcagatgtagtttgcttatttatagcatgtttctttttgaaaaactagtggtggacacatttggatcacatttatacagttataaaaataaaggtttgattttggtcgttcttca

SEQ ID NO: 344810 - DNA, 4756 bp, Homo sapiens
atcccccgggctgcaggattcggcacgagagagacaaggaaaatggctccgtatccagcagtgagacaccaccaccaccaccaccaccaaatgaaattaatcctcctccacatacaatggaagaagaggaggatgatgactggggagaagatacaactgaggaagctcaaaggcgtcgaatggatgaaatcagtgaccatgcaaaagttctgacactcagtgatgatttggaaagaacaattgaggagagggtcaatatcctctttgattttgttaagaaaaagaaagaagagggtgttattgattcatctgacaaagaaatcgttgctgaagcagaaagactggatgtaaaagccatgggccctcttgttctaactgaagttctttttaatgagaagattagagaacagattaagaaatacaggcgccatttcctacgattttgtcacaacaacaaaaaagcccaacggtaccttcttcatggtttggagtgtgtggtagcaatgcatcaagctcagcttatctccaagattccacatatcttgaaggagatgtacgatgcagaccttttagaagaagaggtcatcatcagctggtcggaaaagatttataaaatggttgaaggaggcagaggaagaatcttctggtggcgaagaagaagatgaagatgagaacattgaggtggtgtattcgaaggctgccagtgtaccgaaagttgagactgtaaagtcagacaacaaggatgacgacatcgatattgatgccatttaaagggatggatgcaacctagcttaacagtataatgctgcaaattttcctccattatcagccagaagtgcaacatgtatgtgcaaaagctaaaatggcttaacatcatgctacactttacactaaaaatctattactgtgagtggtctgttattaagcccaatgagacatctagggagtccatacacatcagtgagcagatgtagtttgcttatttatagcatgtttctttttgaaaaactagtggtggacacatttggatcacatttatacagttataaaaataaaggtttgattttggtcgttcttcagatgtttggctctgaatgacttaagctgaagtaactggctccttactttaaatgttctgccatcatttcacctgatgagcattcttggagcctgccagatattgttaggtcctggggctgcaaagaggtcctcaacaggatgtaaagcaaacttaattgtaattaatttattcagcccattaagaaagtactaaagttttatctctgtagttcctcaaattggcatctggtaatgtacattgtgaggtagactgataatgaaatgacagtgcaacatcttaaccaagaagtaaatatgacctcagtgtcctataaataatgtaagagcaggatttgaaacttggagagctgttttctcatttcatgtacacttgccccaaattgtctttgaagtcgtgtgcattgcacgttggatgagccagggaaattattacattaacaagcattttgtgtgtacgtagtagttactttgtactgagagaacttgctttggggtgcaattaataaactgattttatttgggagaaacaaggaagggtgcacttaactagcaacctaagcatgatttttcagcttttgcccttagggtttaaattacaattccaaaatgttagacatactgtattttttcgttcagtgtggctttaattttcccctcttgcagtttgttctgtaatgccttttacatttggacacatagtttatgctttttagattttggttgctttcttgccaaaataagtgttaactgtgtttcaaacttgattttctttcctttttcttttttttttcttccagaatgtcttatttaaaaagaaagctaaaagcatacttctaagtcagagcctctattttggtgtaagacttgggatattttttacttcacattgaatatagccaggcacccaagaagtctgatggccacctgagtgcaggtgacaaggacctgacagagcccatgcagggctttagatttggacacacaagagttgataacttcctcatgaactccttgcctgatctaaactcatattatgggttctgactgtttgagtaatcatcttcaaggttaaacctcttggcagttacccttttcacaaagtgcacagtgggaatcgagaatcgatagggttaattttggagcagtggcttataccattcacctctgtttttttgtgattatttcacagataatgagaccttaataacaaataggcgtaaaaaaattttcacattgaaatgatagaaacatttgatgtaataaaacttggttggcttgatattttaaggaattgaaacctagcaatcttattggagagacaagaattggtctccagctgcctttgatcaagattcgggtgcaagtggagcaggagccatatacctggagggaatgtgctttgtcacaccaaagaggatttttttttcttcaaacttgtatgttgcctaggtttcaaattctttgccgcaaggctgatctgctttcattaactggaattctgtaggagatactggtgacctaagctaagttgcactcagcatactcagtgtcaagctaatgaggttctattataaaggttctacttttaatctgagggaaaacatgttcagggcttctagaacactaaaaaatttggcttaaaccagtgttcagtctggtgccaaacttcgaatggaatacaaattcacataatctgaactttgttcacaggttatcctaatagagtaattcttcactttgctctattgaactgtcttaaggatttgtttaaacagctaagttacttgattaaaataatgataaaattgtattttgtctttgctttaatattaaagttaacaagttttcattttataatgagatcaaagcattggaatctgccctgttttgtagccgttgctttggatttgtgttggatgtatcctgcagttacacttgccagccccactcacaaaagttgttcatttcattgggtcactggctttatttgctagtcttgtctgtgaactgagcatctgcctcagttttattacttgaaatcttggcaggtgcttaatagggaacatacatacagctatgtaactgtgaataattgtatatatctctagttaagaatgagggaatggggaggtttgctttctaaacaagtgcattctgaaattgacttaaaaatttttagtgtgggtcctaaagtttagagatgggcaaggaggtctctaatccaccgcttcccgcttgagaagggaggggtatcaaaattgagccccaagctgtttgttccagtgtaccaagcactgactttatgcctttggcctggagatggcagaagtgaaagctggccatctgcaaaaagcagataagtgagtttgaaccttttgcattttgttagctcagtcagtcctcatcgtggtcctgaggcataggtactgttgtaccaaggtcacttatctaacaaaataacccttcatgtattttaaatttatttgacaagtctgcagacaatccttatctaaccagctattttcttaattgctacagcttgacctaccagtattccggagtaaccagcaaatgcaaagttgaccttgttcctgcatcatctttttgatggttcaaatttcagcctccctgactactacaaagccagagcagtcttagtaccagaaacagtgttgcactttcgttgcatgtgctgtgtgaccccaaggggacagggagtcactttgggtcatctctgtccccagtacagatcttggattcataggtggacattccataagtggggtgacagcaaatgacttgcaggtagtctcattgtaggtttgtgcaccagagtgaccctgtgagcctttgttaataggttgggagctcagggtgtttatgtccacctgtctggtctagccaaacagtttttttctgggaatcaaatttctgtggtttttatggccagaaattttaaggacttgtgtgtgctgggatatgagaatagaagctacagagttcttttcttgggacctagactgggaggtgcaatgtcaggacctccaggtgaatggtaggatctgagttgaccctgcagttcggttatgcagtcaattatttctttttaagaggaggaggattcacttgggtgttgggatcaaatttggattctgtcccaggccttactgtaaaactaggggattgcctttccatatctgctgggggtggagacccttatgtgcagcactcaatcccactggaagcctaatgctgcagtcagaagcaatgcctggctggggcagtaggggaaattccacccaattttgctatgagcctaaaacctctttaaaaacggtcagttaactaaaaaataaaaatcaagtctttaggagagtagaaaacacaattaactaaaaagcagggacatctgaaagagacgtattaagttaacatttttaaaaatccaaatgaaagtaaatggaataaatgtatcaggtaaaggacaagttgtaagcttggatttttaggtctagcaatacactgtttacaagagcatcacctaaaatgtgacaaaagatgttgaaaggatgaaaaaaggtatagtagacatacactaaccaaaaatgtagctctttgaatctcagaaaaaagtagattttaataaagtgtgaaagttgtcaatcaaaaaaaaaaa

SEQ ID NO: 344811 - DNA, 2249 bp, Homo sapiens
ctaggtcaggccggtttaatcggccgagggttcagtcagagcgagaacattccagaggtcgcccagctccggcgctgacgggtgtggaccgcggacgtcgctgggacagcccctccccgctgctcggcggcggcacctggcccggccgctcctcgctgcgcttcgcctccgcctcctcggactcggactcgggtttatatcgcgcctcacttcatcccagtcccgggcgagcagcgttgggtttatgtctttatttgacgaaaacgagctgttgcgcagccattggtacctgtattggggaaacatagcatacaagcaagaagcttacagcctcagtggcgaaaattttttcatgtcagagaccgagaactcttgcagtcgtttatgtcatcccttcttctccagacagaagataccaaaaagttgcaatcaaagatctcttcatcttattgataaagccactaataagccaaaatgtctgtcaatgtcaaccgcagcgtgtcagaccagttctatcgctacaagatgccccgtctgattgccaaggttgagggcaaaggcaatggaatcaagacagttatagtcaacatggttgacgttgcaaaggcgcttaatcggcctccaacgtatcccaccaaatattttggttgtgagctgggagcacagacccagtttgatgttaagaatgaccgttacattgtcaatggatctcatgaggcgaataagctgcaagacatgttggatggattcattaaaaaatttgttctctgtcctgaatgtgagaatcctgaaacagatttgcatgtcaatccaaagaagcaaacaataggtaattcttgtaaagcctgtggctatcgaggcatgcttgacacacatcataaactctgcacattcattctcaaaaacccacctgagaatagtgacagtggtacaggaaagaaagaaaaagaaaagaaaaacagaaagggcaaagacaaggaaaatggctccgtatccagcagtgagacaccaccaccaccaccaccaccaaatgaaattaatcctcctccacatacaatggaagaagaggaggatgatgactggggagaagatacaactgaggaagctcaaaggcgtcgaatggatgaaatcagtgaccatgcaaaagttctgacactcagtgatgatttggaaagaacaattgaggagagggtcaatatcctctttgattttgttaagaaaaagaaagaagagggtgttattgattcatctgacaaagaaatcgttgctgaagcagaaagactggatgtaaaagccatgggccctcttgttctaactgaagttctttttaatgagaagattagagaacagattaagaaatacaggcgccatttcctacgattttgtcacaacaacaaaaaagcccaacggtaccttcttcatggtttggagtgtgtggtagcaatgcatcaagctcagcttatctccaagattccacatatcttgaaggagatgtacgatgcagaccttttagaagaagaggtcatcatcagctggtcggaaaaggcctctaagaaatatgtctccaaagaacttgccaaagagattcgtgtcaaagcagaaccatttataaaatggttgaaggaggcagaggaagaatcttctggtggcgaagaagaagatgaagatgagaacattgaggtggtgtattcgaaggctgccagtgtaccgaaagttgagactgtaaagtcagacaacaaggatgacgacatcgatattgatgccatttaaagggatggatgcaacctagcttaacagtataatgctgcaaattttcctccattatcagccagaagtgcaacatgtatgtgcaaaagctaaaatggcttaacatcatgctacactttacactaaaaatctattactgtgagtgaaaaaaaaaaaaaaaaaaaaaaaaaaggggggggggggaaaaaaatttcccggggggggccccattttaggtgtcaccgctttttgtttgtcaaagagggggcggccatagagggggggcgaaattaaagaggagaagacgggggcgcggtttaaacagagcctgtagaggggaaaacggcagcaggcggaattggggagaagacaccttattgggggcgggtgcaaaatttgtggcagacaacacctagagaattaaaggtccgaggaactaaattgaggcgtaggggttaagcacggcatttgtgagggaagattagctacggaatgatgacatc

SEQ ID NO: 344812 - DNA, 1664 bp, Homo sapiens
ctaggtcaggccggtttaatcggccgagggttcagtcagagcgagaacattccagaggtcgcccagctccggcgctgacgggtgtggaccgcggacgtcgctgggacagcccctccccgctgctcggcggcggcacctggcccggccgctcctcgctgcgcttcgcctccgcctcctcggactcggactcgggtttatatcgcgcctcacttcatcccagtcccgggcgagcagcgttgggtttatgtctttatttgacgaaaacgagctgttgcgcagccattggtacctgtattggggaaacatagcatacaagcaagaagcttacagcctcagtggcgaaaattttttcatgtcagagaccgagaactcttgcagtcgtttatgtcatcccttcttctccagacagaagataccaaaaagttgcaatcaaagatctcttcatcttattgataaagccactaataagccaaaatgtctgtcaatgtcaaccgcagcgtgtcagaccagttctatcgctacaagatgccccgtctgattgccaaggttgagggcaaaggcaatggaatcaagacagttatagtcaacatggttgacgttgcaaaggcgcttaatcggcctccaacgtatcccaccaaatattttggttgtgagctgggagcacagacccagtttgatgttaagaatgaccgttacattgtcaatggatctcatgaggcgaataagctgcaagacatgttggatggattcattaaaaaatttgttctctgtcctgaatgtgagaatcctgaaacagatttgcatgtcaatccaaagaagcaaacaataggtaattcttgtaaagcctgtggctatcgaggcatgcttgacacacatcataaactctgcacattcattctcaaaaacccacctgagaatagtgacagtggtacaggaaagaaagaaaaagaaaagaaaaacagaaagggcaaagacaaggaaaatggctccgtatccagcagtgagacaccaccaccaccaccaccaccaaatgaaattaatcctcctccacatacaatggaagaagaggaggatgatgactggggagaagatacaactgaggaagctcaaaggcgtcgaatggatgaaatcagtgaccatgcaaaagttctgacactcagtgatgatttggaaagaacaattgaggagagggtcaatatcctctttgattttgttaagaaaaagaaagaagagggtgttattgattcatctgacaaagaaatcgttgctgaagcagaaagactggatgtaaaagccatgggccctcttgttctaactgaagttctttttaatgagaagattagagaacagattaagaaatacaggcgccatttcctacgattttgtcacaacaacaaaaaagcccaacggtaccttcttcatggtttggagtgtgtggtagcaatgcatcaagctcagcttatctccaagattccacatatcttgaaggagatgtacgatgcagaccttttagaagaagaggtcatcatcagctggtcggaaaaggcctctaagaaatatgtctccaaagaacttgccaaagagattcgtgtcaaagcagaacctaagatgagaccatgtagtggtgtattcgaaggcttgcagtgtcccgaagttgaaactga

SEQ ID NO: 344813 - DNA, 1407 bp, Homo sapiens
ctaggtcaggccggtttaatcggccgagggttcagtcagagcgagaacattccagaggtcgcccagctccggcgctgacgggtgtggaccgcggacgtcgctgggacagcccctccccgctgctcggcggcggcacctggcccggccgctcctcgctgcgcttcgcctccgcctcctcggactcggactcgggtttatatcgcgcctcacttcatcccagtcccgggcgagcagcgttgggtttatgtctttatttgacgaaaacgagctgttgcgcagccattggtacctgtattggggaaacatagcatacaagcaagaagcttacagcctcagtggcgaaaattttttcatgtcagagaccgagaactcttgcagtcgtttatgtcatcccttcttctccagacagaagataccaaaaagttgcaatcaaagatctcttcatcttattgataaagccactaataagccaaaatgtctgtcaatgtcaaccgcagcgtgtcagaccagttctatcgctacaagatgccccgtctgattgccaaggttgagggcaaaggcaatggaatcaagacagttatagtcaacatggttgacgttgcaaaggcgcttaatcggcctccaacgtatcccaccaaatattttggttgtgagctgggagcacagacccagtttgatgttaagaatgaccgttacattgtcaatggatctcatgaggcgaataagctgcaagacatgttggatggattcattaaaaaatttgttctctgtcctgaatgtgagaatcctgaaacagatttgcatgtcaatccaaagaagcaaacaataggtaattcttgtaaagcctgtggctatcgaggcatgcttgacacacatcataaactctgcacattcattctcaaaaacccacctgagaatagtgacagtggtacaggaaagaaagaaaaagaaaagaaaaacagaaagggcaaagacaaggaaaatggctccgtatccagcagtgagacaccaccaccaccaccaccaccaaatgaaattaatcctcctccacatacaatggaagaagaggaggatgatgactggggagaagatacaactgaggaagctcaaaggcgtcgaatggatgaaatcagtgaccatgcaaaagttctgacactcagtgatgatttggaaagaacaattgaggagagggtcaatatcctctttgattttgttaagaaaaagaaagaagagggtgttattgattcatctgacaaagaaatcgttgctgaagcagaaagactggatgtaaaagccatgggccctcttgttctaactgaagttctttttaatgagaagattagagaacagattaagaaatacaggcgccatttcctacgagtaagcaaagtgctctggattcataaa

SEQ ID NO: 344814 - DNA, 1295 bp, Homo sapiens
ctaggtcaggccggtttaatcggccgagggttcagtcagagcgagaacattccagaggtcgcccagctccggcgctgacgggtgtggaccgcggacgtcgctgggacagcccctccccgctgctcggcggcggcacctggcccggccgctcctcgctgcgcttcgcctccgcctcctcggactcggactcgggtttatatcgcgcctcacttcatcccagtcccgggcgagcagcgttgggtttatgtctttatttgacgaaaacgagctgttgcgcagccattggtacctgtattggggaaacatagcatacaagcaagaagcttacagcctcagtggcgaaaattttttcatgtcagagaccgagaactcttgcagtcgtttatgtcatcccttcttctccagacagaagataccaaaaagttgcaatcaaagatctcttcatcttattgataaagccactaataagccaaaatgtctgtcaatgtcaaccgcagcgtgtcagaccagttctatcgctacaagatgccccgtctgattgccaaggttgagggcaaaggcaatggaatcaagacagttatagtcaacatggttgacgttgcaaaggcgcttaatcggcctccaacgtatcccaccaaatattttggttgtgagctgggagcacagacccagtttgatgttaagaatgaccgttacattgtcaatggatctcatgaggcgaataagctgcaagacatgttggatggattcattaaaaaatttgttctctgtcctgaatgtgagaatcctgaaacagatttgcatgtcaatccaaagaagcaaacaataggtaattcttgtaaagcctgtggctatcgaggcatgcttgacacacatcataaactctgcacattcattctcaaaaacccacctgagaatagtgacagtggtacaggaaaaaaaaaaaaaaaaaaaaaaaactcgagtttttttttttttttttttttttagtcttaggaaacaaaaggtttattgaaatgcatgtagataaattatcatcagcataaaactgttatggagttttcaacatggggtcttttgctcttaaaatgaagtgaagctttgcaagtccattgtccaataggaaaaatattatatctctctgttcagataaagtcctttaaaaaagtaaatctcttttgaaacggtcttttaagcgtctccagcctgtttggctccccccaggtggtgttgctgtccttctccaattgtgagtctgttgaatctcgtgccgctcgtgccgaattcggcacgag

SEQ ID NO: 344815 - DNA, 1255 bp, Homo sapiens
cgccccccggcccggaagtgcgcagcgctggcaagatggcgggaggggtgcgcccgctgaggggcctccgcgccttgtgtcgcgtgctgctcttcctctcgcagttctgcattctgtcgggcggtgaaagtactgaaatcccaccttatgtgatgaagtgtccgagcaatggtttgtgtagcaggcttcctgcagactgtatagactgcacaacaaatttctcctgtacctatgggaagcctgtcacttttgactgtgcagtgaaaccatctgttacctgtgttgatcaagacttcaaatcccaaaagaacttcatcattaacatgacttgcagattttgctggcagcttcctgaaacagattacgagtgtaccaactccaccagctgcatgacggtgtcctgtcctcggcagcgctaccctgccaactgcacggtgcgggaccacgtccactgcttgggtaaccgtacttttcccaaaatgctatattgcaattggactggaggctataagtggtctacggctctggctctaagcatcaccctcggtgggtttggagcagaccgtttctacctgggccagtggcgggaaggcctcggcaagctcttcagcttcggtggcctgggaatatggacgctgatagacgtcctgctcattggagttggctatgttggaccagcagatggctctttgtacatttagctgtggtgtgtgcttcagaaaggagcagggcttagaaaaagcccttttgtccgtaggagttgatgtggtgtgagtgatatatttctatgtttttaatgtacagcatctgtactttgtttgccttgataaaggtaagataaatgaaacgctgaactatgctaatctggaatttgtttttatttgcctgaaatatatttttttctgtgaaaaaattaaaacgtacttaagccaggagaatgaattatacagtgattgaaaatccatttaattcctatgacttttgttttgtattgcccaagtcaaactacatcacttgtatctccagcccaaatgtagtctgccttgaaaagtctttcagctgtgactgcaggaagtgggagtgtttttattgttagctaattgctgtgactgcaggaagtgggagtgtttctgttgttggctaattgaagttattaggctcagcttcagtcatgtgtaagttttgcagtgtaatacatatgtagtctggtctgtatatatgaaaatttgaattaaactgcagaatgtttatgtct

SEQ ID NO: 344816 - DNA, 1419 bp, Homo sapiens
tattgctatcttcagtgctgctaaggcttcaagtttctgtaaatacgagatgtttctataatatcttgtactagattggggactggggtgttgggtggttttcttctgtgttcctaatgctccctttaccttttagctattcctgcatgtctttgccacagagggactctatctatactctcgcctcttcagggatagactctctttacttgttactctgtgctaggcttatggtgagatagggttttctttgttgtcttgctgcaacctcaatcttagacagatataaaccttagggtggggctgtctcagcaattctgctcttccttcctacggcaattaaattctgccttgtatctgtgatggtcttggacaggagattcctgctctcccctccctcagtgtagcagacttctggttggtactggtataggattctgggcctggaatagcttctttattttatctcagaactaggacatttttgcatctacccttcccacagtaccaaaggattttctcctgtgtccttggtgctagagttttcctacccctcttccagaggcatataagttttgcttctagtctttctataagagcaatggattttgcctgtgccctgtgtgtgggaggatgcggtcccctcccctcaatgtcttaaggcgtttactgcatagaaaggaaggatccaggggaagtgggtggggctttgttcctgtcctccaacagcagctgatcttgtcctgcacacccacatacctgtgcctctgaaggagcagcccccgtttcctgcccactcctaatatgtctcttgagagccctcagtgattttgtgagtgagtgtgactccctgagtttcccagttattccaaacttacatcctaggccacacttggactttaatgatttactaacattttatctgatagcttcatacctaatgggggccacatgtttttcctgtgctcaggcaaaggtgagaaacgccatgtgtctcgtgtctccctggagtgcctgctccctctttggaattctgcttatttggttgccttgccatcttagatctttgatagactcaagaaaaattataatgttggtacactagccaggtttttttattattctttgcagctttctacatcccacatggaagcagcaatgagatgttttaaaacgagatgtttcaaaatcaccatctcactctagtttgtctacaaagccatctatcaagaacattatatgaacttttaaatacattcttctgtatttatagaatgatttttaaagcatttccagccatgtttaaaagctgtgaatagtcttttttttgtaacctagtaaccaaagttattaatgaaagtcacagttaaacttttttcctttgaaaataaaatgaatcaacacataacgagaaggtta

SEQ ID NO: 344817 - DNA, 629 bp, Homo sapiens
cgccccccggcccggaagtgcgcagcgctggcaagatggcgggaggggtgcgcccgctgaggggcctccgcgccttgtgtcgcgtgctgctcttcctctcgcagttctgcattctgtcgggcggtgagcaatcgcaggcgctggctcagtcaataaaggatccgggcccaacacgcacattcacagtagttcccagggcagcagaaagtactgaaatcccaccttatgtgatgaagtgtccgagcaatggtttgtgtagcaggcttcctgcagactgtatagactgcacaacaaatttctcctgtacctatgggaagcctgtcacttttgactgtgcagtgaaaccatctgttacctgtgttgatcaagacttcaaatcccaaaagaacttcatcattaacatgacttgcagattttgctggcagcttcctgaaacagattacgagtgtaccaactccaccagctgcatgacggtgtcctgtcctcggcagcgctaccctgccaactgcacggtgcgggaccacgtccactgcttggtaccgtactttccccaaaggctttttccccattgacctgcccgctccccctggtccccggctctggctctaccccttacccctcgttggttt

SEQ ID NO: 344818 - DNA, 1334 bp, Homo sapiens
cgccccccggcccggaagtgcgcagcgctggcaagatggcgggaggggtgcgcccgctgaggggcctccgcgccttgtgtcgcgtgctgctcttcctctcgcagttctgcattctgtcgggcggtgaaagtactgaaatcccaccttatgtgatgaagtgtccgagcaatggtttgtgtagcaggcttcctgcagactgtatagactgcacaacaaatttctcctgtacctatgggaagcctgtcacttttgactgtgcagtgaaaccatctgttacctgtgttgatcaagacttcaaatcccaaaagaacttcatcattaacatgacttgcagattttgctggcagcttcctgaaacagattacgagtgtaccaactccaccagctgcatgacggtgtcctgtcctcggcagcgctaccctgccaactgcacggtgcgggaccacgtccactgcttgggtaaccgtacttttcccaaaatgctatattgcaattggactggaggctataagtggtctacggctctggctctaagcatcaccctcggtgggtttggagcagaccgtttctacctgggccagtggcgggaaggcctcggcaagctcttcagcttcggtggcctgggaatatggacgctgatagacgtcctgctcattggagttggctatgttggaccagcagatggctctttgtacatttagctgtggtgtgtgcttcagaaaggagcagggcttagaaaaagcccttttgtccgtaggagttgatgtggtgtgagtgatatatttctatgtttttaatgtacagcatctgtactttgtttgccttgataaaggtaagataaatgaaacgctgaactatgctaatctggaatttgtttttatttgcctgaaatatatttttttctgtgaaaaaattaaaacgtacttaagccaggagaatgaattatacagtgattgaaaatccatttaattcctatgacttttgttttgtattgcccaagtcaaactacatcacttgtatctccagcccaaatgtagtctgccttgaaaagtctttcagctgtgactgcaggaagtgggagtgtttttattgttagctaattgctgtgactgcaggaagtgggagtgtttctgttgttggctaattgaagttattaggctcagcttcagtcatgtgtaagttttgcagtgtaatacatatgtagtctggtctgtatatatgaaaatttgaattaaactgcagaatgtttatgtctagttatggtttaaattttcttagtagtatataaaaggtaagagtactgaaaaattaataaaattgcaagttaagaaata

SEQ ID NO: 344819 - DNA, 1462 bp, Homo sapiens
cgccccccggcccggaagtgcgcagcgctggcaagatggcgggaggggtgcgcccgctgaggggcctccgcgccttgtgtcgcgtgctgctcttcctctcgcagttctgcattctgtcgggcggtgaaagtactgaaatcccaccttatgtgatgaagtgtccgagcaatggtttgtgtagcaggcttcctgcagactgtatagactgcacaacaaatttctcctgtacctatgggaagcctgtcacttttgactgtgcagtgaaaccatctgttacctgtgttgatcaagacttcaaatcccaaaagaacttcatcattaacatgacttgcagattttgctggcagcttcctgaaacagattacgagtgtaccaactccaccagctgcatgacggtgtcctgtcctcggcagcgctaccctgccaactgcacggtgcgggaccacgtccactgcttgggtaaccgtacttttcccaaaatgctatattgcaattggactggaggctataagtggtctacggctctggctctaagcatcaccctcggtgggtttggagcagaccgtttctacctgggccagtggcgggaaggcctcggcaagctcttcagcttcggtggcctgggaatatggacgctgatagacgtcctgctcattggagttggctatgttggaccagcagatggctctttgtacatttagctgtggtgtgtgcttcagaaaggagcagggcttagaaaaagcccttttgtccgtaggagttgatgtggtgtgagtgatatatttctatgtttttaatgtacagcatctgtactttgtttgccttgataaaggtaagataaatgaaacgctgaactatgctaatctggaatttgtttttatttgcctgaaatatatttttttctgtgaaaaaattaaaacgtacttaagccaggagaatgaattatacagtgattgaaaatccatttaattcctatgacttttgttttgtattgcccaagtcaaactacatcacttgtatctccagcccaaatgtagtctgccttgaaaagtctttcagctgtgactgcaggaagtgggagtgtttttattgttagctaattgctgtgactgcaggaagtgggagtgtttctgttgttggctaattgaagttattaggctcagcttcagtcatgtgtaagttttgcagtgtaatacatatgtagtctggtctgtatatatgaaaatttgaattaaactgcagaatgtttatgtctagttatggtttaaattttcttagtagtatataaaaggtaagagtactgaaaaattaataaaattgcaagttaagaaataaaaaaagggggggcaaaattcctagggcaattggttccggtttgacaagggctatgggtgataacagcgggggttaagtgaggaaggtgggtgagacattggggaggacccgatggcgtaaaagtggc

SEQ ID NO: 344820 - DNA, 3001 bp, Homo sapiens
cacagctggccgtgggcagaattctgctttaattgcaggtgtctctgactccagtcccatgcttcttcccttccagtgcagtgtctacttgctaatgatcacgtctcttaaccttagaagattgttctctgttattcgaatcagtattataggagaataagcttctctcttgcctctcacagaaagtactgaaatcccaccttatgtgatgaagtgtccgagcaatggtttgtgtagcaggcttcctgcagactgtatagactgcacaacaaatttctcctgtacctatgggaagcctgtcacttttgactgtgcagtgaaaccatctgttacctgtgttgatcaagacttcaaatcccaaaagaacttcatcattaacatgacttgcagattttgctggcagcttcctgaaacagattacgagtgtaccaactccaccagctgcatgacggtgtcctgtcctcggcagcgctaccctgccaactgcacggtgcgggaccacgtccactgcttggtaggtcagagttcaaggacatttgtcaacaaaatgtttttctccaagtttattgaagggactttaaccagaaatttgcgagtcaagttacttaattagaaacatttatcagcagctctttagatgtgccaagcatcatcaataaactcaacgtactaaagtaaagcatccagaaaattgcagttctttttaaatgtaatatttgataaaataagaaaaacatttgaagtataaagcataatacacagtaattgacctttacccaaaataacaatgaaagcagcaccaataccattgcggccgcctgagtgcctgagtgcctgagtgcctgagtgcctgagtgcctgagtgcctgagtgcctgagtgcttgccttcacctggttgcctttcctcctcttccaaggtaaccacccttttgaattttttatttcacttccttttaaattttttctgtagttttattgtctatatgtaataaaataatattcaataatgcatgttttagaaccgtgtaaaatgatttcaggctgtgtgctcttctgggacttgcttatttcctaaacattgtggctctaggattcatccacgtgacttctcttcttttttttacttctgtgtaataatctattgtaagattgtatcacagtttattctccaatatatttggttaagtgctgttttccgctgttgtgactgttcaaatttctttgcctgtctcccaatggcacaggtgcaagagcttcttcagcatgtactttccagcgtgtgtcattctttaaatggctgtattgactggcattcccacccgcgctatgtaactgttcctgatgagccatattctctccaagagtggttattcttaaatttggtcgtaaagttgtctagacttcttttatattttggatattacctgtgctgtccctgaaaccctctcccagattttgattttttttttttttttgcattattgtatattttcatgaacagaactttaaaaatataattactggaagttattagagttagtccttttttgtggtggttttaagaaatctttttctaccccaggttaataaagacaatttgctacattttcttttgaaagttgtaagtataacatttcacatttaggtttagaatccacctggaattggtcctggtagatggtgtgaggtagattctactttaattgtccccccacatggatggccagttgtctcaactcttccctgttgatccgtgtgtgacctctgtcataacactcatacatgaagtgtttgtatatttctggttcttgactttctcttcttttcctattgggtgatttttatgcctcaagactacactgtcttatatactcgtaacttccccgtaggtcttgatatgtgggtgagcatttcatgttcctcacgttgtaatcctaacttagctgatttaaatattacatctatgtagatagatggtaagcgctttgtactcttcacttcaacatgtattaccgtaaagagagttgacttttcacattttaaattttgagcccatttgttacaattaagtctttctgagagtattttttataccctgtatttttctttcttttttttttttaaggtaaccgtacttttcccaaaatgctatattgcaattggactggaggctataagtggtctacggctctggctctaagcatcaccctcggtgggtttggagcagaccgtttctacctgggccagtggcgggaaggcctcggcaagctcttcagcttcggtggcctgggaatatggacgctgatagacgtcctgctcattggagttggctatgttggaccagcagatggctctttgtacatttagctgtggtgtgtgcttcagaaaggagcagggcttagaaaaagcccttttgtccgtaggagttgatgtggtgtgagtgatatatttctatgtttttaatgtacagcatctgtactttgtttgccttgataaaggtaagataaatgaaacgctgaactatgctaatctggaatttgtttttatttgcctgaaatatatttttttctgtgaaaaaattaaaacgtacttaagccaggagaatgaattatacagtgattgaaaatccatttaattcctatgacttttgttttgtattgcccaagtcaaactacatcacttgtatctccagcccaaatgtagtctgccttgaaaagtctttcagctgtgactgcaggaagtgggagtgtttttattgttagctaattgctgtgactgcaggaagtgggagtgtttctgttgttggctaattgaagttattaggctcagcttcagtcatgtgtaagttttgcagtgtaatacatatgtagtctggtctgtatatatgaaaatttgaattaaactgcagaatgtttatgtctagttatggtttaaattttcttagtagtatataaaaggtaagagtactgaaaaattaataaaattgcaagttaagaaata

SEQ ID NO: 344821 - DNA, 1727 bp, Homo sapiens
cgccccccggcccggaagtgcgcagcgctggcaagatggcgggaggggtgcgcccgctgaggggcctccgcgccttgtgtcgcgtgctgctcttcctctcgcagttctgcattctgtcgggcggtgaaagtactgaaatcccaccttatgtgatgaagtgtccgagcaatggtttgtgtagcaggcttcctgcagactgtatagactgcacaacaaatttctcctgtacctatgggaagcctgtcacttttgactgtgcagtgaaaccatctgttacctgtgttgatcaagacttcaaatcccaaaagaacttcatcattaacatgacttgcagattttgctggcagcttcctgaaacagattacgagtgtaccaactccaccagctgcatgacggtgtcctgtcctcggcagcgctaccctgccaactgcacggtgcgggaccacgtccactgcttgggtaaccgtacttttcccaaaatgctatattgcaattggactggaggctataagtggtctacggctctggctctaagcatcaccctcggtgggtttggagcagaccgtttctacctgggccagtggcgggaaggcctcggcaagctcttcagcttcggtggcctgggaatatggacgctgatagacgtcctgctcattggagttggctatgttggaccagcagatggctctttgtacatttagctgtggtgtgtgcttcagaaaggagcagggcttagaaaaagcccttttgtccgtaggagttgatgtggtgtgagtgatatatttctatgtttttaatgtacagcatctgtactttgtttgccttgataaaggtaagataaatgaaacgctgaactatgctaatctggaatttgtttttatttgcctgaaatatatttttttctgtgaaaaaattaaaacgtacttaagccaggagaatgaattatacagtgattgaaaatccatttaattcctatgacttttgttttgtattgcccaagtcaaactacatcacttgtatctccagcccaaatgtagtctgccttgaaaagtctttcagctgtgactgcaggaagtgggagtgtttttattgttagctaattgctgtgactgcaggaagtgggagtgtttctgttgttggctaattgaagttattaggctcagcttcagtcatgtgtaagttttgcagtgtaatacatatgtagtctggtctgtatatatgaaaatttgaattaaactgcagaatgtttatgtctagttatggtttaaattttcttagtagtatataaaaggtaagagtactgaaaaattaataaaattgcaagttaagaaataaaaaaaaaaaaaaaaaaaaaaaaaaaaaaaaagaaaaaaaaaaagaaaaaaaaaataaaacaacaaaacaaaaatagaaacaaggcggcgggcgccgccccgcaatcaaaatgctcccctgcgaggaggggcgcaccacaagtaaggtcgacgccacgccaccagcttgtttgtggaaagacaaggagccgcgcccccctaagatgaggggcgcctcattacatcaacaacacacgtccgcggtgcgcgagcgcggctttaaacaaacacgcagctcgcagcggggaacaaaactcgtcacctgcctggacgaatccatcggggagaaagcaccacctcctctgtctggggtggcagccgcaccctggtgggcgcaccaccccacccagagat

SEQ ID NO: 344822 - DNA, 2439 bp, Homo sapiens
cgccccccggcccggaagtgcgcagcgctggcaagatggcgggaggggtgcgcccgctgaggggcctccgcgccttgtgtcgcgtgctgctcttcctctcgcagttctgcattctgtcgggcggtgaaagtactgaaatcccaccttatgtgatgaagtgtccgagcaatggtttgtgtagcaggcttcctgcagactgtatagactgcacaacaaatttctcctgtacctatgggaagcctgtcacttttgactgtgcagtgaaaccatctgttacctgtgttgatcaagacttcaaatcccaaaagaacttcatcattaacatgacttgcagattttgctggcagcttcctgaaacagattacgagtgtaccaactccaccagctgcatgacggtgtcctgtcctcggcagcgctaccctgccaactgcacggtgcgggaccacgtccactgcttggtaggtcagagttcaaggacatttgtcaacaaaatgtttttctccaagtttattgaagggactttaaccagaaatttgcgagtcaagttacttaattagaaacatttatcagcagctctttagatgtgccaagcatcatcaataaactcaacgtactaaagtaaagcatccagaaaattgcagttctttttaaatgtaatatttgataaaataagaaaaacatttgaagtataaagcataatacacagtaattgacctttacccaaaataacaatgaaagcagcaccaataccattgcggccgcctgagtgcctgagtgcctgagtgcctgagtgcctgagtgcctgagtgcctgagtgcctgagtgcttgccttcacctggttgcctttcctcctcttccaaggtaaccacccttttgaattttttatttcacttccttttaaattttttctgtagttttattgtatattttcatgaacagaactttaaaaatataattactggaagttattagagttagtccttttttgtggtggttttaagaaatctttttctaccccaggttaataaagacaatttgctacattttcttttgaaagttgtaagtataacatttcacatttaggtttagaatccacctggaattggtcctggtagatggtgtgaggtagattctactttaattgtccccccacatggatggccagttgtctcaactcttccctgttgatccgtgtgtgacctctgtcataacactcatacatgaagtgtttgtatatttctggttcttgactttctcttcttttcctattgggtgatttttatgcctcaagactacactgtcttatatactcgtaacttccccgtaggtcttgatatgtgggtgagcatttcatgttcctcacgttgtaatcctaacttagctgatttaaatattacatctatgtagatagatggtaagcgctttgtactcttcacttcaacatgtattaccgtaaagagagttgacttttcacattttaaattttgagcccatttgttacaattaagtctttctgagagtattttttataccctgtatttttctttcttttttttttttaaggtaaccgtacttttcccaaaatgctatattgcaattggactggaggctataagtggtctacggctctggctctaagcatcaccctcggtgggtttggagcagaccgtttctacctgggccagtggcgggaaggcctcggcaagctcttcagcttcggtggcctgggaatatggacgctgatagacgtcctgctcattggagttggctatgttggaccagcagatggctctttgtacatttagctgtggtgtgtgcttcagaaaggagcagggcttagaaaaagcccttttgtccgtaggagttgatgtggtgtgagtgatatatttctatgtttttaatgtacagcatctgtactttgtttgccttgataaaggtaagataaatgaaacgctgaactatgctaatctggaatttgtttttatttgcctgaaatatatttttttctgtgaaaaaattaaaacgtacttaagccaggagaatgaattatacagtgattgaaaatccatttaattcctatgacttttgttttgtattgcccaagtcaaactacatcacttgtatctccagcccaaatgtagtctgccttgaaaagtctttcagctgtgactgcaggaagtgggagtgtttttattgttagctaattgctgtgactgcaggaagtgggagtgtttctgttgttggctaattgaagttattaggctcagcttcagtcatgtgtaagttttgcagtgtaatacatatgtagtctggtctgtatatatgaaaatttgaattaaactgcagaatgtttatgtctagttatggtttaaattttcttagtagtatataaaaggtaagagtactgaaaaattaataaaattgcaagttaagaaata

SEQ ID NO: 344823 - DNA, 1332 bp, Homo sapiens
cacagctggccgtgggcagaattctgctttaattgcaggtgtctctgactccagtcccatgcttcttcccttccagtgcagtgtctacttgctaatgatcacgtctcttaaccttagaagattgttctctgttattcgaatcagtattataggagaataagcttctctcttgcctctcacagaaagtactgaaatcccaccttatgtgatgaagtgtccgagcaatggtttgtgtagcaggcttcctgcagactgtatagactgcacaacaaatttctcctgtacctatgggaagcctgtcacttttgactgtgcagtgaaaccatctgttacctgtgttgatcaagacttcaaatcccaaaagaacttcatcattaacatgacttgcagattttgctggcagcttcctgaaacagattacgagtgtaccaactccaccagctgcatgacggtgtcctgtcctcggcagcgctaccctgccaactgcacggtgcgggaccacgtccactgcttggccgtacttttcccctaagcatcaccctcggtgggtttggagcagaccgtttctacctgggccagtggcgggaaggcctcggcaagctcttcagcttcggtggcctgggaatatggacgctgatagacgtcctgctcattggagttggctatgttggaccagcagatggctctttgtacatttagctgtggtgtgtgcttcagaaaggagcagggcttagaaaaagcccttttgtccgtaggagttgatgtggtgtgagtgatatatttctatgtttttaatgtacagcatctgtactttgtttgccttgataaaggtaagataaatgaaacgctgaactatgctaatctggaatttgtttttatttgcctgaaatatatttttttctgtgaaaaaattaaaacgtacttaagccaggagaatgaattatacagtgattgaaaatccatttaattcctatgacttttgttttgtattgcccaagtcaaactacatcacttgtatctccagcccaaatgtagtctgccttgaaaagtctttcagctgtgactgcaggaagtgggagtgtttttattgttagctaattgctgtgactgcaggaagtgggagtgtttctgttgttggctaattgaagttattaggctcagcttcagtcatgtgtaagttttgcagtgtaatacatatgtagtctggtctgtatatatgaaaatttgaattaaactgcagaatgtttatgtctagttatggtttaaattttcttagtagtatataaaaggtaagagtactgaaaaattaataaaattgcaagttaagaaata

SEQ ID NO: 344824 - DNA, 1610 bp, Homo sapiens
cgccccccggcccggaagtgcgcagcgctggcaagatggcgggaggggtgcgcccgctgaggggcctccgcgccttgtgtcgcgtgctgctcttcctctcgcagttctgcattctgtcgggcggtgaaagtactgaaatcccaccttatgtgatgaagtgtccgagcaatggtttgtgtagcaggcttcctgcagactgtatagactgcacaacaaatttctcctgtacctatgggaagcctgtcacttttgactgtgcagtgaaaccatctgttacctgtgttgatcaagacttcaaatcccaaaagaacttcatcattaacatgacttgcagattttgctggcagcttcctgaaacagattacgagtgtaccaactccaccagctgcatgacggtgtcctgtcctcggcagcgctaccctgccaactgcacggtgcgggaccacgtccactgcttgggtaaccgtacttttcccaaaatgctatattgcaattggactggaggctataagtggtctacggctctggctctaagtctgcaggcccaggtggggcttcatgttcagctcactgttggacttcattgacatcaccctgaaaaaggtggatttttgaggagcgtgagaagaagagcatgagaagtgctgaattacactgtgttgttgcagatgagcgtccctaaccacagcagtccttgaagaagaaagatggtctgataggaactgcttattcaggaacacattgcaaaatctgtgggtgtccttcgggatctgagggcctcactcctacaactgcaaggaattgaattcttctaacagtgtgatgaggttggaagaagactccaagatccagaaaggaacacagtcccaccaacacctgtgttgtaacctggtgacaccctgaaacagagaatccagctaagcgatgcccaaaatattcatccacaacgtgttgttttaagcttccaagtttctagtaatttgttataaagcaatagaaaagtaatatatccttatccgaggctcatcttcattccaaacgttccacatttccttctgttatcatttattttctgtcggaattacttcctccagcaaaaaaatttttaaggcagttctgctgcacttgaaaagtcttatgacacgtccttctggccttcatgatttctgctgaaaaatatgctgtcatttgaatagttttaatgcttgagatgaacccggtacctcagatggaaatgcagaaatcacccgtcttctgcgtcgctcacgctgggagctgtagactggagctgttcctattcggacatcttggctcctcccgtgctttctacatcccacatggaagcagcaatgagatgttttaaaacgagatgtttcaaaatcaccatctcactctagtttgtctacaaagccatctatcaagaacattatatgaacttttaaatacattcttctgtatttatagaatgatttttaaagcatttccagccatgtttaaaagctgtgaatagtcttttttttgtaacctagtaaccaaagttattaatgaaagtcacagttaaacttttttcctttgaaaataaaatgaatcaacacataacgagaaggtta

SEQ ID NO: 344825 - DNA, 3115 bp, Homo sapiens
cgccccccggcccggaagtgcgcagcgctggcaagatggcgggaggggtgcgcccgctgaggggcctccgcgccttgtgtcgcgtgctgctcttcctctcgcagttctgcattctgtcgggcggtgaaagtactgaaatcccaccttatgtgatgaagtgtccgagcaatggtttgtgtagcaggcttcctgcagactgtatagactgcacaacaaatttctcctgtacctatgggaagcctgtcacttttgactgtgcagtgaaaccatctgttacctgtgttgatcaagacttcaaatcccaaaagaacttcatcattaacatgacttgcagattttgctggcagcttcctgaaacagattacgagtgtaccaactccaccagctgcatgacggtgtcctgtcctcggcagcgctaccctgccaactgcacggtgcgggaccacgtccactgcttggtaggtcagagttcaaggacatttgtcaacaaaatgtttttctccaagtttattgaagggactttaaccagaaatttgcgagtcaagttacttaattagaaacatttatcagcagctctttagatgtgccaagcatcatcaataaactcaacgtactaaagtaaagcatccagaaaattgcagttctttttaaatgtaatatttgataaaataagaaaaacatttgaagtataaagcataatacacagtaattgacctttacccaaaataacaatgaaagcagcaccaataccattgcggccgcctgagtgcctgagtgcctgagtgcctgagtgcctgagtgcctgagtgcctgagtgcctgagtgcttgccttcacctggttgcctttcctcctcttccaaggtaaccacccttttgaattttttatttcacttccttttaaattttttctgtagttttattgtctatatgtaataaaataatattcaataatgcatgttttagaaccgtgtaaaatgatttcaggctgtgtgctcttctgggacttgcttatttcctaaacattgtggctctaggattcatccacgtgacttctcttcttttttttacttctgtgtaataatctattgtaagattgtatcacagtttattctccaatatatttggttaagtgctgttttccgctgttgtgactgttcaaatttctttgcctgtctcccaatggcacaggtgcaagagcttcttcagcatgtactttccagcgtgtgtcattctttaaatggctgtattgactggcattcccacccgcgctatgtaactgttcctgatgagccatattctctccaagagtggttattcttaaatttggtcgtaaagttgtctagacttcttttatattttggatattacctgtgctgtccctgaaaccctctcccagattttgattttttttttttttttgcattattgtatattttcatgaacagaactttaaaaatataattactggaagttattagagttagtccttttttgtggtggttttaagaaatctttttctaccccaggttaataaagacaatttgctacattttcttttgaaagttgtaagtataacatttcacatttaggtttagaatccacctggaattggtcctggtagatggtgtgaggtagattctactttaattgtccccccacatggatggccagttgtctcaactcttccctgttgatccgtgtgtgacctctgtcataacactcatacatgaagtgtttgtatatttctggttcttgactttctcttcttttcctattgggtgatttttatgcctcaagactacactgtcttatatactcgtaacttccccgtaggtcttgatatgtgggtgagcatttcatgttcctcacgttgtaatcctaacttagctgatttaaatattacatctatgtagatagatggtaagcgctttgtactcttcacttcaacatgtattaccgtaaagagagttgacttttcacattttaaattttgagcccatttgttacaattaagtctttctgagagtattttttataccctgtatttttctttcttttttttttttaaggtaaccgtacttttcccaaaatgctatattgcaattggactggaggctataagtggtctacggctctggctctaagagttggactcttcatcgacactgtgaccacaccactgcactccagcctgagccacagagcgagacactgtctctaaaaaataaaagaaaaagaaaacacaataacaagtattgatgagaatgtggagaaattggaaccttcatatattgctggtggggatgtaaagtgatgtagctgcccaggaaaacagtctggcaatttgtgaaaatgttaaacatagagttaccatgtgacttggggaatcttctaggtatacacccaagagaagtggagatatgttgtgaaagttgtcagcaccaaaatggggtcacttaggtcaaaccctagcaaaatgaatccgggaggccctgaaggaggagtactcacgcacatgtacctatgataagaactattacaaggactccctggaaaccataaacactccatgttaagctgctgctgtgaagacatctccccagcaacagccagcgtgaccaatgaggagctatgagcttcaacagtcaagagtttttgtttcaaaccagcttacatgactttctcctttttgtctttataaaagtttgccttgaccccagcatctttgggtgtttcttggttcattgtggcatgggtatcttggattgcaatcccccaccaatcccagataaactcctttggagagcctatctgtctattgttattttaggttttaggacatacactaaaaaactcgtttacagcaccattattcatagtaaaaaagtggaaacaacccaaatgtcccactgatgaataatacataaacaaaatgtagttcattcatataatggaatactatttcatcacataaaggaatgaagtactgatacacaccataaggtgaataaacctcaaaaacacggtgctaagggaagaaagccagttacactttaagctggtaacctttacagcatataaattacttcttaataaagcggtcttaaaaaaaaa

SEQ ID NO: 344826 - DNA, 1504 bp, Homo sapiens
cgccccccggcccggaagtgcgcagcgctggcaagatggcgggaggggtgcgcccgctgaggggcctccgcgccttgtgtcgcgtgctgctcttcctctcgcagttctgcattctgtcgggcggtgaaagtactgaaatcccaccttatgtgatgaagtgtccgagcaatggtttgtgtagcaggcttcctgcagactgtatagactgcacaacaaatttctcctgtacctatgggaagcctgtcacttttgactgtgcagtgaaaccatctgttacctgtgttgatcaagacttcaaatcccaaaagaacttcatcattaacatgacttgcagattttgctggcagcttcctgaaacagattacgagtgtaccaactccaccagctgcatgacggtgtcctgtcctcggcagcgctaccctgccaactgcacggtgcgggaccacgtccactgcttgggtaaccgtacttttcccaaaatgctatattgcaattggactggaggctataagtggtctacggctctggctctaagagttggactcttcatcgacactgtgaccacaccactgcactccagcctgagccacagagcgagacactgtctctaaaaaataaaagaaaaagaaaacacaataacaagtattgatgagaatgtggagaaattggaaccttcatatattgctggtggggatgtaaagtgatgtagctgcccaggaaaacagtctggcaatttgtgaaaatgttaaacatagagttaccatgtgacttggggaatcttctaggtatacacccaagagaagtggagatatgttgtgaaagttgtcagcaccaaaatggggtcacttaggtcaaaccctagcaaaatgaatccgggaggccctgaaggaggagtactcacgcacatgtacctatgataagaactattacaaggactccctggaaaccataaacactccatgttaagctgctgctgtgaagacatctccccagcaacagccagcgtgaccaatgaggagctatgagcttcaacagtcaagagtttttgtttcaaaccagcttacatgactttctcctttttgtctttataaaagtttgccttgaccccagcatctttgggtgtttcttggttcattgtggcatgggtatcttggattgcaatcccccaccaatcccagataaactcctttggagagcctatctgtctattgttattttaggttttaggacatacactaaaaaactcgtttacagcaccattattcatagtaaaaaagtggaaacaacccaaatgtcccactgatgaataatacataaacaaaatgtagttcattcatataatggaatactatttcatcacataaaggaatgaagtactgatacacaccataaggtgaataaacctcaaaaacacggtgctaagggaagaaagccagttacactttaagctggtaacctttacagcatataaattacttcttaataaagcggtcttaaaaaaaaa

SEQ ID NO: 344827 - DNA, 1412 bp, Homo sapiens
cgccccccggcccggaagtgcgcagcgctggcaagatggcgggaggggtgcgcccgctgaggggcctccgcgccttgtgtcgcgtgctgctcttcctctcgcagttctgcattctgtcgggcggtgagcaatcgcaggcgctggctcagtcaataaaggatccgggcccaacacgcacattcacagtagttcccagggcagcagaaagtactgaaatcccaccttatgtgatgaagtgtccgagcaatggtttgtgtagcaggcttcctgcagactgtatagactgcacaacaaatttctcctgtacctatgggaagcctgtcacttttgactgtgcagtgaaaccatctgttacctgtgttgatcaagacttcaaatcccaaaagaacttcatcattaacatgacttgcagattttgctggcagcttcctgaaacagattacgagtgtaccaactccaccagctgcatgacggtgtcctgtcctcggcagcgctaccctgccaactgcacggtgcgggaccacgtccactgcttgggtaaccgtacttttcccaaaatgctatattgcaattggactggaggctataagtggtctacggctctggctctaagcatcaccctcggtgggtttggagcagaccgtttctacctgggccagtggcgggaaggcctcggcaagctcttcagcttcggtggcctgggaatatggacgctgatagacgtcctgctcattggagttggctatgttggaccagcagatggctctttgtacatttagctgtggtgtgtgcttcagaaaggagcagggcttagaaaaagcccttttgtccgtaggagttgatgtggtgtgagtgatatatttctatgtttttaatgtacagcatctgtactttgtttgccttgataaaggtaagataaatgaaacgctgaactatgctaatctggaatttgtttttatttgcctgaaatatatttttttctgtgaaaaaattaaaacgtacttaagccaggagaatgaattatacagtgattgaaaatccatttaattcctatgacttttgttttgtattgcccaagtcaaactacatcacttgtatctccagcccaaatgtagtctgccttgaaaagtctttcagctgtgactgcaggaagtgggagtgtttttattgttagctaattgctgtgactgcaggaagtgggagtgtttctgttgttggctaattgaagttattaggctcagcttcagtcatgtgtaagttttgcagtgtaatacatatgtagtctggtctgtatatatgaaaatttgaattaaactgcagaatgtttatgtctagttatggtttaaattttcttagtagtatataaaaggtaagagtactgaaaaattaataaaattgcaagttaagaaata

SEQ ID NO: 344828 - DNA, 2945 bp, Homo sapiens
cgccccccggcccggaagtgcgcagcgctggcaagatggcgggaggggtgcgcccgctgaggggcctccgcgccttgtgtcgcgtgctgctcttcctctcgcagttctgcattctgtcgggcggtgaaagtactgaaatcccaccttatgtgatgaagtgtccgagcaatggtttgtgtagcaggcttcctgcagactgtatagactgcacaacaaatttctcctgtacctatgggaagcctgtcacttttgactgtgcagtgaaaccatctgttacctgtgttgatcaagacttcaaatcccaaaagaacttcatcattaacatgacttgcagattttgctggcagcttcctgaaacagattacgagtgtaccaactccaccagctgcatgacggtgtcctgtcctcggcagcgctaccctgccaactgcacggtgcgggaccacgtccactgcttggtaggtcagagttcaaggacatttgtcaacaaaatgtttttctccaagtttattgaagggactttaaccagaaatttgcgagtcaagttacttaattagaaacatttatcagcagctctttagatgtgccaagcatcatcaataaactcaacgtactaaagtaaagcatccagaaaattgcagttctttttaaatgtaatatttgataaaataagaaaaacatttgaagtataaagcataatacacagtaattgacctttacccaaaataacaatgaaagcagcaccaataccattgcggccgcctgagtgcctgagtgcctgagtgcctgagtgcctgagtgcctgagtgcctgagtgcctgagtgcttgccttcacctggttgcctttcctcctcttccaaggtaaccacccttttgaattttttatttcacttccttttaaattttttctgtagttttattgtctatatgtaataaaataatattcaataatgcatgttttagaaccgtgtaaaatgatttcaggctgtgtgctcttctgggacttgcttatttcctaaacattgtggctctaggattcatccacgtgacttctcttcttttttttacttctgtgtaataatctattgtaagattgtatcacagtttattctccaatatatttggttaagtgctgttttccgctgttgtgactgttcaaatttctttgcctgtctcccaatggcacaggtgcaagagcttcttcagcatgtactttccagcgtgtgtcattctttaaatggctgtattgactggcattcccacccgcgctatgtaactgttcctgatgagccatattctctccaagagtggttattcttaaatttggtcgtaaagttgtctagacttcttttatattttggatattacctgtgctgtccctgaaaccctctcccagattttgattttttttttttttttgcattattgtatattttcatgaacagaactttaaaaatataattactggaagttattagagttagtccttttttgtggtggttttaagaaatctttttctaccccaggttaataaagacaatttgctacattttcttttgaaagttgtaagtataacatttcacatttaggtttagaatccacctggaattggtcctggtagatggtgtgaggtagattctactttaattgtccccccacatggatggccagttgtctcaactcttccctgttgatccgtgtgtgacctctgtcataacactcatacatgaagtgtttgtatatttctggttcttgactttctcttcttttcctattgggtgatttttatgcctcaagactacactgtcttatatactcgtaacttccccgtaggtcttgatatgtgggtgagcatttcatgttcctcacgttgtaatcctaacttagctgatttaaatattacatctatgtagatagatggtaagcgctttgtactcttcacttcaacatgtattaccgtaaagagagttgacttttcacattttaaattttgagcccatttgttacaattaagtctttctgagagtattttttataccctgtatttttctttcttttttttttttaaggtaaccgtacttttcccaaaatgctatattgcaattggactggaggctataagtggtctacggctctggctctaagcatcaccctcggtgggtttggagcagaccgtttctacctgggccagtggcgggaaggcctcggcaagctcttcagcttcggtggcctgggaatatggacgctgatagacgtcctgctcattggagttggctatgttggaccagcagatggctctttgtacatttagctgtggtgtgtgcttcagaaaggagcagggcttagaaaaagcccttttgtccgtaggagttgatgtggtgtgagtgatatatttctatgtttttaatgtacagcatctgtactttgtttgccttgataaaggtaagataaatgaaacgctgaactatgctaatctggaatttgtttttatttgcctgaaatatatttttttctgtgaaaaaattaaaacgtacttaagccaggagaatgaattatacagtgattgaaaatccatttaattcctatgacttttgttttgtattgcccaagtcaaactacatcacttgtatctccagcccaaatgtagtctgccttgaaaagtctttcagctgtgactgcaggaagtgggagtgtttttattgttagctaattgctgtgactgcaggaagtgggagtgtttctgttgttggctaattgaagttattaggctcagcttcagtcatgtgtaagttttgcagtgtaatacatatgtagtctggtctgtatatatgaaaatttgaattaaactgcagaatgtttatgtctagttatggtttaaattttcttagtagtatataaaaggtaagagtactgaaaaattaataaaattgcaagttaagaaata

SEQ ID NO: 344829 - DNA, 3520 bp, Homo sapiens
cgccccccggcccggaagtgcgcagcgctggcaagatggcgggaggggtgcgcccgctgaggggcctccgcgccttgtgtcgcgtgctgctcttcctctcgcagttctgcattctgtcgggcggtggtgagtcaaaggctgggttcagcgccgggtggggctgagtggcagcagggccccgggagctgcgaggaggccgggcccacgggcggacgctgacgcggggaggaggccgagtgccgggctccgggccgcttgtcgctgcatctggagtctggcgccctggccgcccggcccgaggccgcccctccgctccggcgacaccgagcccgccatcgcggctgcggagccctggcacggagatggagcgcttgggggctgggccggggaggcggaactggagcgcgatgtcatccttcggtccctcgttgccggctgacctgaactgatgtctactctgttgacgtttcgtccctaagctttgtgttttctggctgaccagccgtgaggttttcatgagcagcttattggcctggtgtagacccgccgtgttaaccacacaaaataaggttttcttgtcccgggataacgtgtttctctaattgtacgatccttaaatttagagcaatcgcaggcgctggctcagtcaataaaggatccgggcccaacacgcacattcacagtagttcccagggcagcagaaagtactgaaatcccaccttatgtgatgaagtgtccgagcaatggtttgtgtagcaggcttcctgcagactgtatagactgcacaacaaatttctcctgtacctatgggaagcctgtcacttttgactgtgcagtgaaaccatctgttacctgtgttgatcaagacttcaaatcccaaaagaacttcatcattaacatgacttgcagattttgctggcagcttcctgaaacagattacgagtgtaccaactccaccagctgcatgacggtgtcctgtcctcggcagcgctaccctgccaactgcacggtgcgggaccacgtccactgcttggtaggtcagagttcaaggacatttgtcaacaaaatgtttttctccaagtttattgaagggactttaaccagaaatttgcgagtcaagttacttaattagaaacatttatcagcagctctttagatgtgccaagcatcatcaataaactcaacgtactaaagtaaagcatccagaaaattgcagttctttttaaatgtaatatttgataaaataagaaaaacatttgaagtataaagcataatacacagtaattgacctttacccaaaataacaatgaaagcagcaccaataccattgcggccgcctgagtgcctgagtgcctgagtgcctgagtgcctgagtgcctgagtgcctgagtgcctgagtgcttgccttcacctggttgcctttcctcctcttccaaggtaaccacccttttgaattttttatttcacttccttttaaattttttctgtagttttattgtctatatgtaataaaataatattcaataatgcatgttttagaaccgtgtaaaatgatttcaggctgtgtgctcttctgggacttgcttatttcctaaacattgtggctctaggattcatccacgtgacttctcttcttttttttacttctgtgtaataatctattgtaagattgtatcacagtttattctccaatatatttggttaagtgctgttttccgctgttgtgactgttcaaatttctttgcctgtctcccaatggcacaggtgcaagagcttcttcagcatgtactttccagcgtgtgtcattctttaaatggctgtattgactggcattcccacccgcgctatgtaactgttcctgatgagccatattctctccaagagtggttattcttaaatttggtcgtaaagttgtctagacttcttttatattttggatattacctgtgctgtccctgaaaccctctcccagattttgattttttttttttttttgcattattgtatattttcatgaacagaactttaaaaatataattactggaagttattagagttagtccttttttgtggtggttttaagaaatctttttctaccccaggttaataaagacaatttgctacattttcttttgaaagttgtaagtataacatttcacatttaggtttagaatccacctggaattggtcctggtagatggtgtgaggtagattctactttaattgtccccccacatggatggccagttgtctcaactcttccctgttgatccgtgtgtgacctctgtcataacactcatacatgaagtgtttgtatatttctggttcttgactttctcttcttttcctattgggtgatttttatgcctcaagactacactgtcttatatactcgtaacttccccgtaggtcttgatatgtgggtgagcatttcatgttcctcacgttgtaatcctaacttagctgatttaaatattacatctatgtagatagatggtaagcgctttgtactcttcacttcaacatgtattaccgtaaagagagttgacttttcacattttaaattttgagcccatttgttacaattaagtctttctgagagtattttttataccctgtatttttctttcttttttttttttaaggtaaccgtacttttcccaaaatgctatattgcaattggactggaggctataagtggtctacggctctggctctaagcatcaccctcggtgggtttggagcagaccgtttctacctgggccagtggcgggaaggcctcggcaagctcttcagcttcggtggcctgggaatatggacgctgatagacgtcctgctcattggagttggctatgttggaccagcagatggctctttgtacatttagctgtggtgtgtgcttcagaaaggagcagggcttagaaaaagcccttttgtccgtaggagttgatgtggtgtgagtgatatatttctatgtttttaatgtacagcatctgtactttgtttgccttgataaaggtaagataaatgaaacgctgaactatgctaatctggaatttgtttttatttgcctgaaatatatttttttctgtgaaaaaattaaaacgtacttaagccaggagaatgaattatacagtgattgaaaatccatttaattcctatgacttttgttttgtattgcccaagtcaaactacatcacttgtatctccagcccaaatgtagtctgccttgaaaagtctttcagctgtgactgcaggaagtgggagtgtttttattgttagctaattgctgtgactgcaggaagtgggagtgtttctgttgttggctaattgaagttattaggctcagcttcagtcatgtgtaagttttgcagtgtaatacatatgtagtctggtctgtatatatgaaaatttgaattaaactgcagaatgtttatgtctagttatggtttaaattttcttagtagtatataaaaggtaagagtactgaaaaattaataaaattgcaagttaagaaata

SEQ ID NO: 344830 - DNA, 1777 bp, Homo sapiens
cgccccccggcccggaagtgcgcagcgctggcaagatggcgggaggggtgcgcccgctgaggggcctccgcgccttgtgtcgcgtgctgctcttcctctcgcagttctgcattctgtcgggcggtggtgagtcaaaggctgggttcagcgccgggtggggctgagtggcagcagggccccgggagctgcgaggaggccgggcccacgggcggacgctgacgcggggaggaggccgagtgccgggctccgggccgcttgtcgctgcatctggagtctggcgccctggccgcccggcccgaggccgcccctccgctccggcgacaccgagcccgccatcgcggctgcggagccctggcacggagatggagcgcttgggggctgggccggggaggcggaactggagcgcgatgtcatccttcggtccctcgttgccggctgacctgaactgatgtctactctgttgacgtttcgtccctaagctttgtgttttctggctgaccagccgtgaggttttcatgagcagcttattggcctggtgtagacccgccgtgttaaccacacaaaataagaaagtactgaaatcccaccttatgtgatgaagtgtccgagcaatggtttgtgtagcaggcttcctgcagactgtatagactgcacaacaaatttctcctgtacctatgggaagcctgtcacttttgactgtgcagtgaaaccatctgttacctgtgttgatcaagacttcaaatcccaaaagaacttcatcattaacatgacttgcagattttgctggcagcttcctgaaacagattacgagtgtaccaactccaccagctgcatgacggtgtcctgtcctcggcagcgctaccctgccaactgcacggtgcgggaccacgtccactgcttgggtaaccgtacttttcccaaaatgctatattgcaattggactggaggctataagtggtctacggctctggctctaagcatcaccctcggtgggtttggagcagaccgtttctacctgggccagtggcgggaaggcctcggcaagctcttcagcttcggtggcctgggaatatggacgctgatagacgtcctgctcattggagttggctatgttggaccagcagatggctctttgtacatttagctgtggtgtgtgcttcagaaaggagcagggcttagaaaaagcccttttgtccgtaggagttgatgtggtgtgagtgatatatttctatgtttttaatgtacagcatctgtactttgtttgccttgataaaggtaagataaatgaaacgctgaactatgctaatctggaatttgtttttatttgcctgaaatatatttttttctgtgaaaaaattaaaacgtacttaagccaggagaatgaattatacagtgattgaaaatccatttaattcctatgacttttgttttgtattgcccaagtcaaactacatcacttgtatctccagcccaaatgtagtctgccttgaaaagtctttcagctgtgactgcaggaagtgggagtgtttttattgttagctaattgctgtgactgcaggaagtgggagtgtttctgttgttggctaattgaagttattaggctcagcttcagtcatgtgtaagttttgcagtgtaatacatatgtagtctggtctgtatatatgaaaatttgaattaaactgcagaatgtttatgtctagttatggtttaaattttcttagtagtatataaaaggtaagagtactgaaaaattaataaaattgcaagttaagaaata

SEQ ID NO: 344831 - DNA, 1851 bp, Homo sapiens
cgccccccggcccggaagtgcgcagcgctggcaagatggcgggaggggtgcgcccgctgaggggcctccgcgccttgtgtcgcgtgctgctcttcctctcgcagttctgcattctgtcgggcggtggtgagtcaaaggctgggttcagcgccgggtggggctgagtggcagcagggccccgggagctgcgaggaggccgggcccacgggcggacgctgacgcggggaggaggccgagtgccgggctccgggccgcttgtcgctgcatctggagtctggcgccctggccgcccggcccgaggccgcccctccgctccggcgacaccgagcccgccatcgcggctgcggagccctggcacggagatggagcgcttgggggctgggccggggaggcggaactggagcgcgatgtcatccttcggtccctcgttgccggctgacctgaactgatgtctactctgttgacgtttcgtccctaagctttgtgttttctggctgaccagccgtgaggttttcatgagcagcttattggcctggtgtagacccgccgtgttaaccacacaaaataaggttttcttgtcccgggataacgtgtttctctaattgtacgatccttaaatttagagcaatcgcaggcgctggctcagtcaataaaggatccgggcccaacacgcacattcacagtagttcccagggcagcagaaagtactgaaatcccaccttatgtgatgaagtgtccgagcaatggtttgtgtagcaggcttcctgcagactgtatagactgcacaacaaatttctcctgtacctatgggaagcctgtcacttttgactgtgcagtgaaaccatctgttacctgtgttgatcaagacttcaaatcccaaaagaacttcatcattaacatgacttgcagattttgctggcagcttcctgaaacagattacgagtgtaccaactccaccagctgcatgacggtgtcctgtcctcggcagcgctaccctgccaactgcacggtgcgggaccacgtccactgcttggccgtacttttcccctaagcatcaccctcggtgggtttggagcagaccgtttctacctgggccagtggcgggaaggcctcggcaagctcttcagcttcggtggcctgggaatatggacgctgatagacgtcctgctcattggagttggctatgttggaccagcagatggctctttgtacatttagctgtggtgtgtgcttcagaaaggagcagggcttagaaaaagcccttttgtccgtaggagttgatgtggtgtgagtgatatatttctatgtttttaatgtacagcatctgtactttgtttgccttgataaaggtaagataaatgaaacgctgaactatgctaatctggaatttgtttttatttgcctgaaatatatttttttctgtgaaaaaattaaaacgtacttaagccaggagaatgaattatacagtgattgaaaatccatttaattcctatgacttttgttttgtattgcccaagtcaaactacatcacttgtatctccagcccaaatgtagtctgccttgaaaagtctttcagctgtgactgcaggaagtgggagtgtttttattgttagctaattgctgtgactgcaggaagtgggagtgtttctgttgttggctaattgaagttattaggctcagcttcagtcatgtgtaagttttgcagtgtaatacatatgtagtctggtctgtatatatgaaaatttgaattaaactgcagaatgtttatgtctagttatggtttaaattttcttagtagtatataaaaggtaagagtactgaaaaattaataaaattgcaagttaagaaata

SEQ ID NO: 344832 - DNA, 3221 bp, Homo sapiens
cgccccccggcccggaagtgcgcagcgctggcaagatggcgggaggggtgcgcccgctgaggggcctccgcgccttgtgtcgcgtgctgctcttcctctcgcagttctgcattctgtcgggcggtgaaagtactgaaatcccaccttatgtgatgaagtgtccgagcaatggtttgtgtagcaggcttcctgcagactgtatagactgcacaacaaatttctcctgtacctatgggaagcctgtcacttttgactgtgcagtgaaaccatctgttacctgtgttgatcaagacttcaaatcccaaaagaacttcatcattaacatgacttgcagattttgctggcagcttcctgaaacagattacgagtgtaccaactccaccagctgcatgacggtgtcctgtcctcggcagcgctaccctgccaactgcacggtgcgggaccacgtccactgcttggtaggtcagagttcaaggacatttgtcaacaaaatgtttttctccaagtttattgaagggactttaaccagaaatttgcgagtcaagttacttaattagaaacatttatcagcagctctttagatgtgccaagcatcatcaataaactcaacgtactaaagtaaagcatccagaaaattgcagttctttttaaatgtaatatttgataaaataagaaaaacatttgaagtataaagcataatacacagtaattgacctttacccaaaataacaatgaaagcagcaccaataccattgcggccgcctgagtgcctgagtgcctgagtgcctgagtgcctgagtgcctgagtgcctgagtgcctgagtgcttgccttcacctggttgcctttcctcctcttccaaggtaaccacccttttgaattttttatttcacttccttttaaattttttctgtagttttattgtctatatgtaataaaataatattcaataatgcatgttttagaaccgtgtaaaatgatttcaggctgtgtgctcttctgggacttgcttatttcctaaacattgtggctctaggattcatccacgtgacttctcttcttttttttacttctgtgtaataatctattgtaagattgtatcacagtttattctccaatatatttggttaagtgctgttttccgctgttgtgactgttcaaatttctttgcctgtctcccaatggcacaggtgcaagagcttcttcagcatgtactttccagcgtgtgtcattctttaaatggctgtattgactggcattcccacccgcgctatgtaactgttcctgatgagccatattctctccaagagtggttattcttaaatttggtcgtaaagttgtctagacttcttttatattttggatattacctgtgctgtccctgaaaccctctcccagattttgattttttttttttttttgcattattgtatattttcatgaacagaactttaaaaatataattactggaagttattagagttagtccttttttgtggtggttttaagaaatctttttctaccccaggttaataaagacaatttgctacattttcttttgaaagttgtaagtataacatttcacatttaggtttagaatccacctggaattggtcctggtagatggtgtgaggtagattctactttaattgtccccccacatggatggccagttgtctcaactcttccctgttgatccgtgtgtgacctctgtcataacactcatacatgaagtgtttgtatatttctggttcttgactttctcttcttttcctattgggtgatttttatgcctcaagactacactgtcttatatactcgtaacttccccgtaggtcttgatatgtgggtgagcatttcatgttcctcacgttgtaatcctaacttagctgatttaaatattacatctatgtagatagatggtaagcgctttgtactcttcacttcaacatgtattaccgtaaagagagttgacttttcacattttaaattttgagcccatttgttacaattaagtctttctgagagtattttttataccctgtatttttctttcttttttttttttaaggtaaccgtacttttcccaaaatgctatattgcaattggactggaggctataagtggtctacggctctggctctaagtctgcaggcccaggtggggcttcatgttcagctcactgttggacttcattgacatcaccctgaaaaaggtggatttttgaggagcgtgagaagaagagcatgagaagtgctgaattacactgtgttgttgcagatgagcgtccctaaccacagcagtccttgaagaagaaagatggtctgataggaactgcttattcaggaacacattgcaaaatctgtgggtgtccttcgggatctgagggcctcactcctacaactgcaaggaattgaattcttctaacagtgtgatgaggttggaagaagactccaagatccagaaaggaacacagtcccaccaacacctgtgttgtaacctggtgacaccctgaaacagagaatccagctaagcgatgcccaaaatattcatccacaacgtgttgttttaagcttccaagtttctagtaatttgttataaagcaatagaaaagtaatatatccttatccgaggctcatcttcattccaaacgttccacatttccttctgttatcatttattttctgtcggaattacttcctccagcaaaaaaatttttaaggcagttctgctgcacttgaaaagtcttatgacacgtccttctggccttcatgatttctgctgaaaaatatgctgtcatttgaatagttttaatgcttgagatgaacccggtacctcagatggaaatgcagaaatcacccgtcttctgcgtcgctcacgctgggagctgtagactggagctgttcctattcggacatcttggctcctcccgtgctttctacatcccacatggaagcagcaatgagatgttttaaaacgagatgtttcaaaatcaccatctcactctagtttgtctacaaagccatctatcaagaacattatatgaacttttaaatacattcttctgtatttatagaatgatttttaaagcatttccagccatgtttaaaagctgtgaatagtcttttttttgtaacctagtaaccaaagttattaatgaaagtcacagttaaacttttttcctttgaaaataaaatgaatcaacacataacgagaaggtta

SEQ ID NO: 344833 - DNA, 2615 bp, Homo sapiens
cgccccccggcccggaagtgcgcagcgctggcaagatggcgggaggggtgcgcccgctgaggggcctccgcgccttgtgtcgcgtgctgctcttcctctcgcagttctgcattctgtcgggcggtgaaagtactgaaatcccaccttatgtgatgaagtgtccgagcaatggtttgtgtagcaggcttcctgcagactgtatagactgcacaacaaatttctcctgtacctatgggaagcctgtcacttttgactgtgcagtgaaaccatctgttacctgtgttgatcaagacttcaaatcccaaaagaacttcatcattaacatgacttgcagattttgctggcagcttcctgaaacagattacgagtgtaccaactccaccagctgcatgacggtgtcctgtcctcggcagcgctaccctgccaactgcacggtgcgggaccacgtccactgcttggtaggtcagagttcaaggacatttgtcaacaaaatgtttttctccaagtttattgaagggactttaaccagaaatttgcgagtcaagttacttaattagaaacatttatcagcagctctttagatgtgccaagcatcatcaataaactcaacgtactaaagtaaagcatccagaaaattgcagttctttttaaatgtaatatttgataaaataagaaaaacatttgaagtataaagcataatacacagtaattgacctttacccaaaataacaatgaaagcagcaccaataccattgcggccgcctgagtgcctgagtgcctgagtgcctgagtgcctgagtgcctgagtgcctgagtgcctgagtgcttgccttcacctggttgcctttcctcctcttccaaggtaaccacccttttgaattttttatttcacttccttttaaattttttctgtagttttattgtctatatgtaataaaataatattcaataatgcatgttttagaaccgtgtaaaatgatttcaggctgtgtgctcttctgggacttgcttatttcctaaacattgtggctctaggattcatccacgtgacttctcttcttttttttacttctgtgtaataatctattgtaagattgtatcacagtttattctccaatatatttggttaagtgctgttttccgctgttgtgactgttcaaatttctttgcctgtctcccaatggcacaggtgcaagagcttcttcagcatgtactttccagcgtgtgtcattctttaaatggctgtattgactggcattcccacccgcgctatgtaactgttcctgatgagccatattctctccaagagtggttattcttaaatttggtcgtaaagttgtctagacttcttttatattttggatattacctgtgctgtccctgaaaccctctcccagattttgattttttttttttttttgcattattgtatattttcatgaacagaactttaaaaatataattactggaagttattagagttagtccttttttgtggtggttttaagaaatctttttctaccccaggttaataaagacaatttgctacattttcttttgaaagttgtaagtataacatttcacatttaggtttagaatccacctggaattggtcctggtagatggtgtgaggtagattctactttaattgtccccccacatggatggccagttgtctcaactcttccctgttgatccgtgtgtgacctctgtcataacactcatacatgaagtgtttgtatatttctggttcttgactttctcttcttttcctattgggtgatttttatgcctcaagactacactgtcttatatactcgtaacttccccgtaggtcttgatatgtgggtgagcatttcatgttcctcacgttgtaatcctaacttagctgatttaaatattacatctatgtagatagatggtaagcgctttgtactcttcacttcaacatgtattaccgtaaagagagttgacttttcacattttaaattttgagcccatttgttacaattaagtctttctgagagtattttttataccctgtatttttctttcttttttttttttaaggtaaccgtacttttcccaaaatgctatattgcaattggactggaggctataagtggtctacggctctggctctaagtctgcaggcccaggtggggcttcatgttcagctcactgttggacttcattgacatcaccctgaaaaaggtggatttttgaggagcgtgagaagaagagcatgagaagtgctgaattacactgtgttgttgcagatgagcgtccctaaccacagcagtccttgaagaagaaagatggtctgataggaactgcttattcaggaacacattgcaaaatctgtgggtgtccttcgggatctgagggcctcactcctacaactgcaaggaattgaattcttctaacagtgtgatgaggttggaagaagactccaagatccagaaaggaacacagtcccaccaacacctgtgttgtaacctggtgacaccctgaaacagagaatccagctaagcgatgcccaaaatattcatccacaacgtgttgttttaagcttccaagtttctagtaatttgttataaagcaatagaaaagta

SEQ ID NO: 344834 - DNA, 1195 bp, Homo sapiens
cgccccccggcccggaagtgcgcagcgctggcaagatggcgggaggggtgcgcccgctgaggggcctccgcgccttgtgtcgcgtgctgctcttcctctcgcagttctgcattctgtcgggcggtggtgagtcaaaggctgggttcagcgccgggtggggctgagtggcagcagggccccgggagctgcgaggaggccgggcccacgggcggacgctgacgcggggaggaggccgagtgccgggctccgggccgcttgtcgctgcatctggagtctggcgccctggccgcccggcccgaggccgcccctccgctccggcgacaccgagcccgccatcgcggctgcggagccctggcacggagatggagcgcttgggggctgggccggggaggcggaactggagcgcgatgtcatccttcggtccctcgttgccggctgacctgaactgatgtctactctgttgacgtttcgtccctaagctttgtgttttctggctgaccagccgtgaggttttcatgagcagcttattggcctggtgtagacccgccgtgttaaccacacaaaataaggttttcttgtcccgggataacgtgtttctctaattgtacgatccttaaatttagagcaatcgcaggcgctggctcagtcaataaaggatccgggcccaacacgcacattcacagtagttcccagggcagcaggtactagacgttttctattctagtaaatatatgtagttatctctagtagtttctctttgtttttataaaaattccctttagtatacgaagtcactttccatttttgaatatttattgtattttagattatgtgaattaagggtagatacacagccattttcagtagatagtcttcgtatttataccttttgacgtttctgcctcctctctttttccaatcccacgctcatttgtcaccttatttctattatttttccacttcatccatcaaaataaccttcagtccgtgcttctttcccttcagcaaatttcctctactgatggaaggattacagcgggactgatggagacttgaaatctagatctggttttgctactgggatcttgaacaaattatttatcctctttggaccttggtcctcatctttaaagcggtggggttggtctgacgacctaaagtcatttctgctttgtgattctaagtgtccaccttc

SEQ ID NO: 344835 - DNA, 412 bp, Homo sapiens
gtggaactgagaatggcatgatacgcagattcaaaaggccattaattactggcaaactgcaaatgcacgcaattaaattgcgtgactcttttatcattaggaaatgtccctctttgtccttggtaataccctttgtcctcggtaataccctttgtcctgaaatctactttatctgacatttctatagccagtccagttttcatggtattgtgtggtatgtacatctttttccatctgtttactttggtaaaagagtgactcttttatcattatgaaatgtccctctttgtccttggtaataccctttgaaggtgtaacaatccaaaatgtatgcagaaattcaaattacatgaaacaaatccctacacaactaaaaggagaaaaagaaaaatgcacagttagagtcacagaa

SEQ ID NO: 344836 - DNA, 5341 bp, Homo sapiens
caccagcctgttgcctctgtgagaaagtaccactgtaagaggccaaagggcatgatcattttcctctttcaccctgtctaggttgccagcaaatcccacgggcctcctgacgctgcccctggggccacaggtccctcgagtgctggaaggatgaaggattcctgcatcactgtgatggccatggcgctgctgtctgggttctttttcttcgcgccggcctcgagctacaacctggacgtgcggggcgcgcggagcttctccccaccgcgcgccgggaggcactttggataccgcgtcctgcaggtcggaaacggggtcatcgtgggagctccaggggaggggaacagcacaggaagcctctatcagtgccagtcgggcacaggacactgcctgccagtcaccctgagaggttccaactatacctccaagtacttgggaatgaccttggcaacagaccccacagatggaagcattttggcctgtgaccctgggctgtctcgaacgtgtgaccagaacacctatctgagtggcctgtgttacctcttccgccagaatctgcagggtcccatgctgcaggggcgccctggttttcaggaatgtatcaagggcaacgtagacctggtatttctgtttgatggttcgatgagcttgcagccagatgaatttcagaaaattctggacttcatgaaggatgtgatgaagaaactcagcaacacttcgtaccagtttgctgctgttcagttttccacaagctacaaaacagaatttgatttctcagattatgttaaacggaaggaccctgatgctctgctgaagcatgtaaagcacatgttgctgttgaccaatacctttggtgccatcaattatgtcgcgacagaggtgttccgggaggagctgggggcccggccagatgccaccaaagtgcttatcatcatcacggatggggaggccactgacagtggcaacatcgatgcggccaaagacatcatccgctacatcatcgggattggaaagcattttcagaccaaggagagtcaggagaccctccacaaatttgcatcaaaacccgcgagcgagtttgtgaaaattctggacacatttgagaagctgaaagatctattcactgagctgcagaagaagatctatgtcattgagggcacaagcaaacaggacctgacttccttcaacatggagctgtcctccagcggcatcagtgctgacctcagcaggggccatgcagtcgtgggggcagtaggagccaaggactgggctgggggctttcttgacctgaaggcagacctgcaggatgacacatttattgggaatgaaccattgacaccagaagtgagagcaggctatttgggttacaccgtgacctggctgccctcccggcaaaagacttcgttgctggcctcgggagcccctcgataccagcacatgggccgagtgctgctgttccaagagccacagggcggaggacactggagccaggtccagacaatccatgggacccagattggctcttatttcggtggggagctgtgtggcgtcgacgtggaccaagatggggagacagagctgctgctgattggtgccccactgttctatggggagcagagaggaggccgggtgtttatctaccagagaagacagttggggtttgaagaagtctcagagctgcagggggaccccggctacccactcgggcggtttggagaagccatcactgctctgacagacatcaacggcgatgggctggtagacgtggctgtgggggcccctctggaggagcagggggctgtgtacatcttcaatgggaggcacggggggcttagtccccagccaagtcagcggatagaagggacccaagtgctctcaggaattcagtggtttggacgctccatccatggggtgaaggaccttgaaggggatggcttggcagatgtggctgtgggggctgagagccagatgatcgtgctgagctcccggcccgtggtggatatggtcaccctgatgtccttctctccagctgagatcccagtgcatgaagtggagtgctcctattcaaccagtaacaagatgaaagaaggagttaatatcacaatctgtttccagatcaagtctctcatcccccagttccaaggccgcctggttgccaatctcacttacactctgcagctggatggccaccggaccagaagacgggggttgttcccaggagggagacatgaactcagaaggaatatagctgtcaccaccagcatgtcatgcactgacttctcatttcatttcccggtatgtgttcaagacctcatctcccccatcaatgtttccctgaatttctctctttgggaggaggaagggacaccgagggaccaaagggcgggcaaggacataccgcccatcctgagaccctccctgcactcggaaacctgggagatcccttttgagaagaactgtggggaggacaagaagtgtgaggcaaacttgagagtgtccttctctcctgcaagatccagagccctgcgtctaactgcttttgccagcctctctgtggagctgagcctgagtaacttggaagaagatgcttactgggtccagctggacctgcacttccccccgggactctccttccgcaaggtggagatgctgaagccccatagccagatacctgtgagctgcgaggagcttcctgaagagtccaggcttctgtccagggcattatcttgcaatgtgagctctcccatcttcaaagcaggccactcggttgctctgcagatgatgtttaatacactggtaaacagctcctggggggactcggttgaattgcacgccaatgtgacctgtaacaatgaggactcagacctcctggaggacaactcagccactaccatcatccccatcctgtaccccatcaacatcctcatccaggaccaagaagactccacactctatgtcagtttcacccccaaaggccccaagatccaccaagtcaagcacatgtaccaggtgaggatccagccttccatccacgaccacaacatacccaccctggaggctgtggttggggtgccacagcctcccagcgaggggcccatcacacaccagtggagcgtgcagatggagcctcccgtgccctgccactatgaggatctggagaggctcccggatgcagctgagccttgtctccccggagccctgttccgctgccctgttgtcttcaggcaggagatcctcgtccaagtgatcgggactctggagctggtgggagagatcgaggcctcttccatgttcagcctctgcagctccctctccatctccttcaacagcagcaagcatttccacctctatggcagcaacgcctccctggcccaggttgtcatgaaggttgacgtggtgtatgagaagcagatgctctacctctacgtgctgagcggcatcggggggctgctgctgctgctgctcattttcatagtgctgtacaaggttggtttcttcaaacggaacctgaaggagaagatggaggctggcagaggtgtcccgaatggaatccctgcagaagactctgagcagctggcatctgggcaagaggctggggatcccggctgcctgaagcccctccatgagaaggactctgagagtggtggtggcaaggactgagtccaggcctgtgaggtgcagagtgcccagaactggactcaggatgcccagggccactctgcctctgcctgcattctgccgtgtgccctcgggcgagtcactgcctctccctggccctcagtttccctatctcgaacatggaactcattcctgcctgtctcctttgcaggctcatagggaagacctgctgagggaccagccaagagggctgcaaaagtgagggcttgtcattaccagacggttcaccagcctctcttggtttccttccttggaagagaatgtctgatctaaatgtggagaaactgtagtctcaggacctagggatgttctggccctcacccctgccctgggatgtccacagatgcctccaccccccagaacctgtccttgcacactcccctgcactggagtccagtctcttctgctggcagaaagcaaatgtgacctgtgtcactacgtgactgtggcacacgccttgttcttggccaaagaccaaattccttggcatgccttccagcaccctgcaaaatgagaccctcgtggccttccccagcctcttctagagccgtgatgcctccctgttgaagctctggtgacaccagcctttctcccaggccaggctccttcctgtcttcctgcattcacccagacagctccctctgcctgaaccttccatctcgccacccctccttccttgaccagcagatcccagctcacgtcacacttggttgggtcctcacatctttcacacttccaccagcctgcactactccctcaaagcacacgtcatgtttcttcatccggcagcctggatgttttttccctgtttaatgattgacgtacttagcagctatctctcagtgaactgtgagggtaaaggctatacttgtcttgttcaccttgggatgatgcctcatgatatgtcagggcgtgggacatctagtaggtgcttgacataatttcactgaattaatgacagagccagtgggaagatacagaaaaagaggggctgggctgggcgcggtggttcacgcctgtaatcccagcactttgggaggccaaggagggtggatcacctgaggtcaggagttagaggccagcctggcgaaaccccatctctactaaaaatacaaaatccaggcgtggtggcacacacctgtagtcccagctactcaggaggttgaggtaggagaattgcttgaacctgggaggtggaggttgcagtgagccaagattgcgccattgcactccagcctgggcaacacagcgagactccgtctcaaggaaaaaataaaaataaaaagcgggcacgggcccgtgacatccccacccttggaggctgtcttctcaggctctgccctgccctagctccacaccctctcccaggacccatcacgcctgtgcagtggcccccacagaaagactgagctcaaggtgggaaccacgtctgctaacttggagccccagtgccaagcacagtgcctgcatgtatttatccaataaatgtgaaattctgtccaaaaaaaaaaaataccatttcaatactcaaaaaaaaacctgcgggggcatttatttgtggggggggccaaaacaagggtttaggcacgggggcacttgggtaaaggtgttttccggaccccagtttttgggcacacgggggataatttgcggggttcccaca

SEQ ID NO: 344837 - DNA, 443 bp, Homo sapiens
gcggatcattctctgggcctcagagactgtaaatgcaaaggaaccttaattttctaggattttagcatttggaattatttctctgcgattctgtagggaagagttgaggtaggagaattgcttgaacctgggaggtggaggttgcagtgagccaagattgcgccattgcactccagcctgggcaacacagcgagactccgtctcaaggaaaaaataaaaataaaaagcgggcacgggcccgtgacatccccacccttggaggctgtcttctcaggctctgccctgccctagctccacaccctctcccaggacccatcacgcctgtgcagtggcccccacagaaagactgagctcaaggtgggaaccacgtctgctaacttggagccccagtgccaagcacagtgcctgcatgtatttatccaataaatgtgaaattctgtcca

SEQ ID NO: 344838 - DNA, 569 bp, Homo sapiens
gtgcgcggtcgatctaaggatccggtgtttatcgatgccacccagatggacatttgggcctgtgaccctgggctgtctcgaacgtgtgaccagaacacctatctgagtggcctgtgttacctcttccgccagaatctgcagggtcccatgctgcaggggcgccctggttttcaggaatgtatcaagggcaacgtagacctggtatttctgtttgatggttcgatgagcttgcagccagatgaatttcagaaaattctggacttcatgaaggatgtgatgaagaaactcagcaacacttcgtaccagtttgctgctgttcagttttccacaagctacaaaacagaatttgatttctcagattatgttaaacggaaggaccctgatgctctgctgaagcatgtaaagcacatgttgctgttgaccaatacctttggtgccatcaattatgtcgcgacagaggtgttccgggaggagctgggggcccggccagatgccaccaaagtgcttatcatcatcacggatggggaggccactgacagtggatcgataaacaccagggggatcgataa

SEQ ID NO: 344839 - DNA, 531 bp, Homo sapiens
tgttacatgagggagcaaggtttatttcattttatttctgtgtttatttgtatattgcctcattttcaaaagaattatctgaggcaaggatgtggagttgggttgcccaggtcctgcataagaagagattgagccaggcatagtggctcacacctgtaatcccagcacattgggaggcttagccgggaggatcacttgaagccaggagttcgagaccagcctaggcaacatagcaagaccccatttctacaaaaaataaaaactagccaagtgtggtggcacgtgcctgaagtcccagctacttcggaggctgacgagggaggatggctcgagcctgggaggctgaggctgcagtgagctatgattgtgaccgtgcactccagcctgggagacagaacaagaccctgtaatcgcagctacttgggaggctgaggcatgaaaatcgctggaacccgggaggcagaggttgcagtgagccaagattgtgccagtgcactccagcctgggcaacaagagcgaaactccatctaa

SEQ ID NO: 344840 - DNA, 4931 bp, Homo sapiens
caccagcctgttgcctctgtgagaaagtaccactgtaagaggccaaagggcatgatcattttcctctttcaccctgtctaggttgccagcaaatcccacgggcctcctgacgctgcccctggggccacaggtccctcgagtgctggaaggatgaaggattcctgcatcactgtgatggccatggcgctgctgtctgggttctttttcttcgcgccggcctcgagctacaacctggacgtgcggggcgcgcggagcttctccccaccgcgcgccgggaggcactttggataccgcgtcctgcaggtcggaaacggggtcatcgtgggagctccaggggaggggaacagcacaggaagcctctatcagtgccagtcgggcacaggacactgcctgccagtcaccctgagaggttccaactatacctccaagtacttgggaatgaccttggcaacagaccccacagatggaagcattttgtttgctgctgttcagttttccacaagctacaaaacagaatttgatttctcagattatgttaaacggaaggaccctgatgctctgctgaagcatgtaaagcacatgttgctgttgaccaatacctttggtgccatcaattatgtcgcgacagaggtgttccgggaggagctgggggcccggccagatgccaccaaagtgcttatcatcatcacggatggggaggccactgacagtggcaacatcgatgcggccaaagacatcatccgctacatcatcgggattggaaagcattttcagaccaaggagagtcaggagaccctccacaaatttgcatcaaaacccgcgagcgagtttgtgaaaattctggacacatttgagaagctgaaagatctattcactgagctgcagaagaagatctatgtcattgagggcacaagcaaacaggacctgacttccttcaacatggagctgtcctccagcggcatcagtgctgacctcagcaggggccatgcagtcgtgggggcagtaggagccaaggactgggctgggggctttcttgacctgaaggcagacctgcaggatgacacatttattgggaatgaaccattgacaccagaagtgagagcaggctatttgggttacaccgtgacctggctgccctcccggcaaaagacttcgttgctggcctcgggagcccctcgataccagcacatgggccgagtgctgctgttccaagagccacagggcggaggacactggagccaggtccagacaatccatgggacccagattggctcttatttcggtggggagctgtgtggcgtcgacgtggaccaagatggggagacagagctgctgctgattggtgccccactgttctatggggagcagagaggaggccgggtgtttatctaccagagaagacagttggggtttgaagaagtctcagagctgcagggggaccccggctacccactcgggcggtttggagaagccatcactgctctgacagacatcaacggcgatgggctggtagacgtggctgtgggggcccctctggaggagcagggggctgtgtacatcttcaatgggaggcacggggggcttagtccccagccaagtcagcggatagaagggacccaagtgctctcaggaattcagtggtttggacgctccatccatggggtgaaggaccttgaaggggatggcttggcagatgtggctgtgggggctgagagccagatgatcgtgctgagctcccggcccgtggtggatatggtcaccctgatgtccttctctccagctgagatcccagtgcatgaagtggagtgctcctattcaaccagtaacaagatgaaagaaggagttaatatcacaatctgtttccagatcaagtctctcatcccccagttccaaggccgcctggttgccaatctcacttacactctgcagctggatggccaccggaccagaagacgggggttgttcccaggagggagacatgaactcagaaggaatatagctgtcaccaccagcatgtcatgcactgacttctcatttcatttcccggtatgtgttcaagacctcatctcccccatcaatgtttccctgaatttctctctttgggaggaggaagggacaccgagggaccaaagggcgggcaaggacataccgcccatcctgagaccctccctgcactcggaaacctgggagatcccttttgagaagaactgtggggaggacaagaagtgtgaggcaaacttgagagtgtccttctctcctgcaagatccagagccctgcgtctaactgcttttgccagcctctctgtggagctgagcctgagtaacttggaagaagatgcttactgggtccagctggacctgcacttccccccgggactctccttccgcaaggtggagatgctgaagccccatagccagatacctgtgagctgcgaggagcttcctgaagagtccaggcttctgtccagggcattatcttgcaatgtgagctctcccatcttcaaagcaggccactcggttgctctgcagatgatgtttaatacactggtaaacagctcctggggggactcggttgaattgcacgccaatgtgacctgtaacaatgaggactcagacctcctggaggacaactcagccactaccatcatccccatcctgtaccccatcaacatcctcatccaggaccaagaagactccacactctatgtcagtttcacccccaaaggccccaagatccaccaagtcaagcacatgtaccaggtgaggatccagccttccatccacgaccacaacatacccaccctggaggctgtggttggggtgccacagcctcccagcgaggggcccatcacacaccagtggagcgtgcagatggagcctcccgtgccctgccactatgaggatctggagaggctcccggatgcagctgagccttgtctccccggagccctgttccgctgccctgttgtcttcaggcaggagatcctcgtccaagtgatcgggactctggagctggtgggagagatcgaggcctcttccatgttcagcctctgcagctccctctccatctccttcaacagcagcaagcatttccacctctatggcagcaacgcctccctggcccaggttgtcatgaaggttgacgtggtgtatgagaagcagatgctctacctctacgtgctgagcggcatcggggggctgctgctgctgctgctcattttcatagtgctgtacaaggttggtttcttcaaacggaacctgaaggagaagatggaggctggcagaggtgtcccgaatggaatccctgcagaagactctgagcagctggcatctgggcaagaggctggggatcccggctgcctgaagcccctccatgagaaggactctgagagtggtggtggcaaggactgagtccaggcctgtgaggtgcagagtgcccagaactggactcaggatgcccagggccactctgcctctgcctgcattctgccgtgtgccctcgggcgagtcactgcctctccctggccctcagtttccctatctcgaacatggaactcattcctgcctgtctcctttgcaggctcatagggaagacctgctgagggaccagccaagagggctgcaaaagtgagggcttgtcattaccagacggttcaccagcctctcttggtttccttccttggaagagaatgtctgatctaaatgtggagaaactgtagtctcaggacctagggatgttctggccctcacccctgccctgggatgtccacagatgcctccaccccccagaacctgtccttgcacactcccctgcactggagtccagtctcttctgctggcagaaagcaaatgtgacctgtgtcactacgtgactgtggcacacgccttgttcttggccaaagaccaaattccttggcatgccttccagcaccctgcaaaatgagaccctcgtggccttccccagcctcttctagagccgtgatgcctccctgttgaagctctggtgacaccagcctttctcccaggccaggctccttcctgtcttcctgcattcacccagacagctccctctgcctgaaccttccatctcgccacccctccttccttgaccagcagatcccagctcacgtcacacttggttgggtcctcacatctttcacacttccaccagcctgcactactccctcaaagcacacgtcatgtttcttcatccggcagcctggatgttttttccctgtttaatgattgacgtacttagcagctatctctcagtgaactgtgagggtaaaggctatacttgtcttgttcaccttgggatgatgcctcatgatatgtcagggcgtgggacatctagtaggtgcttgacataatttcactgaattaatgacagagccagtgggaagatacagaaaaagaggggctgggctgggcgcggtggttcacgcctgtaatcccagcactttgggaggccaaggagggtggatcacctgaggtcaggagttagaggccagcctggcgaaaccccatctctactaaaaatacaaaatccaggcgtggtggcacacacctgtagtcccagctactcaggaggttgaggtaggagaattgcttgaacctgggaggtggaggttgcagtgagccaagattgcgccattgcactccagcctgggcaacacagcgagactccgtctcaaggaaaaaataaaaataaaaagcgggcacgggcccgtgacatccccacccttggaggctgtcttctcaggctctgccctgccctagctccacaccctctcccaggacccatcacgcctgtgcagtggcccccacagaaagactgagctcaaggtgggaaccacgtctgctaacttggagccccagtgccaagcacagtgcctgcatgtatttatccaataaatgtgaaattctgtcca

SEQ ID NO: 344841 - DNA, 5031 bp, Homo sapiens
caccagcctgttgcctctgtgagaaagtaccactgtaagaggccaaagggcatgatcattttcctctttcaccctgtctaggttgccagcaaatcccacgggcctcctgacgctgcccctggggccacaggtccctcgagtgctggaaggatgaaggattcctgcatcactgtgatggccatggcgctgctgtctgggttctttttcttcgcgccggcctcgagctacaacctggacgtgcggggcgcgcggagcttctccccaccgcgcgccgggaggcactttggataccgcgtcctgcaggtcggaaacggggtcatcgtgggagctccaggggaggggaacagcacaggaagcctctatcagtgccagtcgggcacaggacactgcctgccagtcaccctgagaggttccaactatacctccaagtacttgggaatgaccttggcaacagaccccacagatggaagcattttgtttgctgctgttcagttttccacaagctacaaaacagaatttgatttctcagattatgttaaacggaaggaccctgatgctctgctgaagcatgtaaagcacatgttgctgttgaccaatacctttggtgccatcaattatgtcgcgacagaggtgttccgggaggagctgggggcccggccagatgccaccaaagtgcttatcatcatcacggatggggaggccactgacagtggcaacatcgatgcggccaaagacatcatccgctacatcatcgggattggaaagcattttcagaccaaggagagtcaggagaccctccacaaatttgcatcaaaacccgcgagcgagtttgtgaaaattctggacacatttgagaagctgaaagatctattcactgagctgcagaagaagatctatgtcattgagggcacaagcaaacaggacctgacttccttcaacatggagctgtcctccagcggcatcagtgctgacctcagcaggggccatgcagtcgtgggggcagtaggagccaaggactgggctgggggctttcttgacctgaaggcagacctgcaggatgacacatttattgggaatgaaccattgacaccagaagtgagagcaggctatttgggttacaccgtgacctggctgccctcccggcaaaagacttcgttgctggcctcgggagcccctcgataccagcacatgggccgagtgctgctgttccaagagccacagggcggaggacactggagccaggtccagacaatccatgggacccagattggctcttatttcggtggggagctgtgtggcgtcgacgtggaccaagatggggagacagagctgctgctgattggtgccccactgttctatggggagcagagaggaggccgggtgtttatctaccagagaagacagttggggtttgaagaagtctcagagctgcagggggaccccggctacccactcgggcggtttggagaagccatcactgctctgacagacatcaacggcgatgggctggtagacgtggctgtgggggcccctctggaggagcagggggctgtgtacatcttcaatgggaggcacggggggcttagtccccagccaagtcagcggatagaagggacccaagtgctctcaggaattcagtggtttggacgctccatccatggggtgaaggaccttgaaggggatggcttggcagatgtggctgtgggggctgagagccagatgatcgtgctgagctcccggcccgtggtggatatggtcaccctgatgtccttctctccagctgagatcccagtgcatgaagtggagtgctcctattcaaccagtaacaagatgaaagaaggagttaatatcacaatctgtttccagatcaagtctctcatcccccagttccaaggccgcctggttgccaatctcacttacactctgcagctggatggccaccggaccagaagacgggggttgttcccaggagggagacatgaactcagaaggaatatagctgtcaccaccagcatgtcatgcactgacttctcatttcatttcccggtatgtgttcaagacctcatctcccccatcaatgtttccctgaatttctctctttgggaggaggaagggacaccgagggaccaaagggcgggcaaggacataccgcccatcctgagaccctccctgcactcggaaacctgggagatcccttttgagaagaactgtggggaggacaagaagtgtgaggcaaacttgagagtgtccttctctcctgcaagatccagagccctgcgtctaactgcttttgccagcctctctgtggagctgagcctgagtaacttggaagaagatgcttactgggtccagctggacctgcacttccccccgggactctccttccgcaaggtggagatgctgaagccccatagccagatacctgtgagctgcgaggagcttcctgaagagtccaggcttctgtccagggcattatcttgcaatgtgagctctcccatcttcaaagcaggccactcggttgctctgcagatgatgtttaatacactggtaaacagctcctggaggacaactcagccactaccatcatccccatcctgtaccccatcaacatcctcatccaggaccaagaagactccacactctatgtcagtttcacccccaaaggccccaagatccaccaagtcaagcacatgtaccaggtgaggatccagccttccatccacgaccacaacatacccaccctggaggctgtggttggggtgccacagcctcccagcgaggggcccatcacacaccagtggagcgtgcagatggagcctcccgtgccctgccactatgaggatctggagaggctcccggatgcagctgagccttgtctccccggagccctgttccgctgccctgttgtcttcaggcaggagatcctcgtccaagtgatcgggactctggagctggtgggagagatcgaggcctcttccatgttcagcctctgcagctccctctccatctccttcaacagcagcaagcatttccacctctatggcagcaacgcctccctggcccaggttgtcatgaaggttgacgtggtgtatgagaagcagatgctctacctctacgtgctgagcggcatcggggggctgctgctgctgctgctcattttcatagtgctgtacaaggttggtttcttcaaacggaacctgaaggagaagatggaggctggcagaggtgtcccgaatggaatccctgcagaagactctgagcagctggcatctgggcaagaggctggggatcccggctgcctgaagcccctccatgagaaggactctgagagtggtggtggcaaggactgagtccaggcctgtgaggtgcagagtgcccagaactggactcaggatgcccagggccactctgcctctgcctgcattctgccgtgtgccctcgggcgagtcactgcctctccctggccctcagtttccctatctcgaacatggaactcattcctgcctgtctcctttgcaggctcatagggaagacctgctgagggaccagccaagagggctgcaaaagtgagggcttgtcattaccagacggttcaccagcctctcttggtttccttccttggaagagaatgtctgatctaaatgtggagaaactgtagtctcaggacctagggatgttctggccctcacccctgccctgggatgtccacagatgcctccaccccccagaacctgtccttgcacactcccctgcactggagtccagtctcttctgctggcagaaagcaaatgtgacctgtgtcactacgtgactgtggcacacgccttgttcttggccaaagaccaaattccttggcatgccttccagcaccctgcaaaatgagaccctcgtggccttccccagcctcttctagagccgtgatgcctccctgttgaagctctggtgacaccagcctttctcccaggccaggctccttcctgtcttcctgcattcacccagacagctccctctgcctgaaccttccatctcgccacccctccttccttgaccagcagatcccagctcacgtcacacttggttgggtcctcacatctttcacacttccaccagcctgcactactccctcaaagcacacgtcatgtttcttcatccggcagcctggatgttttttccctgtttaatgattgacgtacttagcagctatctctcagtgaactgtgagggtaaaggctatacttgtcttgttcaccttgggatgatgcctcatgatatgtcagggcgtgggacatctagtaggtgcttgacataatttcactgaattaatgacagagccagtgggaagatacagaaaaagaggggctgggctgggcgcggtggttcacgcctgtaatcccagcactttgggaggccaaggagggtggatcacctgaggtcaggagttagaggccagcctggcgaaaccccatctctactaaaaatacaaaatccaggcgtggtggcacacacctgtagtcccagctactcaggaggttgaggtaggagaattgcttgaacctgggaggtggaggttgcagtgagccaagattgcgccattgcactccagcctgggcaacacagcgagactccgtctcaaggaaaaaataaaaataaaaagcgggcacgggcccgtgacatccccacccttggaggctgtcttctcaggctctgccctgccctagctccacaccctctcccaggacccatcacgcctgtgcagtggcccccacagaaagactgagctcaaggtgggaaccacgtctgctaacttggagccccagtgccaagcacagtgcctgcatgtatttatccaataaatgtgaaattctgtccaaaaaaaaaaaataccatttcaatactcaaaaaaaaacctgcgggggcatttatttgtggggggggccaaaacaagggtttaggcacgggggcacttgggtaaaggtgttttccggaccccagtttttgggcacacgggggataatttgcggggttcccaca

SEQ ID NO: 344842 - DNA, 4978 bp, Homo sapiens
caccagcctgttgcctctgtgagaaagtaccactgtaagaggccaaagggcatgatcattttcctctttcaccctgtctaggttgccagcaaatcccacgggcctcctgacgctgcccctggggccacaggtccctcgagtgctggaaggatgaaggattcctgcatcactgtgatggccatggcgctgctgtctgggttctttttcttcgcgccggcctcgagctacaacctggacgtgcggggcgcgcggagcttctccccaccgcgcgccgggaggcactttggataccgcgtcctgcaggtcggaaacggggtcatcgtgggagctccaggggaggggaacagcacaggaagcctctatcagtgccagtcgggcacaggacactgcctgccagtcaccctgagaggttccaactatacctccaagtacttgggaatgaccttggcaacagaccccacagatggaagcattttgtttgctgctgttcagttttccacaagctacaaaacagaatttgatttctcagattatgttaaacggaaggaccctgatgctctgctgaagcatgtaaagcacatgttgctgttgaccaatacctttggtgccatcaattatgtcgcgacagaggtgttccgggaggagctgggggcccggccagatgccaccaaagtgcttatcatcatcacggatggggaggccactgacagtggcaacatcgatgcggccaaagacatcatccgctacatcatcgggattggaaagcattttcagaccaaggagagtcaggagaccctccacaaatttgcatcaaaacccgcgagcgagtttgtgaaaattctggacacatttgagaagctgaaagatctattcactgagctgcagaagaagatctatgtcattgagggcacaagcaaacaggacctgacttccttcaacatggagctgtcctccagcggcatcagtgctgacctcagcaggggccatgcagtcgtgggggcagtaggagccaaggactgggctgggggctttcttgacctgaaggcagacctgcaggatgacacatttattgggaatgaaccattgacaccagaagtgagagcaggctatttgggttacaccgtgacctggctgccctcccggcaaaagacttcgttgctggcctcgggagcccctcgataccagcacatgggccgagtgctgctgttccaagagccacagggcggaggacactggagccaggtccagacaatccatgggacccagattggctcttatttcggtggggagctgtgtggcgtcgacgtggaccaagatggggagacagagctgctgctgattggtgccccactgttctatggggagcagagaggaggccgggtgtttatctaccagagaagacagttggggtttgaagaagtctcagagctgcagggggaccccggctacccactcgggcggtttggagaagccatcactgctctgacagacatcaacggcgatgggctggtagacgtggctgtgggggcccctctggaggagcagggggctgtgtacatcttcaatgggaggcacggggggcttagtccccagccaagtcagcggatagaagggacccaagtgctctcaggaattcagtggtttggacgctccatccatggggtgaaggaccttgaaggggatggcttggcagatgtggctgtgggggctgagagccagatgatcgtgctgagctcccggcccgtggtggatatggtcaccctgatgtccttctctccagctgagatcccagtgcatgaagtggagtgctcctattcaaccagtaacaagatgaaagaaggagttaatatcacaatctgtttccagatcaagtctctcatcccccagttccaaggccgcctggttgccaatctcacttacactctgcagctggatggccaccggaccagaagacgggggttgttcccaggagggagacatgaactcagaaggaatatagctgtcaccaccagcatgtcatgcactgacttctcatttcatttcccggtatgtgttcaagacctcatctcccccatcaatgtttccctgaatttctctctttgggaggaggaagggacaccgagggaccaaagggcgggcaaggacataccgcccatcctgagaccctccctgcactcggaaacctgggagatcccttttgagaagaactgtggggaggacaagaagtgtgaggcaaacttgagagtgtccttctctcctgcaagatccagagccctgcgtctaactgcttttgccagcctctctgtggagctgagcctgagtaacttggaagaagatgcttactgggtccagctggacctgcacttccccccgggactctccttccgcaaggtggagatgctgaagccccatagccagatacctgtgagctgcgaggagcttcctgaagagtccaggcttctgtccagggcattatcttgcaatgtgagctctcccatcttcaaagcaggccactcggttgctctgcagatgatgtttaatacactggtaaacagctcctggaggacaactcagccactaccatcatccccatcctgtaccccatcaacatcctcatccaggaccaagaagactccacactctatgtcagtttcacccccaaaggccccaagatccaccaagtcaagcacatgtaccaggtgaggatccagccttccatccacgaccacaacatacccaccctggaggctgtggttggggtgccacagcctcccagcgaggggcccatcacacaccagtggagcgtgcagatggagcctcccgtgccctgccactatgaggatctggagaggctcccggatgcagctgagccttgtctccccggagccctgttccgctgccctgttgtcttcaggcaggagatcctcgtccaagtgatcgggactctggagctggtgggagagatcgaggcctcttccatgttcagcctctgcagctccctctccatctccttcaacagcagcaagcatttccacctctatggcagcaacgcctccctggcccaggttgtcatgaaggttgacgtggtgtatgagaagcagatgctctacctctacgtgctgagcggcatcggggggctgctgctgctgctgctcattttcatagtgctgtacaaggttggtttcttcaaacggaacctgaaggagaagatggaggctggcagaggtgtcccgaatggaatccctgcagaagactctgagcagctggcatctgggcaagaggctggggatcccggctgcctgaagcccctccatgagaaggactctgagagtggtggtggcaaggactgagtccaggcctgtgaggtgcagagtgcccagaactggactcaggatgcccagggccactctgcctctgcctgcattctgccgtgtgccctcgggcgagtcactgcctctccctggccctcagtttccctatctcgaacatggaactcattcctgcctgtctcctttgcaggctcatagggaagacctgctgagggaccagccaagagggctgcaaaagtgagggcttgtcattaccagacggttcaccagcctctcttggtttccttccttggaagagaatgtctgatctaaatgtggagaaactgtagtctcaggacctagggatgttctggccctcacccctgccctgggatgtccacagatgcctccaccccccagaacctgtccttgcacactcccctgcactggagtccagtctcttctgctggcagaaagcaaatgtgacctgtgtcactacgtgactgtggcacacgccttgttcttggccaaagaccaaattccttggcatgccttccagcaccctccctgttgaagctctggtgacaccagcctttctcccaggccaggctccttcctgtcttcctgcattcacccagacagctccctctgcctgaaccttccatctcgccacccctccttccttgaccagcagatcccagctcacgtcacacttggttgggtcctcacatctttcacacttccaccagcctgcactactccctcaaagcacacgtcatgtttcttcatccggcagcctggatgttttttccctgtttaatgattgacgtacttagcagctatctctcagtgaactgtgagggtaaaggctatacttgtcttgttcaccttgggatgatgcctcatgatatgtcagggcgtgggacatctagtaggtgcttgacataatttcactgaattaatgacagagccagtgggaagatacagaaaaagaggggctgggctgggcgcggtggttcacgcctgtaatcccagcactttgggaggccaaggagggtggatcacctgaggtcaggagttagaggccagcctggcgaaaccccatctctactaaaaatacaaaatccaggcgtggtggcacacacctgtagtcccagctactcaggaggttgaggtaggagaattgcttgaacctgggaggtggaggttgcagtgagccaagattgcgccattgcactccagcctgggcaacacagcgagactccgtctcaaggaaaaaataaaaataaaaagcgggcacgggcccgtgacatccccacccttggaggctgtcttctcaggctctgccctgccctagctccacaccctctcccaggacccatcacgcctgtgcagtggcccccacagaaagactgagctcaaggtgggaaccacgtctgctaacttggagccccagtgccaagcacagtgcctgcatgtatttatccaataaatgtgaaattctgtccaaaaaaaaaaaataccatttcaatactcaaaaaaaaacctgcgggggcatttatttgtggggggggccaaaacaagggtttaggcacgggggcacttgggtaaaggtgttttccggaccccagtttttgggcacacgggggataatttgcggggttcccaca

SEQ ID NO: 344843 - DNA, 4403 bp, Homo sapiens
tttctcaggagaaggtcttcagctgtttccatgcatctctgctactaacccaattccctggggcccctgccctctcctgctgggtgttcttccagcatcctgtgttcctaactccacgccccacacactttcctcaggttacaccgtgacctggctgccctcccggcaaaagacttcgttgctggcctcgggagcccctcgataccagcacatgggccgagtgctgctgttccaagagccacagggcggaggacactggagccaggtccagacaatccatgggacccaggtgcgcccagtccgagggcatctgcagaccagggactggcgggacacacatcacactcccttctgtcctttgaatgctcatccacttaccatgtggcagcccctgtgccaaacatgatcacatttatccctcataacacacagaggtaagccctgtcatctccctctctagtttaagaaactgaacctcaaagagcccaccttgtcttaacgcacatagactaggggtggatccaagattggaacctgcatttgagggagtggcacaagatgaacacggtacaggtatctccctgccaacccctgctgttcccacaggcgcttccccaaacacctgcctctccccacagattggctcttatttcggtggggagctgtgtggcgtcgacgtggaccaagatggggagacagagctgctgctgattggtgccccactgttctatggggagcagagaggaggccgggtgtttatctaccagagaagacagttggggtttgaagaagtctcagagctgcagggggaccccggctacccactcgggcggtttggagaagccatcactgctctgacagacatcaacggcgatgggctggtagacgtggctgtgggggcccctctggaggagcagggggctgtgtacatcttcaatgggaggcacggggggcttagtccccagccaagtcagcggatagaagggacccaagtgctctcaggaattcagtggtttggacgctccatccatggggtgaaggaccttgaaggggatggcttggcagatgtggctgtgggggctgagagccagatgatcgtgctgagctcccggcccgtggtggatatggtcaccctgatgtccttctctccagctgagatcccagtgcatgaagtggagtgctcctattcaaccagtaacaagatgaaagaaggagttaatatcacaatctgtttccagatcaagtctctcatcccccagttccaaggccgcctggttgccaatctcacttacactctgcagctggatggccaccggaccagaagacgggggttgttcccaggagggagacatgaactcagaaggaatatagctgtcaccaccagcatgtcatgcactgacttctcatttcatttcccggtatgtgttcaagacctcatctcccccatcaatgtttccctgaatttctctctttgggaggaggaagggacaccgagggaccaaagggcgggcaaggacataccgcccatcctgagaccctccctgcactcggaaacctgggagatcccttttgagaagaactgtggggaggacaagaagtgtgaggcaaacttgagagtgtccttctctcctgcaagatccagagccctgcgtctaactgcttttgccagcctctctgtggagctgagcctgagtaacttggaagaagatgcttactgggtccagctggacctgcacttccccccgggactctccttccgcaaggtggagatgctgaagccccatagccagatacctgtgagctgcgaggagcttcctgaagagtccaggcttctgtccagggcattatcttgcaatgtgagctctcccatcttcaaagcaggccactcggttgctctgcagatgatgtttaatacactggtaaacagctcctggaggacaactcagccactaccatcatccccatcctgtaccccatcaacatcctcatccaggaccaagaagactccacactctatgtcagtttcacccccaaaggccccaagatccaccaagtcaagcacatgtaccaggtgaggatccagccttccatccacgaccacaacatacccaccctggaggctgtggttggggtgccacagcctcccagcgaggggcccatcacacaccagtggagcgtgcagatggagcctcccgtgccctgccactatgaggatctggagaggctcccggatgcagctgagccttgtctccccggagccctgttccgctgccctgttgtcttcaggcaggagatcctcgtccaagtgatcgggactctggagctggtgggagagatcgaggcctcttccatgttcagcctctgcagctccctctccatctccttcaacagcagcaagcatttccacctctatggcagcaacgcctccctggcccaggttgtcatgaaggttgacgtggtgtatgagaagcagatgctctacctctacgtgctgagcggcatcggggggctgctgctgctgctgctcattttcatagtgctgtacaaggttggtttcttcaaacggaacctgaaggagaagatggaggctggcagaggtgtcccgaatggaatccctgcagaagactctgagcagctggcatctgggcaagaggctggggatcccggctgcctgaagcccctccatgagaaggactctgagagtggtggtggcaaggactgagtccaggcctgtgaggtgcagagtgcccagaactggactcaggatgcccagggccactctgcctctgcctgcattctgccgtgtgccctcgggcgagtcactgcctctccctggccctcagtttccctatctcgaacatggaactcattcctgcctgtctcctttgcaggctcatagggaagacctgctgagggaccagccaagagggctgcaaaagtgagggcttgtcattaccagacggttcaccagcctctcttggtttccttccttggaagagaatgtctgatctaaatgtggagaaactgtagtctcaggacctagggatgttctggccctcacccctgccctgggatgtccacagatgcctccaccccccagaacctgtccttgcacactcccctgcactggagtccagtctcttctgctggcagaaagcaaatgtgacctgtgtcactacgtgactgtggcacacgccttgttcttggccaaagaccaaattccttggcatgccttccagcaccctgcaaaatgagaccctcgtggccttccccagcctcttctagagccgtgatgcctccctgttgaagctctggtgacaccagcctttctcccaggccaggctccttcctgtcttcctgcattcacccagacagctccctctgcctgaaccttccatctcgccacccctccttccttgaccagcagatcccagctcacgtcacacttggttgggtcctcacatctttcacacttccaccagcctgcactactccctcaaagcacacgtcatgtttcttcatccggcagcctggatgttttttccctgtttaatgattgacgtacttagcagctatctctcagtgaactgtgagggtaaaggctatacttgtcttgttcaccttgggatgatgcctcatgatatgtcagggcgtgggacatctagtaggtgcttgacataatttcactgaattaatgacagagccagtgggaagatacagaaaaagaggggctgggctgggcgcggtggttcacgcctgtaatcccagcactttgggaggccaaggagggtggatcacctgaggtcaggagttagaggccagcctggcgaaaccccatctctactaaaaatacaaaatccaggcgtggtggcacacacctgtagtcccagctactcaggaggttgaggtaggagaattgcttgaacctgggaggtggaggttgcagtgagccaagattgcgccattgcactccagcctgggcaacacagcgagactccgtctcaaggaaaaaataaaaataaaaagcgggcacgggcccgtgacatccccacccttggaggctgtcttctcaggctctgccctgccctagctccacaccctctcccaggacccatcacgcctgtgcagtggcccccacagaaagactgagctcaaggtgggaaccacgtctgctaacttggagccccagtgccaagcacagtgcctgcatgtatttatccaataaatgtgaaattctgtccaaaaaaaaaaaataccatttcaatactcaaaaaaaaacctgcgggggcatttatttgtggggggggccaaaacaagggtttaggcacgggggcacttgggtaaaggtgttttccggaccccagtttttgggcacacgggggataatttgcggggttcccaca

SEQ ID NO: 344844 - DNA, 4005 bp, Homo sapiens
caccagcctgttgcctctgtgagaaagtaccactgtaagaggccaaagggcatgatcattttcctctttcaccctgtctaggttgccagcaaatcccacgggcctcctgacgctgcccctggggccacaggtccctcgagtgctggaaggatgaaggattcctgcatcactgtgatggccatggcgctgctgtctgggttctttttcttcgcgccggcctcgagctacaacctggacgtgcggggcgcgcggagcttctccccaccgcgcgccgggaggcactttggataccgcgtcctgcaggtcggaaacggggtcatcgtgggagctccaggggaggggaacagcacaggaagcctctatcagtgccagtcgggcacaggacactgcctgccagtcaccctgagaggttccaactatacctccaagtacttgggaatgaccttggcaacagaccccacagatggaagcattttgtttgctgctgttcagttttccacaagctacaaaacagaatttgatttctcagattatgttaaacggaaggaccctgatgctctgctgaagcatgtaaagcacatgttgctgttgaccaatacctttggtgccatcaattatgtcgcgacagaggtgttccgggaggagctgggggcccggccagatgccaccaaagtgcttatcatcatcacggatggggaggccactgacagtggcaacatcgatgcggccaaagacatcatccgctacatcatcgggattggaaagcattttcagaccaaggagagtcaggagaccctccacaaatttgcatcaaaacccgcgagcgagtttgtgaaaattctggacacatttgagaagctgaaagatctattcactgagctgcagaagaagatctatgtcattgagggcacaagcaaacaggacctgacttccttcaacatggagctgtcctccagcggcatcagtgctgacctcagcaggggccatgcagtcgtgggggcagtaggagccaaggactgggctgggggctttcttgacctgaaggcagacctgcaggatgacacatttattgggaatgaaccattgacaccagaagtgagagcaggctatttgggttacaccgtgacctggctgccctcccggcaaaagacttcgttgctggcctcgggagcccctcgataccagcacatgggccgagtgctgctgttccaagagccacagggcggaggacactggagccaggtccagacaatccatgggacccagattggctcttatttcggtggggagctgtgtggcgtcgacgtggaccaagatggggagacagagctgctgctgattggtgccccactgttctatggggagcagagaggaggccgggtgtttatctaccagagaagacagttggggtttgaagaagtctcagagctgcagggggaccccggctacccactcgggcggtttggagaagccatcactgctctgacagacatcaacggcgatgggctggtagacgtggctgtgggggcccctctggaggagcagggggctgtgtacatcttcaatgggaggcacggggggcttagtccccagccaagtcagcggatagaagggacccaagtgctctcaggaattcagtggtttggacgctccatccatggggtgaaggaccttgaaggggatggcttggcagatgtggctgtgggggctgagagccagatgatcgtgctgagctcccggcccgtggtggatatggtcaccctgatgtccttctctccagctgagatcccagtgcatgaagtggagtgctcctattcaaccagtaacaagatgaaagaaggagttaatatcacaatctgtttccagatcaagtctctcatcccccagttccaaggccgcctggttgccaatctcacttacactctgcagctggatggccaccggaccagaagacgggggttgttcccaggagggagacatgaactcagaaggaatatagctgtcaccaccagcatgtcatgcactgacttctcatttcatttcccggtatgtgttcaagacctcatctcccccatcaatgtttccctgaatttctctctttgggaggaggaagggacaccgagggaccaaagggcgggcaaggacataccgcccatcctgagaccctccctgcactcggaaacctgggagatcccttttgagaagaactgtggggaggacaagaagtgtgaggcaaacttgagagtgtccttctctcctgcaagatccagagccctgcgtctaactgcttttgccagcctctctgtggagctgagcctgagtaacttggaagaagatgcttactgggtccagctggacctgcacttccccccgggactctccttccgcaaggtggagatgctgaagccccatagccagatacctgtgagctgcgaggagcttcctgaagagtccaggcttctgtccagggcattatcttgcaatgtgagctctcccatcttcaaagcaggccactcggttgctctgcagatgatgtttaatacactggtaaacagctcctggaggacaactcagccactaccatcatccccatcctgtaccccatcaacatcctcatccaggaccaagaagactccacactctatgtcagtttcacccccaaaggccccaagatccaccaagtcaagcacatgtaccaggtgaggatccagccttccatccacgaccacaacatacccaccctggaggctgtggttggggtgccacagcctcccagcgaggggcccatcacacaccagtggagcgtgcagatggagcctcccgtgccctgccactatgaggatctggagaggctcccggatgcagctgagccttgtctccccggagccctgttccgctgccctgttgtcttcaggcaggagatcctcgtccaagtgatcgggactctggagctggtgggagagatcgaggcctcttccatgttcagcctctgcagctccctctccatctccttcaacagcagcaagcatttccacctctatggcagcaacgcctccctggcccaggttgtcatgaaggttgacgtggtgtatgagaagcagatgctctacctctacgtgctgagcggcatcggggggctgctgctgctgctgctcattttcatagtgctgtacaaggttggtttcttcaaacggaacctgaaggagaagatggaggctggcagaggtgtcccgaatggaatccctgcagaagactctgagcagctggcatctgggcaagaggctggggatcccggctgcctgaagcccctccatgagaaggactctgagagtggtggtggcaaggactgagtccaggcctgtgaggtgcagagtgcccagaactggactcaggatgcccagggccactctgcctctgcctgcattctgccgtgtgccctcgggcgagtcactgcctctccctggccctcagtttccctatctcgaacatggaactcattcctgcctgtctcctttgcaggctcatagggaagacctgctgagggaccagccaagagggctgcaaaagtgagggcttgtcattaccagacggttcaccagcctctcttggtttccttccttggaagagaatgtctgatctaaatgtggagaaactgtagtctcaggacctagggatgttctggccctcacccctgccctgggatgtccacagatgcctccaccccccagaacctgtccttgcacactcccctgcactggagtccagtctcttctgctggcagaaagcaaatgtgacctgtgtcactacgtgactgtggcacacgccttgttcttggccaaagaccaaattccttggcatgccttccagcaccatgcgtggattgccagctggtcactccacgcttggacccgttgcccagcggccgggcagaggcgctcctcacttgccagacggtgtggcggccaggcagacgtgctcctcacttcccactctgtgtgggggccg

SEQ ID NO: 344845 - DNA, 2179 bp, Homo sapiens
  misc_feature (2084)..(2084): n is a, c, g, or t
caccagcctgttgcctctgtgagaaagtaccactgtaagaggccaaagggcatgatcattttcctctttcaccctgtctaggttgccagcaaatcccacgggcctcctgacgctgcccctggggccacaggtccctcgagtgctggaaggatgaaggattcctgcatcactgtgatggccatggcgctgctgtctgggttctttttcttcgcgccggcctcgagctacaacctggacgtgcggggcgcgcggagcttctccccaccgcgcgccgggaggcactttggataccgcgtcctgcaggtcggaaacggggtcatcgtgggagctccaggggaggggaacagcacaggaagcctctatcagtgccagtcgggcacaggacactgcctgccagtcaccctgagaggttccaactatacctccaagtacttgggaatgaccttggcaacagaccccacagatggaagcattttgtttgctgctgttcagttttccacaagctacaaaacagaatttgatttctcagattatgttaaacggaaggaccctgatgctctgctgaagcatgtaaagcacatgttgctgttgaccaatacctttggtgccatcaattatgtcgcgacagaggtgttccgggaggagctgggggcccggccagatgccaccaaagtgcttatcatcatcacggatggggaggccactgacagtggcaacatcgatgcggccaaagacatcatccgctacatcatcgggattggaaagcattttcagaccaaggagagtcaggagaccctccacaaatttgcatcaaaacccgcgagcgagtttgtgaaaattctggacacatttgagaagctgaaagatctattcactgagctgcagaagaagatctatgtcattgagggcacaagcaaacaggacctgacttccttcaacatggagctgtcctccagcggcatcagtgctgacctcagcaggggccatgcagtcgtgggggcagtaggagccaaggactgggctgggggctttcttgacctgaaggcagacctgcaggatgacacatttattgggaatgaaccattgacaccagaagtgagagcaggctatttgggttacaccgtgacctggctgccctcccggcaaaagacttcgttgctggcctcgggagcccctcgataccagcacatgggccgagtgctgctgttccaagagccacagggcggaggacactggagccaggtccagacaatccatgggacccagattggctcttatttcggtggggagctgtgtggcgtcgacgtggaccaagatggggagacagagctgctgctgattggtgccccactgttctatggggagcagagaggaggccgggtgtttatctaccagagaagacagttggggtttgaagaagtctcagagctgcagggggaccccggctacccactcgggcggtttggagaagccatcactgctctgacagacatcaacggcgatgggctggtagacgtggctgtgggggcccctctggaggagcagggggctgtgtacatcttcaatgggaggcacggggggcttagtccccagccaagtcagcggatagaagggacccaagtgctctcaggaattcagtggtttggacgctccatccatggggtgaaggaccttgaaggggatggcttggcagatgtggctgtgggggctgagagccagatgatcgtgctgaggtgagatgggtctcccaggtcacacctgatgaccccagctcttatcctgttttgtttatattttattttatttatttattttggtctttttttagagacagggtctctctctgttgcccaggctggagtgcagtggcatgatcataactcactgcagcctcgaactgctgggcctaagcgatcctcccacctcagcctcccaagtagctgggactacaggtctgccttcaggtcaagaaagcccccagcccagtccttggctcctactgcccccacgactgcatggccctgcccagggaaggagatgagcgggtcagctacccaccgacccaccccccagagccaactgcnctccctgcagcccattgctccagcccagcacgcacctgctgagtcgcactgatgccgctggaggacagctccatgctgatggaacgtcgcgcatg

SEQ ID NO: 344846 - DNA, 2440 bp, Homo sapiens
ggaccagccaagagggctgcaaaagtgagggcttgtcattaccagacggttcaccagcctctcttgggttccttccttggaagagaatgtctgatctaaatgtggagaaactgtagtctcaggacctagggatgttctggccctcacccctgccctgggatgtccacagatgcctccacccccctgaacctaaaataaaagttaaaaaaatgaaaaataggcccggtgtggtggctcatgcctgtaatcccagcactttgggaggccaaggagggcagatcacttgaggtcaggagttcaagaccagcctggccaacatggtgaaaccctgtctctactaaaaatacaaaaattagccgggcgtggtggcagatgcctgtaatcccagctactgaggaggctgaggcaagagaattgcttaagtctgggaggcagaggttgcagtgagccgagatcgcaccactgcactccagcctgggcaacacagtgagactccatctcaaaaaaaaaaaagtgttctcacattttcttggggccaaagtgctcagtgaattctttgctcgttcaaattttgtctttgtacaggttggtttcttcaaacggaacctgaaggagaagatggaggctggcagaggtgtcccgaatggaatccctgcagaagactctgagcagctggcatctgggcaagaggctggggatcccggctgcctgaagcccctccatgagaaggactctgagagtggtggtggcaaggactgagtccaggcctgtgaggtgcagagtgcccagaactggactcaggatgcccagggccactctgcctctgcctgcattctgccgtgtgccctcgggcgagtcactgcctctccctggccctcagtttccctatctcgaacatggaactcattcctgcctgtctcctttgcaggctcatagggaagacctgctgagggaccagccaagagggctgcaaaagtgagggcttgtcattaccagacggttcaccagcctctcttggtttccttccttggaagagaatgtctgatctaaatgtggagaaactgtagtctcaggacctagggatgttctggccctcacccctgccctgggatgtccacagatgcctccaccccccagaacctgtccttgcacactcccctgcactggagtccagtctcttctgctggcagaaagcaaatgtgacctgtgtcactacgtgactgtggcacacgccttgttcttggccaaagaccaaattccttggcatgccttccagcaccctgcaaaatgagaccctcgtggccttccccagcctcttctagagccgtgatgcctccctgttgaagctctggtgacaccagcctttctcccaggccaggctccttcctgtcttcctgcattcacccagacagctccctctgcctgaaccttccatctcgccacccctccttccttgaccagcagatcccagctcacgtcacacttggttgggtcctcacatctttcacacttccaccagcctgcactactccctcaaagcacacgtcatgtttcttcatccggcagcctggatgttttttccctgtttaatgattgacgtacttagcagctatctctcagtgaactgtgagggtaaaggctatacttgtcttgttcaccttgggatgatgcctcatgatatgtcagggcgtgggacatctagtaggtgcttgacataatttcactgaattaatgacagagccagtgggaagatacagaaaaagaggggctgggctgggcgcggtggttcacgcctgtaatcccagcactttgggaggccaaggagggtggatcacctgaggtcaggagttagaggccagcctggcgaaaccccatctctactaaaaatacaaaatccaggcgtggtggcacacacctgtagtcccagctactcaggaggttgaggtaggagaattgcttgaacctgggaggtggaggttgcagtgagccaagattgcgccattgcactccagcctgggcaacacagcgagactccgtctcaaggaaaaaataaaaataaaaagcgggcacgggcccgtgacatccccacccttggaggctgtcttctcaggctctgccctgccctagctccacaccctctcccaggacccatcacgcctgtgcagtggcccccacagaaagactgagctcaaggtgggaaccacgtctgctaacttggagccccagtgccaagcacagtgcctgcatgtatttatccaataaatgtgaaattctgtccaaaaaaaaaaaataccatttcaatactcaaaaaaaaacctgcgggggcatttatttgtggggggggccaaaacaagggtttaggcacgggggcacttgggtaaaggtgttttccggaccccagtttttgggcacacgggggataatttgcggggttcccaca

SEQ ID NO: 344847 - DNA, 2116 bp, Homo sapiens
gtgacgtgttaaagggagagggtctgcagctggagactccaggcgggtgatgcagtccggataggaggagatggggaatggaaccaggttcacagggactttcaggggtggaaaaggcattttccggcactcccctccccctgctcccaggttgtcatgaaggttgacgtggtgtatgagaagcagatgctctacctctacgtgctgagcggcatcggggggctgctgctgctgctgctcattttcatagtgctgtacaaggttggtttcttcaaacggaacctgaaggagaagatggaggctggcagaggtgtcccgaatggaatccctgcagaagactctgagcagctggcatctgggcaagaggctggggatcccggctgcctgaagcccctccatgagaaggactctgagagtggtggtggcaaggactgagtccaggcctgtgaggtgcagagtgcccagaactggactcaggatgcccagggccactctgcctctgcctgcattctgccgtgtgccctcgggcgagtcactgcctctccctggccctcagtttccctatctcgaacatggaactcattcctgcctgtctcctttgcaggctcatagggaagacctgctgagggaccagccaagagggctgcaaaagtgagggcttgtcattaccagacggttcaccagcctctcttggtttccttccttggaagagaatgtctgatctaaatgtggagaaactgtagtctcaggacctagggatgttctggccctcacccctgccctgggatgtccacagatgcctccaccccccagaacctgtccttgcacactcccctgcactggagtccagtctcttctgctggcagaaagcaaatgtgacctgtgtcactacgtgactgtggcacacgccttgttcttggccaaagaccaaattccttggcatgccttccagcaccctgcaaaatgagaccctcgtggccttccccagcctcttctagagccgtgatgcctccctgttgaagctctggtgacaccagcctttctcccaggccaggctccttcctgtcttcctgcattcacccagacagctccctctgcctgaaccttccatctcgccacccctccttccttgaccagcagatcccagctcacgtcacacttggttgggtcctcacatctttcacacttccaccagcctgcactactccctcaaagcacacgtcatgtttcttcatccggcagcctggatgttttttccctgtttaatgattgacgtacttagcagctatctctcagtgaactgtgagggtaaaggctatacttgtcttgttcaccttgggatgatgcctcatgatatgtcagggcgtgggacatctagtaggtgcttgacataatttcactgaattaatgacagagccagtgggaagatacagaaaaagaggggctgggctgggcgcggtggttcacgcctgtaatcccagcactttgggaggccaaggagggtggatcacctgaggtcaggagttagaggccagcctggcgaaaccccatctctactaaaaatacaaaatccaggcgtggtggcacacacctgtagtcccagctactcaggaggttgaggtaggagaattgcttgaacctgggaggtggaggttgcagtgagccaagattgcgccattgcactccagcctgggcaacacagcgagactccgtctcaaggaaaaaataaaaataaaaagcgggcacgggcccgtgacatccccacccttggaggctgtcttctcaggctctgccctgccctagctccacaccctctcccaggacccatcacgcctgtgcagtggcccccacagaaagactgagctcaaggtgggaaccacgtctgctaacttggagccccagtgccaagcacagtgcctgcatgtatttatccaataaatgtgaaattctgtccaaaaaaaaaaaataccatttcaatactcaaaaaaaaacctgcgggggcatttatttgtggggggggccaaaacaagggtttaggcacgggggcacttgggtaaaggtgttttccggaccccagtttttgggcacacgggggataatttgcggggttcccaca

SEQ ID NO: 344848 - DNA, 1142 bp, Homo sapiens
  misc_feature (53)..(53): n is a, c, g, or t
ttccactttaacccaatttcccatccaatttgtccccatatcctgggccctcnccgcaggtctctgctcttgcccttcacgtccccaggcatgtcctctcctctcctcggcgtcgcagtccctgtctctcccaccttcccctgctccctccttccttgaccagcagatcccagctcacgtcacacttggttgggtcctcacatctttcacacttccaccagcctgcactactccctcaaagcacacgtcatgtttcttcatccggcagcctggatgttttttccctgtttaatgattgacgtacttagcagctatctctcagtgaactgtgagggtaaaggctatacttgtcttgttcaccttgggatgatgcctcatgatatgtcagggcgtgggacatctagtaggtgcttgacataatttcactgaattaatgacagagccagtgggaagatacagaaaaagaggggctgggctgggcgcggtggttcacgcctgtaatcccagcactttgggaggccaaggagggtggatcacctgaggtcaggagttagaggccagcctggcgaaaccccatctctactaaaaatacaaaatccaggcgtggtggcacacacctgtagtcccagctactcaggaggttgaggtaggagaattgcttgaacctgggaggtggaggttgcagtgagccaagattgcgccattgcactccagcctgggcaacacagcgagactccgtctcaaggaaaaaataaaaataaaaagcgggcacgggcccgtgacatccccacccttggaggctgtcttctcaggctctgccctgccctagctccacaccctctcccaggacccatcacgcctgtgcagtggcccccacagaaagactgagctcaaggtgggaaccacgtctgctaacttggagccccagtgccaagcacagtgcctgcatgtatttatccaataaatgtgaaattctgtccaaaaaaaaaaaataccatttcaatactcaaaaaaaaacctgcgggggcatttatttgtggggggggccaaaacaagggtttaggcacgggggcacttgggtaaaggtgttttccggaccccagtttttgggcacacgggggataatttgcggggttcccaca

SEQ ID NO: 344849 - DNA, 680 bp, Homo sapiens
cgcagaacacactctagaggataccgcgctggagtgcgcatgcactcccatcggtgagaccaagcacgactctgtctcaaaaacaaaacaaacaaaaagaggcccgataattctgataacataaaattcttatttttctgtatagcaaagcaacccataaaaaaagtcaagaggccaggcccggtggttcacgcctgtaatcccagcactttgggaggccaaggagggtggatcacctgaggtcaggagttagaggccagcctggcgaaaccccatctctactaaaaatacaaaatccaggcgtggtggcacacacctgtagtcccagctactcaggaggttgaggtaggagaattgcttgaacctgggaggtggaggttgcagtgagccaagattgcgccattgcactccagcctgggcaacacagcgagactccgtctcaaggaaaaaataaaaataaaaagcgggcacgggcccgtgacatccccacccttggaggctgtcttctcaggctctgccctgccctagctccacaccctctcccaggacccatcacgcctgtgcagtggcccccacagaaagactgagctcaaggtgggaaccacgtctgctaacttggagccccagtgccaagcacagtgcctgcatgtatttatccaataaatgtgaaattctgtcca

SEQ ID NO: 344850 - DNA, 882 bp, Homo sapiens
cccatgaggcagaggttgcagtgagccaagctcgtgccaatgcactccagcctgggtgacagagcaagactctgtctggaaaaagaaagaaagaggcatggccgggcgcggtggctcatgcctgtaatcccagcactttgggaggccgaggcaggcagatcacgaggttgggagatcaagaccatcctggctaacacggtgaaaccccgtctctgctaaaaatacacacacacacacacacacacacacacacaccacacacacaaaaattagccgggtgtagtggcgggtgcctgtagtcccagctactcagaaggctgaggcaggagaatggcgtgaacccgggaggcgaagcttgcagtgagccgagatcatgccatgcagtccagcctaggcgatagagcgagactccatctcaaaaaaaaaaaaaaaaagaagaaagaaagaaagaggcactgtatattctgggaatcttgataatttgatttggctggaacacagaaaaagagattgggactaggagaagatggacctggaaatgtgggatcgtgcccagtgtaagcccagataaggagtccagactcaccaccagtcctacaggcggtgagcatccattggcatagagcattggtaggatgggagggatggacagtagagactgtggaggcggacattccttgccttggtaaccagttggatagaggaagtgagaaagaggacaaggactctgaacgttcctagttttggttgatgttgccctaaagacacatagcaaataggagacccaaatctttggcctcttgctttctttaggcctgtgaccctgggctgtctcgaacgtgtgaccagaacaccgtcgaacggtaacctctagacagctag

SEQ ID NO: 344851 - DNA, 399 bp, Homo sapiens
cgcctgggccccatgaccgcaggagaagtgggtggcagaggcgcacccggctcgggggcatccccatcttggcctctgcctgagaacttggtcaccctctgccttggggccccttgggtctgctcctctctctggagcctctaacttctcatccttccttttttgcagagaggccaaacgggaagttgtatcctcaggccctgggaagagctttcagagctctaggggggccgggagttgctccttccatattcccagaagtcaacgccctggagcggaagcgcagggtgcgggtggcctggggagcgacatccgggtgggcctgggatcggccacctgctgggcacgtgcaggggcgggggtccctcggtcgcagctgacgacccttgccttcctcag

SEQ ID NO: 344852 - DNA, 5092 bp, Homo sapiens
caccagcctgttgcctctgtgagaaagtaccactgtaagaggccaaagggcatgatcattttcctctttcaccctgtctaggttgccagcaaatcccacgggcctcctgacgctgcccctggggccacaggtccctcgagtgctggaaggatgaaggattcctgcatcactgtgatggccatggcgctgctgtctgggttctttttcttcgcgccggcctcgagctacaacctggacgtgcggggcgcgcggagcttctccccaccgcgcgccgggaggcactttggataccgcgtcctgcaggtcggaaacggggtcatcgtgggagctccaggggaggggaacagcacaggaagcctctatcagtgccagtcgggcacaggacactgcctgccagtcaccctgagaggttccaactatacctccaagtacttgggaatgaccttggcaacagaccccacagatggaagcattttgtttgctgctgttcagttttccacaagctacaaaacagaatttgatttctcagattatgttaaacggaaggaccctgatgctctgctgaagcatgtaaagcacatgttgctgttgaccaatacctttggtgccatcaattatgtcgcgacagaggtgttccgggaggagctgggggcccggccagatgccaccaaagtgcttatcatcatcacggatggggaggccactgacagtggcaacatcgatgcggccaaagacatcatccgctacatcatcgggattggaaagcattttcagaccaaggagagtcaggagaccctccacaaatttgcatcaaaacccgcgagcgagtttgtgaaaattctggacacatttgagaagctgaaagatctattcactgagctgcagaagaagatctatgtcattgagggcacaagcaaacaggacctgacttccttcaacatggagctgtcctccagcggcatcagtgctgacctcagcaggggccatgcagtcgtgggggcagtaggagccaaggactgggctgggggctttcttgacctgaaggcagacctgcaggatgacacatttattgggaatgaaccattgacaccagaagtgagagcaggctatttgggttacaccgtgacctggctgccctcccggcaaaagacttcgttgctggcctcgggagcccctcgataccagcacatgggccgagtgctgctgttccaagagccacagggcggaggacactggagccaggtccagacaatccatgggacccagattggctcttatttcggtggggagctgtgtggcgtcgacgtggaccaagatggggagacagagctgctgctgattggtgccccactgttctatggggagcagagaggaggccgggtgtttatctaccagagaagacagttggggtttgaagaagtctcagagctgcagggggaccccggctacccactcgggcggtttggagaagccatcactgctctgacagacatcaacggcgatgggctggtagacgtggctgtgggggcccctctggaggagcagggggctgtgtacatcttcaatgggaggcacggggggcttagtccccagccaagtcagcggatagaagggacccaagtgctctcaggaattcagtggtttggacgctccatccatggggtgaaggaccttgaaggggatggcttggcagatgtggctgtgggggctgagagccagatgatcgtgctgagctcccggcccgtggtggatatggtcaccctgatgtccttctctccagctgagatcccagtgcatgaagtggagtgctcctattcaaccagtaacaagatgaaagaaggagttaatatcacaatctgtttccagatcaagtctctcatcccccagttccaaggccgcctggttgccaatctcacttacactctgcagctggatggccaccggaccagaagacgggggttgttcccaggagggagacatgaactcagaaggaatatagctgtcaccaccagcatgtcatgcactgacttctcatttcatttcccggtatgtgttcaagacctcatctcccccatcaatgtttccctgaatttctctctttgggaggaggaagggacaccgagggaccaaagggcgggcaaggacataccgcccatcctgagaccctccctgcactcggaaacctgggagatcccttttgagaagaactgtggggaggacaagaagtgtgaggcaaacttgagagtgtccttctctcctgcaagatccagagccctgcgtctaactgcttttgccagcctctctgtggagctgagcctgagtaacttggaagaagatgcttactgggtccagctggacctgcacttccccccgggactctccttccgcaaggtggagatgctgaagccccatagccagatacctgtgagctgcgaggagcttcctgaagagtccaggcttctgtccagggcattatcttgcaatgtgagctctcccatcttcaaagcaggccactcggttgctctgcagatgatgtttaatacactggtaaacagctcctggggggactcggttgaattgcacgccaatgtgacctgtaacaatgaggactcagacctcctggaggacaactcagccactaccatcatccccatcctgtaccccatcaacatcctcatccaggaccaagaagactccacactctatgtcagtttcacccccaaaggccccaagatccaccaagtcaagcacatgtaccaggtgaggatccagccttccatccacgaccacaacatacccaccctggaggctgtggttggggtgccacagcctcccagcgaggggcccatcacacaccagtggagcgtgcagatggagcctcccgtgccctgccactatgaggatctggagaggctcccggatgcagctgagccttgtctccccggagccctgttccgctgccctgttgtcttcaggcaggagatcctcgtccaagtgatcgggactctggagctggtgggagagatcgaggcctcttccatgttcagcctctgcagctccctctccatctccttcaacagcagcaagcatttccacctctatggcagcaacgcctccctggcccaggttgtcatgaaggttgacgtggtgtatgagaagcagatgctctacctctacgtgctgagcggcatcggggggctgctgctgctgctgctcattttcatagtgctgtacaaggttggtttcttcaaacggaacctgaaggagaagatggaggctggcagaggtgtcccgaatggaatccctgcagaagactctgagcagctggcatctgggcaagaggctggggatcccggctgcctgaagcccctccatgagaaggactctgagagtggtggtggcaaggactgagtccaggcctgtgaggtgcagagtgcccagaactggactcaggatgcccagggccactctgcctctgcctgcattctgccgtgtgccctcgggcgagtcactgcctctccctggccctcagtttccctatctcgaacatggaactcattcctgcctgtctcctttgcaggctcatagggaagacctgctgagggaccagccaagagggctgcaaaagtgagggcttgtcattaccagacggttcaccagcctctcttggtttccttccttggaagagaatgtctgatctaaatgtggagaaactgtagtctcaggacctagggatgttctggccctcacccctgccctgggatgtccacagatgcctccaccccccagaacctgtccttgcacactcccctgcactggagtccagtctcttctgctggcagaaagcaaatgtgacctgtgtcactacgtgactgtggcacacgccttgttcttggccaaagaccaaattccttggcatgccttccagcaccctgcaaaatgagaccctcgtggccttccccagcctcttctagagccgtgatgcctccctgttgaagctctggtgacaccagcctttctcccaggccaggctccttcctgtcttcctgcattcacccagacagctccctctgcctgaaccttccatctcgccacccctccttccttgaccagcagatcccagctcacgtcacacttggttgggtcctcacatctttcacacttccaccagcctgcactactccctcaaagcacacgtcatgtttcttcatccggcagcctggatgttttttccctgtttaatgattgacgtacttagcagctatctctcagtgaactgtgagggtaaaggctatacttgtcttgttcaccttgggatgatgcctcatgatatgtcagggcgtgggacatctagtaggtgcttgacataatttcactgaattaatgacagagccagtgggaagatacagaaaaagaggggctgggctgggcgcggtggttcacgcctgtaatcccagcactttgggaggccaaggagggtggatcacctgaggtcaggagttagaggccagcctggcgaaaccccatctctactaaaaatacaaaatccaggcgtggtggcacacacctgtagtcccagctactcaggaggttgaggtaggagaattgcttgaacctgggaggtggaggttgcagtgagccaagattgcgccattgcactccagcctgggcaacacagcgagactccgtctcaaggaaaaaataaaaataaaaagcgggcacgggcccgtgacatccccacccttggaggctgtcttctcaggctctgccctgccctagctccacaccctctcccaggacccatcacgcctgtgcagtggcccccacagaaagactgagctcaaggtgggaaccacgtctgctaacttggagccccagtgccaagcacagtgcctgcatgtatttatccaataaatgtgaaattctgtccaaaaaaaaaaaataccatttcaatactcaaaaaaaaacctgcgggggcatttatttgtggggggggccaaaacaagggtttaggcacgggggcacttgggtaaaggtgttttccggaccccagtttttgggcacacgggggataatttgcggggttcccaca

SEQ ID NO: 344853 - DNA, 4965 bp, Homo sapiens
  misc_feature (4886)..(4886): n is a, c, g, or t
caccagcctgttgcctctgtgagaaagtaccactgtaagaggccaaagggcatgatcattttcctctttcaccctgtctaggttgccagcaaatcccacgggcctcctgacgctgcccctggggccacaggtccctcgagtgctggaaggatgaaggattcctgcatcactgtgatggccatggcgctgctgtctgggttctttttcttcgcgccggcctcgagctacaacctggacgtgcggggcgcgcggagcttctccccaccgcgcgccgggaggcactttggataccgcgtcctgcaggtcggaaacggggtcatcgtgggagctccaggggaggggaacagcacaggaagcctctatcagtgccagtcgggcacaggacactgcctgccagtcaccctgagaggttccaactatacctccaagtacttgggaatgaccttggcaacagaccccacagatggaagcattttgtttgctgctgttcagttttccacaagctacaaaacagaatttgatttctcagattatgttaaacggaaggaccctgatgctctgctgaagcatgtaaagcacatgttgctgttgaccaatacctttggtgccatcaattatgtcgcgacagaggtgttccgggaggagctgggggcccggccagatgccaccaaagtgcttatcatcatcacggatggggaggccactgacagtggcaacatcgatgcggccaaagacatcatccgctacatcatcgggattggaaagcattttcagaccaaggagagtcaggagaccctccacaaatttgcatcaaaacccgcgagcgagtttgtgaaaattctggacacatttgagaagctgaaagatctattcactgagctgcagaagaagatctatgtcattgagggcacaagcaaacaggacctgacttccttcaacatggagctgtcctccagcggcatcagtgctgacctcagcaggggccatgcagtcgtgggggcagtaggagccaaggactgggctgggggctttcttgacctgaaggcagacctgcaggatgacacatttattgggaatgaaccattgacaccagaagtgagagcaggctatttgggttacaccgtgacctggctgccctcccggcaaaagacttcgttgctggcctcgggagcccctcgataccagcacatgggccgagtgctgctgttccaagagccacagggcggaggacactggagccaggtccagacaatccatgggacccagattggctcttatttcggtggggagctgtgtggcgtcgacgtggaccaagatggggagacagagctgctgctgattggtgccccactgttctatggggagcagagaggaggccgggtgtttatctaccagagaagacagttggggtttgaagaagtctcagagctgcagggggaccccggctacccactcgggcggtttggagaagccatcactgctctgacagacatcaacggcgatgggctggtagacgtggctgtgggggcccctctggaggagcagggggctgtgtacatcttcaatgggaggcacggggggcttagtccccagccaagtcagcggatagaagggacccaagtgctctcaggaattcagtggtttggacgctccatccatggggtgaaggaccttgaaggggatggcttggcagatgtggctgtgggggctgagagccagatgatcgtgctgagctcccggcccgtggtggatatggtcaccctgatgtccttctctccagctgagatcccagtgcatgaagtggagtgctcctattcaaccagtaacaagatgaaagaaggagttaatatcacaatctgtttccagatcaagtctctcatcccccagttccaaggccgcctggttgccaatctcacttacactctgcagctggatggccaccggaccagaagacgggggttgttcccaggagggagacatgaactcagaaggaatatagctgtcaccaccagcatgtcatgcactgacttctcatttcatttcccggtatgtgttcaagacctcatctcccccatcaatgtttccctgaatttctctctttgggaggaggaagggacaccgagggaccaaagggcgggcaaggacataccgcccatcctgagaccctccctgcactcggaaacctgggagatcccttttgagaagaactgtggggaggacaagaagtgtgaggcaaacttgagagtgtccttctctcctgcaagatccagagccctgcgtctaactgcttttgccagcctctctgtggagctgagcctgagtaacttggaagaagatgcttactgggtccagctggacctgcacttccccccgggactctccttccgcaaggtggagatgctgaagccccatagccagatacctgtgagctgcgaggagcttcctgaagagtccaggcttctgtccagggcattatcttgcaatgtgagctctcccatcttcaaagcaggccactcggttgctctgcagatgatgtttaatacactggtaaacagctcctggggggactcggttgaattgcacgccaatgtgacctgtaacaatgaggactcagacctcctggaggacaactcagccactaccatcatccccatcctgtaccccatcaacatcctcatccaggaccaagaagactccacactctatgtcagtttcacccccaaaggccccaagatccaccaagtcaagcacatgtaccaggtgaggatccagccttccatccacgaccacaacatacccaccctggaggctgtggttggggtgccacagcctcccagcgaggggcccatcacacaccagtggagcgtgcagatggagcctcccgtgccctgccactatgaggatctggagaggctcccggatgcagctgagccttgtctccccggagccctgttccgctgccctgttgtcttcaggcaggagatcctcgtccaagtgatcgggactctggagctggtgggagagatcgaggcctcttccatgttcagcctctgcagctccctctccatctccttcaacagcagcaagcatttccacctctatggcagcaacgcctccctggcccaggttgtcatgaaggttgacgtggtgtatgagaagcagatgctctacctctacgtgctgagcggcatcggggggctgctgctgctgctgctcattttcatagtgctgtacaaggttggtttcttcaaacggaacctgaaggagaagatggaggctggcagaggtgtcccgaatggaatccctgcagaagactctgagcagctggcatctgggcaagaggctggggatcccggctgcctgaagcccctccatgagaaggactctgagagtggtggtggcaaggactgagtccaggcctgtgaggtgcagagtgcccagaactggactcaggatgcccagggccactctgcctctgcctgcattctgccgtgtgccctcgggcgagtcactgcctctccctggccctcagtttccctatctcgaacatggaactcattcctgcctgtctcctttgcaggctcatagggaagacctgctgagggaccagccaagagggctgcaaaagtgagggcttgtcattaccagacggttcaccagcctctcttggtttccttccttggaagagaatgtctgatctaaatgtggagaaactgtagtctcaggacctagggatgttctggccctcacccctgccctgggatgtccacagatgcctccaccccccagaacctgtccttgcacactcccctgcactggagtccagtctcttctgctggcagaaagcaaatgtgacctgtgtcactacgtgactgtggcacacgccttgttcttggccaaagaccaaattccttggcatgccttccagcaccctgcaaaatgagaccctcgtggccttccccagcctcttctagagccgtgatgcctccctgttgaagctctggtgacaccagcctttctcccaggccaggctccttcctgtcttcctgcattcacccagacagctccctctgcctgaaccttccatctcgccacccctccttccttgaccagcagatcccagctcacgtcacacttggttgggtcctcacatctttcacacttccaccagcctgcactactccctcaaagcacacgtcatgtttcttcatccggcagcctggatgttttttccctgtttaatgattgacgtacttagcagctatctctcagtgaactgtgagggtaaaggctatacttgtcttgttcaccttgggatgatgcctcatgatatgtcagggcgtgggacatctagtaggtgcttgacataatttcactgaattaatgacagagccagtgggaagatacagaaaaagaggggctgggctgggcgcggtggttcacgcctgtaatcccagcactttgggaggccaaggagggtggatcacctgaggtcaggagttagaggccagcctggcgaaaccccatctctactaaaaatacaaaatccaggcgtggtggcacacacctgtagtcccagctactcaggaggttgaggtaggagaattgcttgaacctgggaggtggaggttgcagtgagccaagattgcgccattgcactccagcctgggcaacacagcgagactccgtctcaaggaaaaaataaaaataaaaagcgggcacgggcccgtgacatccccacccttggaggctgtcttctcaggctctgccctgccctagctccacaccctctcccaggacccatcacgcctgtgcagtggcccccacagaaagactgagctcaaggtgggaaccacgtctgctaacttggagccccagtgccacanaaggcaccaagtaacaggcggggtgtagtttatgccgcataaaatgtgattttccgacccgcgggttgtggattctgcg

SEQ ID NO: 344854 - DNA, 5000 bp, Homo sapiens
caccagcctgttgcctctgtgagaaagtaccactgtaagaggccaaagggcatgatcattttcctctttcaccctgtctaggttgccagcaaatcccacgggcctcctgacgctgcccctggggccacaggtccctcgagtgctggaaggatgaaggattcctgcatcactgtgatggccatggcgctgctgtctgggttctttttcttcgcgccggcctcgagctacaacctggacgtgcggggcgcgcggagcttctccccaccgcgcgccgggaggcactttggataccgcgtcctgcaggtcggaaacggggtcatcgtgggagctccaggggaggggaacagcacaggaagcctctatcagtgccagtcgggcacaggacactgcctgccagtcaccctgagaggttccaactatacctccaagtacttgggaatgaccttggcaacagaccccacagatggaagcattttgtttgctgctgttcagttttccacaagctacaaaacagaatttgatttctcagattatgttaaacggaaggaccctgatgctctgctgaagcatgtaaagcacatgttgctgttgaccaatacctttggtgccatcaattatgtcgcgacagaggtgttccgggaggagctgggggcccggccagatgccaccaaagtgcttatcatcatcacggatggggaggccactgacagtggcaacatcgatgcggccaaagacatcatccgctacatcatcgggattggaaagcattttcagaccaaggagagtcaggagaccctccacaaatttgcatcaaaacccgcgagcgagtttgtgaaaattctggacacatttgagaagctgaaagatctattcactgagctgcagaagaagatctatgtcattgagggcacaagcaaacaggacctgacttccttcaacatggagctgtcctccagcggcatcagtgctgacctcagcaggggccatgcagtcgtgggggcagtaggagccaaggactgggctgggggctttcttgacctgaaggcagacctgcaggatgacacatttattgggaatgaaccattgacaccagaagtgagagcaggctatttgggttacaccgtgacctggctgccctcccggcaaaagacttcgttgctggcctcgggagcccctcgataccagcacatgggccgagtgctgctgttccaagagccacagggcggaggacactggagccaggtccagacaatccatgggacccagattggctcttatttcggtggggagctgtgtggcgtcgacgtggaccaagatggggagacagagctgctgctgattggtgccccactgttctatggggagcagagaggaggccgggtgtttatctaccagagaagacagttggggtttgaagaagtctcagagctgcagggggaccccggctacccactcgggcggtttggagaagccatcactgctctgacagacatcaacggcgatgggctggtagacgtggctgtgggggcccctctggaggagcagggggctgtgtacatcttcaatgggaggcacggggggcttagtccccagccaagtcagcggatagaagggacccaagtgctctcaggaattcagtggtttggacgctccatccatggggtgaaggaccttgaaggggatggcttggcagatgtggctgtgggggctgagagccagatgatcgtgctgagctcccggcccgtggtggatatggtcaccctgatgtccttctctccagctgagatcccagtgcatgaagtggagtgctcctattcaaccagtaacaagatgaaagaaggagttaatatcacaatctgtttccagatcaagtctctcatcccccagttccaaggccgcctggttgccaatctcacttacactctgcagctggatggccaccggaccagaagacgggggttgttcccaggagggagacatgaactcagaaggaatatagctgtcaccaccagcatgtcatgcactgacttctcatttcatttcccggtatgtgttcaagacctcatctcccccatcaatgtttccctgaatttctctctttgggaggaggaagggacaccgagggaccaaagggcgggcaaggacataccgcccatcctgagaccctccctgcactcggaaacctgggagatcccttttgagaagaactgtggggaggacaagaagtgtgaggcaaacttgagagtgtccttctctcctgcaagatccagagccctgcgtctaactgcttttgccagcctctctgtggagctgagcctgagtaacttggaagaagatgcttactgggtccagctggacctgcacttccccccgggactctccttccgcaaggtggagatgctgaagccccatagccagatacctgtgagctgcgaggagcttcctgaagagtccaggcttctgtccagggcattatcttgcaatgtgagctctcccatcttcaaagcaggccactcggttgctctgcagatgatgtttaatacactggtaaacagctcctggaggacaactcagccactaccatcatccccatcctgtaccccatcaacatcctcatccaggaccaagaagactccacactctatgtcagtttcacccccaaaggccccaagatccaccaagtcaagcacatgtaccaggtgaggatccagccttccatccacgaccacaacatacccaccctggaggctgtggttggggtgccacagcctcccagcgaggggcccatcacacaccagtggagcgtgcagatggagcctcccgtgccctgccactatgaggatctggagaggctcccggatgcagctgagccttgtctccccggagccctgttccgctgccctgttgtcttcaggcaggagatcctcgtccaagtgatcgggactctggagctggtgggagagatcgaggcctcttccatgttcagcctctgcagctccctctccatctccttcaacagcagcaagcatttccacctctatggcagcaacgcctccctggcccaggttgtcatgaaggttgacgtggtgtatgagaagcagatgctctacctctacgtgctgagcggcatcggggggctgctgctgctgctgctcattttcatagtgctgtacaaggttggtttcttcaaacggaacctgaaggagaagatggaggctggcagaggtgtcccgaatggaatccctgcagaagactctgagcagctggcatctgggcaagaggctggggatcccggctgcctgaagcccctccatgagaaggactctgagagtggtggtggcaaggactgagtccaggcctgtgaggtgcagagtgcccagaactggactcaggatgcccagggccactctgcctctgcctgcattctgccgtgtgccctcgggcgagtcactgcctctccctggccctcagtttccctatctcgaacatggaactcattcctgcctgtctcctttgcaggctcatagggaagacctgctgagggaccagccaagagggctgcaaaagtgagggcttgtcattaccagacggttcaccagcctctcttggtttccttccttggaagagaatgtctgatctaaatgtggagaaactgtagtctcaggacctagggatgttctggccctccaccccccagaacctgtccttgcacactcccctgcactggagtccagtctcttctgctggcagaaagcaaatgtgacctgtgtcactacgtgactgtggcacacgccttgttcttggccaaagaccaaattccttggcatgccttccagcaccctgcaaaatgagaccctcgtggccttccccagcctcttctagagccgtgatgcctccctgttgaagctctggtgacaccagcctttctcccaggccaggctccttcctgtcttcctgcattcacccagacagctccctctgcctgaaccttccatctcgccacccctccttccttgaccagcagatcccagctcacgtcacacttggttgggtcctcacatctttcacacttccaccagcctgcactactccctcaaagcacacgtcatgtttcttcatccggcagcctggatgttttttccctgtttaatgattgacgtacttagcagctatctctcagtgaactgtgagggtaaaggctatacttgtcttgttcaccttgggatgatgcctcatgatatgtcagggcgtgggacatctagtaggtgcttgacataatttcactgaattaatgacagagccagtgggaagatacagaaaaagaggggctgggctgggcgcggtggttcacgcctgtaatcccagcactttgggaggccaaggagggtggatcacctgaggtcaggagttagaggccagcctggcgaaaccccatctctactaaaaatacaaaatccaggcgtggtggcacacacctgtagtcccagctactcaggaggttgaggtaggagaattgcttgaacctgggaggtggaggttgcagtgagccaagattgcgccattgcactccagcctgggcaacacagcgagactccgtctcaaggaaaaaataaaaataaaaagcgggcacgggcccgtgacatccccacccttggaggctgtcttctcaggctctgccctgccctagctccacaccctctcccaggacccatcacgcctgtgcagtggcccccacagaaagactgagctcaaggtgggaaccacgtctgctaacttggagccccagtgccaagcacagtgcctgcatgtatttatccaataaatgtgaaattctgtccaaaaaaaaaaaataccatttcaatactcaaaaaaaaacctgcgggggcatttatttgtggggggggccaaaacaagggtttaggcacgggggcacttgggtaaaggtgttttccggaccccagtttttgggcacacgggggataatttgcggggttcccaca

SEQ ID NO: 344855 - DNA, 5616 bp, Homo sapiens
cccatgaggcagaggttgcagtgagccaagctcgtgccaatgcactccagcctgggtgacagagcaagactctgtctggaaaaagaaagaaagaggcatggccgggcgcggtggctcatgcctgtaatcccagcactttgggaggccgaggcaggcagatcacgaggttgggagatcaagaccatcctggctaacacggtgaaaccccgtctctgctaaaaatacacacacacacacacacacacacacacacaccacacacacaaaaattagccgggtgtagtggcgggtgcctgtagtcccagctactcagaaggctgaggcaggagaatggcgtgaacccgggaggcgaagcttgcagtgagccgagatcatgccatgcagtccagcctaggcgatagagcgagactccatctcaaaaaaaaaaaaaaaaagaagaaagaaagaaagaggcactgtatattctgggaatcttgataatttgatttggctggaacacagaaaaagagattgggactaggagaagatggacctggaaatgtgggatcgtgcccagtgtaagcccagataaggagtccagactcaccaccagtcctacaggcggtgagcatccattggcatagagcattggtaggatgggagggatggacagtagagactgtggaggcggacattccttgccttggtaaccagttggatagaggaagtgagaaagaggacaaggactctgaacgttcctagttttggttgatgttgccctaaagacacatagcaaataggagacccaaatctttggcctcttgctttctttaggcctgtgaccctgggctgtctcgaacgtgtgaccagaacacctatctgagtggcctgtgttacctcttccgccagaatctgcagggtcccatgctgcaggggcgccctggttttcaggaatgtatcaagggcaacgtagacctggtatttctgtttgatggttcgatgagcttgcagccagatgaatttcagaaaattctggacttcatgaaggatgtgatgaagaaactcagcaacacttcgtaccagtttgctgctgttcagttttccacaagctacaaaacagaatttgatttctcagattatgttaaacggaaggaccctgatgctctgctgaagcatgtaaagcacatgttgctgttgaccaatacctttggtgccatcaattatgtcgcgacagaggtgttccgggaggagctgggggcccggccagatgccaccaaagtgcttatcatcatcacggatggggaggccactgacagtggcaacatcgatgcggccaaagacatcatccgctacatcatcgggattggaaagcattttcagaccaaggagagtcaggagaccctccacaaatttgcatcaaaacccgcgagcgagtttgtgaaaattctggacacatttgagaagctgaaagatctattcactgagctgcagaagaagatctatgtcattgagggcacaagcaaacaggacctgacttccttcaacatggagctgtcctccagcggcatcagtgctgacctcagcaggggccatgcagtcgtgggggcagtaggagccaaggactgggctgggggctttcttgacctgaaggcagacctgcaggatgacacatttattgggaatgaaccattgacaccagaagtgagagcaggctatttgggttacaccgtgacctggctgccctcccggcaaaagacttcgttgctggcctcgggagcccctcgataccagcacatgggccgagtgctgctgttccaagagccacagggcggaggacactggagccaggtccagacaatccatgggacccagattggctcttatttcggtggggagctgtgtggcgtcgacgtggaccaagatggggagacagagctgctgctgattggtgccccactgttctatggggagcagagaggaggccgggtgtttatctaccagagaagacagttggggtttgaagaagtctcagagctgcagggggaccccggctacccactcgggcggtttggagaagccatcactgctctgacagacatcaacggcgatgggctggtagacgtggctgtgggggcccctctggaggagcagggggctgtgtacatcttcaatgggaggcacggggggcttagtccccagccaagtcagcggatagaagggacccaagtgctctcaggaattcagtggtttggacgctccatccatggggtgaaggaccttgaaggggatggcttggcagatgtggctgtgggggctgagagccagatgatcgtgctgagctcccggcccgtggtggatatggtcaccctgatgtccttctctccagctgagatcccagtgcatgaagtggagtgctcctattcaaccagtaacaagatgaaagaaggagttaatatcacaatctgtttccagatcaagtctctcatcccccagttccaaggccgcctggttgccaatctcacttacactctgcagctggatggccaccggaccagaagacgggggttgttcccaggagggagacatgaactcagaaggaatatagctgtcaccaccagcatgtcatgcactgacttctcatttcatttcccggtatgtgttcaagacctcatctcccccatcaatgtttccctgaatttctctctttgggaggaggaagggacaccgagggaccaaagggcgggcaaggacataccgcccatcctgagaccctccctgcactcggaaacctgggagatcccttttgagaagaactgtggggaggacaagaagtgtgaggcaaacttgagagtgtccttctctcctgcaagatccagagccctgcgtctaactgcttttgccagcctctctgtggagctgagcctgagtaacttggaagaagatgcttactgggtccagctggacctgcacttccccccgggactctccttccgcaaggtggagatgctgaagccccatagccagatacctgtgagctgcgaggagcttcctgaagagtccaggcttctgtccagggcattatcttgcaatgtgagctctcccatcttcaaagcaggccactcggttgctctgcagatgatgtttaatacactggtaaacagctcctggaggacaactcagccactaccatcatccccatcctgtaccccatcaacatcctcatccaggaccaagaagactccacactctatgtcagtttcacccccaaaggccccaagatccaccaagtcaagcacatgtaccaggtgaggatccagccttccatccacgaccacaacatacccaccctggaggctgtggttggggtgccacagcctcccagcgaggggcccatcacacaccagtggagcgtgcagatggagcctcccgtgccctgccactatgaggatctggagaggctcccggatgcagctgagccttgtctccccggagccctgttccgctgccctgttgtcttcaggcaggagatcctcgtccaagtgatcgggactctggagctggtgggagagatcgaggcctcttccatgttcagcctctgcagctccctctccatctccttcaacagcagcaagcatttccacctctatggcagcaacgcctccctggcccaggttgtcatgaaggttgacgtggtgtatgagaagcagatgctctacctctacgtgctgagcggcatcggggggctgctgctgctgctgctcattttcatagtgctgtacaaggttggtttcttcaaacggaacctgaaggagaagatggaggctggcagaggtgtcccgaatggaatccctgcagaagactctgagcagctggcatctgggcaagaggctggggatcccggctgcctgaagcccctccatgagaaggactctgagagtggtggtggcaaggactgagtccaggcctgtgaggtgcagagtgcccagaactggactcaggatgcccagggccactctgcctctgcctgcattctgccgtgtgccctcgggcgagtcactgcctctccctggccctcagtttccctatctcgaacatggaactcattcctgcctgtctcctttgcaggctcatagggaagacctgctgagggaccagccaagagggctgcaaaagtgagggcttgtcattaccagacggttcaccagcctctcttggtttccttccttggaagagaatgtctgatctaaatgtggagaaactgtagtctcaggacctagggatgttctggccctcacccctgccctgggatgtccacagatgcctccaccccccagaacctgtccttgcacactcccctgcactggagtccagtctcttctgctggcagaaagcaaatgtgacctgtgtcactacgtgactgtggcacacgccttgttcttggccaaagaccaaattccttggcatgccttccagcaccctgcaaaatgagaccctcgtggccttccccagcctcttctagagccgtgatgcctccctgttgaagctctggtgacaccagcctttctcccaggccaggctccttcctgtcttcctgcattcacccagacagctccctctgcctgaaccttccatctcgccacccctccttccttgaccagcagatcccagctcacgtcacacttggttgggtcctcacatctttcacacttccaccagcctgcactactccctcaaagcacacgtcatgtttcttcatccggcagcctggatgttttttccctgtttaatgattgacgtacttagcagctatctctcagtgaactgtgagggtaaaggctatacttgtcttgttcaccttgggatgatgcctcatgatatgtcagggcgtgggacatctagtaggtgcttgacataatttcactgaattaatgacagagccagtgggaagatacagaaaaagaggggctgggctgggcgcggtggttcacgcctgtaatcccagcactttgggaggccaaggagggtggatcacctgaggtcaggagttagaggccagcctggcgaaaccccatctctactaaaaatacaaaatccaggcgtggtggcacacacctgtagtcccagctactcaggaggttgaggtaggagaattgcttgaacctgggaggtggaggttgcagtgagccaagattgcgccattgcactccagcctgggcaacacagcgagactccgtctcaaggaaaaaataaaaataaaaagcgggcacgggcccgtgacatccccacccttggaggctgtcttctcaggctctgccctgccctagctccacaccctctcccaggacccatcacgcctgtgcagtggcccccacagaaagactgagctcaaggtgggaaccacgtctgctaacttggagccccagtgccaagcacagtgcctgcatgtatttatccaataaatgtgaaattctgtccaaaaaaaaaaaataccatttcaatactcaaaaaaaaacctgcgggggcatttatttgtggggggggccaaaacaagggtttaggcacgggggcacttgggtaaaggtgttttccggaccccagtttttgggcacacgggggataatttgcggggttcccaca

SEQ ID NO: 344856 - DNA, 2587 bp, Homo sapiens
caccagcctgttgcctctgtgagaaagtaccactgtaagaggccaaagggcatgatcattttcctctttcaccctgtctaggttgccagcaaatcccacgggcctcctgacgctgcccctggggccacaggtccctcgagtgctggaaggatgaaggattcctgcatcactgtgatggccatggcgctgctgtctgggttctttttcttcgcgccggcctcgagctacaacctggacgtgcggggcgcgcggagcttctccccaccgcgcgccgggaggcactttggataccgcgtcctgcaggtcggaaacggggtcatcgtgggagctccaggggaggggaacagcacaggaagcctctatcagtgccagtcgggcacaggacactgcctgccagtcaccctgagaggttccaactatacctccaagtacttgggaatgaccttggcaacagaccccacagatggaagcattttgtttgctgctgttcagttttccacaagctacaaaacagaatttgatttctcagattatgttaaacggaaggaccctgatgctctgctgaagcatgtaaagcacatgttgctgttgaccaatacctttggtgccatcaattatgtcgcgacagaggtgttccgggaggagctgggggcccggccagatgccaccaaagtgcttatcatcatcacggatggggaggccactgacagtggcaacatcgatgcggccaaagacatcatccgctacatcatcgggattggaaagcattttcagaccaaggagagtcaggagaccctccacaaatttgcatcaaaacccgcgagcgagtttgtgaaaattctggacacatttgagaagctgaaagatctattcactgagctgcagaagaagatctatgtcattgagggcacaagcaaacaggacctgacttccttcaacatggagctgtcctccagcggcatcagtgctgacctcagcaggggccatgcagtcgtgggggcagtaggagccaaggactgggctgggggctttcttgacctgaaggcagacctgcaggatgacacatttattgggaatgaaccattgacaccagaagtgagagcaggctatttgggttacaccgtgacctggctgccctcccggcaaaagacttcgttgctggcctcgggagcccctcgataccagcacatgggccgagtgctgctgttccaagagccacagggcggaggacactggagccaggtccagacaatccatgggacccagattggctcttatttcggtggggagctgtgtggcgtcgacgtggaccaagatggggagacagagctgctgctgattggtgccccactgttctatggggagcagagaggaggccgggtgtttatctaccagagaagacagttggggtttgaagaagtctcagagctgcagggggaccccggctacccactcgggcggtttggagaagccatcactgctctgacagacatcaacggcgatgggctggtagacgtggctgtgggggcccctctggaggagcagggggctgtgtacatcttcaatgggaggcacggggggcttagtccccagccaagtcagcggatagaagggacccaagtgctctcaggaattcagtggtttggacgctccatccatggggtgaaggaccttgaaggggatggcttggcagatgtggctgtgggggctgagagccagatgatcgtgctgagctcccggcccgtggtggatatggtcaccctgatgtccttctctccagctgagatcccagtgcatgaagtggagtgctcctattcaaccagtaacaagatgaaagaaggagttaatatcacaatctgtttccagatcaagtctctcatcccccagttccaaggccgcctggttgccaatctcacttacactctgcagctggatggccaccggaccagaagacgggggttgttcccaggagggagacatgaactcagaaggaatatagctgtcaccaccagcatgtcatgcactgacttctcatttcatttcccggtatgtgttcaagacctcatctcccccatcaatgtttccctgaatttctctctttgggaggaggaagggacaccgagggaccaaagggcggtaagaagagatggctagggatggtggggagtttatcagagaaatccatttggcaagaagagccgcccatggccgggcagcacactcctataatcccagcactttgggaggctgaagtgggtggatcacttaaggtcaggggttcaggaccagcctggccaacatggtgaaaccccatctctactaaaaatacaaagattagtcgggtgtgatggtgcacttgaggccaggagtttgagaccagcctgggcaacatagtgggactccctttctacaaaacataaaaaattagttattgtgatggtgcgcccctgtagtcccagctacttgggaggctgagcagggaggatcacttgagccagagggttgaggctgcagtgagctattgagctatgattgcaccactgccctccagcctaggcaacagcacgaaaccctgtctctaaagaag

SEQ ID NO: 344857 - DNA, 2830 bp, Homo sapiens
ccagatctctcagatcttagcccagcctggtcttaaccacacacgctctacacagcccaccttttcagcctcattcttttatcactccagctggacctgcacttccccccgggactctccttccgcaaggtggagatgctgaagccccatagccagatacctgtgagctgcgaggagcttcctgaagagtccaggcttctgtccagggcattatcttgcaatgtgagctctcccatcttcaaagcaggccactcggttgctctgcagatgatgtttaatacactggtaaacagctcctggggggactcggttgaattgcacgccaatgtgacctgtaacaatgaggactcagacctcctggaggacaactcagccactaccatcatccccatcctgtaccccatcaacatcctcatccaggaccaagaagactccacactctatgtcagtttcacccccaaaggccccaagatccaccaagtcaagcacatgtaccaggtgaggatccagccttccatccacgaccacaacatacccaccctggaggctgtggttggggtgccacagcctcccagcgaggggcccatcacacaccagtggagcgtgcagatggagcctcccgtgccctgccactatgaggatctggagaggctcccggatgcagctgagccttgtctccccggagccctgttccgctgccctgttgtcttcaggcaggagatcctcgtccaagtgatcgggactctggagctggtgggagagatcgaggcctcttccatgttcagcctctgcagctccctctccatctccttcaacagcagcaagcatttccacctctatggcagcaacgcctccctggcccaggttgtcatgaaggttgacgtggtgtatgagaagcagatgctctacctctacgtgctgagcggcatcggggggctgctgctgctgctgctcattttcatagtgctgtacaaggttggtttcttcaaacggaacctgaaggagaagatggaggctggcagaggtgtcccgaatggaatccctgcagaagactctgagcagctggcatctgggcaagaggctggggatcccggctgcctgaagcccctccatgagaaggactctgagagtggtggtggcaaggactgagtccaggcctgtgaggtgcagagtgcccagaactggactcaggatgcccagggccactctgcctctgcctgcattctgccgtgtgccctcgggcgagtcactgcctctccctggccctcagtttccctatctcgaacatggaactcattcctgcctgtctcctttgcaggctcatagggaagacctgctgagggaccagccaagagggctgcaaaagtgagggcttgtcattaccagacggttcaccagcctctcttggtttccttccttggaagagaatgtctgatctaaatgtggagaaactgtagtctcaggacctagggatgttctggccctcacccctgccctgggatgtccacagatgcctccaccccccagaacctgtccttgcacactcccctgcactggagtccagtctcttctgctggcagaaagcaaatgtgacctgtgtcactacgtgactgtggcacacgccttgttcttggccaaagaccaaattccttggcatgccttccagcaccctgcaaaatgagaccctcgtggccttccccagcctcttctagagccgtgatgcctccctgttgaagctctggtgacaccagcctttctcccaggccaggctccttcctgtcttcctgcattcacccagacagctccctctgcctgaaccttccatctcgccacccctccttccttgaccagcagatcccagctcacgtcacacttggttgggtcctcacatctttcacacttccaccagcctgcactactccctcaaagcacacgtcatgtttcttcatccggcagcctggatgttttttccctgtttaatgattgacgtacttagcagctatctctcagtgaactgtgagggtaaaggctatacttgtcttgttcaccttgggatgatgcctcatgatatgtcagggcgtgggacatctagtaggtgcttgacataatttcactgaattaatgacagagccagtgggaagatacagaaaaagaggggctgggctgggcgcggtggttcacgcctgtaatcccagcactttgggaggccaaggagggtggatcacctgaggtcaggagttagaggccagcctggcgaaaccccatctctactaaaaatacaaaatccaggcgtggtggcacacacctgtagtcccagctactcaggaggttgaggtaggagaattgcttgaacctgggaggtggaggttgcagtgagccaagattgcgccattgcactccagcctgggcaacacagcgagactccgtctcaaggaaaaaataaaaataaaaagcgggcacgggcccgtgacatccccacccttggaggctgtcttctcaggctctgccctgccctagctccacaccctctcccaggacccatcacgcctgtgcagtggcccccacagaaagactgagctcaaggtgggaaccacgtctgctaacttggagccccagtgccaagcacagtgcctgcatgtatttatccaataaatgtgaaattctgtccaaaaaaaaaaaataccatttcaatactcaaaaaaaaacctgcgggggcatttatttgtggggggggccaaaacaagggtttaggcacgggggcacttgggtaaaggtgttttccggaccccagtttttgggcacacgggggataatttgcggggttcccaca

SEQ ID NO: 344858 - DNA, 279 bp, Homo sapiens
cctcgttctcccgggttctgacgcctttccccgctcccacaggcctcttccatgttcagcctctgcagctccctctccatctccttcaacagcagcaagcatttccacctctatggcagcaacgcctccctggcccaggtatctccacctccttggaagccccaggaacaggcaacagagggagcccaggagccccagggcagacctagatgtgggagagctcctgggctctgtgcgagtcagaacttcccactgccagagccatcagcctgggagaag

SEQ ID NO: 344859 - DNA, 371 bp, Homo sapiens
cttcagaccaaacacatcatgactcaacaacaaaagaagggtaagaagaattctagctgaggcatatccaaagctttggcccagtggattcaggcatggcccaaaccttttggagcggagtggcggctgccgtgtcatgagaggcagtggaaaatatgacaacagaagagaaggcactgtgaccatggaggcagccacaagccatgggatgctggcagctaccagaagctgggagaagcaaggaatagattttcccctgtaacctttggaagaaatgtggtcctgttgacattctgattttggcccagtgaaactgatttcaaaccttcctccagaactgtgaaagaataaatttctgtgttttaagctgc

SEQ ID NO: 344860 - DNA, 690 bp, Homo sapiens
ccagctcaaatatcccttgatttgggtagtaaaatcgtccttatttttatatcaacgatatattgagcaaaacatttgaactgttcaaaatttctgtttccttaaattgtcttacatctcatctcagattaactgtatgtatacatattccaacccaaaggcttgactttctcagactggagtgatagctagcaggttaatttactccggttcctccaaatgaaaaaccatgaaccatattcatggctatgaaaacatgatttaaacttgcagtacaggaagaaatacttaccttttggggtagatgtaaacagccagtcccctcctttatcatgttccttttctttgtattatttactttcagtgatctgggactataattcttcataaaagttcatccacggtctgcatttcctttcctttttacatccttctagaaagttacatagcaagatcttgtttccttaaaaatattgtacttatgttattaatatttgatagtaaaaataatacatgctcattgtaaaaacttagaaaatacagcaatgctaccattgagaaataagtcacaattaacatatttttggatgtttatgtgggaatatattttaacaaagctgtatgtatatgcatgtatgtgtgtataatagtgcttgtatatctataaagaaaccttgaaattatatacat

SEQ ID NO: 344861 - DNA, 1289 bp, Homo sapiens
tgtaaagttctcctgtgtctccttctatttgttcagcatttctgaatctacacagagctcctgccttgatctaaaatctatgccactttgagtcactttttagcactggatatctataatgacatagccataactgatgtattatctaggacttgggacagtccgaaggaatttggaaagcctaaataccttgacgtgtctaaaccaaatttctacctattttccactgaatagttgtggcctggggctagatagtggctttaaaacaggacaggtctttgcctgaagtccattcatctttttattcctgtttttatttgtccttaattattgatctaagaaaacaaataataagcacaacttttcctaaatatcctccagacattgtgcatcctccttgttgcagcttttaatctatgcctgttactgctacttctctaacctaaatgtgcacagagatcactggaaggatcttgttacaggtctaaaaagcgcccaggtgatcagcatgctgctggccctatgatgataagtagtgggctcttccttagccttctctctggttcctcctcgtatcaaaggaaggtggttcccagagtagctgaatgagaagtgaggcgtgactctcgctgtgcctgcagccgtctcataaatggccaatggtgtagttttaggtgcttagatccaatccctggtgacaagccattttgtggctcttctgtcacacgtctgtgattctgttttccagagagcaagccagagtgacccacccagaaggtaactgttttgtagcctctccaagttttctctctgaggttatgaaatagatgcagagatagctcctcacagaagtgcaggattccccagtgtgttaaatcttaattttaactttgtatatgagacgtcctctcaccttattactttcagcatatattaatgcaattgtttcttttaaagtaaatgagtgccttactcactggagaaccatcctagccctagcagtttgtcacatgcaagttcatcttccttctcgaccttggattcacagtgctacaagctgagtgtatactgcaaatcaagaaacaactgtttttctgttgagaaatgctaaagacatttttctctctctcctctcacaaagaaaaagactgcactgattgttactttaacacattaaagtcttgagaattagcactcactcatttgaaccattagtggatacttacaggaaacttgcataagagccataaggatacttacaaaaaacttgcctggggcaagttgtgatt

SEQ ID NO: 344862 - DNA, 459 bp, Homo sapiens
agaaggtgtatttctctgccagccaccttcttgggagaccactggtcagcgagggcttgacatggtaccaagtgggttggggctggggccaaagagaggcctcctgggaagctgttgatgacattctggggcctggagggaggaaaatcactcagggaggggccaggcccctcaaccactctgttcttgtttgccctctcctcataacccttggcttgggtctcggaagcttcagcttaaaggctggagatgaaaaaggccaaaggtcagtagggtcggtggcttcaggctactgagggacctgtgatccccagcaggagacctgaagagccagagcagctcagggatggaaacagccccatttggcactcttagcatttgaagagccctgcccagcctcatggaaccttccatcgacaagggcacaggggcagatttggactataacgcaggtccttg

SEQ ID NO: 344863 - DNA, 611 bp, Homo sapiens
aattcaagttaagtcagggtaatacttatttgaacttaattgtctgtacagagatatttaaaatttagcccaaatattctccactaagtcttcaaataaagattaattaaaagtcctaaagctatctaaacataaatcaataagtagtaaatgttaaaaataaagagacaaagttgcttttctctcttgctaggagaaaaagagaaggtgaagcatgaaagtcatgctttcattttaaaagtatgtgcagagtgagtagatggcacttttatttcaactaaatcatgtgtatttagtgtctgtgtatcttactggtgtgttcattttcatttttcaatccactgtatctcaagtgatcagataattcatcatccaagtcaatttcattttagaacgtgaaaaggggcactggaaacattttttttggacggggggacaagagatacaaccatgaacatctccaagcaaatcagaataaatgatcacttaacattgaccccaaaaatctgctgctctagtatttttgtcggttccttctcttttactccatcaatgcaccaggtgtagttctggctaattttctggtttataatgtcaatttcagattcagg

SEQ ID NO: 344864 - DNA, 297 bp, Homo sapiens
ggccttaagactggttggatgactgatttaagcctccattgagctttattttcgcacctgtttaatgggaaaataataaaagcttagatttattgagcactccctgtatatttgaagcatggtgctaagcatttaatacatattttgtcatttaattctcattaaaccaaatgagatagggataattatttggcccattttacagataaggaaaccaaggttcacctgtaagtcactcactcagagaggctaagtgacttgtccaagtttacataaccaggaaatgggaagtaagga

SEQ ID NO: 344865 - DNA, 1150 bp, Homo sapiens
tgagacctctgagtcaccccccaggccgacctcagataaactcccattcatttcttctctctggcctggaggaggccaagccaagttgcagttcaggctctggggagcagcggggccccccagtgaacctctcaccgtttggtagagggtggcactctgggggctcctctgtactttcctaaatggtaaagttaatctcacttcctctttcgtaagaagagaaaacggggcgggagtgctttggctcaacacatcaggctgttggaagttcctttaaagccatagttttctctgagtactttctggcctttaccaacccctcggaaactcacggtaattcacgtctgtacttgcagtcatgcagcacctatgcagtgctggtgtgaaccatgtgttgagagaagggaggaaaaccaacattcattagatagttaatggcgttccaggccggatgctgctcctgcgtcgtctcacccgcaagacatggattggctcttctccccattctgcagatgcagaaaatcgagtcccaaactggggaactaacttataagtgatagagaggagccaggattttggatgctggccttcctgctgggtggcttctagggaagaagctcaatgacttaatcaggatgatttagtccaagctggagagggagtgagagaggcccctttctggccttgggtggaggactgtagaagagttctttctctgggcagaaggttttgatgaagtcacaggcatttctctgaaagcctgctgagggtggaaatactgacagccccttggtcctcaccagtaacaacacatgagaggtgatgtggctcctgtgagagccccccatctgggctgctgagctctggagcccccagagctggaatattcctccctgcatcttcctggtgccctttgcgacagatggagagggggtgtgcgagaggaagggagtctaaaagtgttgtacggatcccacacgcgctcgcttgctgcttccaatggctccgtgcgacaggttattttcttatttgtagtcttggactgacggaaggtttcccccctctctctctctttttaaatgtgctcagatttctggcctgtcaacacaactcagatcatgtcactccccagctcaaaactgttgagtgg

SEQ ID NO: 344866 - DNA, 263 bp, Homo sapiens
ttttagtagagatggggtttttaccatgttagccaggatggtctcgatctcccgaccttgtgatccgcccacctcggcctcccaaagtgctgggattacaggcgtgagccaccatgcctggccagtattcagttttaataccgcttcctgtacaaagcacagtccaatattccccagacaaaactgtgtgctacacaatgtattacaatagctccccacaaaagcatgttccaattcaaattatactgcatatcgatatatac

SEQ ID NO: 344867 - DNA, 225 bp, Homo sapiens
ttatgtcttagtatcttatgggtaatacttaggcttttgagtagcatgtataacagtatgaattctcctgtagtacaactactttgaaaaagcgggtgagccttataaaatacagacatgacccagtgattcccattctagaaaaatgcatgtgtatatgcttctgaagacttttataaataagtgttcataacagcattatttttgtagtagattggaaaagta

SEQ ID NO: 344868 - DNA, 465 bp, Homo sapiens
agctggttagtgctaactggcaggggcaccagagtaaaatgggccttctggaaggctggaaagctggaggaagaggtgttttcctggaaagccagggattaattctgatttcttttccctctaaattagagtggggacttgctgaagttgagtttaagtgaaggtcaaaaagagaacaagttttgtaagaattccttaaatgcctgggtttgatgatcagtgcacattcctcaggaattattatagcaggtcaataagaacatagccagtaatgaacctttcagatccagcaaggactcacatttcatgcacagtttcaccagcagttgcatgacccctatcaaggaccccagcagccaagggaagtgactcaaatatgtggttcatctgctcttaccctgggcagccactctagttcttatacagttatgtatcttttgctaattaaaccaggaacctaattta

SEQ ID NO: 344869 - DNA, 676 bp, Homo sapiens
agctggttagtgctaactggcaggggcaccagagtaaaatgggccttctggaaggctggaaagctggaggaagaggtgttttcctggaaagccagggattaattctgatttcttttccctctaaattagagtggggacttgctgaagttgagtttaagtgaaggtcaaaaagagaacaagttttgtaagaattccttaaatgcctgggtttgatgatcagtgcacattcctcaggaattattatagcaggtcaataagaacatagccagtaatgaacctttcagatccagcaaggactcacatttcatgcacagtttcaccagcagttgcatgacccctatcaaggaccccagcagccaagggaagtgactcaaatatgtggttcatctgctcttaccctgggcagccactctagttcttatacagttatgtatcttttgctaattaaaccaggaacctaatttaatatttttgctttgtgtgtaagatttcttcatgtccatctataatccatctgagatacaactggcataaagatgggttctgaaatgctgtagttcgtgtcagaagtagattcataagccaaattactatcatggtttgattttagaaatggtgtcaggaaaacaagaaatgaaatggtgagataaagaagtgtgagaggaaactccgccca

SEQ ID NO: 344870 - DNA, 92 bp, Homo sapiens
tgagtgtcccctccccaacccagaacaagttttaatctcttaatcttcctcattaatcactcaccctcctacccctctctgtggatccgatt

SEQ ID NO: 344871 - DNA, 380 bp, Homo sapiens
ctggctgctggcaactcagatgttcaaactgtcacgaacatttatcaagctgtgtgaagcctgctccccttcaccttctgccaagattggaagctctctgagggcctcacaagaagcagatactggtgccatgcttcttgtacagcctgcagaactgtgaggcaaataagcctcttcttggtataaattacctgcctcaggcattcctttatagcaaagcaaatggacgaagacagaggactctggttgagagctccgattctccatcttcacacttctcagggaagaggcaagagctgccctgtccaatggggtaactgctacctacatgttgctatttacattcaaaataactaaaattaaatacagtttaaactcta

SEQ ID NO: 344872 - DNA, 950 bp, Homo sapiens
cctgctttctgcctcgtagtccaaaatgttgatggttagaagaaaatgaggcaggaaccagtcagtttaatatggatctttttcttttctgtttttttttgttgttgtcattgttgttgtttttgagacagagtctcactctgttgcccaggttggtcacagatgtcggctgtttgaagatgctggggaatgcaccccggacctcacacaggatctttttcaagtctgagatgatatggacccattgtaacaatcttctgaattagctctgacctcacttctagtaattttgagtcattgttctgtttcttgaatatgaatagttggtggttgtggtttttgtttttaacttattcaatattggctctctcaaatcctaattatcctaccagttggctctccggtattatcttaatacctggtaccatcccaattttgtggatgagaaaacaagtgtttaaagtgtcgcactgaatgttgggcgcagtggttcatgcctgtgatcccagcatttggtagggacctaaacaggaggattacttgaggccaggagtttcagaccagcttgagcaacatagcaagacctcgtctctactataaagcaaaaaaaaagttagccaggtgtggcagtgtgcacctgcggtggtggtcccagctacttgggagtctgaggtgggaggcctgcttgagctagggaggtcgaggctgcactgagccatgattaggccactggactccagcctgggtgacaaagcaaaaccctatctcaaaaaaataaaaataaagtatcacactcacggtagcagtgattgtagattcccagtcctgatgatacctccaagccacgctcagtggctcatggagctattttggttggtacttgagagcaatcccattttgagaacttggagagtggggtttctttcatttaccttctgtggaatgagcct

SEQ ID NO: 344873 - DNA, 349 bp, Homo sapiens
atgttttttggacttacgtatttctttttattcaagaactctatccaatatatacacattttccttttggcttttgtcatttgtgtctttaagactttgaataatgtttttaaataatattaactttaatctttcatacacctttcagaaatttactatttgtattttgttttgtgtattttgtaacacacaagttgtaaatgattatgtattttctgttcaattccatctttcatttttatgcttaaaaatgtcttcttagtcatatatgcccggagtcactgctccgtggagggggtgagtggggtgaggggctatggatggggcgcccgtttggcacgggggaagt

SEQ ID NO: 344874 - DNA, 3393 bp, Homo sapiens
atgttttttggacttacgtatttctttttattcaagaactctatccaatatatacacattttccttttggcttttgtcatttgtgtctttaagactttgaataatgtttttaaataatattaactttaatctttcatacacctttcagaaatttactatttgtattttgttttgtgtattttgtaacacacaagttgtaaatgattatgtattttctgttcaattccatctttcatttttatgcttaaaaatgtcttcttagtcatatatgcccgtctacattttcttctagttcttttattagatatatctagtattaattcgtcacccatttgatacatggtaatttttttcatgatgtggacatgaagtaaatattctgatttttaaatgtttccattataattggctaccattgtcaattttcttattggttctgatacttattcggtttcttagttttccaggtaataatttatctgcaagtcagcgtaacttaattatttgttttttaatagttcagtattaccattgcctttgttgtttcattgagaacttccagtacaatgtcaggagggggaaaaaaacaacggcaatggcaccaatccttctcttgttgttcatctttatattccttagaacatacggaatgcgttctgacatagaacttattgaagagtaatttggaattttctgatgaatcaactgtctttaatctttacaagtttgaaaggtatacgttattgtttccatttcccagatggagaaattgaggttcaggaaggttacacaaagtcccaggtctaagaaaaatgtctcccagattcccaaaagatgtttctattatgctaatagtgcccgttcaagcattagaggaaaggttgcccgtggtatcgctggtaaattcttcttcccactttcaaatctagaatagtaaaacagccaaaatcccaacaggcatgagagttatcgcagtagataggttaagctgcttctctgctgtggtcaacgtcagctctgttgcgaggcgggttctcccaacaatagcccacaccatttccaggcttttctgggcgaggggcagggcgcccggcccccaaagcgagaagacagacagccccggttctccgcagccccaggtttgctcctcaaggacggaggggcctctcagctccggccgcctcctttccgccccctgcaggccggccggaggaaagctcagggcccaggtcggcccagggagcacggaaccaaagagcgctagcgccggttcggccgcctttccagaaagcccgggccgaacggccccgccgcagagactcagcgcggatcgctgctccctctcgccatggcgcaggtgctgatcgtgggcgccgggatgacaggaagcttgtgcgctgcgctgctgaggaggcagacgtccggtcccttgtaccttgctgtgtgggacaaggctgaggactcagggggaagaatgactacagcctgcagtcctcataatcctcagtgcacagctgacttgggtgctcagtacatcacctgcactcctcattatgccaaaaaacaccaacgtttttatgatgaactgttagcctatggcgttttgaggcctctaagctcgcctattgaaggaatggtgatgaaagaaggagactgtaactttgtggcacctcaaggaatttcttcaattattaagcattacttgaaagaatcaggtgcagaagtctacttcagacatcgtgtgacacagatcaacctaagagatgacaaatgggaagtatccaaacaaacaggctcccctgagcagtttgatcttattgttctcacaatgccagttcctgagattctgcagcttcaaggtgacatcaccaccttaattagtgaatgccaaaggcagcaactggaggctgtgagctactcctctcgatatgctctgggcctcttttatgaagctggtacgaagattgatgtcccttgggctgggcagtacatcaccagtaatccctgcatacgcttcgtctccattgataataagaagcgcaatatagagtcatcagaaattgggccttccctcgtgattcacaccactgtcccatttggagttacatacttggaacacagcattgaggatgtgcaagagttagtcttccagcagctggaaaacattttgccgggtttgcctcagccaattgctaccaaatgccaaaaatggagacattcacaggtaccaagtgctggtgtgattctaggatgtgcgaagagcccctggatgatggcgattggatttcccatctgacttcctggaaattggagcacacagtcaggttttatttgatttttttttttaaggataccacttcacagcctttaggatagctattatttagaagcaaaacagaagataaatgttggcaaggatgtggagatattggattcccttgtgcagtgccggtgggaatgtaaaatgatgtagctactatggaaaatgatacggcaatttctttagaaatgaaatatagaattgccgtatgatctgcagttccacatctggatatctatccaaaagaagtgaaagtagggacttgaacgaacatttgtacaccaatgttcacagcggctttattcacaacagccaaaaggtggaagcaacccagtgtccatggatagatgaatagataaataaaatgtggtataaacatacaatgggctattgtttagccttaaaagggaaggaaattctgacatgctgcaatatggatgaagcttaaagtcattatgcaaagtggaataagcctatcacaaaaaataatattacataattctacttatatgaggaatctagagcagtcagtttcacagagacagaaaatagaatggtggttgccaagggctgggagaagagggcaatggagagtgagtgtttagtgggtcagagttttagtttgggaaggtaaaaagttctggagatggatgatggttatgggtgctcaacagtgtgaatgtacttaatgccacagaactgcacatttaaatgtggttaaaatcatcacttttatgttatgtatatttaccacaataaataaagaagttgatatttcttatacttacaaagaggagaagggcatttgcaaatcaacaagaagtgtgaggcccctctctctagcagaaaaatagactaaatctatttctttatcttttaacatcctgtttaagggaaatgccaaaacaaatgggaaaaaatacacacacacaaatatatatgaacatgttttgcctcatgagtaatcaaaatgtgtacatatgtatgtttatgtatgtgtgtttatatttaaaatcgtgttctgccttatgagtaaacaaaaagtatacaaattaaaaactataatgaaacgt

SEQ ID NO: 344875 - DNA, 2611 bp, Homo sapiens
atgttttttggacttacgtatttctttttattcaagaactctatccaatatatacacattttccttttggcttttgtcatttgtgtctttaagactttgaataatgtttttaaataatattaactttaatctttcatacacctttcagaaatttactatttgtattttgttttgtgtattttgtaacacacaagttgtaaatgattatgtattttctgttcaattccatctttcatttttatgcttaaaaatgtcttcttagtcatatatgcccgtctacattttcttctagttcttttattagatatatctagtattaattcgtcacccatttgatacatggtaatttttttcatgatgtggacatgaagtaaatattctgatttttaaatgtttccattataattggctaccattgtcaattttcttattggttctgatacttattcggtttcttagttttccaggtaataatttatctgcaagtcagcgtaacttaattatttgttttttaatagttcagtattaccattgcctttgttgtttcattgagaacttccagtacaatgtcaggagggggaaaaaaacaacggcaatggcaccaatccttctcttgttgttcatctttatattccttagaacatacggaatgcgttctgacatagaacttattgaagagtaatttggaattttctgatgaatcaactgtctttaatctttacaagtttgaaaggtatacgttattgtttccatttcccagatggagaaattgaggttcaggaaggttacacaaagtcccaggtctaagaaaaatgtctcccagattcccaaaagatgtttctattatgctaatagtgcccgttcaagcattagaggaaaggttgcccgtggtatcgctggtaaattcttcttcccactttcaaatctagaatagtaaaacagccaaaatcccaacaggcatgagagttatcgcagtagataggttaagctgcttctctgctgtggtcaacgtcagctctgttgcgaggcgggttctcccaacaatagcccacaccatttccaggcttttctgggcgaggggcagggcgcccggcccccaaagcgagaagacagacagccccggttctccgcagccccaggtttgctcctcaaggacggaggggcctctcagctccggccgcctcctttccgccccctgcaggccggccggaggaaagctcagggcccaggtcggcccagggagcacggaaccaaagagcgctagcgccggttcggccgcctttccagaaagcccgggccgaacggccccgccgcagagactcagcgcggatcgctgctccctctcgccatggcgcaggtgctgatcgtgggcgccgggatgacaggaagcttgtgcgctgcgctgctgaggaggcagacgtccggtcccttgtaccttgctgtgtgggacaaggctgaggactcagggggaagaatgactacagcctgcagtcctcataatcctcagtgcacagctgacttgggtgctcagtacatcacctgcactcctcattatgccaaaaaacaccaacgtttttatgatgaactgttagcctatggcgttttgaggcctctaagctcgcctattgaaggaatggtgatgaaagaaggagactgtaactttgtggcacctcaaggaatttcttcaattattaagcattacttgaaagaatcagtaattagtgaatgccaaaggcagcaactggaggctgtgagctactcctctcgatatgctctgggcctcttttatgaagctggtacgaagattgatgtcccttgggctgggcagtacatcaccagtaatccctgcatacgcttcgtctccattgataataagaagcgcaatatagagtcatcagaaattgggccttccctcgtgattcacaccactgtcccatttggagttacatacttggaacacagcattgaggatgtgcaagagttagtcttccagcagctggaaaacattttgccgggtttgcctcagccaattgctaccaaatgccaaaaatggagacattcacaggttacaaatgctgctgccaactgtcctggccaaatgactctgcatcacaaacctttccttgcatgtggaggggatggatttactcagtccaactttgatggctgcatcacttctgccctatgtgttctggaagctttaaagaattatatttagtgcctatatccttattctctacatgtgtattgggtttttattttcacaattttctgttattgattattttgttttctattttgctaagaaaaattactggaaaattgttcttcacttattatcatttttcatgtggagtataaaatcaattttgtaattttgatagttacaacccatgctagaatggaaattcctcacaccttgcaccttccctacttttctgaattgctatgactactccttgttggaggaaaagtggtacttaaaaaataacaaacgactctctcaaaaaaattacattaaatcacaataacagtttgtgtgccaaaaacttgattatccttatgaaaatttcaattctgaataaagaataatcacattatcaaagcccca

SEQ ID NO: 344876 - DNA, 3133 bp, Homo sapiens
atgttttttggacttacgtatttctttttattcaagaactctatccaatatatacacattttccttttggcttttgtcatttgtgtctttaagactttgaataatgtttttaaataatattaactttaatctttcatacacctttcagaaatttactatttgtattttgttttgtgtattttgtaacacacaagttgtaaatgattatgtattttctgttcaattccatctttcatttttatgcttaaaaatgtcttcttagtcatatatgcccgtctacattttcttctagttcttttattagatatatctagtattaattcgtcacccatttgatacatggtaatttttttcatgatgtggacatgaagtaaatattctgatttttaaatgtttccattataattggctaccattgtcaattttcttattggttctgatacttattcggtttcttagttttccaggtaataatttatctgcaagtcagcgtaacttaattatttgttttttaatagttcagtattaccattgcctttgttgtttcattgagaacttccagtacaatgtcaggagggggaaaaaaacaacggcaatggcaccaatccttctcttgttgttcatctttatattccttagaacatacggaatgcgttctgacatagaacttattgaagagtaatttggaattttctgatgaatcaactgtctttaatctttacaagtttgaaaggtatacgttattgtttccatttcccagatggagaaattgaggttcaggaaggttacacaaagtcccaggtctaagaaaaatgtctcccagattcccaaaagatgtttctattatgctaatagtgcccgttcaagcattagaggaaaggttgcccgtggtatcgctggtaaattcttcttcccactttcaaatctagaatagtaaaacagccaaaatcccaacaggcatgagagttatcgcagtagataggttaagctgcttctctgctgtggtcaacgtcagctctgttgcgaggcgggttctcccaacaatagcccacaccatttccaggcttttctgggcgaggggcagggcgcccggcccccaaagcgagaagacagacagccccggttctccgcagccccaggtttgctcctcaaggacggaggggcctctcagctccggccgcctcctttccgccccctgcaggccggccggaggaaagctcagggcccaggtcggcccagggagcacggaaccaaagagcgctagcgccggttcggccgcctttccagaaagcccgggccgaacggccccgccgcagagactcagcgcggatcgctgctccctctcgccatggcgcaggtgctgatcgtgggcgccgggatgacaggaagcttgtgcgctgcgctgctgaggaggcagacgtccggtcccttgtaccttgctgtgtgggacaaggctgaggactcagggggaagaatgactacagcctgcagtcctcataatcctcagtgcacagctgacttgggtgctcagtacatcacctgcactcctcattatgccaaaaaacaccaacgtttttatgatgaactgttagcctatggcgttttgaggcctctaagctcgcctattgaaggaatggtgatgaaagaaggagactgtaactttgtggcacctcaaggaatttcttcaattattaagcattacttgaaagaatcaggtgcagaagtctacttcagacatcgtgtgacacagatcaacctaagagatgacaaatgggaagtatccaaacaaacaggctcccctgagcagtttgatcttattgttctcacaatgccagttcctgagattctgcagcttcaaggtgacatcaccaccttaattagtgaatgccaaaggcagcaactggaggctgtgagctactcctctcgatatgctctgggcctcttttatgaagctggtacgaagattgatgtcccttgggctgggcagtacatcaccagtaatccctgcatacgcttcgtctccattgataataagaagcgcaatatagagtcatcagaaattgggccttccctcgtgattcacaccactgtcccatttggagttacatacttggaacacagcattgaggatgtgcaagagttagtcttccagcagctggaaaacattttgccgggtttgcctcagccaattgctaccaaatgccaaaaatggagacattcacaggttacaaatgctgctgccaactgtcctggccaaatgactctgcatcacaaacctttccttgcatgtggaggggatggatttactcagtccaactttgatggctgcatcacttctgccctatgtgttctggaagctttaaagaattatatttagtgcctatatccttattctctacatgtgtattgggtttttattttcacaattttctgttattgattattttgttttctattttgctaagaaaaattactggaaaattgttcttcacttattatcatttttcatgtggagtataaaatcaattttgtaattttgatagttacaacccatgctagaatggaaattcctcacaccttgcaccttccctacttttctgaattgctatgactactccttgttggaggaaaagtggtacttaaaaaataacaaacgactctctcaaaaaaattacattaaatcacaataacagtttgtgtgccaaaaacttgattatccttatgaaaatttcaattctgaataaagaataatcacattatcaaagccccaaaaaaaaaaaaaaaaaaaaaaaaacataaaaacaaggaggaacacaacaaaaaagacacctaaaataaagaggaggggggacgcaccgtaaaaaaattgacccccggggggcccccaccatgaaaaagcgcaccaaccaagctagtttgggaaaacagagagggaggcaccaatagaaggagcgagcgacacaaaaaccgccgcagcgggcaggcagccgccgaaaaaaaacgcggccgacgggagagaaaacgaagctcagctggccagatcgcttgagaagaacgcccaacactcgcgggggggggacaaaaaatggaggaacaaacacccacaaggaaaagccacccggaggaacatagt

SEQ ID NO: 344877 - DNA, 1336 bp, Homo sapiens
agcgttttccaacagtatagatctcatgaatcaaatcctccatgcagatgatgccgtatttaccaagagatcgagcaatcaaagcgttatctgtcaaagcaattcgcttcttattgattatgccaaaaaacaccaacgtttttatgatgaactgttagcctatggcgttttgaggcctctaagctcgcctattgaaggaatggtgatgaaagaaggagactgtaactttgtggcacctcaaggaatttcttcaattattaagcattacttgaaagaatcaggtgcagaagtctacttcagacatcgtgtgacacagatcaacctaagagatgacaaatgggaagtatccaaacaaacaggctcccctgagcagtttgatcttattgttctcacaatgccagttcctgagattctgcagcttcaaggtgacatcaccaccttaattagtgaatgccaaaggcagcaactggaggctgtgagctactcctctcgatatgctctgggcctcttttatgaagctggtacgaagattgatgtcccttgggctgggcagtacatcaccagtaatccctgcatacgcttcgtctccattgataataagaagcgcaatatagagtcatcagaaattgggccttccctcgtgattcacaccactgtcccatttggagttacatacttggaacacagcattgaggatgtgcaagagttagtcttccagcagctggaaaacattttgccgggtttgcctcagccaattgctaccaaatgccaaaaatggagacattcacaggttacaaatgctgctgccaactgtcctggccaaatgactctgcatcacaaacctttccttgcatgtggaggggatggatttactcagtccaactttgatggctgcatcacttctgccctatgtgttctggaagctttaaagaattatatttagtgcctatatccttattctctacatgtgtattgggtttttattttcacaattttctgttattgattattttgttttctattttgctaagaaaaattactggaaaattgttcttcacttattatcatttttcatgtggagtataaaatcaattttgtaattttgatagttacaacccatgctagaatggaaattcctcacaccttgcaccttccctacttttctgaattgctatgactactccttgttggaggaaaagtggtacttaaaaaataacaaacgactctctcaaaaaaattacattaaatcacaataacagtttgtgtgccaaaaacttgattatccttatgaaaatttcaattctgaataaagaataatcacattatcaaagcccca

SEQ ID NO: 344878 - DNA, 1613 bp, Homo sapiens
atgttttttggacttacgtatttctttttattcaagaactctatccaatatatacacattttccttttggcttttgtcatttgtgtctttaagactttgaataatgtttttaaataatattaactttaatctttcatacacctttcagaaatttactatttgtattttgttttgtgtattttgtaacacacaagttgtaaatgattatgtattttctgttcaattccatctttcatttttatgcttaaaaatgtcttcttagtcatatatgcccgtctacattttcttctagttcttttattagatatatctagtattaattcgtcacccatttgatacatggtaatttttttcatgatgtggacatgaagtaaatattctgatttttaaatgtttccattataattggctaccattgtcaattttcttattggttctgatacttattcggtttcttagttttccaggtaataatttatctgcaagtcagcgtaacttaattatttgttttttaatagttcagtattaccattgcctttgttgtttcattgagaacttccagtacaatgtcaggagggggaaaaaaacaacggcaatggcaccaatccttctcttgttgttcatctttatattccttagaacatacggaatgcgttctgacatagaacttattgaagagtaatttggaattttctgatgaatcaactgtctttaatctttacaagtttgaaaggtatacgttattgtttccatttcccagatggagaaattgaggttcaggaaggttacacaaagtcccaggtctaagaaaaatgtctcccagattcccaaaagatgtttctattatgctaatagtgcccgttcaagcattagaggaaaggttgcccgtggtatcgctggtaaattcttcttcccactttcaaatctagaatagtaaaacagccaaaatcccaacaggcatgagagttatcgcagtagataggttaagctgcttctctgctgtggtcaacgtcagctctgttgcgaggcgggttctcccaacaatagcccacaccatttccaggcttttctgggcgaggggcagggcgcccggcccccaaagcgagaagacagacagccccggttctccgcagccccaggtttgctcctcaaggacggaggggcctctcagctccggccgcctcctttccgccccctgcaggccggccggaggaaagctcagggcccaggtcggcccagggagcacggaaccaaagagcgctagcgccggttcggccgcctttccagaaagcccgggccgaacggccccgccgcagagactcagcgcggatcgctgctccctctcgccatggcgcaggtgctgatcgtgggcgccgggatgacaggaagcttgtgcgctgcgctgctgaggaggcagacgtccggtcccttgtaccttgctgtgtgggacaaggctgaggactcaggtgggttgtctaaacgccaaaacctgggaaaagaggactgccgggcaggctgctgaggtggtgtgggcctgcacccaagaaagtctaaggcgaaaacgctataccctcagctccctgagcggccgtgtagcgcggcccatgcgccga

SEQ ID NO: 344879 - DNA, 2770 bp, Homo sapiens
atgttttttggacttacgtatttctttttattcaagaactctatccaatatatacacattttccttttggcttttgtcatttgtgtctttaagactttgaataatgtttttaaataatattaactttaatctttcatacacctttcagaaatttactatttgtattttgttttgtgtattttgtaacacacaagttgtaaatgattatgtattttctgttcaattccatctttcatttttatgcttaaaaatgtcttcttagtcatatatgcccgtctacattttcttctagttcttttattagatatatctagtattaattcgtcacccatttgatacatggtaatttttttcatgatgtggacatgaagtaaatattctgatttttaaatgtttccattataattggctaccattgtcaattttcttattggttctgatacttattcggtttcttagttttccaggtaataatttatctgcaagtcagcgtaacttaattatttgttttttaatagttcagtattaccattgcctttgttgtttcattgagaacttccagtacaatgtcaggagggggaaaaaaacaacggcaatggcaccaatccttctcttgttgttcatctttatattccttagaacatacggaatgcgttctgacatagaacttattgaagagtaatttggaattttctgatgaatcaactgtctttaatctttacaagtttgaaaggtatacgttattgtttccatttcccagatggagaaattgaggttcaggaaggttacacaaagtcccaggtctaagaaaaatgtctcccagattcccaaaagatgtttctattatgctaatagtgcccgttcaagcattagaggaaaggttgcccgtggtatcgctggtaaattcttcttcccactttcaaatctagaatagtaaaacagccaaaatcccaacaggcatgagagttatcgcagtagataggttaagctgcttctctgctgtggtcaacgtcagctctgttgcgaggcgggttctcccaacaatagcccacaccatttccaggcttttctgggcgaggggcagggcgcccggcccccaaagcgagaagacagacagccccggttctccgcagccccaggtttgctcctcaaggacggaggggcctctcagctccggccgcctcctttccgccccctgcaggccggccggaggaaagctcagggcccaggtcggcccagggagcacggaaccaaagagcgctagcgccggttcggccgcctttccagaaagcccgggccgaacggccccgccgcagagactcagcgcggatcgctgctccctctcgccatggcgcaggtgctgatcgtgggcgccgggatgacaggaagcttgtgcgctgcgctgctgaggaggcagacgtccggtcccttgtaccttgctgtgtgggacaaggctgaggactcagggggaagaatgactacagcctgcagtcctcataatcctcagtgcacagctgacttgggtgctcagtacatcacctgcactcctcattatgccaaaaaacaccaacgtttttatgatgaactgttagcctatggcgttttgaggcctctaagctcgcctattgaaggaatggtgatgaaagaaggagactgtaactttgtggcacctcaaggaatttcttcaattattaagcattacttgaaagaatcaggtgcagaagtctacttcagacatcgtgtgacacagatcaacctaagagatgacaaatgggaagtatccaaacaaacaggctcccctgagcagtttgatcttattgttctcacaatgccagttcctgagattctgcagcttcaaggtgacatcaccaccttaattagtgaatgccaaaggcagcaactggaggctgtgagctactcctctcgatatgctctgggcctcttttatgaagctggtacgaagattgatgtcccttgggctgggcagtacatcaccagtaatccctgcatacgcttcgtctccattgataataagaagcgcaatatagagtcatcagaaattgggccttccctcgtgattcacaccactgtcccatttggagttacatacttggaacacagcattgaggatgtgcaagagttagtcttccagcagctggaaaacattttgccgggtttgcctcagccaattgctaccaaatgccaaaaatggagacattcacaggttacaaatgctgctgccaactgtcctggccaaatgactctgcatcacaaacctttccttgcatgtggaggggatggatttactcagtccaactttgatggctgcatcacttctgccctatgtgttctggaagctttaaagaattatatttagtgcctatatccttattctctacatgtgtattgggtttttattttcacaattttctgttattgattattttgttttctattttgctaagaaaaattactggaaaattgttcttcacttattatcatttttcatgtggagtataaaatcaattttgtaattttgatagttacaacccatgctagaatggaaattcctcacaccttgcaccttccctacttttctgaattgctatgactactccttgttggaggaaaagtggtacttaaaaaataacaaacgactctctcaaaaaaattacattaaatcacaataacagtttgtgtgccaaaaacttgattatccttatgaaaatttcaattctgaataaagaataatcacattatcaaagcccca

SEQ ID NO: 344880 - DNA, 2521 bp, Homo sapiens
atgttttttggacttacgtatttctttttattcaagaactctatccaatatatacacattttccttttggcttttgtcatttgtgtctttaagactttgaataatgtttttaaataatattaactttaatctttcatacacctttcagaaatttactatttgtattttgttttgtgtattttgtaacacacaagttgtaaatgattatgtattttctgttcaattccatctttcatttttatgcttaaaaatgtcttcttagtcatatatgcccgtctacattttcttctagttcttttattagatatatctagtattaattcgtcacccatttgatacatggtaatttttttcatgatgtggacatgaagtaaatattctgatttttaaatgtttccattataattggctaccattgtcaattttcttattggttctgatacttattcggtttcttagttttccaggtaataatttatctgcaagtcagcgtaacttaattatttgttttttaatagttcagtattaccattgcctttgttgtttcattgagaacttccagtacaatgtcaggagggggaaaaaaacaacggcaatggcaccaatccttctcttgttgttcatctttatattccttagaacatacggaatgcgttctgacatagaacttattgaagagtaatttggaattttctgatgaatcaactgtctttaatctttacaagtttgaaaggtatacgttattgtttccatttcccagatggagaaattgaggttcaggaaggttacacaaagtcccaggtctaagaaaaatgtctcccagattcccaaaagatgtttctattatgctaatagtgcccgttcaagcattagaggaaaggttgcccgtggtatcgctggtaaattcttcttcccactttcaaatctagaatagtaaaacagccaaaatcccaacaggcatgagagttatcgcagtagataggttaagctgcttctctgctgtggtcaacgtcagctctgttgcgaggcgggttctcccaacaatagcccacaccatttccaggcttttctgggcgaggggcagggcgcccggcccccaaagcgagaagacagacagccccggttctccgcagccccaggtttgctcctcaaggacggaggggcctctcagctccggccgcctcctttccgccccctgcaggccggccggaggaaagctcagggcccaggtcggcccagggagcacggaaccaaagagcgctagcgccggttcggccgcctttccagaaagcccgggccgaacggccccgccgcagagactcagcgcggatcgctgctccctctcgccatggcgcaggtgctgatcgtgggcgccgggatgacaggaagcttgtgcgctgcgctgctgaggaggcagacgtccggtcccttgtaccttgctgtgtgggacaaggctgaggactcaggtgcagaagtctacttcagacatcgtgtgacacagatcaacctaagagatgacaaatgggaagtatccaaacaaacaggctcccctgagcagtttgatcttattgttctcacaatgccagttcctgagattctgcagcttcaaggtgacatcaccaccttaattagtgaatgccaaaggcagcaactggaggctgtgagctactcctctcgatatgctctgggcctcttttatgaagctggtacgaagattgatgtcccttgggctgggcagtacatcaccagtaatccctgcatacgcttcgtctccattgataataagaagcgcaatatagagtcatcagaaattgggccttccctcgtgattcacaccactgtcccatttggagttacatacttggaacacagcattgaggatgtgcaagagttagtcttccagcagctggaaaacattttgccgggtttgcctcagccaattgctaccaaatgccaaaaatggagacattcacaggttacaaatgctgctgccaactgtcctggccaaatgactctgcatcacaaacctttccttgcatgtggaggggatggatttactcagtccaactttgatggctgcatcacttctgccctatgtgttctggaagctttaaagaattatatttagtgcctatatccttattctctacatgtgtattgggtttttattttcacaattttctgttattgattattttgttttctattttgctaagaaaaattactggaaaattgttcttcacttattatcatttttcatgtggagtataaaatcaattttgtaattttgatagttacaacccatgctagaatggaaattcctcacaccttgcaccttccctacttttctgaattgctatgactactccttgttggaggaaaagtggtacttaaaaaataacaaacgactctctcaaaaaaattacattaaatcacaataacagtttgtgtgccaaaaacttgattatccttatgaaaatttcaattctgaataaagaataatcacattatcaaagcccca

SEQ ID NO: 344881 - DNA, 407 bp, Homo sapiens
actcacagttccacatagctggggaggcctcacattaatggcagaaggcaaggaggagcaaatcagatcttacatggatggtggcaggcaaaaagagagcttgtgcagggcaattcccatttttaaaaccatcagatctcgtgagacccattcattatcacaagaacagcacaggaaagacctgcccccatgattcaatcatctcccaccgggtccttcccacaacacgtgggaaatatgggagctgcaagatgagatttgggtggggacactgccaaaccatatcatccatagatgtacaattaggttatttcccataagtgtgtattttattcatgtatcattttgaatatcttcaagtatacctataaggtaaatttttagtattgctgagtcagagaatgtgt

SEQ ID NO: 344882 - DNA, 330 bp, Homo sapiens
tactttatgcaggatttttgcatacagcttcataagggatattggtttaaagatttccatttctgttgatgatttgtttgtatttcattttagggtaatattggcctcattaaattagttgagaagtattctattttgggaggtaagtggaagagaataatttgtaaaccattttcgtgaactatctttaaatatttggaagacttgggttagtgaaacatctaggaacggcattttccttgtggacaggtttttgaatacggattcagtctgttcacttctcataggtctattcaaattgtgtatttgttcttgggtcaaatttgacag

SEQ ID NO: 344883 - DNA, 544 bp, Homo sapiens
cagcaggtatctatctttatccaaatccctatagccagctgtattcatttgcacttgtttgtatttcttgctaagtgtcaagtccctccaaattactgattgtaagatcttttgagagcaaaaatggtattttcttactgttttcttcctttccactgatgtgtgtgcgctcttcttgtgattgacctttaaacccactaacatcagtaggtctttcttcctgaattaagtgctgctagctccagtgggaacagactaagcttacccatgtattctattctgagttggaggcctgctaggtaaacggcatgtccatattctgtagtgtattttttcccaagaaacacagtaattctcactcacctccacggaaccatactgatgcaggcagtaaggggtgagtctaacctttccaggaaacttcacaatttacttagaatcacaaaattgctgggacagagcctatcttctgaactttcaactgatgctctgcccagtagacttgtcttttttttttttttttttttttttttgagacagagtt

SEQ ID NO: 344884 - DNA, 566 bp, Homo sapiens
gtgccagagaattctaccatgagatgtgtattttgcttcagatgcctcagaagacaatataaaggaccaagaatgatggtgatactgcatcataaggaattgatttagttcaaccaccttttatatgccaagctgtgtgcagaaaggacatctggttcaaagcaggagcaatgagtgcggatacctagattaagaaggaaaaccagtatagcccttttgagctagcatgatctgaccattggcatgttccttttgcccaccgtgagtgcagatagtgacaccatgagaatcaccaaacagaagtaccagtgtctaaagaaatcaatatgtaaaatgatatcttctgagggataaaggatattgagtttagaaaacaagctgttaatgaaaggatttagatgtctttataatgtaaaatagaactgtcaaaagtaaattcaacactacttgggagggtaatatgggaggatcactcgtgccaggagacggaggttgcagtgagccgagattgtgccactgcagtccagcctaggcaacaaagtgaggctctgcctcaaaaaaaaaaa

SEQ ID NO: 344885 - DNA, 541 bp, Homo sapiens
gaataatttaccaacattaaaccgcacaattggcaaacacacacacattcgagactctatgttgaagatgcctggactaacctactgaagatacgtggttttaccaacagccagcaccaataggaagatatgaatgaagccatctgagaccagccatctggcagccaaactgccaactgactgcaaatgcatgaatgatcccactgacaccacgtagagcacaaatgagttgcctccactgagcccagcccaaattgttatcctataaaatcataaaaacataaacagttgttttaagtcactaagttttggatagtttgttatacaacaaaagctagctgaaacaaatgtattagctagagcagctgtgaatggcactatttgcttagttgattggctgaaatttggactcactggtaggttacatttaatggtgttgagttgccagaatttctctggaataatgtataggaaggattctaatggcctaagccattagaatctctaaggagatagaaataaaggagtgatttattatatg

SEQ ID NO: 344886 - DNA, 467 bp, Homo sapiens
tgcataagcctcgcccgcggccgccgggttgcgtccgcacttctgcgcgctggcccctcccttgctcctctccctagcagtctccagggttttaccgggaggacctaggcaacggcctgagactccgaggcaagtggggcgagtctagggataacgcagcagcaaggctactgggccggtggaacacgccctggcctggccaaattggacctcccttccggattggcggggtctcggtgggggcgggccggttgccggggggagctggagtcacgtgacggccggcgcggtttcccactttgggctgccggccgctgtggctgtggtgggcggtaggggcttttaccgtgtgagctcctttaatgccggggtctgcagtgagagctggtgatgaagctcctgccggtgtggagcttacatccctaagggagcgtttatttaatcagtaaataaaccactcaccatga

SEQ ID NO: 344887 - DNA, 661 bp, Homo sapiens
tgcataagcctcgcccgcggccgccgggttgcgtccgcacttctgcgcgctggcccctcccttgctcctctccctagcagtctccagggttttaccgggaggacctaggcaacggcctgagactccgaggacatttttaaagattggaatgatctcgttcttgaaacctaggtactctatgttgaagatgcctggactaacctactgaagatacgtggttttaccaacagccagcaccaataggaagatatgaatgaagccatctgagaccagccatctggcagccaaactgccaactgactgcaaatgcatgaatgatcccactgacaccacgtagagcacaaatgagttgcctccactgagcccagcccaaattgttatcctataaaatcataaaaacataaacagttgttttaagtcactaagttttggatagtttgttatacaacaaaagctagctgaaacaaatgtattagctagagcagctgtgaatggcactatttgcttagttgattggctgaaatttggactcactggtaggttacatttaatggtgttgagttgccagaatttctctggaataatgtataggaaggattctaatggcctaagccattagaatctctaaggagatagaaataaaggagtgatttattatatg

SEQ ID NO: 344888 - DNA, 821 bp, Homo sapiens
tgcataagcctcgcccgcggccgccgggttgcgtccgcacttctgcgcgctggcccctcccttgctcctctccctagcagtctccagggttttaccgggaggacctaggcaacggcctgagactccgaggacatttttaaagattggaatgatctcgttcttgaaacctaggtactctatgttgaagatgcctggactaacctactgaagatacgtggttttaccaacagccagcaccaataggaagatatgaatgaagccatctgagaccagccatctggcagccaaactgccaactgactgcaaatgcatgaatgatcccactgacaccacgtagagcacaaatgagttgcctccactgagcccagcccaaattgttatcctataaaatcataaaaacataaacagttgttttaagccaaaaaaaaaaaaaaaaaaaaaaaaaaaaattgtggggggggcctggggccctgagaaagtttttaacacaccctctgtttggggggcgggggcccctgggtaggcaccccggggccaatggcggtccccagggaaccgcggcgcaagaatacagggcggcgtctcccccataaaaaaacgcggggggacccggggtgtctcggaacaaaccccgatggtgcgcgggcccgcggttccacagcggcccgggacgaaatagccgccgcgcggaagaagacaccaagagacacagaacacacacgcagaagcacgagaaagacagaacccggagcgacgacaacgcgcggaaccagagcaaacgcagacacaacgacacacaccaccagacacgacgcgaccca

SEQ ID NO: 344889 - DNA, 596 bp, Homo sapiens
ttgtcctgtccgttgtcgcgtgtttagcagcatcgtttgtacatactagatgccagtagcaatcccctctcccaagttgtgacaaccaaaaatgtctctagacatagccaagtgtcccctggaggacaaaattgtccccagttgagatccactgatatataatgaagtaaaatttagtctgtgtagcatcttgccctgaggggaataatagtgaaaaaaatcaaagaatatcagaagcagtcttattcccatttgaaatgtatgtctaaacattgtatatatctgcttgtgagagtgaattaaattactaaaataaaaataaagtctaaaacacaccaaactattttgaaatattttgcacttttaaaatgctttactttttgtgtctttgaatacttttgtaattgttaaatgctttttcttttcttttttttaactatttctctgacagtaaataagtagtagtgtctttttcttcttacagtcaggaaaatggcgatgtcaaagacttaaaaagtcatttatcaaaccaaaactcaaactggcgatggagacacaaattgattagcaagcatcagtctaattatataggattc

SEQ ID NO: 344890 - DNA, 272 bp, Homo sapiens
tgatgctccagtggataactcagcatcccagcctaggcccaatgccactgaagatggacctgccccctggggacccaggagtcctaccactcagctgtccccaggagtgcccagaccctcattcttatccaggacctaggagccctacccctggccttccctcatcagccgtaaatgatgatttactgctgttaccatcatcactgccttcagtgaccaagggccttccaaggtgccagctctggaacgaaggatgcccttgggaggtgatg

SEQ ID NO: 344891 - DNA, 140 bp, Homo sapiens
gcggccgcctactactactactgctcgaattcaagcttctaacgatgtacggggacatgtaacaagtttctcaaaccaccaacagccaagtggatttggtacagtgcggctgtctaataaataatcaaaagcatttgata

SEQ ID NO: 344892 - DNA, 421 bp, Homo sapiens
  misc_feature (17)..(17): n is a, c, g, or t
  misc_feature (30)..(30): n is a, c, g, or t
ccacatacggctaggtncgaggctgggtgncggctatacaatctgaaaacacactggcaggtgctcctctccttggcaattcattgagtatccagagttctacgatgtttaactgaagaattggctaatgttttgatcctccagtgtgactgttgtttttgtttgggggtgggtttggggttttttgcttttttattcctgaagcttaccagatatgaatggctaatactccattgttctgcttgttgtaatggtgaatgctttaagaaaaaaaagtgtaatttgctaagaataattcatgatctgtttatgcgataactcctttttgttacaatttttttaaaaaaagctatttttgttaatgtaaagtaaatatttcagagcaaattttttaaacttattgcactaaatacaggctctg

SEQ ID NO: 344893 - DNA, 386 bp, Homo sapiens
atttcactttcacttcctctctctctctgtcttcactgactgcacttcttcaggagaagcttttgttatctgtatcacgcaggacatgctgctctttctgtttgtgtgcttacccatcacttggatggcagaattcttgtcacaactgagaccaccttctataaaactgaagaaaaggtgactggtctcatgagccctgaagaatgaactcagaggaggttgtttacatgaggttctcccactcaccagctgttgagagtctgcgattatgaagagcaggatcttattacttcaatgaaagcatgtaacaagtttctcaaaccaccaacagccaagtggatttggtacagtgcggctgtctaataaataatcaaaagcatttgata

SEQ ID NO: 344894 - DNA, 4564 bp, Homo sapiens
cagctgctgcagcaggagcagagcaggagacgcgtagccgccgtcgccgccgccgggggatgtggccggcgcctgcctctagccgcgccgcctcttgagtaccagccgccgctgcagccgccgccgccgcctagccgtgcggtgccaggccgcgccctccccgggcgcccgccggctcgcatgccgaggggctccggggcgtagctgcgcgcccggcgccgcctccgggctccttcggccccgccatgggctgctgcagctccgcctcctccgccgcgcagagctccaaacgagaatggaagccgctggaggaccgtagctgcacagacataccatggctgctgctcttcatcctcttctgcattgggatgggatttatttgtggcttttcaatagcaacaggtgcagcagcaagactagtgtcaggatacgacagctatggaaatatctgtgggcagaaaaatacaaagttggaagcaataccaaacagtggcatggaccacacccagcggaagtatgtattctttttggatccatgcaacctggacttgataaaccggaagattaagtctgtagcactgtgtgtagcagcgtgtccaaggcaagaactgaaaactctgagtgatgttcagaagtttgcagagataaatggttcagccctatgtagctacaacctaaagccttctgaatacactacatctccaaaatcttctgttctctgccccaaactaccagttccagcgagtgcacctattccattcttccatcgctgtgctcctgtgaacatttcctgctatgccaagtttgcagaggccctgatcacctttgtcagtgacaatagtgtcttacacaggctgattagtggagtaatgaccagcaaagaaattatattgggactttgcttgttatcactagttctatccatgattttgatggtgataatcaggtatatatcaagagtacttgtgtggatcttaacgattctggtcatactcggttcacttggaggcacaggtgtactatggtggctgtatgcaaagcaaagaaggtctcccaaagaaactgttactcctgagcagcttcagatagctgaagacaatcttcgggccctcctcatttatgccatttcagctacagtgttcacagtgatcttattcctgataatgttggttatgcgcaaacgtgttgctcttaccatcgccttgttccacgtagctggcaaggtcttcattcacttgccactgctagtcttccaacccttctggactttctttgctcttgtcttgttttgggtgtactggatcatgacacttctttttcttggcactaccggcagtcctgttcagaatgagcaaggctttgtggagttcaaaatttctgggcctctgcagtacatgtggtggtaccatgtggtgggcctgatttggatcagtgaatttattctagcatgtcagcagatgacagtggcaggagctgtggtaacatactattttactagggataaaaggaatttgccatttacacctattttggcatcagtaaatcgccttattcgttaccacctaggtacggtggcaaaaggatctttcattatcacattagtcaaaattccgcgaatgatccttatgtatattcacagtcagctcaaaggaaaggaaaatgcttgtgcacgatgtgtgctgaaatcttgcatttgttgcctttggtgtcttgaaaagtgcctaaattatttaaatcagaatgcatacacagccacagctatcaacagcaccaacttctgcacctcagcaaaggatgcctttgtcattctggtggagaatgctttgcgagtggctaccatcaacacagtaggagattttatgttattccttggcaaggtgctgatagtctgcagcacaggtttagctgggattatgctgctcaactaccagcaggactacacagtatgggtgctgcctctgatcatcgtctgcctctttgctttcctagtcgctcattgcttcctgtctatttatgaaatggtagtggatgtattattcttgtgttttgccattgatacaaaatacaatgatgggagccctggcagagaattctatatggataaagtgctgatggagtttgtggaaaacagtaggaaagcaatgaaagaagctggtaagggaggcgtcgctgattccagagagctaaagccgatggcttcgggagcaagttctgcttgaacctagccgacggttatggaaacccattgacattccaaaacaatatatacacataactatgtatttgtgtgtgtgggtgtgtgtatatatgtatatgtatgtgtgtatatatgtatatgtatatacacacacacacataaatcagccaaaatcagagaaaaggaacagggatttaataccttttttatgcttatttttgtcaaacatgtactcctttcatacgggtggcttttacaaggcaacttccgtcatttaatgttttcaactgtaattgtcttaatggaaatgttaaaattcatatctgattaacatttttaataacttagaggagattttaactttatttaaaaataggtaaaattattgtacctaattatgtctaaagtttattcaggggtaatttccctgatgtctgtataaaatcaagatcttattttactgatgcataagtcctagtgggtcaagactaggcatatgctttcagataaataaggaattactccaatcagttttccccaatcaaagaagccatgtcattttacttttagaaacatacaattgggcccaatatgggaattttcataatagttcatacatttgtcagccaacattaaaaggtaaccaactcctcaggtatttgtagtttaccctaacgcttctttaaaagaaagtaggtaaaaaaagaaaagggtagataatctttcgtatgcaaacttttcccttatattttgtctttctttcctttttgactttagtagcatcctccacacatttgtgtgcctgatttgaaaggaagctggggcacccagcgagtttagcctttaagtttctgtgtattgatttgcagattaagtaatgctgagaggaataaagaagggacagaaacatggaacataaagcattgaaaattccggtgcttgggcttcggcttcagagtaacgtcagtggcttagggttaaacggccattttattcaaatgcttgctatacaatctgaaaacacactggcaggtgctcctctccttggcaattcattgagtatccagagttctacgatgtttaactgaagaattggctaatgttttgatcctccagtgtgactgttgtttttgtttgggggtgggtttggggttttttgcttttttattcctgaagcttaccagatatgaatggctaatactccattgttctgcttgttgtaatggtgaatgctttaagaaaaaaaagtgtaatttgctaagaataattcatgatctgtttatgcgataactcctttttgttacaatttttttaaaaaaagctatttttgttaatgtaaagtaaatatttcagagcaaattttttaaacttattgcactaaatacaggctctgtacaaaaaaaaaaaaaaaaaaagcctcagcattttatcattccatggaaggagaatcttttgaaagaaagcattgcctcctaccagaactagacagtgaattagatcggtattatggaaatgcatacaagtaatgtcactagggcttaataagcagccgtttgctaatgtgcttcctttcaaagggttggacctttaaattgctgcaaaaggtaaattgtatttttttttaagtattggtgttctttactctagctaggctaaaatttgctaaatgccttggtttcttttaaaagttcatgtaatatttctgatttttcagaatatttgcaataagagtctggattttaaaaaacacatgcatacacacaattaagagctcatgtcttagcaagatctgggaaaccaacattgcgagagtagctattttgaaagaataattctccagaagttaacatctaatatctagtatcaccaaacagtatcgctgttctcttttattcatttgaaatgaatataattatataactaacaattgtccaaatagatgagagagcaaatcatgtgagaaaattcagaataccatctgtttcatagccgcacagattttggactttcacaaacattgggaactaaatttagaattggcaaaagtctagaagatgggtatcaaaacagaagacattccaggagctagcaattttaagaggtgtccctccaaagtgacctgatggaagtcctgaacttggaaattaggttctactcacttggacatccctgcatcatggactgttgctgctccctgttccatatgctcgcaatctcagctatttggaagctaccaggaatgctttctaattatcatttgcaactagaactgtaatcagaaagaaattttgtatttttgtataacttgattgtgtgccattttatataacaggtcctgttttacaaataaattttgttttactaaca

SEQ ID NO: 344895 - DNA, 4558 bp, Homo sapiens
cgcgaacgggaagactatcttgcgagttgctggacagaacgagtcgccccgttccagaacaggacatacgacgtcaccgcgccgcctcttgagtaccagccgccgctgcagccgccgccgccgcctagccgtgcggtgccaggccgcgccctccccgggcgcccgccggctcgcatgccgaggggctccggggcgtagctgcgcgcccggcgccgcctccgggctccttcggccccgccatgggctgctgcagctccgcctcctccgccgcgcagagctccaaacgagaatggaagccgctggaggaccgtagctgcacagacataccatggctgctgctcttcatcctcttctgcattgggatgggatttatttgtggcttttcaatagcaacaggtgcagcagcaagactagtgtcaggatacgacagctatggaaatatctgtgggcagaaaaatacaaagttggaagcaataccaaacagtggcatggaccacacccagcggaagtatgtattctttttggatccatgcaacctggacttgataaaccggaagattaagtctgtagcactgtgtgtagcagcgtgtccaaggcaagaactgaaaactctgagtgatgttcagaagtttgcagagataaatggttcagccctatgtagctacaacctaaagccttctgaatacactacatctccaaaatcttctgttctctgccccaaactaccagttccagcgagtgcacctattccattcttccatcgctgtgctcctgtgaacatttcctgctatgccaagtttgcagaggccctgatcacctttgtcagtgacaatagtgtcttacacaggctgattagtggagtaatgaccagcaaagaaattatattgggactttgcttgttatcactagttctatccatgattttgatggtgataatcaggtatatatcaagagtacttgtgtggatcttaacgattctggtcatactcggttcacttggaggcacaggtgtactatggtggctgtatgcaaagcaaagaaggtctcccaaagaaactgttactcctgagcagcttcagatagctgaagacaatcttcgggccctcctcatttatgccatttcagctacagtgttcacagtgatcttattcctgataatgttggttatgcgcaaacgtgttgctcttaccatcgccttgttccacgtagctggcaaggtcttcattcacttgccactgctagtcttccaacccttctggactttctttgctcttgtcttgttttgggtgtactggatcatgacacttctttttcttggcactaccggcagtcctgttcagaatgagcaaggctttgtggagttcaaaatttctgggcctctgcagtacatgtggtggtaccatgtggtgggcctgatttggatcagtgaatttattctagcatgtcagcagatgacagtggcaggagctgtggtaacatactattttactagggataaaaggaatttgccatttacacctattttggcatcagtaaatcgccttattcgttaccacctaggtacggtggcaaaaggatctttcattatcacattagtcaaaattccgcgaatgatccttatgtatattcacagtcagctcaaaggaaaggaaaatgcttgtgcacgatgtgtgctgaaatcttgcatttgttgcctttggtgtcttgaaaagtgcctaaattatttaaatcagaatgcatacacagccacagctatcaacagcaccaacttctgcacctcagcaaaggatgcctttgtcattctggtggagaatgctttgcgagtggctaccatcaacacagtaggagattttatgttattccttggcaaggtgctgatagtctgcagcacaggtttagctgggattatgctgctcaactaccagcaggactacacagtatgggtgctgcctctgatcatcgtctgcctctttgctttcctagtcgctcattgcttcctgtctatttatgaaatggtagtggatgtattattcttgtgttttgccattgatacaaaatacaatgatgggagccctggcagagaattctatatggataaagtgctgatggagtttgtggaaaacagtaggaaagcaatgaaagaagctggtaagggaggcgtcgctgattccagagagctaaagccgatggcttcgggagcaagttctgcttgaacctagccgacggttatggaaacccattgacattccaaaacaatatatacacataactatgtatttgtgtgtgtgggtgtgtgtatatatgtatatgtatgtgtgtatatatgtatatgtatatacacacacacacataaatcagccaaaatcagagaaaaggaacagggatttaataccttttttatgcttatttttgtcaaacatgtactcctttcatacgggtggcttttacaaggcaacttccgtcatttaatgttttcaactgtaattgtcttaatggaaatgttaaaattcatatctgattaacatttttaataacttagaggagattttaactttatttaaaaataggtaaaattattgtacctaattatgtctaaagtttattcaggggtaatttccctgatgtctgtataaaatcaagatcttattttactgatgcataagtcctagtgggtcaagactaggcatatgctttcagataaataaggaattactccaatcagttttccccaatcaaagaagccatgtcattttacttttagaaacatacaattgggcccaatatgggaattttcataatagttcatacatttgtcagccaacattaaaaggtaaccaactcctcaggtatttgtagtttaccctaacgcttctttaaaagaaagtaggtaaaaaaagaaaagggtagataatctttcgtatgcaaacttttcccttatattttgtctttctttcctttttgactttagtagcatcctccacacatttgtgtgcctgatttgaaaggaagctggggcacccagcgagtttagcctttaagtttctgtgtattgatttgcagattaagtaatgctgagaggaataaagaagggacagaaacatggaacataaagcattgaaaattccggtgcttgggcttcggcttcagagtaacgtcagtggcttagggttaaacggccattttattcaaatgcttgctatacaatctgaaaacacactggcaggtgctcctctccttggcaattcattgagtatccagagttctacgatgtttaactgaagaattggctaatgttttgatcctccagtgtgactgttgtttttgtttgggggtgggtttggggttttttgcttttttattcctgaagcttaccagatatgaatggctaatactccattgttctgcttgttgtaatggtgaatgctttaagaaaaaaaagtgtaatttgctaagaataattcatgatctgtttatgcgataactcctttttgttacaatttttttaaaaaaagctatttttgttaatgtaaagtaaatatttcagagcaaattttttaaacttattgcactaaatacaggctctgtacaaaaaaaaaaaaaaaaaaagcctcagcattttatcattccatggaaggagaatcttttgaaagaaagcattgcctcctaccagaactagacagtgaattagatcggtattatggaaatgcatacaagtaatgtcactagggcttaataagcagccgtttgctaatgtgcttcctttcaaagggttggacctttaaattgctgcaaaaggtaaattgtatttttttttaagtattggtgttctttactctagctaggctaaaatttgctaaatgccttggtttcttttaaaagttcatgtaatatttctgatttttcagaatatttgcaataagagtctggattttaaaaaacacatgcatacacacaattaagagctcatgtcttagcaagatctgggaaaccaacattgcgagagtagctattttgaaagaataattctccagaagttaacatctaatatctagtatcaccaaacagtatcgctgttctcttttattcatttgaaatgaatataattatataactaacaattgtccaaatagatgagagagcaaatcatgtgagaaaattcagaataccatctgtttcatagccgcacagattttggactttcacaaacattgggaactaaatttagaattggcaaaagtctagaagatgggtatcaaaacagaagacattccaggagctagcaattttaagaggtgtccctccaaagtgacctgatggaagtcctgaacttggaaattaggttctactcacttggacatccctgcatcatggactgttgctgctccctgttccatatgctcgcaatctcagctatttggaagctaccaggaatgctttctaattatcatttgcaactagaactgtaatcagaaagaaattttgtatttttgtataacttgattgtgtgccattttatataacaggtcctgttttacaaataaattttgttttactaaca

SEQ ID NO: 344896 - DNA, 4229 bp, Homo sapiens
gtatagagaatggaggagcagagttgctggtataagggatttatttgtggcttttcaatagcaacaggtgcagcagcaagactagtgtcaggatacgacagctatggaaatatctgtgggcagaaaaatacaaagttggaagcaataccaaacagtggcatggaccacacccagcggaagtatgtattctttttggatccatgcaacctggacttgataaaccggaagattaagtctgtagcactgtgtgtagcagcgtgtccaaggcaagaactgaaaactctgagtgatgttcagaagtttgcagagataaatggttcagccctatgtagctacaacctaaagccttctgaatacactacatctccaaaatcttctgttctctgccccaaactaccagttccagcgagtgcacctattccattcttccatcgctgtgctcctgtgaacatttcctgctatgccaagtttgcagaggccctgatcacctttgtcagtgacaatagtgtcttacacaggctgattagtggagtaatgaccagcaaagaaattatattgggactttgcttgttatcactagttctatccatgattttgatggtgataatcaggtatatatcaagagtacttgtgtggatcttaacgattctggtcatactcggttcacttggaggcacaggtgtactatggtggctgtatgcaaagcaaagaaggtctcccaaagaaactgttactcctgagcagcttcagatagctgaagacaatcttcgggccctcctcatttatgccatttcagctacagtgttcacagtgatcttattcctgataatgttggttatgcgcaaacgtgttgctcttaccatcgccttgttccacgtagctggcaaggtcttcattcacttgccactgctagtcttccaacccttctggactttctttgctcttgtcttgttttgggtgtactggatcatgacacttctttttcttggcactaccggcagtcctgttcagaatgagcaaggctttgtggagttcaaaatttctgggcctctgcagtacatgtggtggtaccatgtggtgggcctgatttggatcagtgaatttattctagcatgtcagcagatgacagtggcaggagctgtggtaacatactattttactagggataaaaggaatttgccatttacacctattttggcatcagtaaatcgccttattcgttaccacctaggtacggtggcaaaaggatctttcattatcacattagtcaaaattccgcgaatgatccttatgtatattcacagtcagctcaaaggaaaggaaaatgcttgtgcacgatgtgtgctgaaatcttgcatttgttgcctttggtgtcttgaaaagtgcctaaattatttaaatcagaatgcatacacagccacagctatcaacagcaccaacttctgcacctcagcaaaggatgcctttgtcattctggtggagaatgctttgcgagtggctaccatcaacacagtaggagattttatgttattccttggcaaggtgctgatagtctgcagcacaggtttagctgggattatgctgctcaactaccagcaggactacacagtatgggtgctgcctctgatcatcgtctgcctctttgctttcctagtcgctcattgcttcctgtctatttatgaaatggtagtggatgtattattcttgtgttttgccattgatacaaaatacaatgatgggagccctggcagagaattctatatggataaagtgctgatggagtttgtggaaaacagtaggaaagcaatgaaagaagctggtaagggaggcgtcgctgattccagagagctaaagccgatggcttcgggagcaagttctgcttgaacctagccgacggttatggaaacccattgacattccaaaacaatatatacacataactatgtatttgtgtgtgtgggtgtgtgtatatatgtatatgtatgtgtgtatatatgtatatgtatatacacacacacacataaatcagccaaaatcagagaaaaggaacagggatttaataccttttttatgcttatttttgtcaaacatgtactcctttcatacgggtggcttttacaaggcaacttccgtcatttaatgttttcaactgtaattgtcttaatggaaatgttaaaattcatatctgattaacatttttaataacttagaggagattttaactttatttaaaaataggtaaaattattgtacctaattatgtctaaagtttattcaggggtaatttccctgatgtctgtataaaatcaagatcttattttactgatgcataagtcctagtgggtcaagactaggcatatgctttcagataaataaggaattactccaatcagttttccccaatcaaagaagccatgtcattttacttttagaaacatacaattgggcccaatatgggaattttcataatagttcatacatttgtcagccaacattaaaaggtaaccaactcctcaggtatttgtagtttaccctaacgcttctttaaaagaaagtaggtaaaaaaagaaaagggtagataatctttcgtatgcaaacttttcccttatattttgtctttctttcctttttgactttagtagcatcctccacacatttgtgtgcctgatttgaaaggaagctggggcacccagcgagtttagcctttaagtttctgtgtattgatttgcagattaagtaatgctgagaggaataaagaagggacagaaacatggaacataaagcattgaaaattccggtgcttgggcttcggcttcagagtaacgtcagtggcttagggttaaacggccattttattcaaatgcttgctatacaatctgaaaacacactggcaggtgctcctctccttggcaattcattgagtatccagagttctacgatgtttaactgaagaattggctaatgttttgatcctccagtgtgactgttgtttttgtttgggggtgggtttggggttttttgcttttttattcctgaagcttaccagatatgaatggctaatactccattgttctgcttgttgtaatggtgaatgctttaagaaaaaaaagtgtaatttgctaagaataattcatgatctgtttatgcgataactcctttttgttacaatttttttaaaaaaagctatttttgttaatgtaaagtaaatatttcagagcaaattttttaaacttattgcactaaatacaggctctgtacaaaaaaaaaaaaaaaaaaagcctcagcattttatcattccatggaaggagaatcttttgaaagaaagcattgcctcctaccagaactagacagtgaattagatcggtattatggaaatgcatacaagtaatgtcactagggcttaataagcagccgtttgctaatgtgcttcctttcaaagggttggacctttaaattgctgcaaaaggtaaattgtatttttttttaagtattggtgttctttactctagctaggctaaaatttgctaaatgccttggtttcttttaaaagttcatgtaatatttctgatttttcagaatatttgcaataagagtctggattttaaaaaacacatgcatacacacaattaagagctcatgtcttagcaagatctgggaaaccaacattgcgagagtagctattttgaaagaataattctccagaagttaacatctaatatctagtatcaccaaacagtatcgctgttctcttttattcatttgaaatgaatataattatataactaacaattgtccaaatagatgagagagcaaatcatgtgagaaaattcagaataccatctgtttcatagccgcacagattttggactttcacaaacattgggaactaaatttagaattggcaaaagtctagaagatgggtatcaaaacagaagacattccaggagctagcaattttaagaggtgtccctccaaagtgacctgatggaagtcctgaacttggaaattaggttctactcacttggacatccctgcatcatggactgttgctgctccctgttccatatgctcgcaatctcagctatttggaagctaccaggaatgctttctaattatcatttgcaactagaactgtaatcagaaagaaattttgtatttttgtataacttgattgtgtgccattttatataacaggtcctgttttacaaataaattttgttttactaaca

SEQ ID NO: 344897 - DNA, 4505 bp, Homo sapiens
cagctgctgcagcaggagcagagcaggagacgcgtagccgccgtcgccgccgccgggggatgtggccggcgcctgcctctagccgcgccgcctcttgagtaccagccgccgctgcagccgccgccgccgcctagccgtgcggtgccaggccgcgccctccccgggcgcccgccggctcgcatgccgaggggctccggggcgtagctgcgcgcccggcgccgcctccgggctccttcggccccgccatgggctgctgcagctccgcctcctccgccgcgcagagctccaaacgagaatggaagccgctggaggaccgtagctgcacagacataccatggctgctgctcttcatcctcttctgcattgggatgggatttatttgtggcttttcaatagcaacaggtgcagcagcaagactagtgtcaggatacgacagctatggaaatatctgtgggcagaaaaatacaaagttggaagcaataccaaacagtggcatggaccacacccagcggaagtatgtattctttttggatccatgcaacctggacttgataaaccggaagattaagtctgtagcactgtgtgtagcagcgtgtccaaggcaagaactgaaaactctgagtgatgttcagaagtttgcagagataaatggttcagccctatgtagctacaacctaaagccttctgaatacactacatctccaaaatcttctgttctctgccccaaactaccagttccagcgagtgcacctattccattcttccatcgctgtgctcctgtgaacatttcctgctatgccaagtttgcagaggccctgatcacctttgtcagtgacaatagtgtcttacacaggctgattagtggagtaatgaccagcaaagaaattatattgggactttgcttgttatcactagttctatccatgattttgatggtgataatcaggtatatatcaagagtacttgtgtggatcttaacgattctggtcatactcggttcacttggaggcacaggtgtactatggtggctgtatgcaaagcaaagaaggtctcccaaagaaactgttactcctgagcagcttcagagtgatcttattcctgataatgttggttatgcgcaaacgtgttgctcttaccatcgccttgttccacgtagctggcaaggtcttcattcacttgccactgctagtcttccaacccttctggactttctttgctcttgtcttgttttgggtgtactggatcatgacacttctttttcttggcactaccggcagtcctgttcagaatgagcaaggctttgtggagttcaaaatttctgggcctctgcagtacatgtggtggtaccatgtggtgggcctgatttggatcagtgaatttattctagcatgtcagcagatgacagtggcaggagctgtggtaacatactattttactagggataaaaggaatttgccatttacacctattttggcatcagtaaatcgccttattcgttaccacctaggtacggtggcaaaaggatctttcattatcacattagtcaaaattccgcgaatgatccttatgtatattcacagtcagctcaaaggaaaggaaaatgcttgtgcacgatgtgtgctgaaatcttgcatttgttgcctttggtgtcttgaaaagtgcctaaattatttaaatcagaatgcatacacagccacagctatcaacagcaccaacttctgcacctcagcaaaggatgcctttgtcattctggtggagaatgctttgcgagtggctaccatcaacacagtaggagattttatgttattccttggcaaggtgctgatagtctgcagcacaggtttagctgggattatgctgctcaactaccagcaggactacacagtatgggtgctgcctctgatcatcgtctgcctctttgctttcctagtcgctcattgcttcctgtctatttatgaaatggtagtggatgtattattcttgtgttttgccattgatacaaaatacaatgatgggagccctggcagagaattctatatggataaagtgctgatggagtttgtggaaaacagtaggaaagcaatgaaagaagctggtaagggaggcgtcgctgattccagagagctaaagccgatggcttcgggagcaagttctgcttgaacctagccgacggttatggaaacccattgacattccaaaacaatatatacacataactatgtatttgtgtgtgtgggtgtgtgtatatatgtatatgtatgtgtgtatatatgtatatgtatatacacacacacacataaatcagccaaaatcagagaaaaggaacagggatttaataccttttttatgcttatttttgtcaaacatgtactcctttcatacgggtggcttttacaaggcaacttccgtcatttaatgttttcaactgtaattgtcttaatggaaatgttaaaattcatatctgattaacatttttaataacttagaggagattttaactttatttaaaaataggtaaaattattgtacctaattatgtctaaagtttattcaggggtaatttccctgatgtctgtataaaatcaagatcttattttactgatgcataagtcctagtgggtcaagactaggcatatgctttcagataaataaggaattactccaatcagttttccccaatcaaagaagccatgtcattttacttttagaaacatacaattgggcccaatatgggaattttcataatagttcatacatttgtcagccaacattaaaaggtaaccaactcctcaggtatttgtagtttaccctaacgcttctttaaaagaaagtaggtaaaaaaagaaaagggtagataatctttcgtatgcaaacttttcccttatattttgtctttctttcctttttgactttagtagcatcctccacacatttgtgtgcctgatttgaaaggaagctggggcacccagcgagtttagcctttaagtttctgtgtattgatttgcagattaagtaatgctgagaggaataaagaagggacagaaacatggaacataaagcattgaaaattccggtgcttgggcttcggcttcagagtaacgtcagtggcttagggttaaacggccattttattcaaatgcttgctatacaatctgaaaacacactggcaggtgctcctctccttggcaattcattgagtatccagagttctacgatgtttaactgaagaattggctaatgttttgatcctccagtgtgactgttgtttttgtttgggggtgggtttggggttttttgcttttttattcctgaagcttaccagatatgaatggctaatactccattgttctgcttgttgtaatggtgaatgctttaagaaaaaaaagtgtaatttgctaagaataattcatgatctgtttatgcgataactcctttttgttacaatttttttaaaaaaagctatttttgttaatgtaaagtaaatatttcagagcaaattttttaaacttattgcactaaatacaggctctgtacaaaaaaaaaaaaaaaaaaagcctcagcattttatcattccatggaaggagaatcttttgaaagaaagcattgcctcctaccagaactagacagtgaattagatcggtattatggaaatgcatacaagtaatgtcactagggcttaataagcagccgtttgctaatgtgcttcctttcaaagggttggacctttaaattgctgcaaaaggtaaattgtatttttttttaagtattggtgttctttactctagctaggctaaaatttgctaaatgccttggtttcttttaaaagttcatgtaatatttctgatttttcagaatatttgcaataagagtctggattttaaaaaacacatgcatacacacaattaagagctcatgtcttagcaagatctgggaaaccaacattgcgagagtagctattttgaaagaataattctccagaagttaacatctaatatctagtatcaccaaacagtatcgctgttctcttttattcatttgaaatgaatataattatataactaacaattgtccaaatagatgagagagcaaatcatgtgagaaaattcagaataccatctgtttcatagccgcacagattttggactttcacaaacattgggaactaaatttagaattggcaaaagtctagaagatgggtatcaaaacagaagacattccaggagctagcaattttaagaggtgtccctccaaagtgacctgatggaagtcctgaacttggaaattaggttctactcacttggacatccctgcatcatggactgttgctgctccctgttccatatgctcgcaatctcagctatttggaagctaccaggaatgctttctaattatcatttgcaactagaactgtaatcagaaagaaattttgtatttttgtataacttgattgtgtgccattttatataacaggtcctgttttacaaataaattttgttttactaaca

SEQ ID NO: 344898 - DNA, 4518 bp, Homo sapiens
cagctgctgcagcaggagcagagcaggagacgcgtagccgccgtcgccgccgccgggggatgtggccggcgcctgcctctagccgcgccgcctcttgagtaccagccgccgctgcagccgccgccgccgcctagccgtgcggtgccaggccgcgccctccccgggcgcccgccggctcgcatgccgaggggctccggggcgtagctgcgcgcccggcgccgcctccgggctccttcggccccgccatgggctgctgcagctccgcctcctccgccgcgcagagctccaaacgagaatggaagccgctggaggaccgtagctgcacagacataccatggctgctgctcttcatcctcttctgcattgggatgggatttatttgtggcttttcaatagcaacaggtgcagcagcaagactagtgtcaggatacgacagctatggaaatatctgtgggcagaaaaatacaaagttggaagcaataccaaacagtggcatggaccacacccagcggaagtatgtattctttttggatccatgcaacctggacttgataaaccggaagattaagtctgtagcactgtgtgtagcagcgtgtccaaggcaagaactgaaaactctgagtgatgttcagaagtttgcagagataaatggttcagccctatgtagctacaacctaaagccttctgaatacactacattgcacctattccattcttccatcgctgtgctcctgtgaacatttcctgctatgccaagtttgcagaggccctgatcacctttgtcagtgacaatagtgtcttacacaggctgattagtggagtaatgaccagcaaagaaattatattgggactttgcttgttatcactagttctatccatgattttgatggtgataatcaggtatatatcaagagtacttgtgtggatcttaacgattctggtcatactcggttcacttggaggcacaggtgtactatggtggctgtatgcaaagcaaagaaggtctcccaaagaaactgttactcctgagcagcttcagatagctgaagacaatcttcgggccctcctcatttatgccatttcagctacagtgttcacagtgatcttattcctgataatgttggttatgcgcaaacgtgttgctcttaccatcgccttgttccacgtagctggcaaggtcttcattcacttgccactgctagtcttccaacccttctggactttctttgctcttgtcttgttttgggtgtactggatcatgacacttctttttcttggcactaccggcagtcctgttcagaatgagcaaggctttgtggagttcaaaatttctgggcctctgcagtacatgtggtggtaccatgtggtgggcctgatttggatcagtgaatttattctagcatgtcagcagatgacagtggcaggagctgtggtaacatactattttactagggataaaaggaatttgccatttacacctattttggcatcagtaaatcgccttattcgttaccacctaggtacggtggcaaaaggatctttcattatcacattagtcaaaattccgcgaatgatccttatgtatattcacagtcagctcaaaggaaaggaaaatgcttgtgcacgatgtgtgctgaaatcttgcatttgttgcctttggtgtcttgaaaagtgcctaaattatttaaatcagaatgcatacacagccacagctatcaacagcaccaacttctgcacctcagcaaaggatgcctttgtcattctggtggagaatgctttgcgagtggctaccatcaacacagtaggagattttatgttattccttggcaaggtgctgatagtctgcagcacaggtttagctgggattatgctgctcaactaccagcaggactacacagtatgggtgctgcctctgatcatcgtctgcctctttgctttcctagtcgctcattgcttcctgtctatttatgaaatggtagtggatgtattattcttgtgttttgccattgatacaaaatacaatgatgggagccctggcagagaattctatatggataaagtgctgatggagtttgtggaaaacagtaggaaagcaatgaaagaagctggtaagggaggcgtcgctgattccagagagctaaagccgatggcttcgggagcaagttctgcttgaacctagccgacggttatggaaacccattgacattccaaaacaatatatacacataactatgtatttgtgtgtgtgggtgtgtgtatatatgtatatgtatgtgtgtatatatgtatatgtatatacacacacacacataaatcagccaaaatcagagaaaaggaacagggatttaataccttttttatgcttatttttgtcaaacatgtactcctttcatacgggtggcttttacaaggcaacttccgtcatttaatgttttcaactgtaattgtcttaatggaaatgttaaaattcatatctgattaacatttttaataacttagaggagattttaactttatttaaaaataggtaaaattattgtacctaattatgtctaaagtttattcaggggtaatttccctgatgtctgtataaaatcaagatcttattttactgatgcataagtcctagtgggtcaagactaggcatatgctttcagataaataaggaattactccaatcagttttccccaatcaaagaagccatgtcattttacttttagaaacatacaattgggcccaatatgggaattttcataatagttcatacatttgtcagccaacattaaaaggtaaccaactcctcaggtatttgtagtttaccctaacgcttctttaaaagaaagtaggtaaaaaaagaaaagggtagataatctttcgtatgcaaacttttcccttatattttgtctttctttcctttttgactttagtagcatcctccacacatttgtgtgcctgatttgaaaggaagctggggcacccagcgagtttagcctttaagtttctgtgtattgatttgcagattaagtaatgctgagaggaataaagaagggacagaaacatggaacataaagcattgaaaattccggtgcttgggcttcggcttcagagtaacgtcagtggcttagggttaaacggccattttattcaaatgcttgctatacaatctgaaaacacactggcaggtgctcctctccttggcaattcattgagtatccagagttctacgatgtttaactgaagaattggctaatgttttgatcctccagtgtgactgttgtttttgtttgggggtgggtttggggttttttgcttttttattcctgaagcttaccagatatgaatggctaatactccattgttctgcttgttgtaatggtgaatgctttaagaaaaaaaagtgtaatttgctaagaataattcatgatctgtttatgcgataactcctttttgttacaatttttttaaaaaaagctatttttgttaatgtaaagtaaatatttcagagcaaattttttaaacttattgcactaaatacaggctctgtacaaaaaaaaaaaaaaaaaaagcctcagcattttatcattccatggaaggagaatcttttgaaagaaagcattgcctcctaccagaactagacagtgaattagatcggtattatggaaatgcatacaagtaatgtcactagggcttaataagcagccgtttgctaatgtgcttcctttcaaagggttggacctttaaattgctgcaaaaggtaaattgtatttttttttaagtattggtgttctttactctagctaggctaaaatttgctaaatgccttggtttcttttaaaagttcatgtaatatttctgatttttcagaatatttgcaataagagtctggattttaaaaaacacatgcatacacacaattaagagctcatgtcttagcaagatctgggaaaccaacattgcgagagtagctattttgaaagaataattctccagaagttaacatctaatatctagtatcaccaaacagtatcgctgttctcttttattcatttgaaatgaatataattatataactaacaattgtccaaatagatgagagagcaaatcatgtgagaaaattcagaataccatctgtttcatagccgcacagattttggactttcacaaacattgggaactaaatttagaattggcaaaagtctagaagatgggtatcaaaacagaagacattccaggagctagcaattttaagaggtgtccctccaaagtgacctgatggaagtcctgaacttggaaattaggttctactcacttggacatccctgcatcatggactgttgctgctccctgttccatatgctcgcaatctcagctatttggaagctaccaggaatgctttctaattatcatttgcaactagaactgtaatcagaaagaaattttgtatttttgtataacttgattgtgtgccattttatataacaggtcctgttttacaaataaattttgttttactaaca

SEQ ID NO: 344899 - DNA, 4394 bp, Homo sapiens
cagctgctgcagcaggagcagagcaggagacgcgtagccgccgtcgccgccgccgggggatgtggccggcgcctgcctctagccgcgccgcctcttgagtaccagccgccgctgcagccgccgccgccgcctagccgtgcggtgccaggccgcgccctccccgggcgcccgccggctcgcatgccgaggggctccggggcgtagctgcgcgcccggcgccgcctccgggctccttcggccccgccatgggctgctgcagctccgcctcctccgccgcgcagagctccaaacgagaatggaagccgctggaggaccgtagctgcacagacataccatggctgctgctcttcatcctcttctgcattgggatgggatttatttgtggcttttcaatagcaacaggtgcagcagcaagactagtgtcaggatacgacagctatggaaatatctgtgggcagaaaaatacaaagttggaagcaataccaaacagtggcatggaccacacccagcggaagtatgtattctttttggatccatgcaacctggacttgataaaccggaagattaagtctgtagcactgtgtgtagcagcgtgtccaaggcaagaactgaaaactctgagtgatgttcagaagtttgcagagataaatggttcagccctatgtagctacaacctaaagccttctgaatacactacatctccaaaatcttctgttctctgccccaaactaccagttccagcgagttctatccatgattttgatggtgataatcaggtatatatcaagagtacttgtgtggatcttaacgattctggtcatactcggttcacttggaggcacaggtgtactatggtggctgtatgcaaagcaaagaaggtctcccaaagaaactgttactcctgagcagcttcagatagctgaagacaatcttcgggccctcctcatttatgccatttcagctacagtgttcacagtgatcttattcctgataatgttggttatgcgcaaacgtgttgctcttaccatcgccttgttccacgtagctggcaaggtcttcattcacttgccactgctagtcttccaacccttctggactttctttgctcttgtcttgttttgggtgtactggatcatgacacttctttttcttggcactaccggcagtcctgttcagaatgagcaaggctttgtggagttcaaaatttctgggcctctgcagtacatgtggtggtaccatgtggtgggcctgatttggatcagtgaatttattctagcatgtcagcagatgacagtggcaggagctgtggtaacatactattttactagggataaaaggaatttgccatttacacctattttggcatcagtaaatcgccttattcgttaccacctaggtacggtggcaaaaggatctttcattatcacattagtcaaaattccgcgaatgatccttatgtatattcacagtcagctcaaaggaaaggaaaatgcttgtgcacgatgtgtgctgaaatcttgcatttgttgcctttggtgtcttgaaaagtgcctaaattatttaaatcagaatgcatacacagccacagctatcaacagcaccaacttctgcacctcagcaaaggatgcctttgtcattctggtggagaatgctttgcgagtggctaccatcaacacagtaggagattttatgttattccttggcaaggtgctgatagtctgcagcacaggtttagctgggattatgctgctcaactaccagcaggactacacagtatgggtgctgcctctgatcatcgtctgcctctttgctttcctagtcgctcattgcttcctgtctatttatgaaatggtagtggatgtattattcttgtgttttgccattgatacaaaatacaatgatgggagccctggcagagaattctatatggataaagtgctgatggagtttgtggaaaacagtaggaaagcaatgaaagaagctggtaagggaggcgtcgctgattccagagagctaaagccgatggcttcgggagcaagttctgcttgaacctagccgacggttatggaaacccattgacattccaaaacaatatatacacataactatgtatttgtgtgtgtgggtgtgtgtatatatgtatatgtatgtgtgtatatatgtatatgtatatacacacacacacataaatcagccaaaatcagagaaaaggaacagggatttaataccttttttatgcttatttttgtcaaacatgtactcctttcatacgggtggcttttacaaggcaacttccgtcatttaatgttttcaactgtaattgtcttaatggaaatgttaaaattcatatctgattaacatttttaataacttagaggagattttaactttatttaaaaataggtaaaattattgtacctaattatgtctaaagtttattcaggggtaatttccctgatgtctgtataaaatcaagatcttattttactgatgcataagtcctagtgggtcaagactaggcatatgctttcagataaataaggaattactccaatcagttttccccaatcaaagaagccatgtcattttacttttagaaacatacaattgggcccaatatgggaattttcataatagttcatacatttgtcagccaacattaaaaggtaaccaactcctcaggtatttgtagtttaccctaacgcttctttaaaagaaagtaggtaaaaaaagaaaagggtagataatctttcgtatgcaaacttttcccttatattttgtctttctttcctttttgactttagtagcatcctccacacatttgtgtgcctgatttgaaaggaagctggggcacccagcgagtttagcctttaagtttctgtgtattgatttgcagattaagtaatgctgagaggaataaagaagggacagaaacatggaacataaagcattgaaaattccggtgcttgggcttcggcttcagagtaacgtcagtggcttagggttaaacggccattttattcaaatgcttgctatacaatctgaaaacacactggcaggtgctcctctccttggcaattcattgagtatccagagttctacgatgtttaactgaagaattggctaatgttttgatcctccagtgtgactgttgtttttgtttgggggtgggtttggggttttttgcttttttattcctgaagcttaccagatatgaatggctaatactccattgttctgcttgttgtaatggtgaatgctttaagaaaaaaaagtgtaatttgctaagaataattcatgatctgtttatgcgataactcctttttgttacaatttttttaaaaaaagctatttttgttaatgtaaagtaaatatttcagagcaaattttttaaacttattgcactaaatacaggctctgtacaaaaaaaaaaaaaaaaaaagcctcagcattttatcattccatggaaggagaatcttttgaaagaaagcattgcctcctaccagaactagacagtgaattagatcggtattatggaaatgcatacaagtaatgtcactagggcttaataagcagccgtttgctaatgtgcttcctttcaaagggttggacctttaaattgctgcaaaaggtaaattgtatttttttttaagtattggtgttctttactctagctaggctaaaatttgctaaatgccttggtttcttttaaaagttcatgtaatatttctgatttttcagaatatttgcaataagagtctggattttaaaaaacacatgcatacacacaattaagagctcatgtcttagcaagatctgggaaaccaacattgcgagagtagctattttgaaagaataattctccagaagttaacatctaatatctagtatcaccaaacagtatcgctgttctcttttattcatttgaaatgaatataattatataactaacaattgtccaaatagatgagagagcaaatcatgtgagaaaattcagaataccatctgtttcatagccgcacagattttggactttcacaaacattgggaactaaatttagaattggcaaaagtctagaagatgggtatcaaaacagaagacattccaggagctagcaattttaagaggtgtccctccaaagtgacctgatggaagtcctgaacttggaaattaggttctactcacttggacatccctgcatcatggactgttgctgctccctgttccatatgctcgcaatctcagctatttggaagctaccaggaatgctttctaattatcatttgcaactagaactgtaatcagaaagaaattttgtatttttgtataacttgattgtgtgccattttatataacaggtcctgttttacaaataaattttgttttactaaca

SEQ ID NO: 344900 - DNA, 4509 bp, Homo sapiens
cagctgctgcagcaggagcagagcaggagacgcgtagccgccgtcgccgccgccgggggatgtggccggcgcctgcctctagccgcgccgcctcttgagtaccagccgccgctgcagccgccgccgccgcctagccgtgcggtgccaggccgcgccctccccgggcgcccgccggctcgcatgccgaggggctccggggcgtagctgcgcgcccggcgccgcctccgggctccttcggccccgccatgggctgctgcagctccgcctcctccgccgcgcagagctccaaacgagaatggaagccgctggaggaccgtagctgcacagacataccatggctgctgctcttcatcctcttctgcattgggatgggatttatttgtggcttttcaatagcaacaggtgcagcagcaagactagtgtcaggatacgacagctatggaaatatctgtgggcagaaaaatacaaagttggaagcaataccaaacagtggcatggaccacacccagcggaagtatgtattctttttggatccatgcaacctggacttgataaaccggaagattaagtctgtagcactgtgtgtagcagcgtgtccaaggcaagaactgaaaactctgagtgatgttcagaagtttgcagagataaatggttcagccctatgtagctacaacctaaagccttctgaatacactacatctccaaaatcttctgttctctgccccaaactaccagttccagcgagtgcacctattccattcttccatcgctgtgctcctgtgaacatttcctgctatgccaagtttgcagaggccctgatcacctttgtcagtgacaatagtgtcttacacaggctgattagtggagtaatgaccagcaaagaaattatattgggactttgcttgttatcactagttctatccatgattttgatggtgataatcaggtatatatcaagagtacttgtgtggatcttaacgattctggtcatactcggttcacttggaggcacaggtgtactatggtggctgtatgcaaagcaaagaaggtctcccaaagaaactgttactcctgagcagcttcagatagctgaagacaatcttcgggccctcctcatttatgccatttcagctacagtgttcacagtgatcttattcctgataatgttggttatgcgcaaacgtgttgctcttaccatcgccttgttccacgtagctggcaaggtcttcattcacttgccactgctagtcttccaacccttctggactttctttgctcttgtcttgttttgggtgtactggatcatgacacttctttttcttggcactaccggcagtcctgttcagaatgagcaaggctttgtggagttcaaaatttctgggcctctgcagtacatgtggtggtaccatgtggtgggcctgatttggatcagtgaatttattctagcatgtcagcagatgacagtggcaggagctgtggtaacatactattttactagggataaaaggaatttgccatttacacctattttggcatcagtaaatcgccttattcgttaccacctaggtacggtggcaaaaggatctttcattatcacattagtcaaaattccgcgaatgatccttatgtatattcacagtcagctcaaaggaaaggaaaatgcttgtgcacgatgtgtgctgaaatcttgcatttgttgcctttggtgtcttgaaaagtgcctaaattatttaaatcagaatgcatacacagccacagctatcaacagcaccaacttctgcacctcagcaaaggatgcctttgtcattctggtggagaatgctttgcgagtggctaccatcaacacagtaggagattttatgttattccttggcaaggtgctgatagtctgcagcacaggtttagctgggattatgctgctcaactaccagcaggactacacagtatgggtgctgcctctgatcatcgtctgcctctttgctttcctagtcgctcattgcttcctgtctatttatgaaatggtagtggatgtattattcttgtgttttgccattgatacaaaatacaatgatgggagccctggcagagaattctatatggataaagtgctgatgagtttgtgggagagctaaagccgatggcttcgggagcaagttctgcttgaacctagccgacggttatggaaacccattgacattccaaaacaatatatacacataactatgtatttgtgtgtgtgggtgtgtgtatatatgtatatgtatgtgtgtatatatgtatatgtatatacacacacacacataaatcagccaaaatcagagaaaaggaacagggatttaataccttttttatgcttatttttgtcaaacatgtactcctttcatacgggtggcttttacaaggcaacttccgtcatttaatgttttcaactgtaattgtcttaatggaaatgttaaaattcatatctgattaacatttttaataacttagaggagattttaactttatttaaaaataggtaaaattattgtacctaattatgtctaaagtttattcaggggtaatttccctgatgtctgtataaaatcaagatcttattttactgatgcataagtcctagtgggtcaagactaggcatatgctttcagataaataaggaattactccaatcagttttccccaatcaaagaagccatgtcattttacttttagaaacatacaattgggcccaatatgggaattttcataatagttcatacatttgtcagccaacattaaaaggtaaccaactcctcaggtatttgtagtttaccctaacgcttctttaaaagaaagtaggtaaaaaaagaaaagggtagataatctttcgtatgcaaacttttcccttatattttgtctttctttcctttttgactttagtagcatcctccacacatttgtgtgcctgatttgaaaggaagctggggcacccagcgagtttagcctttaagtttctgtgtattgatttgcagattaagtaatgctgagaggaataaagaagggacagaaacatggaacataaagcattgaaaattccggtgcttgggcttcggcttcagagtaacgtcagtggcttagggttaaacggccattttattcaaatgcttgctatacaatctgaaaacacactggcaggtgctcctctccttggcaattcattgagtatccagagttctacgatgtttaactgaagaattggctaatgttttgatcctccagtgtgactgttgtttttgtttgggggtgggtttggggttttttgcttttttattcctgaagcttaccagatatgaatggctaatactccattgttctgcttgttgtaatggtgaatgctttaagaaaaaaaagtgtaatttgctaagaataattcatgatctgtttatgcgataactcctttttgttacaatttttttaaaaaaagctatttttgttaatgtaaagtaaatatttcagagcaaattttttaaacttattgcactaaatacaggctctgtacaaaaaaaaaaaaaaaaaaagcctcagcattttatcattccatggaaggagaatcttttgaaagaaagcattgcctcctaccagaactagacagtgaattagatcggtattatggaaatgcatacaagtaatgtcactagggcttaataagcagccgtttgctaatgtgcttcctttcaaagggttggacctttaaattgctgcaaaaggtaaattgtatttttttttaagtattggtgttctttactctagctaggctaaaatttgctaaatgccttggtttcttttaaaagttcatgtaatatttctgatttttcagaatatttgcaataagagtctggattttaaaaaacacatgcatacacacaattaagagctcatgtcttagcaagatctgggaaaccaacattgcgagagtagctattttgaaagaataattctccagaagttaacatctaatatctagtatcaccaaacagtatcgctgttctcttttattcatttgaaatgaatataattatataactaacaattgtccaaatagatgagagagcaaatcatgtgagaaaattcagaataccatctgtttcatagccgcacagattttggactttcacaaacattgggaactaaatttagaattggcaaaagtctagaagatgggtatcaaaacagaagacattccaggagctagcaattttaagaggtgtccctccaaagtgacctgatggaagtcctgaacttggaaattaggttctactcacttggacatccctgcatcatggactgttgctgctccctgttccatatgctcgcaatctcagctatttggaagctaccaggaatgctttctaattatcatttgcaactagaactgtaatcagaaagaaattttgtatttttgtataacttgattgtgtgccattttatataacaggtcctgttttacaaataaattttgttttactaaca

SEQ ID NO: 344901 - DNA, 3590 bp, Homo sapiens
cagctgctgcagcaggagcagagcaggagacgcgtagccgccgtcgccgccgccgggggatgtggccggcgcctgcctctagccgcgccgcctcttgagtaccagccgccgctgcagccgccgccgccgcctagccgtgcggtgccaggccgcgccctccccgggcgcccgccggctcgcatgccgaggggctccggggcgtagctgcgcgcccggcgccgcctccgggctccttcggccccgccatgggctgctgcagctccgcctcctccgccgcgcagagctccaaacgagaatggaagccgctggaggaccgtagctgcacagacataccatggctgctgctcttcatcctcttctgcattgggatgggatttatttgtggcttttcaatagcaacaggtgcagcagcaagactagtgtcaggatacgacagctatggaaatatctgtgggcagaaaaatacaaagttggaagcaataccaaacagtggcatggaccacacccagcggaagtatgtattctttttggatccatgcaacctggacttgataaaccggaagattaagtctgtagcactgtgtgtagcagcgtgtccaaggcaagaactgaaaactctgagtgatgttcagaagtttgcagagataaatggttcagccctatgtagctacaacctaaagccttctgaatacactacatctccaaaatcttctgttctctgccccaaactaccagttccagcgagtgcacctattccattcttccatcgctgtgctcctgtgaacatttcctgctatgccaagtttgcagaggccctgatcacctttgtcagtgacaatagtgtcttacacaggctgattagtggagtaatgaccagcaaagaaattatattgggactttgcttgttatcactagttctatccatgattttgatggtgataatcaggtatatatcaagagtacttgtgtggatcttaacgattctggtcatactcggttcacttggaggcacaggtgtactatggtggctgtatgcaaagcaaagaaggtctcccaaagaaactgttactcctgagcagcttcagatagctgaagacaatcttcgggccctcctcatttatgccatttcagctacagtgttcacagtgatcttattcctgataatgttggttatgcgcaaacgtgttgctcttaccatcgccttgttccacgtagctggcaaggtcttcattcacttgccactgctagtcttccaacccttctggactttctttgctcttgtcttgttttgggtgtactggatcatgacacttctttttcttggcactaccggcagtcctgttcagaatgagcaaggctttgtggagttcaaaatttctgggcctctgcagtacatgtggtggtaccatgtggtgggcctgatttggatcagtgaatttattctagcatgtcagcagatgacagtggcaggagctgtggtaacatactattttactagggataaaaggaatttgccatttacacctattttggcatcagtaaatcgccttattcgttaccacctaggtacggtggcaaaaggatctttcattatcacattagtcaaaattccgcgaatgatccttatgtatattcacagtcagctcaaaggaaaggaaaatgcttgtgcacgatgtgtgctgaaatcttgcatttgttgcctttggtgtcttgaaaagtgcctaaattatttaaatcagaatgcatacacagccacagctatcaacagcaccaacttctgcacctcagcaaaggatgcctttgtcattctggtggagaatgctttgcgagtggctaccatcaacacagtaggagattttatgttattccttggcaaggtgctgatagtctgcagcacaggtttagctgggattatgctgctcaactaccagcaggactacacagtatgggtgctgcctctgatcatcgtctgcctctttgctttcctagtcgctcattgcttcctgtctatttatgaaatggtagtggatgtattattcttgtgttttgccattgatacaaaatacaatgatgggagccctggcagagaattctatatggataaagtgctgatggagtttgtggaaaacagtaggaaagcaatgaaagaagctggtaagggaggcgtcgctgattccagagagctaaagccgatggcttcgggagcaagttctgcttgaacctagccgacggttatggaaacccattgacattccaaaacaatatatacacataactatgtatttgtgtgtgtgggtgtgtgtatatatgtatatgtatgtgtgtatatatgtatatgtatatacacacacacacataaatcagccaaaatcagagaaaaggaacagggatttaataccttttttatgcttatttttgtcaaacatgtactcctttcatacgggtggcttttacaaggcaacttccgtcatttaatgttttcaactgtaattgtcttaatggaaatgttaaaattcatatctgattaacatttttaataacttagaggagattttaactttatttaaaaataggtaaaattattgtacctaattatgtctaaagtttattcaggggtaatttccctgatgtctgtataaaatcaagatcttattttactgatgcataagtcctagtgggtcaagactaggcatatgctttcagataaataaggaattactccaatcagttttccccaatcaaagaagccatgtcattttacttttagaaacatacaattgggcccaatatgggaattttcataatagttcatacatttgtcagccaacattaaaaggtaaccaactcctcaggtatttgtagtttaccctaacgcttctttaaaagaaagtaggtaaaaaaagaaaagggtagataatctttcgtatgcaaacttttcccttatattttgtctttctttcctttttgactttagtagcatcctccacacatttgtgtgcctgatttgaaaggaagctggggcacccagcgagtttagcctttaagtttctgtgtattgatttgcagattaagtaatgctgagaggaataaagaagggacagaaacatggaacataaagcattgaaaattccggtgcttgggcttcggcttcagagtaacgtcagtggcttagggttaaacggccattttattcaaatgcttgctatacaatctgaaaacacactggcaggtgctcctctccttggcaattcattgagtatccagagttctacgatgtttaactgaagaattggctaatgttttgatcctccagtgtgactgttgtttttgtttgggggtgggtttggggttttttgcttttttattcctgaagcttaccagatatgaatggctaatactccattgttctgcttgttgtaatggtgaatgctttaagaaaaaaaagtgtaatttgctaagaataattcatgatctgtttatgcgataactcctttttgttacaatttttttaaaaaaagctatttttgttaatgtaaagtaaatatttcagagcaaattttttaaacttattgcactaaatacaggctctg

SEQ ID NO: 344902 - DNA, 4601 bp, Homo sapiens
cagctgctgcagcaggagcagagcaggagacgcgtagccgccgtcgccgccgccgggggatgtggccggcgcctgcctctagccgcgccgcctcttgagtaccagccgccgctgcagccgccgccgccgcctagccgtgcggtgccaggccgcgccctccccgggcgcccgccggctcgcatgccgaggggctccggggcgtagctgcgcgcccggcgccgcctccgggctccttcggccccgccatgggctgctgcagctccgcctcctccgccgcgcagagctccaaacgagaatggaagccgctggaggaccgtagctgcacagacataccatggctgctgctcttcatcctcttctgcattgggatgggatttatttgtggcttttcaatagcaacaggtgcagcagcaagactagtgtcaggatacgacagctatggaaatatctgtgggcagaaaaatacaaagttggaagcaataccaaacagtggcatggaccacacccagcggaagtatgtattctttttggatccatgcaacctggacttgataaaccggaagattaagtctgtagcactgtgtgtagcagcgtgtccaaggcaagaactgaaaactctgagtgatgttcagaagtttgcagagataaatggttcagccctatgtagctacaacctaaagccttctgaatacactacatctccaaaatcttctgttctctgccccaaactaccagttccagcgagtgcacctattccattcttccatcgctgtgctcctgtgaacatttcctgctatgccaagtttgcagaggccctgatcacctttgtcagtgacaatagtgtcttacacaggctgattagtggagtaatgaccagcaaagaaattatattgggactttgcttgttatcactagttctatccatgattttgatggtgataatcaggtatatatcaagagtacttgtgtggatcttaacgattctggtcatactcggttcacttggaggcacaggtgtactatggtggctgtatgcaaagcaaagaaggtctcccaaagaaactgttactcctgagcagcttcagatagctgaagacaatcttcgggccctcctcatttatgccatttcagctacagtgttcacagtgatcttattcctgataatgttggttatgcgcaaacgtgttgctcttaccatcgccttgttccacgtagctggcaaggtcttcattcacttgccactgctagtcttccaacccttctggactttctttgctcttgtcttgttttgggtgtactggatcatgacacttctttttcttggcactaccggcagtcctgttcagaatgagcaaggctttgtggagttcaaaatttctgggcctctgcagtacatgtggtggtaccatgtggtgggcctgatttggatcagtgaatttattctagcatgtcagcagatgacagtggcaggagctgtggtaacatactattttactagggataaaaggaatttgccatttacacctattttggcatcagtaaatcgccttattcgttaccacctaggtacggtggcaaaaggatctttcattatcacattagtcaaaattccgcgaatgatccttatgtatattcacagtcagctcaaaggaaaggaaaatgcttgtgcacgatgtgtgctgaaatcttgcatttgttgcctttggtgtcttgaaaagtgcctaaattatttaaatcagaatgcatacacagccacagctatcaacagcaccaacttctgcacctcagcaaaggatgcctttgtcattctggtggagaatgctttgcgagtggctaccatcaacacagtaggagattttatgttattccttggcaaggtgctgatagtctgcagcacaggtttagctgggattatgctgctcaactaccagcaggactacacagtatgggtgctgcctctgatcatcgtctgcctctttgctttcctagtcgctcattgcttcctgtctatttatgaaatggtagtggatgtattattcttgtgttttgccattgatacaaaatacaatgatgggagccctggcagagaattctatatggataaagtgctgatggagtttgtggaaaacagtaggaaagcaatgaaagaagctggtaagggaggcgtcgctgattccagagagctaaagccgatggcttcgggagcaagttctgcttgaacctagccgacggttatggaaacccattgacattccaaaacaatatatacacataactatgtatttgtgtgtgtgggtgtgtgtatatatgtatatgtatgtgtgtatatatgtatatgtatatacacacacacacataaatcagccaaaatcagagaaaaggaacagggatttaataccttttttatgcttatttttgtcaaacatgtactcctttcatacgggtggcttttacaaggcaacttccgtcatttaatgttttcaactgtaattgtcttaatggaaatgttaaaattcatatctgattaacatttttaataacttagaggagattttaactttatttaaaaataggtaaaattattgtacctaattatgtctaaagtttattcaggggtaatttccctgatgtctgtataaaatcaagatcttattttactgatgcataagtcctagtgggtcaagactaggcatatgctttcagataaataaggaattactccaatcagttttccccaatcaaagaagccatgtcattttacttttagaaacatacaattgggcccaatatgggaattttcataatagttcatacatttgtcagccaacattaaaaggtaaccaactcctcaggtatttgtagtttaccctaacgcttctttaaaagaaagtaggtaaaaaaagaaaagggtagataatctttcgtatgcaaacttttcccttatattttgtctttctttcctttttgactttagtagcatcctccacacatttgtgtgcctgatttgaaaggaagctggggcacccagcgagtttagcctttaagtttctgtgtattgatttgcagattaagtaatgctgagaggaataaagaagggacagaaacatggaacataaagcattgaaaattccggtgcttgggcttcggcttcagagtaacgtcagtggcttagggttaaacggccattttattcaaatgcttgctatacaatctgaaaacacactggcaggtgctcctctccttggcaattcattgagtatccagagttctacgatgtttaactgaagaattggctaatgttttgatcctccagtgtgactgttgtttttgtttgggggtgggtttggggttttttgcttttttattcctgaagcttaccagatatgaatggctaatactccattgttctgcttgttgtaatggtgaatgctttaagaaaaaaaagtgtaatttgctaagaataattcatgatctgtttatgcgataactcctttttgttacaatttttttaaaaaaagctatttttgttaatgtaaagtaaatatttcagagcaaattttttaaacttattgcactaaatacaggctctgtacaaaaaaaaaaaaaaaaaaagcctcagcattttatcattccatggaaggagaatcttttgaaagaaagcattgcctcctaccagaactagacagtgaattagatcggtattatggaaatgcatacaagtaatgtcactagggcttaataagcagccgtttgctaatgtgcttcctttcaaagggttggacctttaaattgctgcaaaaggtaaattgtatttttttttaagtattggtgttctttactctagctaggctaaaatttgctaaatgccttggtttcttttaaaagttcatgtaatatttctgatttttcagaatatttgcaataagagtctggattttaaaaaacacatgcatacacacaattaagagctcatgtcttagcaagatctgggaaaccaacattgcgagagtagctattttgaaagaataattctccagaagttaacatctaatatctagtatcaccaaacagtatcgctgttctcttttattcatttgaaatgaatataattatataactaacaattgtccaaatagatgagagagcaaatcatgtgagaaaattcagaataccatctgtttcatagccgcacagattttggactttcacaaacattgggaactaaatttagaattggcaaaagtctagaagatgggtatcaaaacagaagacattccaggagctagcaattttaagaggtgtccctccaaagtgacctgatggaagtcctgaacttggaaattaggttctactcacttggacatccctgcatcatggactgttgctgctccctgttccatatgctcgcaatctcagctatttggaagctaccaggaatgctttctaattatcatttgcaactagaactgtaatcagaaagaaattttgtatttttgtataacttgattgtgtgccattttatataacaggtcctgttttacaaataaattttgttttactaacattgtgtttagaaattataatctatgtgtaaccatgaa

SEQ ID NO: 344903 - DNA, 2535 bp, Homo sapiens
atttcactttcacttcctctctctctctgtcttcactgactgcacttcttcaggagaagcttttgttatctgtatcacgcaggacatgctgctctttctgtttgtgtgcttacccatcacttggatggcagaattcttgtcacaactgagaccaccttctataaaagcttcgggagcaagttctgcttgaacctagccgacggttatggaaacccattgacattccaaaacaatatatacacataactatgtatttgtgtgtgtgggtgtgtgtatatatgtatatgtatgtgtgtatatatgtatatgtatatacacacacacacataaatcagccaaaatcagagaaaaggaacagggatttaataccttttttatgcttatttttgtcaaacatgtactcctttcatacgggtggcttttacaaggcaacttccgtcatttaatgttttcaactgtaattgtcttaatggaaatgttaaaattcatatctgattaacatttttaataacttagaggagattttaactttatttaaaaataggtaaaattattgtacctaattatgtctaaagtttattcaggggtaatttccctgatgtctgtataaaatcaagatcttattttactgatgcataagtcctagtgggtcaagactaggcatatgctttcagataaataaggaattactccaatcagttttccccaatcaaagaagccatgtcattttacttttagaaacatacaattgggcccaatatgggaattttcataatagttcatacatttgtcagccaacattaaaaggtaaccaactcctcaggtatttgtagtttaccctaacgcttctttaaaagaaagtaggtaaaaaaagaaaagggtagataatctttcgtatgcaaacttttcccttatattttgtctttctttcctttttgactttagtagcatcctccacacatttgtgtgcctgatttgaaaggaagctggggcacccagcgagtttagcctttaagtttctgtgtattgatttgcagattaagtaatgctgagaggaataaagaagggacagaaacatggaacataaagcattgaaaattccggtgcttgggcttcggcttcagagtaacgtcagtggcttagggttaaacggccattttattcaaatgcttgctatacaatctgaaaacacactggcaggtgctcctctccttggcaattcattgagtatccagagttctacgatgtttaactgaagaattggctaatgttttgatcctccagtgtgactgttgtttttgtttgggggtgggtttggggttttttgcttttttattcctgaagcttaccagatatgaatggctaatactccattgttctgcttgttgtaatggtgaatgctttaagaaaaaaaagtgtaatttgctaagaataattcatgatctgtttatgcgataactcctttttgttacaatttttttaaaaaaagctatttttgttaatgtaaagtaaatatttcagagcaaattttttaaacttattgcactaaatacaggctctgtacaaaaaaaaaaaaaaaaaaagcctcagcattttatcattccatggaaggagaatcttttgaaagaaagcattgcctcctaccagaactagacagtgaattagatcggtattatggaaatgcatacaagtaatgtcactagggcttaataagcagccgtttgctaatgtgcttcctttcaaagggttggacctttaaattgctgcaaaaggtaaattgtatttttttttaagtattggtgttctttactctagctaggctaaaatttgctaaatgccttggtttcttttaaaagttcatgtaatatttctgatttttcagaatatttgcaataagagtctggattttaaaaaacacatgcatacacacaattaagagctcatgtcttagcaagatctgggaaaccaacattgcgagagtagctattttgaaagaataattctccagaagttaacatctaatatctagtatcaccaaacagtatcgctgttctcttttattcatttgaaatgaatataattatataactaacaattgtccaaatagatgagagagcaaatcatgtgagaaaattcagaataccatctgtttcatagccgcacagattttggactttcacaaacattgggaactaaatttagaattggcaaaagtctagaagatgggtatcaaaacagaagacattccaggagctagcaattttaagaggtgtccctccaaagtgacctgatggaagtcctgaacttggaaattaggttctactcacttggacatccctgcatcatggactgttgctgctccctgttccatatgctcgcaatctcagctatttggaagctaccaggaatgctttctaattatcatttgcaactagaactgtaatcagaaagaaattttgtatttttgtataacttgattgtgtgccattttatataacaggtcctgttttacaaataaattttgttttactaaca

SEQ ID NO: 344904 - DNA, 2458 bp, Homo sapiens
gtgaccatgtgtatatttgtaacatcattcatgatctccttttaatggtaattgtctaagattatactctgtatgactttgttttctaggcttcgggagcaagttctgcttgaacctagccgacggttatggaaacccattgacattccaaaacaatatatacacataactatgtatttgtgtgtgtgggtgtgtgtatatatgtatatgtatgtgtgtatatatgtatatgtatatacacacacacacataaatcagccaaaatcagagaaaaggaacagggatttaataccttttttatgcttatttttgtcaaacatgtactcctttcatacgggtggcttttacaaggcaacttccgtcatttaatgttttcaactgtaattgtcttaatggaaatgttaaaattcatatctgattaacatttttaataacttagaggagattttaactttatttaaaaataggtaaaattattgtacctaattatgtctaaagtttattcaggggtaatttccctgatgtctgtataaaatcaagatcttattttactgatgcataagtcctagtgggtcaagactaggcatatgctttcagataaataaggaattactccaatcagttttccccaatcaaagaagccatgtcattttacttttagaaacatacaattgggcccaatatgggaattttcataatagttcatacatttgtcagccaacattaaaaggtaaccaactcctcaggtatttgtagtttaccctaacgcttctttaaaagaaagtaggtaaaaaaagaaaagggtagataatctttcgtatgcaaacttttcccttatattttgtctttctttcctttttgactttagtagcatcctccacacatttgtgtgcctgatttgaaaggaagctggggcacccagcgagtttagcctttaagtttctgtgtattgatttgcagattaagtaatgctgagaggaataaagaagggacagaaacatggaacataaagcattgaaaattccggtgcttgggcttcggcttcagagtaacgtcagtggcttagggttaaacggccattttattcaaatgcttgctatacaatctgaaaacacactggcaggtgctcctctccttggcaattcattgagtatccagagttctacgatgtttaactgaagaattggctaatgttttgatcctccagtgtgactgttgtttttgtttgggggtgggtttggggttttttgcttttttattcctgaagcttaccagatatgaatggctaatactccattgttctgcttgttgtaatggtgaatgctttaagaaaaaaaagtgtaatttgctaagaataattcatgatctgtttatgcgataactcctttttgttacaatttttttaaaaaaagctatttttgttaatgtaaagtaaatatttcagagcaaattttttaaacttattgcactaaatacaggctctgtacaaaaaaaaaaaaaaaaaaagcctcagcattttatcattccatggaaggagaatcttttgaaagaaagcattgcctcctaccagaactagacagtgaattagatcggtattatggaaatgcatacaagtaatgtcactagggcttaataagcagccgtttgctaatgtgcttcctttcaaagggttggacctttaaattgctgcaaaaggtaaattgtatttttttttaagtattggtgttctttactctagctaggctaaaatttgctaaatgccttggtttcttttaaaagttcatgtaatatttctgatttttcagaatatttgcaataagagtctggattttaaaaaacacatgcatacacacaattaagagctcatgtcttagcaagatctgggaaaccaacattgcgagagtagctattttgaaagaataattctccagaagttaacatctaatatctagtatcaccaaacagtatcgctgttctcttttattcatttgaaatgaatataattatataactaacaattgtccaaatagatgagagagcaaatcatgtgagaaaattcagaataccatctgtttcatagccgcacagattttggactttcacaaacattgggaactaaatttagaattggcaaaagtctagaagatgggtatcaaaacagaagacattccaggagctagcaattttaagaggtgtccctccaaagtgacctgatggaagtcctgaacttggaaattaggttctactcacttggacatccctgcatcatggactgttgctgctccctgttccatatgctcgcaatctcagctatttggaagctaccaggaatgctttctaattatcatttgcaactagaactgtaatcagaaagaaattttgtatttttgtataacttgattgtgtgccattttatataacaggtcctgttttacaaataaattttgttttactaaca

SEQ ID NO: 344905 - DNA, 4510 bp, Homo sapiens
cagctgctgcagcaggagcagagcaggagacgcgtagccgccgtcgccgccgccgggggatgtggccggcgcctgcctctagccgcgccgcctcttgagtaccagccgccgctgcagccgccgccgccgcctagccgtgcggtgccaggccgcgccctccccgggcgcccgccggctcgcatgccgaggggctccggggcgtagctgcgcgcccggcgccgcctccgggctccttcggccccgccatgggctgctgcagctccgcctcctccgccgcgcagagctccaaacgagaatggaagccgctggaggaccgtagctgcacagacataccatggctgctgctcttcatcctcttctgcattgggatgggatttatttgtggcttttcaatagcaacaggtgcagcagcaagactagtgtcaggatacgacagctatggaaatatctgtgggcagaaaaatacaaagttggaagcaataccaaacagtggcatggaccacacccagcggaagtatgtattctttttggatccatgcaacctggacttgataaaccggaagattaagtctgtagcactgtgtgtagcagcgtgtccaaggcaagaactgaaaactctgagtgatgttcagaagtttgcagagataaatggttcagccctatgtagctacaacctaaagccttctgaatacactacatctccaaaatcttctgttctctgccccaaactaccagttccagcgagtgcacctattccattcttccatcgctgtgctcctgtgaacatttcctgctatgccaagtttgcagaggccctgatcacctttgtcagtgacaatagtgtcttacacaggctgattagtggagtaatgaccagcaaagaaattatattgggactttgcttgttatcactagttctatccatgattttgatggtgataatcaggtatatatcaagagtacttgtgtggatcttaacgattctggtcatactcggttcacttggaggcacaggtgtactatggtggctgtatgcaaagcaaagaaggtctcccaaagaaactgttactcctgagcagcttcagatagctgaagacaatcttcgggccctcctcatttatgccatttcagctacagtgttcacagtgatcttattcctgataatgttggttatgcgcaaacgtgttgctcttaccatcgccttgttccacgtagctggcaaggtcttcattcacttgccactgctagtcttccaacccttctggactttctttgctcttgtcttgttttgggtgtactggatcatgacacttctttttcttggcactaccggcagtcctgttcagaatgagcaaggctttgtggagttcaaaatttctgggcctctgcagtacatgtggtggtaccatgtggtgggcctgatttggatcagtgaatttattctagcatgtcagcagatgacagtggcaggagctgtggtaacatactattttactagggataaaaggaatttgccatttacacctattttggcatcagtaaatcgccttattcgttaccacctaggtacggtggcaaaaggatctttcattatcacattagtcaaaattccgcgaatgatccttatgtatattcacagtcagctcaaaggaaaggaaaatgcttgtgcacgatgtgtgctgaaatcttgcatttgttgcctttggtgtcttgaaaagtgcctaaattatttaaatcagaatgcatacacagccacagctatcaacagcaccaacttctgcacctcagcaaaggatgcctttgtcattctggtggagaatgctttgcgagtggctaccatcaacacagtaggagattttatgttattccttggcaaggtgctgatagtctgcagcacaggtttagctgggattatgctgctcaactaccagcaggactacacagtatgggtgctgcctctgatcatcgtctgcctctttgctttcctagtcgctcattgcttcctgtctatttatgaaatggtagtggatgtattattcttgtgttttgccattgatacaaaatacaatgatgggagccctggcagagaattctatatggataaagtgctgatggagtttgtggaaaacagtaggaaagcaatgaaagaagctggtaagggaggcgtcgctgattccagagagctaaagccgatggcttcgggagcaagttctgcttgaacctagccgacggttatggaaacccattgacattccaaaacaatatatacacataactatgtatttgtgtgtgtgggtgtgtgtatatatgtatatgtatgtgtgtatatatgtatatgtatatacacacacacacataaatcagccaaaatcagagaaaaggaacagggatttaataccttttttatgcttatttttgtcaaacatgtactcctttcatacgggtggcttttacaaggcaacttccgtcatttaatgttttcaactgtaattgtcttaatggaaatgttaaaattcatatctgattaacatttttaataacttagaggagattttaactttatttaaaaataggtaaaattattgtacctaattatgtctaaagtttattcaggggtaatttccctgatgtctgtataaaatcaagatcttattttactgatgcataagtcctagtgggtcaagactaggcatatgctttcagataaataaggaattactccaatcagttttccccaatcaaagaagccatgtcattttacttttagaaacatacaattgggcccaatatgggaattttcataatagttcatacatttgtcagccaacattaaaaggtaaccaactcctcaggtatttgtagtttaccctaacgcttctttaaaagaaagtaggtaaaaaaagaaaagggtagataatctttcgtatgcaaacttttcccttatattttgtctttctttcctttttgactttagtagcatcctccacacatttgtgtgcctgatttgaaaggaagctggggcacccagcgagtttagcctttaagtttctgtgtattgatttgcagattaagtaatgctgagaggaataaagaagggacagaaacatggaacataaagcattgaaaattccggtgcttgggcttcggcttcagagtaacgtcagtggcttagggttaaacggccattttattcaaatgcttgctatacaatctgaaaacacactggcaggtgctcctctccttggcaattcattgagtatccagagttctacgatgtttaactgaagaattggctaatgttttgatcctccagtgtgactgttgtttttgtttgggggtgggtttggggttttttgcttttttattcctgaagcttaccagatatgaatggctaatactccattgttctgcttgttgtaatggtgaatgctttaagaaaaaaaagtgtaatttgctaagaataattcatgatctgtttatgcgataactcctttttgttacaatttttttaaaaaaagctatttttgttaatgtaaagtaaatatttcagagcaaattttttaaacttattgcactaaatacaggctctgtacaaaaaaaaaaaaaaaaaaagcctcagcattttatcattccatggaaggagaatcttttgaaagaaagcattgcctcctaccagaactagacagtgaattagatcggtattatggaaatgcatacaagtaatgtcactagggcttaataagcagccgtttgctaatgtgcttcctttcaaagggttggacctttaaattgctgcaaaaggtaaattgtatttttttttaagtattggtgttctttactctagctaggctaaaatttgctaaatgccttggtttcttttaaaagttcatgtaatatttctgatttttcagaatatttgcaataagagtctggattttaaaaaacacatgcatacacacaattaagagctcatgtcttagcaagatctgggaaaccaacattgcgagagtagctattttgaaagaataattctccagaagttaacatctaatatctagtatcaccaaacagtatcgctgttctcttttattcatttgaaatgaatataattatataactaacaattgtccaaatagatgagagagcaaatcatgtgagaaaattcagaataccatctgtttcatagccgcacagattttggactttcacaaacattgggaactaaatttagaattggcaaaagtctagaagatgggtatgacctgatggaagtcctgaacttggaaattaggttctactcacttggacatccctgcatcatggactgttgctgctccctgttccatatgctcgcaatctcagctatttggaagctaccaggaatgctttctaattatcatttgcaactagaactgtaatcagaaagaaattttgtatttttgtataacttgattgtgtgccattttatataacaggtcctgttttacaaataaattttgttttactaaca

SEQ ID NO: 344906 - DNA, 4126 bp, Homo sapiens
cagctgctgcagcaggagcagagcaggagacgcgtagccgccgtcgccgccgccgggggatgtggccggcgcctgcctctagccgcgccgcctcttgagtaccagccgccgctgcagccgccgccgccgcctagccgtgcggtgccaggccgcgccctccccgggcgcccgccggctcgcatgccgaggggctccggggcgtagctgcgcgcccggcgccgcctccgggctccttcggccccgccatgggctgctgcagctccgcctcctccgccgcgcagagctccaaacgagaatggaagccgctggaggaccgtagctgcacagacataccatggctgctgctcttcatcctcttctgcattgggatgggatttatttgtggcttttcaatagcaacaggtgcagcagcaagactagtgtcaggatacgacagctatggaaatatctgtgggcagaaaaatacaaagttggaagcaataccaaacagtggcatggaccacacccagcggaagtatgtattctttttggatccatgcaacctggacttgataaaccggaagattaagtctgtagcactgtgtgtagcagcgtgtccaaggcaagaactgaaaactctgagtgatgttcagaagtttgcagagataaatggttcagccctatgtagctacaacctaaagccttctgaatacactacatctccaaaatcttctgttctctgccccaaactaccagttccagcgagtgcacctattccattcttccatcgctgtgctcctgtgaacatttcctgctatgccaagtttgcagaggccctgatcacctttgtcagtgacaatagtgtcttacacaggctgattagtggagtaatgaccagcaaagaaattatattgggactttgcttgttatcactagttctatccatgattttgatggtgataatcaggtatatatcaagagtacttgtgtggatcttaacgattctggtcatactcggttcacttggaggcacaggtgtactatggtggctgtatgcaaagcaaagaaggtctcccaaagaaactgttactcctgagcagcttcagatagctgaagacaatcttcgggccctcctcatttatgccatttcagctacagtgttcacagtgatcttattcctgataatgttggttatgcgcaaacgtgttgctcttaccatcgccttgttccacgtagctggcaaggtcttcattcacttgccactgctagtcttccaacccttctggactttctttgctcttgtcttgttttgggtgtactggatcatgacacttctttttcttggcactaccggcagtcctgttcagaatgagcaaggctttgtggagttcaaaatttctgggcctctgcagtacatgtggtggtaccatgtggtgggcctgatttggatcagtgaatttattctagcatgtcagcagatgacagtggcaggagctgtggtaacatactattttactagggataaaaggaatttgccatttacacctattttggcatcagtaaatcgccttattcgttaccacctaggtacggtggcaaaaggatctttcattatcacattagtcaaaattccgcgaatgatccttatgtatattcacagtcagctcaaaggaaaggaaaatgcttgtgcacgatgtgtgctgaaatcttgcatttgttgcctttggtgtcttgaaaagtgcctaaattatttaaatcagaatgcatacacagccacagctatcaacagcaccaacttctgcacctcagcaaaggatgcctttgtcattctggtggagaatgctttgcgagtggctaccatcaacacagtaggagattttatgttattccttggcaaggtgctgatagtctgcagcacaggtttagctgggattatgctgctcaactaccagcaggactacacagtatgggtgctgcctctgatcatcgtctgcctctttgctttcctagtcgctcattgcttcctgtctatttatgaaatggtagtggatgtattattcttgtgttttgccattgatacaaaatacaatgatgggagccctggcagagaattctatatggataaagtgctgatggagtttgtggaaaacagtaggaaagcaatgaaagaagctggtaagggaggcgtcgctgattccagagagctaaagccgatggcttcgggagcaagttctgcttgaacctagccgacggttatggaaacccattgacattccaaaacaatatatacacataactatgtatttgtgtgtgtgggtgtgtgtatatatgtatatgtatgtgtgtatatatgtatatgtatatacacacacacacataaatcagccaaaatcagagaaaaggaacagggatttaataccttttttatgcttatttttgtcaaacatgtactcctttcatacgggtggcttttacaaggcaacttccgtcatttaatgttttcaactgtaattgtcttaatggaaatgttaaaattcatatctgattaacatttttaataacttagaggagattttaactttatttaaaaataggtaaaattattgtacctaattatgtctaaagtttattcaggggtaatttccctgatgtctgtataaaatcaagatcttattttactgatgcataagtcctagtgggtcaagactaggcatatgctttcagataaataaggaattactccaatcagttttccccaatcaaagaagccatgtcattttacttttagaaacatacaattgggcccaatatgggaattttcataatagttcatacatttgtcagccaacattaaaaggtaaccaactcctcaggtatttgtagtttaccctaacgcttctttaaaagaaagtaggtaaaaaaagaaaagggtagataatctttcgtatgcaaacttttcccttatattttgtctttctttcctttttgactttagtagcatcctccacacatttgtgtgcctgatttgaaaggaagctggggcacccagcgagtttagcctttaagtttctgtgtattgatttgcagattaagtaatgctgagaggaataaagaagggacagaaacatggaacataaagcattgaaaattccggtgcttgggcttcggcttcagagtaacgtcagtggcttagggttaaacggccattttattcaaatgcttgctatacaatctgaaaacacactggcaggtgctcctctccttggcaattcattgagtatccagagttctacgatgtttaactgaagaattggctaatgttttgatcctccagtgtgactgttgtttttgtttgggggtgggtttggggttttttgcttttttattcctgaagcttaccagatatgaatggctaatactccattgttctgcttgttgtaatggtgaatgctttaagaaaaaaaagtgtaatttgctaagaataattcatgatctgtttatgcgataactcctttttgttacaatttttttaaaaaaagctatttttgttaatgtaaagtaaatatttcagagcaaattttttaaacttattgcactaaatacaggctctgtacaaaaaaaaaaaaaaaaaaaaagaggcccaagacgatttagagtccccggggacgggcacaaatcttcgcgaacaaaaggcattgggcccctctaacgaagaacgtagaaacgcgggcaatcgaacccgggactagcggaacagggctctacaccgagtcagtggcccagagggggcaacaaaaagcaacacgtgtgtgctaaaggggagactacacattcacaagcgggtgggccctcaaaactgtggcggcccacaggggccacacgggtatgctgtggaacaacgactatgcagggcgacacaaaacacccagaagccagtgggggcacaaaatctgcggaaacagcgccgccgggaggcctcacgccagcaaaagcgccgactagaaacaacagcgcgcgagagatcccacacaaatcgtcgcgccaaagaacgcggcgaaacgtaaaaaccaacacgtgaacaaccaaagtagaagaagcgcaactcggtcagcaaccaagcacccggggaacgacacacctttgcgca

SEQ ID NO: 344907 - DNA, 4266 bp, Homo sapiens
  misc_feature (4266)..(4266): n is a, c, g, or t
cagctgctgcagcaggagcagagcaggagacgcgtagccgccgtcgccgccgccgggggatgtggccggcgcctgcctctagccgcgccgcctcttgagtaccagccgccgctgcagccgccgccgccgcctagccgtgcggtgccaggccgcgccctccccgggcgcccgccggctcgcatgccgaggggctccggggcgtagctgcgcgcccggcgccgcctccgggctccttcggccccgccatgggctgctgcagctccgcctcctccgccgcgcagagctccaaacgagaatggaagccgctggaggaccgtagctgcacagacataccatggctgctgctcttcatcctcttctgcattgggatgggatttatttgtggcttttcaatagcaacaggtgcagcagcaagactagtgtcaggatacgacagctatggaaatatctgtgggcagaaaaatacaaagttggaagcaataccaaacagtggcatggaccacacccagcggaagtatgtattctttttggatccatgcaacctggacttgataaaccggaagattaagtctgtagcactgtgtgtagcagcgtgtccaaggcaagaactgaaaactctgagtgatgttcagaagtttgcagagataaatggttcagccctatgtagctacaacctaaagccttctgaatacactacatctccaaaatcttctgttctctgccccaaactaccagttccagcgagtgcacctattccattcttccatcgctgtgctcctgtgaacatttcctgctatgccaagtttgcagaggccctgatcacctttgtcagtgacaatagtgtcttacacaggctgattagtggagtaatgaccagcaaagaaattatattgggactttgcttgttatcactagttctatccatgattttgatggtgataatcaggtatatatcaagagtacttgtgtggatcttaacgattctggtcatactcggttcacttggaggcacaggtgtactatggtggctgtatgcaaagcaaagaaggtctcccaaagaaactgttactcctgagcagcttcagatagctgaagacaatcttcgggccctcctcatttatgccatttcagctacagtgttcacagtgatcttattcctgataatgttggttatgcgcaaacgtgttgctcttaccatcgccttgttccacgtagctggcaaggtcttcattcacttgccactgctagtcttccaacccttctggactttctttgctcttgtcttgttttgggtgtactggatcatgacacttctttttcttggcactaccggcagtcctgttcagaatgagcaaggctttgtggagttcaaaatttctgggcctctgcagtacatgtggtggtaccatgtggtgggcctgatttggatcagtgaatttattctagcatgtcagcagatgacagtggcaggagctgtggtaacatactattttactagggataaaaggaatttgccatttacacctattttggcatcagtaaatcgccttattcgttaccacctaggtacggtggcaaaaggatctttcattatcacattagtcaaaattccgcgaatgatccttatgtatattcacagtcagctcaaaggaaaggaaaatgcttgtgcacgatgtgtgctgaaatcttgcatttgttgcctttggtgtcttgaaaagtgcctaaattatttaaatcagaatgcatacacagccacagctatcaacagcaccaacttctgcacctcagcaaaggatgcctttgtcattctggtggagaatgctttgcgagtggctaccatcaacacagtaggagattttatgttattccttggcaaggtgctgatagtctgcagcacaggtttagctgggattatgctgctcaactaccagcaggactacacagtatgggtgctgcctctgatcatcgtctgcctctttgctttcctagtcgctcattgcttcctgtctatttatgaaatggtagtggatgtattattcttgtgttttgccattgatacaaaatacaatgatgggagccctggcagagaattctatatggataaagtgctgatggagtttgtggaaaacagtaggaaagcaatgaaagaagctggtaagggaggcgtcgctgattccagagagctaaagccgatggcttcgggagcaagttctgcttgaacctagccgacggttatggaaacccattgacattccaaaacaatatatacacataactatgtatttgtgtgtgtgggtgtgtgtatatatgtatatgtatgtgtgtatatatgtatatgtatatacacacacacacataaatcagccaaaatcagagaaaaggaacagggatttaataccttttttatgcttatttttgtcaaacatgtactcctttcatacgggtggcttttacaaggcaacttccgtcatttaatgttttcaactgtaattgtcttaatggaaatgttaaaattcatatctgattaacatttttaataacttagaggagattttaactttatttaaaaataggtaaaattattgtacctaattatgtctaaagtttattcaggggtaatttccctgatgtctgtataaaatcaagatcttattttactgatgcataagtcctagtgggtcaagactaggcatatgctttcagataaataaggaattactccaatcagttttccccaatcaaagaagccatgtcattttacttttagaaacatacaattgggcccaatatgggaattttcataatagttcatacatttgtcagccaacattaaaaggtaaccaactcctcaggtatttgtagtttaccctaacgcttctttaaaagaaagtaggtaaaaaaagaaaagggtagataatctttcgtatgcaaacttttcccttatattttgtctttctttcctttttgactttagtagcatcctccacacatttgtgtgcctgatttgaaaggaagctggggcacccagcgagtttagcctttaagtttctgtgtattgatttgcagattaagtaatgctgagaggaataaagaagggacagaaacatggaacataaagcattgaaaattccggtgcttgggcttcggcttcagagtaacgtcagtggcttagggttaaacggccattttattcaaatgcttgctatacaatctgaaaacacactggcaggtgctcctctccttggcaattcattgagtatccagagttctacgatgtttaactgaagaattggctaatgttttgatcctccagtgtgactgttgtttttgtttgggggtgggtttggggttttttgcttttttattcctgaagcttaccagatatgaatggctaatactccattgttctgcttgttgtaatggtgaatgctttaagaaaaaaaagtgtaatttgctaagaataattcatgatctgtttatgcgataactcctttttgttacaatttttttaaaaaaagctatttttgttaatgtaaagtaaatatttcagagcaaattttttaaacttattgcactaaatacaggctctgtacaaaaaaaaaaaaaaaaaaaaacggccccaggatttttatatttcttctccccaggggagggggaagactctctttttgggacaagagaagcgcttttggtcttcctatacacaagaacttaacaccgcggagaattatgatccgcgatattatatggagaacttcgccttacctagttatgtgtccctcgtagcggctttaaaataagacgcacgccgagttggcataaagtgtcgctcccctttcccaaggggttggacccttttaaatttgggcttggccacagggtaactgggtgtttctcttcaaacagattgtgggcggtccttaaactctaaggctggcgcctaaaattgtcgctaataaggccctggtgttttcctttcaaacaagttcctcggtcacataattccgggattcttccacaacaatatttctggcccaacaaacatctcgggtttctcaaaagactcttgtgttttcccccaatttatagagtctcttgtttttagctagactttgggcaacccccctttgcgacagattagctctttcggcaagcaaatattttcctcagaaggttagaccttcacttttctttgtcttcccccacaccagtatccgtggtccccttaattcacatcggaaaggaatttaattttttttactacan

SEQ ID NO: 344908 - DNA, 3781 bp, Homo sapiens
  misc_feature (3595)..(3595): n is a, c, g, or t
  misc_feature (3621)..(3621): n is a, c, g, or t
  misc_feature (3648)..(3648): n is a, c, g, or t
cagctgctgcagcaggagcagagcaggagacgcgtagccgccgtcgccgccgccgggggatgtggccggcgcctgcctctagccgcgccgcctcttgagtaccagccgccgctgcagccgccgccgccgcctagccgtgcggtgccaggccgcgccctccccgggcgcccgccggctcgcatgccgaggggctccggggcgtagctgcgcgcccggcgccgcctccgggctccttcggccccgccatgggctgctgcagctccgcctcctccgccgcgcagagctccaaacgagaatggaagccgctggaggaccgtagctgcacagacataccatggctgctgctcttcatcctcttctgcattgggatgggatttatttgtggcttttcaatagcaacaggtgcagcagcaagactagtgtcaggatacgacagctatggaaatatctgtgggcagaaaaatacaaagttggaagcaataccaaacagtggcatggaccacacccagcggaagtatgtattctttttggatccatgcaacctggacttgataaaccggaagattaagtctgtagcactgtgtgtagcagcgtgtccaaggcaagaactgaaaactctgagtgatgttcagaagtttgcagagataaatggttcagccctatgtagctacaacctaaagccttctgaatacactacatctccaaaatcttctgttctctgccccaaactaccagttccagcgagtgcacctattccattcttccatcgctgtgctcctgtgaacatttcctgctatgccaagtttgcagaggccctgatcacctttgtcagtgacaatagtgtcttacacaggctgattagtggagtaatgaccagcaaagaaattatattgggactttgcttgttatcactagttctatccatgattttgatggtgataatcaggtatatatcaagagtacttgtgtggatcttaacgattctggtcatactcggttcacttggaggcacaggtgtactatggtggctgtatgcaaagcaaagaaggtctcccaaagaaactgttactcctgagcagcttcagatagctgaagacaatcttcgggccctcctcatttatgccatttcagctacagtgttcacagtgatcttattcctgataatgttggttatgcgcaaacgtgttgctcttaccatcgccttgttccacgtagctggcaaggtcttcattcacttgccactgctagtcttccaacccttctggactttctttgctcttgtcttgttttgggtgtactggatcatgacacttctttttcttggcactaccggcagtcctgttcagaatgagcaaggctttgtggagttcaaaatttctgggcctctgcagtacatgtggtggtaccatgtggtgggcctgatttggatcagtgaatttattctagcatgtcagcagatgacagtggcaggagctgtggtaacatactattttactagggataaaaggaatttgccatttacacctattttggcatcagtaaatcgccttattcgttaccacctaggtacggtggcaaaaggatctttcattatcacattagtcaaaattccgcgaatgatccttatgtatattcacagtcagctcaaaggaaaggaaaatgcttgtgcacgatgtgtgctgaaatcttgcatttgttgcctttggtgtcttgaaaagtgcctaaattatttaaatcagaatgcatacacagccacagctatcaacagcaccaacttctgcacctcagcaaaggatgcctttgtcattctggtggagaatgctttgcgagtggctaccatcaacacagtaggagattttatgttattccttggcaaggtgctgatagtctgcagcacaggtttagctgggattatgctgctcaactaccagcaggactacacagtatgggtgctgcctctgatcatcgtctgcctctttgctttcctagtcgctcattgcttcctgtctatttatgaaatggtagtggatgtattattcttgtgttttgccattgatacaaaatacaatgatgggagccctggcagagaattctatatggataaagtgctgatggagtttgtggaaaacagtaggaaagcaatgaaagaagctggtaagggaggcgtcgctgattccagagagctaaagccgatggcttcgggagcaagttctgcttgaacctagccgacggttatggaaacccattgacattccaaaacaatatatacacataactatgtatttgtgtgtgtgggtgtgtgtatatatgtatatgtatgtgtgtatatatgtatatgtatatacacacacacacataaatcagccaaaatcagagaaaaggaacagggatttaataccttttttatgcttatttttgtcaaacatgtactcctttcatacgggtggcttttacaaggcaacttccgtcatttaatgttttcaactgtaattgtcttaatggaaatgttaaaattcatatctgattaacatttttaataacttagaggagattttaactttatttaaaaataggtaaaattattgtacctaattatgtctaaagtttattcaggggtaatttccctgatgtctgtataaaatcaagatcttattttactgatgcataagtcctagtgggtcaagactaggcatatgctttcagataaataaggaattactccaatcagttttccccaatcaaagaagccatgtcattttacttttagaaacatacaattgggcccaatatgggaattttcataatagttcatacatttgtcagccaacattaaaaggtaaccaactcctcaggtatttgtagtttaccctaacgcttctttaaaagaaagtaggtaaaaaaagaaaagggtagataatctttcgtatgcaaacttttcccttatattttgtctttctttcctttttgactttagtagcatcctccacacatttgtgtgcctgatttgaaaggaagctggggcacccagcgagtttagcctttaagtttctgtgtattgatttgcagattaagtaatgctgagaggaataaagaagggacagaaacatggaacataaagcattgaaaattccggtgcttgggcttcggcttcagagtaacgtcagtggcttagggttaaacggccattttattcaaatgcttgctatacaatctgaaaacacactggcaggtgctcctctccttggcaattcattgagtatccagagttctacgatgtttaactgaagaattggctaatgttttgatcctccagtgtgactgttgtttttgtttgggggtgggtttggggccccccgaaagggagtcccgcaagctacttcttgttgacccctttagacacgttgtgatgattgctcgaatctacctttacttagcaaaaattagggtgggtgggcattcttatggccgcaacttttaggcctgtagctgcgtcctggcccatgccggtggatcgaaccggttaccacctccccaaaggttgggtgttcccgccaaacatcctcccctcttgcttcctcggcggggtcgccgtttntgccgtataaccctaaaacttgtacncagggctctaattatttagacgaacanttttttacaattcttttcccaagggaggcccctttcgggcaaagcgcgggaaattcccccaaagtttgcttttttcttccactcccttccccctcgtcttaacactgttcttcaataaaggccgcctatcaag

SEQ ID NO: 344909 - DNA, 897 bp, Homo sapiens
agctactccgcgctcatatacttggcacaattgccataacaaagctaaattggttctacataaggggcttaataagcagccgtttgctaatgtgcttcctttcaaagggttggacctttaaattgctgcaaaaggtaaattgtatttttttttaagtattggtgttctttactctagctaggctaaaatttgctaaatgccttggtttcttttaaaagttcatgtaatatttctgatttttcagaatatttgcaataagagtctggattttaaaaaacacatgcatacacacaattaagagctcatgtcttagcaagatctgggaaaccaacattgcgagagtagctattttgaaagaataattctccagaagttaacatctaatatctagtatcaccaaacagtatcgctgttctcttttattcatttgaaatgaatataattatataactaacaattgtccaaatagatgagagagcaaatcatgtgagaaaattcagaataccatctgtttcatagccgcacagattttggactttcacaaacattgggaactaaatttagaattggcaaaagtctagaagatgggtatcaaaacagaagacattccaggagctagcaattttaagaggtgtccctccaaagtgacctgatggaagtcctgaacttggaaattaggttctactcacttggacatccctgcatcatggactgttgctgctccctgttccatatgctcgcaatctcagctatttggaagctaccaggaatgctttctaattatcatttgcaactagaactgtaatcagaaagaaattttgtatttttgtataacttgattgtgtgccattttatataacaggtcctgttttacaaataaattttgttttactaaca

SEQ ID NO: 344910 - DNA, 569 bp, Homo sapiens
agctagcaattttaagaggtgtccctccaaagtgacctgatggaagtcctgaacttggaatagaagcaccaaacagtatcgctgttctcttttattcatttgaaatgaatataattatataactaacaattgtccaaatagatgagagagcaaatcatgtgagaaaattcagaataccatctgtttcatagccgcacagattttggactttcacaaacattgggaactaaatttagaattggcaaaagtctagaagatgggtatcaaaacagaagacattccaggagctagcaattttaagaggtgtccctccaaagtgacctgatggaagtcctgaacttggaaattaggttctactcacttggacatccctgcatcatggactgttgctgctccctgttccatatgctcgcaatctcagctatttggaagctaccaggaatgctttctaattatcatttgcaactagaactgtaatcagaaagaaattttgtatttttgtataacttgattgtgtgccattttatataacaggtcctgttttacaaataaattttgttttactaaca

SEQ ID NO: 344911 - DNA, 643 bp, Homo sapiens
  misc_feature (6)..(6): n is a, c, g, or t
  misc_feature (9)..(9): n is a, c, g, or t
  misc_feature (31)..(31): n is a, c, g, or t
gatcanagnattattcttagcaaattacacnttgttttcttaaagcattcaccattacaacaagcagaacaatggagtattagccattcatatctggtaagcttcaggaataaaaaagcaaaaaaccccaaacccacccccaccaaacagtatcgctgttctcttttattcatttgaaatgaatataattatataactaacaattgtccaaatagatgagagagcaaatcatgtgagaaaattcagaataccatctgtttcatagccgcacagattttggactttcacaaacattgggaactaaatttagaattggcaaaagtctagaagatgggtatcaaaacagaagacattccaggagctagcaattttaagaggtgtccctccaaagtgacctgatggaagtcctgaacttggaaattaggttctactcacttggacatccctgcatcatggactgttgctgctccctgttccatatgctcgcaatctcagctatttggaagctaccaggaatgctttctaattatcatttgcaactagaactgtaatcagaaagaaattttgtatttttgtataacttgattgtgtgccattttatataacaggtcctgttttacaaataaattttgttttactaaca

SEQ ID NO: 344912 - DNA, 2442 bp, Homo sapiens
cagctgctgcagcaggagcagagcaggagacgcgtagccgccgtcgccgccgccgggggatgtggccggcgcctgcctctagccgcgccgcctcttgagtaccagccgccgctgcagccgccgccgccgcctagccgtgcggtgccaggccgcgccctccccgggcgcccgccggctcgcatgccgaggggctccggggcgtagctgcgcgcccggcgccgcctccgggctccttcggccccgccatgggctgctgcagctccgcctcctccgccgcgcagagctccaaacgagaatggaagccgctggaggaccgtagctgcacagacataccatggctgctgctcttcatcctcttctgcattgggatgggatttatttgtggcttttcaatagcaacaggtgcagcagcaagactagtgtcaggatacgacagctatggaaatatctgtgggcagaaaaatacaaagttggaagcaataccaaacagtggcatggaccacacccagcggaagtatgtattctttttggatccatgcaacctggacttgataaaccggaagattaagtctgtagcactgtgtgtagcagcgtgtccaaggcaagaactgaaaactctgagtgatgttcagaagtttgcagagataaatggttcagccctatgtagctacaacctaaagccttctgaatacactacatctccaaaatcttctgttctctgccccaaactaccagttccagcgagtgcacctattccattcttccatcgctgtgctcctgtgaacatttcctgctatgccaagtttgcagaggccctgatcacctttgtcagtgacaatagtgtcttacacaggctgattagtggagtaatgaccagcaaagaaattatattgggactttgcttgttatcactagttctatccatgattttgatggtgataatcaggtatatatcaagagtacttgtgtggatcttaacgattctggtcatactcggttcacttggaggcacaggtgtactatggtggctgtatgcaaagcaaagaaggtctcccaaagaaactgttactcctgagcagcttcagatagctgaagacaatcttcgggccctcctcatttatgccatttcagctacagtgttcacagtgatcttattcctgataatgttggttatgcgcaaacgtgttgctcttaccatcgccttgttccacgtagctggcaaggtcttcattcacttgccactgctagtcttccaacccttctggactttctttgctcttgtcttgttttgggtgtactggatcatgacacttctttttcttggcactaccggcagtcctgttcagaatgagcaaggctttgtggagttcaaaatttctgggcctctgcagtacatgtggtggtaccatgtggtgggcctgatttggatcagtgaatttattctagcatgtcagcagatgacagtggcaggagctgtggtaacatactattttactagggataaaaggaatttgccatttacacctattttggcatcagtaaatcgccttattcgttaccacctaggtacggtggcaaaaggatctttcattatcacattagtcaaaattccgcgaatgatccttatgtatattcacagtcagctcaaaggaaaggaaaatgcttgtgcacgatgtgtgctgaaatcttgcatttgttgcctttggtgtcttgaaaagtgcctaaattatttaaatcagaatgcatacacagccacagctatcaacagcaccaacttctgcacctcagcaaaggatgcctttgtcattctggtggagaatgctttgcgagtggctaccatcaacacagtaggagattttatgttattccttggcaaggtgctgatagtctgcagcacaggtttagctgggattatgctgctcaactaccagcaggactacacagtatgggtgctgcctctgatcatcgtctgcctctttgctttcctagtcgctcattgcttcctgtctatttatgaaatggtagtggatgtattattcttgtgttttgccattgatacaaaatacaatgatgggagccctggcagagaattctatatggataaagtgctgatggagtttgtggaaaacagtaggaaagcaatgaaagaagctggtaagggaggcgtcgctgattccagagagctaaagccgatgctgaagaaaaggtgactggtctcatgagccctgaagaatgaactcagaggaggttgtttacatgaggttctcccactcaccagctgttgagagtctgcgattatgaagagcaggatcttattacttcaatgaaagcatgtaacaagtttctcaaaccaccaacagccaagtggatttggtacagtgcggctgtctaataaataatcaaaagcatttgataatagaaatctgtcttgcagcactgtct

SEQ ID NO: 344913 - DNA, 2322 bp, Homo sapiens
cagctgctgcagcaggagcagagcaggagacgcgtagccgccgtcgccgccgccgggggatgtggccggcgcctgcctctagccgcgccgcctcttgagtaccagccgccgctgcagccgccgccgccgcctagccgtgcggtgccaggccgcgccctccccgggcgcccgccggctcgcatgccgaggggctccggggcgtagctgcgcgcccggcgccgcctccgggctccttcggccccgccatgggctgctgcagctccgcctcctccgccgcgcagagctccaaacgagaatggaagccgctggaggaccgtagctgcacagacataccatggctgctgctcttcatcctcttctgcattgggatgggatttatttgtggcttttcaatagcaacaggtgcagcagcaagactagtgtcaggatacgacagctatggaaatatctgtgggcagaaaaatacaaagttggaagcaataccaaacagtggcatggaccacacccagcggaagtatgtattctttttggatccatgcaacctggacttgataaaccggaagattaagtctgtagcactgtgtgtagcagcgtgtccaaggcaagaactgaaaactctgagtgatgttcagaagtttgcagagataaatggttcagccctatgtagctacaacctaaagccttctgaatacactacatctccaaaatcttctgttctctgccccaaactaccagttccagcgagtgcacctattccattcttccatcgctgtgctcctgtgaacatttcctgctatgccaagtttgcagaggccctgatcacctttgtcagtgacaatagtgtcttacacaggctgattagtggagtaatgaccagcaaagaaattatattgggactttgcttgttatcactagttctatccatgattttgatggtgataatcaggtatatatcaagagtacttgtgtggatcttaacgattctggtcatactcggttcacttggaggcacaggtgtactatggtggctgtatgcaaagcaaagaaggtctcccaaagaaactgttactcctgagcagcttcagatagctgaagacaatcttcgggccctcctcatttatgccatttcagctacagtgttcacagtgatcttattcctgataatgttggttatgcgcaaacgtgttgctcttaccatcgccttgttccacgtagctggcaaggtcttcattcacttgccactgctagtcttccaacccttctggactttctttgctcttgtcttgttttgggtgtactggatcatgacacttctttttcttggcactaccggcagtcctgttcagaatgagcaaggctttgtggagttcaaaatttctgggcctctgcagtacatgtggtggtaccatgtggtgggcctgatttggatcagtgaatttattctagcatgtcagcagatgacagtggcaggagctgtggtaacatactattttactagggataaaaggaatttgccatttacacctattttggcatcagtaaatcgccttattcgttaccacctaggtacggtggcaaaaggatctttcattatcacattagtcaaaattccgcgaatgatccttatgtatattcacagtcagctcaaaggaaaggaaaatgcttgtgcacgatgtgtgctgaaatcttgcatttgttgcctttggtgtcttgaaaagtgcctaaattatttaaatcagaatgcatacacagccacagctatcaacagcaccaacttctgcacctcagcaaaggatgcctttgtcattctggtggagaatgctttgcgagtggtgcctctgatcatcgtctgcctctttgctttcctagtcgctcattgcttcctgtctatttatgaaatggtagtggatgtattattcttgtgttttgccattgatacaaaatacaatgatgggagccctggcagagaattctatatggataaagtgctgatggagtttgtggaaaacagtaggaaagcaatgaaagaagctggtaagggaggcgtcgctgattccagagagctaaagccgatgctgaagaaaaggtgactggtctcatgagccctgaagaatgaactcagaggaggttgtttacatgaggttctcccactcaccagctgttgagagtctgcgattatgaagagcaggatcttattacttcaatgaaagcatgtaacaagtttctcaaaccaccaacagccaagtggatttggtacagtgcggctgtctaataaataatcaaaagcatttgataatagaaatctgtcttgcagcactgtct

SEQ ID NO: 344914 - DNA, 1736 bp, Homo sapiens
attctatcagcagcctgccaaatggattgaagttgggaaaaatctgaggccgggggatcagcaataagtggcacgtactaaaatctcaagaataaaaccctgacctgttttaagcacctggagacaagcagagcctcttgtggagacagatgtatcagatcttcacctgacttcatttgatatctgaatcatagaactatttcatacccccttcttccaagtccaagctctcctggcatcttgtggttaggactgtatctcgttacttctgcttatcctgcagtggctctgggcttgtttgataatcaaactgagccggcccttatttttaatttttaacccatcctaatggggcttttttatttggaaatgattttaaacttatagaaatgctgcaagaataagaatggtacatagaacaccatgctacatattgttacacctctgttaaacatgtattttaccccatatgctcatccattctctctctatatctatctagatctcgatatctatctatagatatatctatatctatatgtatagatagatatctagatatatctagctattgagatctagatctagatatagatgtctatagatatagatataactagctattgagatctagatagatagttgtctagataagtatctagacagattgatatagatatatacagagaatattaggtccatactctctctctctctatatatatacacacacatatctattaggtatatagtatatacctaatacttttggatcacttgagaataatgtatatacgtcattgccctttagtcctaaatacttcaatgtgtatttcctaggaataagaatatccatttaaaagaatcatgttatacttcttatcttcagttcatttacttagtcactatttcttgaattgaaccaaactattagaacacccattatcctggtctgatctgacccactgctaacggaattacaggagtgaaaaattcaaagtttcatttgcatttcaggttttggtctttgagagtaccatagaatcaagttttgcaaatcagctttgaatttgactcaccatgggtttgtttgattcagttcaactgttctaaaaacctctttgtcaaagaacaatactaatgccaacagtggcaaacactaatctagccttccttgatatgtgtcagacagtgttttaagtactttgtatttaccaatgcatttaatccttacaacaaccttaaggaaaccataattatctcaattttatacattgggaaatgtaggcacagattttaaataacttgtgcatgaatacacagttgataaggggatctcccagatatctttttaaatttgttaatctgtgtgtgtgtgtgtgtgtgtgtagccttcttacatttcataatgttttctttaaagacgatcccacactatttctagttattgattacttctcattgtgtcatgttcccctaggacagaagcattcattttcttgatgtgttttttcagctgaagaaaaggtgactggtctcatgagccctgaagaatgaactcagaggaggttgtttacatgaggttctcccactcaccagctgttgagagtctgcgattatgaagagcaggatcttattacttcaatgaaagcatgtaacaagtttctcaaaccaccaacagccaagtggatttggtacagtgcggctgtctaataaataatcaaaagcatttgata

SEQ ID NO: 344915 - DNA, 1134 bp, Homo sapiens
  misc_feature (1014)..(1014): n is a, c, g, or t
  misc_feature (1032)..(1032): n is a, c, g, or t
  misc_feature (1053)..(1053): n is a, c, g, or t
  misc_feature (1061)..(1061): n is a, c, g, or t
  misc_feature (1071)..(1071): n is a, c, g, or t
  misc_feature (1079)..(1079): n is a, c, g, or t
  misc_feature (1089)..(1089): n is a, c, g, or t
  misc_feature (1094)..(1094): n is a, c, g, or t
  misc_feature (1096)..(1096): n is a, c, g, or t
  misc_feature (1099)..(1099): n is a, c, g, or t
  misc_feature (1103)..(1103): n is a, c, g, or t
cagctgctgcagcaggagcagagcaggagacgcgtagccgccgtcgccgccgccgggggatgtggccggcgcctgcctctagccgcgccgcctcttgagtaccagccgccgctgcagccgccgccgccgcctagccgtgcggtgccaggccgcgccctccccgggcgcccgccggctcgcatgccgaggggctccggggcgtagctgcgcgcccggcgccgcctccgggctccttcggccccgccatgggctgctgcagctccgcctcctccgccgcgcagagctccaaacgagaatggaagccgctggaggaccgtagctgcacagacataccatggctgctgctcttcatcctcttctgcattgggatgggatttatttgtggcttttcaatagcaacaggtgcagcagcaagactagtgtcaggatacgacagctatggaaatatctgtgggcagaaaaatacaaagttggaagcaataccaaacagtggcatggaccacacccagcggaagtatgtattctttttggatccatgcaacctggacttgataaaccggaagattaagtctgtagcactgtgtgtagcagcgtgtccaaggcaagaactgaaaactctgagtgatgttcagaagtttgcagagataaatggttcagccctatgtagctacaacctaaagccttctgaatacactacatctccaaaatcttctgttctctgccccaaactaccagttccagcgagtgcacctattccattcttccatcgctgtgctcctgtgaacatttcctgctatgccaagtttgcagaggccctgatcacctttgtcagtgacaatagtgtcttacacaggctgattagtggagtaatgaccagcaaagaaattatattgggactttgcttgttatcactagttctatccatgattttgatggtgataatcaggtatatatcaagagtacttgtgtggatcttaacgattctggtcatactcggttcacttggaggcacangtgtactatggtggctgnatgcgtcttcgggcccttctnatttatgncatttaactncagaggtnacaaggatcntattncngantggngggtatgcgcacacgtgttgttcttacctct

SEQ ID NO: 344916 - DNA, 533 bp, Homo sapiens
atttcactttcacttcctctctctctctgtcttcactgactgcacttcttcaggagaagcttttgttatctgtatcacgcaggacatgctgctctttctgtttgtgtgcttacccatcacttggatggcagaattcttgtcacaactgagaccaccttctataaaagtaagctgaaaggaacagcatcctcgtcagtgctcggcaggggcgggtaggggatgatggttttttccctaaggtaaaactgctgttgctcttgtttcctttttaactgtcagtgtttggctttcatcagactgaacattttggtgtacacttgaactgacggtttgatttttatcattttggaaggtgatcatagcaattcctttcaacttgctaaaattcatactcccccttttaaaagtatggttctgcttacattgctgtccttttcccttggctgactttttcttctgttgcctaggttgtactttctttgtttcttaagctatttttcagtagcaaacaaggctgttttcatcaataccca

SEQ ID NO: 344917 - DNA, 673 bp, Homo sapiens
cagaaacaaaaaataaagccatcataaaaccattggtgccaaaagatatttgttagttattgttatacagatattacaacaaaatatgaatgaaatctcattttaggtacaatttgctgtgccagctgctgaagatgggatgtgggggtgggaggaggcaaagggtgaatctgacacagatcccacttttaaggagctgttggtctaataaggaagatacaaataaaaacctcgtttttgtggtgtatctgtttaaataaataaagagtctcatcctgactgacagtatgttttggttcataatgagtggcaaagggaaaaggaaaaaaattctagaatgtattaataagttgagaaatccttttatgttttgctttaaaggtcacttggtaaccataatataaaattgacaataaatattgcaagagagatacttactgataaagtattattgaaattcaaagaatgctacctccaggtttggggctgaagggttatgttaaaaatttctactattttcggtttctgttttcactacttataataataactgaaaccattctctccatacaggtgatcttattcctgataatgttggttatgcgcaaacgtgttgctcttaccatcgccttgttccacgtagctggcaaggtcttcattcacttgccactgc

SEQ ID NO: 344918 - DNA, 333 bp, Homo sapiens
gatattaaatatgatctttgttctctctgcttcaggtgctgatagtctgcagcacaggtttagctgggattatgctgctcaactaccagcaggactacacagtatgggtgctgcctctgatcatcgtctgcctctttgctttcctagtcgctcattgcttcctgtctatttatgaaatggtagtggatgtattattcttgtgttttgccattgatacaaaatacaatgatgggagccctggcagagaattctatatggataaagtgctgatggtaagtacttcaaatgccgtttcctattttagggataaaaataccaataaaaatattttgt

SEQ ID NO: 344919 - DNA, 4486 bp, Homo sapiens
cagctgctgcagcaggagcagagcaggagacgcgtagccgccgtcgccgccgccgggggatgtggccggcgcctgcctctagccgcgccgcctcttgagtaccagccgccgctgcagccgccgccgccgcctagccgtgcggtgccaggccgcgccctccccgggcgcccgccggctcgcatgccgaggggctccggggcgtagctgcgcgcccggcgccgcctccgggctccttcggccccgccatgggctgctgcagctccgcctcctccgccgcgcagagctccaaacgagaatggaagccgctggaggaccgtagctgcacagacataccatggctgctgctcttcatcctcttctgcattgggatgggatttatttgtggcttttcaatagcaacaggtgcagcagcaagactagtgtcaggatacgacagctatggaaatatctgtgggcagaaaaatacaaagttggaagcaataccaaacagtggcatggaccacacccagcggaagtatgtattctttttggatccatgcaacctggacttgataaaccggaagattaagtctgtagcactgtgtgtagcagcgtgtccaaggcaagaactgaaaactctgagtgatgttcagaagtttgcagagataaatggttcagccctatgtagctacaacctaaagccttctgaatacactacatctccaaaatcttctgttctctgccccaaactaccagttccagcgagtgcacctattccattcttccatcgctgtgctcctgtgaacatttcctgctatgccaagtttgcagaggccctgatcacctttgtcagtgacaatagtgtcttacacaggctgattagtggagtaatgaccagcaaagaaattatattgggactttgcttgttatcactagttctatccatgattttgatggtgataatcaggtatatatcaagagtacttgtgtggatcttaacgattctggtcatactcggttcacttggaggcacaggtgtactatggtggctgtatgcaaagcaaagaaggtctcccaaagaaactgttactcctgagcagcttcagatagctgaagacaatcttcgggccctcctcatttatgccatttcagctacagtgttcacagtgatcttattcctgataatgttggttatgcgcaaacgtgttgctcttaccatcgccttgttccacgtagctggcaaggtcttcattcacttgccactgctagtcttccaacccttctggactttctttgctcttgtcttgttttgggtgtactggatcatgacacttctttttcttggcactaccggcagtcctgttcagaatgagcaaggctttgtggagttcaaaatttctgggcctctgcagtacatgtggtggtaccatgtggtgggcctgatttggatcagtgaatttattctagcatgtcagcagatgacagtggcaggagctgtggtaacatactattttactagggataaaaggaatttgccatttacacctattttggcatcagtaaatcgccttattcgttaccacctaggtacggtggcaaaaggatctttcattatcacattagtcaaaattccgcgaatgatccttatgtatattcacagtcagctcaaaggaaaggaaaatgcttgtgcacgatgtgtgctgaaatcttgcatttgttgcctttggtgtcttgaaaagtgcctaaattatttaaatcagaatgcatacacagccacagctatcaacagcaccaacttctgcacctcagcaaaggatgcctttgtcattctggtggagaatgctttgcgagtggctaccatcaacacagtaggagattttatgttattccttggcaaggtgctgatagtctgcagcacaggtttagctgggattatgctgctcaactaccagcaggactacacagtatgggtgctgcctctgatcatcgtctgcctctttgctttcctagtcgctcattgcttcctgtctatttatgaaatggtagtggatgtattattcttgtgttttgccattgatacaaaatacaatgatgggagccctggcagagaattctatatggataaagtgctgatggagtttgtggaaaacagtaggaaagcaatgaaagaagctggtaagggaggcgtcgctgattccagagagctaaagccgatggcttcgggagcaagttctgcttgaacctagccgacggttatggaaacccattgacattccaaaacaatatatacacacacacataaatcagccaaaatcagagaaaaggaacagggatttaataccttttttatgcttatttttgtcaaacatgtactcctttcatacgggtggcttttacaaggcaacttccgtcatttaatgttttcaactgtaattgtcttaatggaaatgttaaaattcatatctgattaacatttttaataacttagaggagattttaactttatttaaaaataggtaaaattattgtacctaattatgtctaaagtttattcaggggtaatttccctgatgtctgtataaaatcaagatcttattttactgatgcataagtcctagtgggtcaagactaggcatatgctttcagataaataaggaattactccaatcagttttccccaatcaaagaagccatgtcattttacttttagaaacatacaattgggcccaatatgggaattttcataatagttcatacatttgtcagccaacattaaaaggtaaccaactcctcaggtatttgtagtttaccctaacgcttctttaaaagaaagtaggtaaaaaaagaaaagggtagataatctttcgtatgcaaacttttcccttatattttgtctttctttcctttttgactttagtagcatcctccacacatttgtgtgcctgatttgaaaggaagctggggcacccagcgagtttagcctttaagtttctgtgtattgatttgcagattaagtaatgctgagaggaataaagaagggacagaaacatggaacataaagcattgaaaattccggtgcttgggcttcggcttcagagtaacgtcagtggcttagggttaaacggccattttattcaaatgcttgctatacaatctgaaaacacactggcaggtgctcctctccttggcaattcattgagtatccagagttctacgatgtttaactgaagaattggctaatgttttgatcctccagtgtgactgttgtttttgtttgggggtgggtttggggttttttgcttttttattcctgaagcttaccagatatgaatggctaatactccattgttctgcttgttgtaatggtgaatgctttaagaaaaaaaagtgtaatttgctaagaataattcatgatctgtttatgcgataactcctttttgttacaatttttttaaaaaaagctatttttgttaatgtaaagtaaatatttcagagcaaattttttaaacttattgcactaaatacaggctctgtacaaaaaaaaaaaaaaaaaaagcctcagcattttatcattccatggaaggagaatcttttgaaagaaagcattgcctcctaccagaactagacagtgaattagatcggtattatggaaatgcatacaagtaatgtcactagggcttaataagcagccgtttgctaatgtgcttcctttcaaagggttggacctttaaattgctgcaaaaggtaaattgtatttttttttaagtattggtgttctttactctagctaggctaaaatttgctaaatgccttggtttcttttaaaagttcatgtaatatttctgatttttcagaatatttgcaataagagtctggattttaaaaaacacatgcatacacacaattaagagctcatgtcttagcaagatctgggaaaccaacattgcgagagtagctattttgaaagaataattctccagaagttaacatctaatatctagtatcaccaaacagtatcgctgttctcttttattcatttgaaatgaatataattatataactaacaattgtccaaatagatgagagagcaaatcatgtgagaaaattcagaataccatctgtttcatagccgcacagattttggactttcacaaacattgggaactaaatttagaattggcaaaagtctagaagatgggtatcaaaacagaagacattccaggagctagcaattttaagaggtgtccctccaaagtgacctgatggaagtcctgaacttggaaattaggttctactcacttggacatccctgcatcatggactgttgctgctccctgttccatatgctcgcaatctcagctatttggaagctaccaggaatgctttctaattatcatttgcaactagaactgtaatcagaaagaaattttgtatttttgtataacttgattgtgtgccattttatataacaggtcctgttttacaaataaattttgttttactaaca

SEQ ID NO: 344920 - DNA, 4508 bp, Homo sapiens
cagctgctgcagcaggagcagagcaggagacgcgtagccgccgtcgccgccgccgggggatgtggccggcgcctgcctctagccgcgccgcctcttgagtaccagccgccgctgcagccgccgccgccgcctagccgtgcggtgccaggccgcgccctccccgggcgcccgccggctcgcatgccgaggggctccggggcgtagctgcgcgcccggcgccgcctccgggctccttcggccccgccatgggctgctgcagctccgcctcctccgccgcgcagagctccaaacgagaatggaagccgctggaggaccgtagctgcacagacataccatggctgctgctcttcatcctcttctgcattgggatgggatttatttgtggcttttcaatagcaacaggtgcagcagcaagactagtgtcaggatacgacagctatggaaatatctgtgggcagaaaaatacaaagttggaagcaataccaaacagtggcatggaccacacccagcggaagtatgtattctttttggatccatgcaacctggacttgataaaccggaagattaagtctgtagcactgtgtgtagcagcgtgtccaaggcaagaactgaaaactctgagtgatgttcagaagtttgcagagataaatggttcagccctatgtagctacaacctaaagccttctgaatacactacatctccaaaatcttctgttctctgccccaaactaccagttccagcgagtgcacctattccattcttccatcgctgtgctcctgtgaacatttcctgctatgccaagtttgcagaggccctgatcacctttgtcagtgacaatagtgtcttacacaggctgattagtggagtaatgaccagcaaagaaattatattgggactttgcttgttatcactagttctatccatgattttgatggtgataatcaggtatatatcaagagtacttgtgtggatcttaacgattctggtcatactcggttcacttggaggcacaggtgtactatggtggctgtatgcaaagcaaagaaggtctcccaaagaaactgttactcctgagcagcttcagatagctgaagacaatcttcgggccctcctcatttatgccatttcagctacagtgttcacagtgatcttattcctgataatgttggttatgcgcaaacgtgttgctcttaccatcgccttgttccacgtagctggcaaggtcttcattcacttgccactgctagtcttccaacccttctggactttctttgctcttgtcttgttttgggtgtactggatcatgacacttctttttcttggcactaccggcagtcctgttcagaatgagcaaggctttgtggagttcaaaatttctgggcctctgcagtacatgtggtggtaccatgtggtgggcctgatttggatcagtgaatttattctagcatgtcagcagatgacagtggcaggagctgtggtaacatactattttactagggataaaaggaatttgccatttacacctattttggcatcagtaaatcgccttattcgttaccacctaggtacggtggcaaaaggatctttcattatcacattagtcaaaattccgcgaatgatccttatgtatattcacagtcagctcaaaggaaaggaaaatgcttgtgcacgatgtgtgctgaaatcttgcatttgttgcctttggtgtcttgaaaagtgcctaaattatttaaatcagaatgcatacacagccacagctatcaacagcaccaacttctgcacctcagcaaaggatgcctttgtcattctggtggagaatgctttgcgagtggctaccatcaacacagtaggagattttatgttattccttggcaaggtgctgatagtctgcagcacaggtttagctgggattatgctgctcaactaccagcaggactacacagtatgggtgctgcctctgatcatcgtctgcctctttgctttcctagtcgctcattgcttcctgtctatttatgaaatggtagtggatgtattattcttgtgttttgccattgatacaaaatacaatgatgggagccctggcagagaattctatatggataaagtgctgatggagtttgtggaaaacagtaggaaagcaatgaaagaagctggtaagggaggcgtcgctgattccagagagctaaagccgatggcttcgggagcaagttctgcttgaacctagccgacggttatggaaacccattgacattccaaaacaatatatacacataactatgtatttgtgtgtgtgggtgtgtgtatatatgtatatgtatgtgtgtatatatgtatatgtatatacacacacacacataaatcagccaaaatcagagaaaaggaacagggatttaataccttttttatgcttatttttgtcaaacatgtactcctttcatacgggtggcttttacaaggcaacttccgtcatttaatgttttcaactgtaattgtcttaatggaaatgttaaaattcatatctgattaacatttttaataacttagaggagattttaactttatttaaaaataggtaaaattattgtacctaattatgtctaaagtttattcaggggtaatttccctgatgtctgtataaaatcaagatcttattttactgatgcataagtcctagtgggtcaagactaggcatatgctttcagataaataaggaattactccaatcagttttccccaatcaaagaagccatgtcattttacttttagaaacatacaattgggcccaatatgggaattttcataatagttcatacatttgtcagccaacattaaaaggtaaccaactcctcaggtatttgtagtttaccctaacgcttctttaaaagaaagtaggtaaaaaaagaaaagggtagataatctttcgtatgcaaacttttcccttatattttgtctttctttcctttttgactttagtagcatcctccacacatttgtgtgcctgatttgaaaggaagctggggcacccagcgagtttagcctttaagtttctgtgtattgatttgcagattaagtaatgctgagaggaataaagaagggacagaaacatggaacataaagcattgaggccattttattcaaatgcttgctatacaatctgaaaacacactggcaggtgctcctctccttggcaattcattgagtatccagagttctacgatgtttaactgaagaattggctaatgttttgatcctccagtgtgactgttgtttttgtttgggggtgggtttggggttttttgcttttttattcctgaagcttaccagatatgaatggctaatactccattgttctgcttgttgtaatggtgaatgctttaagaaaaaaaagtgtaatttgctaagaataattcatgatctgtttatgcgataactcctttttgttacaatttttttaaaaaaagctatttttgttaatgtaaagtaaatatttcagagcaaattttttaaacttattgcactaaatacaggctctgtacaaaaaaaaaaaaaaaaaaagcctcagcattttatcattccatggaaggagaatcttttgaaagaaagcattgcctcctaccagaactagacagtgaattagatcggtattatggaaatgcatacaagtaatgtcactagggcttaataagcagccgtttgctaatgtgcttcctttcaaagggttggacctttaaattgctgcaaaaggtaaattgtatttttttttaagtattggtgttctttactctagctaggctaaaatttgctaaatgccttggtttcttttaaaagttcatgtaatatttctgatttttcagaatatttgcaataagagtctggattttaaaaaacacatgcatacacacaattaagagctcatgtcttagcaagatctgggaaaccaacattgcgagagtagctattttgaaagaataattctccagaagttaacatctaatatctagtatcaccaaacagtatcgctgttctcttttattcatttgaaatgaatataattatataactaacaattgtccaaatagatgagagagcaaatcatgtgagaaaattcagaataccatctgtttcatagccgcacagattttggactttcacaaacattgggaactaaatttagaattggcaaaagtctagaagatgggtatcaaaacagaagacattccaggagctagcaattttaagaggtgtccctccaaagtgacctgatggaagtcctgaacttggaaattaggttctactcacttggacatccctgcatcatggactgttgctgctccctgttccatatgctcgcaatctcagctatttggaagctaccaggaatgctttctaattatcatttgcaactagaactgtaatcagaaagaaattttgtatttttgtataacttgattgtgtgccattttatataacaggtcctgttttacaaataaattttgttttactaaca

SEQ ID NO: 344921 - DNA, 4400 bp, Homo sapiens
cagctgctgcagcaggagcagagcaggagacgcgtagccgccgtcgccgccgccgggggatgtggccggcgcctgcctctagccgcgccgcctcttgagtaccagccgccgctgcagccgccgccgccgcctagccgtgcggtgccaggccgcgccctccccgggcgcccgccggctcgcatgccgaggggctccggggcgtagctgcgcgcccggcgccgcctccgggctccttcggccccgccatgggctgctgcagctccgcctcctccgccgcgcagagctccaaacgagaatggaagccgctggaggaccgtagctgcacagacataccatggctgctgctcttcatcctcttctgcattgggatgggatttatttgtggcttttcaatagcaacaggtgcagcagcaagactagtgtcaggatacgacagctatggaaatatctgtgggcagaaaaatacaaagttggaagcaataccaaacagtggcatggaccacacccagcggaagtatgtattctttttggatccatgcaacctggacttgataaaccggaagattaagtctgtagcactgtgtgtagcagcgtgtccaaggcaagaactgaaaactctgagtgatgttcagaagtttgcagagataaatggttcagccctatgtagctacaacctaaagccttctgaatacactacatctccaaaatcttctgttctctgccccaaactaccagttccagcgagtgcacctattccattcttccatcgctgtgctcctgtgaacatttcctgctatgccaagtttgcagaggccctgatcacctttgtcagtgacaatagtgtcttacacaggctgattagtggagtaatgaccacaaagaaggtctcccaaagaaactgttactcctgagcagcttcagatagctgaagacaatcttcgggccctcctcatttatgccatttcagctacagtgttcacagtgatcttattcctgataatgttggttatgcgcaaacgtgttgctcttaccatcgccttgttccacgtagctggcaaggtcttcattcacttgccactgctagtcttccaacccttctggactttctttgctcttgtcttgttttgggtgtactggatcatgacacttctttttcttggcactaccggcagtcctgttcagaatgagcaaggctttgtggagttcaaaatttctgggcctctgcagtacatgtggtggtaccatgtggtgggcctgatttggatcagtgaatttattctagcatgtcagcagatgacagtggcaggagctgtggtaacatactattttactagggataaaaggaatttgccatttacacctattttggcatcagtaaatcgccttattcgttaccacctaggtacggtggcaaaaggatctttcattatcacattagtcaaaattccgcgaatgatccttatgtatattcacagtcagctcaaaggaaaggaaaatgcttgtgcacgatgtgtgctgaaatcttgcatttgttgcctttggtgtcttgaaaagtgcctaaattatttaaatcagaatgcatacacagccacagctatcaacagcaccaacttctgcacctcagcaaaggatgcctttgtcattctggtggagaatgctttgcgagtggctaccatcaacacagtaggagattttatgttattccttggcaaggtgctgatagtctgcagcacaggtttagctgggattatgctgctcaactaccagcaggactacacagtatgggtgctgcctctgatcatcgtctgcctctttgctttcctagtcgctcattgcttcctgtctatttatgaaatggtagtggatgtattattcttgtgttttgccattgatacaaaatacaatgatgggagccctggcagagaattctatatggataaagtgctgatggagtttgtggaaaacagtaggaaagcaatgaaagaagctggtaagggaggcgtcgctgattccagagagctaaagccgatggcttcgggagcaagttctgcttgaacctagccgacggttatggaaacccattgacattccaaaacaatatatacacataactatgtatttgtgtgtgtgggtgtgtgtatatatgtatatgtatgtgtgtatatatgtatatgtatatacacacacacacataaatcagccaaaatcagagaaaaggaacagggatttaataccttttttatgcttatttttgtcaaacatgtactcctttcatacgggtggcttttacaaggcaacttccgtcatttaatgttttcaactgtaattgtcttaatggaaatgttaaaattcatatctgattaacatttttaataacttagaggagattttaactttatttaaaaataggtaaaattattgtacctaattatgtctaaagtttattcaggggtaatttccctgatgtctgtataaaatcaagatcttattttactgatgcataagtcctagtgggtcaagactaggcatatgctttcagataaataaggaattactccaatcagttttccccaatcaaagaagccatgtcattttacttttagaaacatacaattgggcccaatatgggaattttcataatagttcatacatttgtcagccaacattaaaaggtaaccaactcctcaggtatttgtagtttaccctaacgcttctttaaaagaaagtaggtaaaaaaagaaaagggtagataatctttcgtatgcaaacttttcccttatattttgtctttctttcctttttgactttagtagcatcctccacacatttgtgtgcctgatttgaaaggaagctggggcacccagcgagtttagcctttaagtttctgtgtattgatttgcagattaagtaatgctgagaggaataaagaagggacagaaacatggaacataaagcattgaaaattccggtgcttgggcttcggcttcagagtaacgtcagtggcttagggttaaacggccattttattcaaatgcttgctatacaatctgaaaacacactggcaggtgctcctctccttggcaattcattgagtatccagagttctacgatgtttaactgaagaattggctaatgttttgatcctccagtgtgactgttgtttttgtttgggggtgggtttggggttttttgcttttttattcctgaagcttaccagatatgaatggctaatactccattgttctgcttgttgtaatggtgaatgctttaagaaaaaaaagtgtaatttgctaagaataattcatgatctgtttatgcgataactcctttttgttacaatttttttaaaaaaagctatttttgttaatgtaaagtaaatatttcagagcaaattttttaaacttattgcactaaatacaggctctgtacaaaaaaaaaaaaaaaaaaagcctcagcattttatcattccatggaaggagaatcttttgaaagaaagcattgcctcctaccagaactagacagtgaattagatcggtattatggaaatgcatacaagtaatgtcactagggcttaataagcagccgtttgctaatgtgcttcctttcaaagggttggacctttaaattgctgcaaaaggtaaattgtatttttttttaagtattggtgttctttactctagctaggctaaaatttgctaaatgccttggtttcttttaaaagttcatgtaatatttctgatttttcagaatatttgcaataagagtctggattttaaaaaacacatgcatacacacaattaagagctcatgtcttagcaagatctgggaaaccaacattgcgagagtagctattttgaaagaataattctccagaagttaacatctaatatctagtatcaccaaacagtatcgctgttctcttttattcatttgaaatgaatataattatataactaacaattgtccaaatagatgagagagcaaatcatgtgagaaaattcagaataccatctgtttcatagccgcacagattttggactttcacaaacattgggaactaaatttagaattggcaaaagtctagaagatgggtatcaaaacagaagacattccaggagctagcaattttaagaggtgtccctccaaagtgacctgatggaagtcctgaacttggaaattaggttctactcacttggacatccctgcatcatggactgttgctgctccctgttccatatgctcgcaatctcagctatttggaagctaccaggaatgctttctaattatcatttgcaactagaactgtaatcagaaagaaattttgtatttttgtataacttgattgtgtgccattttatataacaggtcctgttttacaaataaattttgttttactaaca

SEQ ID NO: 344922 - DNA, 4560 bp, Homo sapiens
cagctgctgcagcaggagcagagcaggagacgcgtagccgccgtcgccgccgccgggggatgtggccggcgcctgcctctagccgcgccgcctcttgagtaccagccgccgctgcagccgccgccgccgcctagccgtgcggtgccaggccgcgccctccccgggcgcccgccggctcgcatgccgaggggctccggggcgtagctgcgcgcccggcgccgcctccgggctccttcggccccgccatgggctgctgcagctccgcctcctccgccgcgcagagctccaaacgagaatggaagccgctggaggaccgtagctgcacagacataccatggctgctgctcttcatcctcttctgcattgggatgggatttatttgtggcttttcaatagcaacaggtgcagcagcaagactagtgtcaggatacgacagctatggaaatatctgtgggcagaaaaatacaaagttggaagcaataccaaacagtggcatggaccacacccagcggaagtatgtattctttttggatccatgcaacctggacttgataaaccggaagattaagtctgtagcactgtgtgtagcagcgtgtccaaggcaagaactgaaaactctgagtgatgttcagaagtttgcagagataaatggttcagccctatgtagctacaacctaaagccttctgaatacactacatctccaaaatcttctgttctctgccccaaactaccagttccagcgagtgcacctattccattcttccatcgctgtgctcctgtgaacatttcctgctatgccaagtttgcagaggccctgatcacctttgtcagtgacaatagtgtcttacacaggctgattagtggagtaatgaccagcaaagaaattatattgggactttgcttgttatcactagttctatccatgattttgatggtgataatcaggtatatatcaagagtacttgtgtggatcttaacgattctggtcatactcggttcacttggaggcacaggtgtactatggtggctgtatgcaaagcaaagaaggtctcccaaagaaactgttactcctgagcagcttcagatagctgaagacaatcttcgggccctcctcatttatgccatttcagctacagtgttcacagtgatcttattcctgataatgttggttatgcgcaaacgtgttgctcttaccatcgccttgttccacgtagctggcaaggtcttcattcacttgccactgctagtcttccaacccttctggactttctttgctcttgtcttgttttgggtgtactggatcatgacacttctttttcttggcactaccggcagtcctgttcagaatgagcaaggctttgtggagttcaaaatttctgggcctctgcagtacatgtggtggtaccatgtggtgggcctgatttggatcagtgaatttattctagcatgtcagcagatgacagtggcaggagctgtggtaacatactattttactagggataaaaggaatttgccatttacacctattttggcatcagtaaatcgccttattcgttaccacctaggtacggtggcaaaaggatctttcattatcacattagtcaaaattccgcgaatgatccttatgtatattcacagtcagctcaaaggaaaggaaaatgcttgtgcacgatgtgtgctgaaatcttgcatttgttgcctttggtgtcttgaaaagtgcctaaattatttaaatcagaatgcatacacagccacagctatcaacagcaccaacttctgcacctcagcaaaggatgcctttgtcattctggtggagaatgctttgcgagtggctaccatcaacacagtaggagattttatgttattccttggcaaggtgctgatagtctgcagcacaggtttagctgggattatgctgctcaactaccagcaggactacacagtatgggtgctgcctctgatcatcgtctgcctctttgctttcctagtcgctcattgcttcctgtctatttatgaaatggtagtggatgtattattcttgtgttttgccattgatacaaaatacaatgatgggagccctggcagagaattctatatggataaagtgctgatggagtttgtggaaaacagtaggaaagcaatgaaagaagctggtaagggaggcgtcgctgattccagagagctaaagccgatggcttcgggagcaagttctgcttgaacctagccgacggttatggaaacccattgacattccaaaacaatatatacacataactatgtatttgtgtgtgtgggtgtgtgtatatatgtatatgtatgtgtgtatatatgtatatgtatatacacacacacacataaatcagccaaaatcagagaaaaggaacagggatttaataccttttttatgcttatttttgtcaaacatgtactcctttcatacgggtggcttttacaaggcaacttccgtcatttaatgttttcaactgtaattgtcttaatggaaatgttaaaattcatatctgattaacatttttaataacttagaggagattttaactttatttaaaaataggtaaaattattgtacctaattatgtctaaagtttattcaggggtaatttccctgatgtctgtataaaatcaagatcttattttactgatgcataagtcctagtgggtcaagactaggcatatgctttcagataaataaggaattactccaatcagttttccccaatcaaagaagccatgtcattttacttttagaaacatacaattgggcccaatatgggaattttcataatagttcatacatttgtcagccaacattaaaaggtaaccaactcctcaggtatttgtagtttaccctaacgcttctttaaaagaaagtaggtaaaaaaagaaaagggtagataatctttcgtatgcaaacttttcccttatattttgtctttctttcctttttgactttagtagcatcctccacacatttgtgtgcctgatttgaaaggaagctggggcacccagcgagtttagcctttaagtttctgtgtattgatttgcagattaagtaatgctgagaggaataaagaagggacagaaacatggaacataaagcattgaaaattccggtgcttgggcttcggcttcagagtaacgtcagtggcttagggttaaacggccattttattcaaatgcttgctatacaatctgaaaacacactggcaggtgctcctctccttggcaattcattgagtatccagagttctacgatgtttaactgaagaattggctaatgttttgatcctccagtgtgactgttgtttttgtttgggggtgggtttggggttttttgcttttttattcctgaagcttaccagatatgaatggctaatactccattgttctgcttgttgtaatggtgaatgctttaagaaaaaaaagtgtaatttgctaagaataattcatgatctgtttatgcgataactcctttttgttacaatttttttaaaaaaagctatttttgttaatgtaaagtaaatatttcagagcaaattttttaaacttattgcactaaatacaggctctgtacaaaaaaaaaaaaaaaaaaagcctcagcattttatcattccatggaaggagaatcttttgaaagaaagcattgcctcctaccagaactagacagtgaattagatcggtattatggaaatgcatacaagtaatgtcactagggcttaataagcagccgtttgctaatgtgcttcctttcaaagggttggacctttaaattgctgcaaaaggtaaattgtatttttttttaagtattggtgttctttactctagctaggctaaaatttgctaaatgccttggtttcttttaaaagttcatgtaatatttctgatttttcagaatatttgcaataagagtctggattttaaaaaacacatgcatacacacaattaagagctcatgtcttagcaagatctgggaaaccaacattgcgagagtagctattttgaaagaataattctccagaagttaacatctaatatctagtatcaccaaacagtatcgctgttctcttttattcatttgaaatgaatataattatataactaacaattgtccaaatagatgagagagcaaatcatgtgagaaaattcagaataccatctgtttcatagccgcacagattttggactttcacaaacattgggaactaaatttagaattggcaaaagtctagaagatgggtatcaaaacagaagacattccaggagctagcaattttaagaggtgtccctccaaagtgacctgatggaagtcctgaacttggaaattaggttctactcacttgccccccacgttcccaaacccttcttcaagagctgaagggatcccagcccctaggtgggcataggcagaccctccccagagctccttaggaataagacagactggttcattgaatgccgccttatttatttttggtgaggatgcatgcgtggggccgttggtgtttagagtgggggctacccaattaatctttgatactctc

SEQ ID NO: 344923 - DNA, 3603 bp, Homo sapiens
cagctgctgcagcaggagcagagcaggagacgcgtagccgccgtcgccgccgccgggggatgtggccggcgcctgcctctagccgcgccgcctcttgagtaccagccgccgctgcagccgccgccgccgcctagccgtgcggtgccaggccgcgccctccccgggcgcccgccggctcgcatgccgaggggctccggggcgtagctgcgcgcccggcgccgcctccgggctccttcggccccgccatgggctgctgcagctccgcctcctccgccgcgcagagctccaaacgagaatggaagccgctggaggaccgtagctgcacagacataccatggctgctgctcttcatcctcttctgcattgggatgggatttatttgtggcttttcaatagcaacaggtgcagcagcaagactagtgtcaggatacgacagctatggaaatatctgtgggcagaaaaatacaaagttggaagcaataccaaacagtggcatggaccacacccagcggaagtatgtattctttttggatccatgcaacctggacttgataaaccggaagattaagtctgtagcactgtgtgtagcagcgtgtccaaggcaagaactgaaaactctgagtgatgttcagaagtttgcagagataaatggttcagccctatgtagctacaacctaaagccttctgaatacactacatctccaaaatcttctgttctctgccccaaactaccagttccagcgagtgcacctattccattcttccatcgctgtgctcctgtgaacatttcctgctatgccaagtttgcagaggccctgatcacctttgtcagtgacaatagtgtcttacacaggctgattagtggagtaatgaccagcaaagaaattatattgggactttgcttgttatcactagttctatccatgattttgatggtgataatcaggtatatatcaagagtacttgtgtggatcttaacgattctggtcatactcggttcacttggaggcacaggtgtactatggtggctgtatgcaaagcaaagaaggtctcccaaagaaactgttactcctgagcagcttcagatagctgaagacaatcttcgggccctcctcatttatgccatttcagctacagtgttcacagtgatcttattcctgataatgttggttatgcgcaaacgtgttgctcttaccatcgccttgttccacgtagctggcaaggtcttcattcacttgccactgctagtcttccaacccttctggactttctttgctcttgtcttgttttgggtgtactggatcatgacacttctttttcttggcactaccggcagtcctgttcagaatgagcaaggctttgtggagttcaaaatttctgggcctctgcagtacatgtggtggtaccatgtggtgggcctgatttggatcagtgaatttattctagcatgtcagcagatgacagtggcaggagctgtggtaacatactattttactagggataaaaggaatttgccatttacacctattttggcatcagtaaatcgccttattcgttaccacctaggtacggtggcaaaaggatctttcattatcacattagtcaaaattccgcgaatgatccttatgtatattcacagtcagctcaaaggaaaggaaaatgcttgtgcacgatgtgtgctgaaatcttgcatttgttgcctttggtgtcttgaaaagtgcctaaattatttaaatcagaatgcatacacagccacagctatcaacagcaccaacttctgcacctcagcaaaggatgcctttgtcattctggtggagaatgctttgcgagtggctaccatcaacacagtaggagattttatgttattccttggcaaggtgctgatagtctgcagcacaggtttagctgggattatgctgctcaactaccagcaggactacacagtatgggtgctgcctctgatcatcgtctgcctctttgctttcctagtcgctcattgcttcctgtctatttatgaaatggtagtggatgtattattcttgtgttttgccattgatacaaaatacaatgatgggagccctggcagagaattctatatggataaagtgctgatggagtttgtggaaaacagtaggaaagcaatgaaagaagctggtaagggaggcgtcgctgattccagagagctaaagccgatggcttcgggagcaagttctgcttgaacctagccgacggttatggaaacccattgacattccaaaacaatatatacacataactatgtatttgtgtgtgtgggtgtgtgtatatatgtatatgtatgtgtgtatatatgtatatgtatatacacacacacacataaatcagccaaaatcagagaaaaggaacagggatttaataccttttttatgcttatttttgtcaaacatgtactcctttcatacgggtggcttttacaaggcaacttccgtcatttaatgttttcaactgtaattgtcttaatggaaatgttaaaattcatatctgattaacatttttaataacttagaggagattttaactttatttaaaaataggtaaaattattgtacctaattatgtctaaagtttattcaggggtaatttccctgatgtctgtataaaatcaagatcttattttactgatgcataagtcctagtgggtcaagactaggcatatgctttcagataaataaggaattactccaatcagttttccccaatcaaagaagccatgtcattttacttttagaaacatacaattgggcccaatatgggaattttcataatagttcatacatttgtcagccaacattaaaaggtaaccaactcctcaggtatttgtagtttaccctaacgcttctttaaaagaaagtaggtaaaaaaagaaaagggtagataatctttcgtatgcaaacttttcccttatattttgtctttctttcctttttgactttagtagcatcctccacacatttgtgtgcctgatttgaaaggaagctggggcacccagcgagtttagcctttaagtttctgtgtattgatttgcagattaagtaatgctgagaggaataaagaagggacagaaacatggaacataaagcattgaaaattccggtgcttgggcttcggcttcagagtaacgtcagtggcttagggttaaacggccattttattcaaatgcttgctatacaatctgaaaacacactggcaggtgctcctctccttggcaattcattgagtatccagagttctacgatgtttaactgaagaattggctaatgttttgatcctccagtgtgactgttgtttttgtttgggggtgggtttggggttttttgcttttttattcctgaagcttaccagatatgaatggctaatactccattgttctgcttgttgtaatggtgaatgctttaagaaaaaaaagtgtaatttgctaagaataattcatgatctgtttatgcgataactcctttttgttacaatttttttaaaaaaagctatttttgttaatgtaaagtaaatatttcagagaccgcttgtaactatgcattacggcccgttgggtgggcggggggggcgggg

SEQ ID NO: 344924 - DNA, 2415 bp, Homo sapiens
cagctgctgcagcaggagcagagcaggagacgcgtagccgccgtcgccgccgccgggggatgtggccggcgcctgcctctagccgcgccgcctcttgagtaccagccgccgctgcagccgccgccgccgcctagccgtgcggtgccaggccgcgccctccccgggcgcccgccggctcgcatgccgaggggctccggggcgtagctgcgcgcccggcgccgcctccgggctccttcggccccgccatgggctgctgcagctccgcctcctccgccgcgcagagctccaaacgagaatggaagccgctggaggaccgtagctgcacagacataccatggctgctgctcttcatcctcttctgcattgggatgggatttatttgtggcttttcaatagcaacaggtgcagcagcaagactagtgtcaggatacgacagctatggaaatatctgtgggcagaaaaatacaaagttggaagcaataccaaacagtggcatggaccacacccagcggaagtatgtattctttttggatccatgcaacctggacttgataaaccggaagattaagtctgtagcactgtgtgtagcagcgtgtccaaggcaagaactgaaaactctgagtgatgttcagaagtttgcagagataaatggttcagccctatgtagctacaacctaaagccttctgaatacactacatctccaaaatcttctgttctctgccccaaactaccagttccagcgagtgcacctattccattcttccatcgctgtgctcctgtgaacatttcctgctatgccaagtttgcagaggccctgatcacctttgtcagtgacaatagtgtcttacacaggctgattagtggagtaatgaccagcaaagaaattatattgggactttgcttgttatcactagttctatccatgattttgatggtgataatcaggtatatatcaagagtacttgtgtggatcttaacgattctggtcatactcggttcacttggaggcacaggtgtactatggtggctgtatgcaaagcaaagaaggtctcccaaagaaactgttactcctgagcagcttcagatagctgaagacaatcttcgggccctcctcatttatgccatttcagctacagtgttcacagtgatcttattcctgataatgttggttatgcgcaaacgtgttgctcttaccatcgccttgttccacgtagctggcaaggtcttcattcacttgccactgctagtcttccaacccttctggactttctttgctcttgtcttgttttgggtgtactggatcatgacacttctttttcttggcactaccggcagtcctgttcagaatgagcaaggctttgtggagttcaaaatttctgggcctctgcagtacatgtggtggtaccatgtggtgggcctgatttggatcagtgaatttattctagcatgtcagcagatgacagtggcaggagctgtggtaacatactattttactagggataaaaggaatttgccatttacacctattttggcatcagtaaatcgccttattcgttaccacctaggtacggtggcaaaaggatctttcattatcacattagtcaaaattccgcgaatgatccttatgtatattcacagtcagctcaaaggaaaggaaaatgcttgtgcacgatgtgtgctgaaatcttgcatttgttgcctttggtgtcttgaaaagtgcctaaattatttaaatcagaatgcatacacagccacagctatcaacagcaccaacttctgcacctcagcaaaggatgcctttgtcattctggtggagaatgctttgcgagtggctaccatcaacacagtaggagattttatgttattccttggcaaggtgctgatagtctgcagcacaggtttagctgggattatgctgctcaactaccagcaggactacacagtatgggtgctgcctctgatcatcgtctgcctctttgctttcctagtcgctcattgcttcctgtctatttatgaaatggtagtggatgtattattcttgtgttttgccattgatacaaaatacaatgatgggagccctggcagagaattctatatggataaagtgctgatggagtttgtggaaaacagtaggaaagcaatgaaagaagctggtaagggaggcgtcgctgattccagagagctaaagccgatgctgaagaaaaggtgactggtctcatgagccctgaagaatgaactcagaggaggttgtttacatgaggttctcccactcaccagctgttgagagtctgcgattatgaagagcaggatcttattacttcaatgaaagcatgtaacaagtttctcaaaccaccaacagccaagtggatttggtacagtgcggctgtctaataaataatcaaaagcatttgata

SEQ ID NO: 344925 - DNA, 2698 bp, Homo sapiens
cagctgctgcagcaggagcagagcaggagacgcgtagccgccgtcgccgccgccgggggatgtggccggcgcctgcctctagccgcgccgcctcttgagtaccagccgccgctgcagccgccgccgccgcctagccgtgcggtgccaggccgcgccctccccgggcgcccgccggctcgcatgccgaggggctccggggcgtagctgcgcgcccggcgccgcctccgggctccttcggccccgccatgggctgctgcagctccgcctcctccgccgcgcagagctccaaacgagaatggaagccgctggaggaccgtagctgcacagacataccatggctgctgctcttcatcctcttctgcattgggatgggatttatttgtggcttttcaatagcaacaggtgcagcagcaagactagtgtcaggatacgacagctatggaaatatctgtgggcagaaaaatacaaagttggaagcaataccaaacagtggcatggaccacacccagcggaagtatgtattctttttggatccatgcaacctggacttgataaaccggaagattaagtctgtagcactgtgtgtagcagcgtgtccaaggcaagaactgaaaactctgagtgatgttcagaagtttgcagagataaatggttcagccctatgtagctacaacctaaagccttctgaatacactacatctccaaaatcttctgttctctgccccaaactaccagttccagcgagtgcacctattccattcttccatcgctgtgctcctgtgaacatttcctgctatgccaagtttgcagaggccctgatcacctttgtcagtgacaatagtgtcttacacaggctgattagtggagtaatgaccagcaaagaaattatattgggactttgcttgttatcactagttctatccatgattttgatggtgataatcaggtatatatcaagagtacttgtgtggatcttaacgattctggtcatactcggttcacttggaggcacaggtgtactatggtggctgtatgcaaagcaaagaaggtctcccaaagaaactgttactcctgagcagcttcagatagctgaagacaatcttcgggccctcctcatttatgccatttcagctacagtgttcacagtgatcttattcctgataatgttggttatgcgcaaacgtgttgctcttaccatcgccttgttccacgtagctggcaaggtcttcattcacttgccactgctagtcttccaacccttctggactttctttgctcttgtcttgttttgggtgtactggatcatgacacttctttttcttggcactaccggcagtcctgttcagaatgagcaaggctttgtggagttcaaaatttctgggcctctgcagtacatgtggtggtaccatgtggtgggcctgatttggatcagtgaatttattctagcatgtcagcagatgacagtggcaggagctgtggtaacatactattttactagggataaaaggaatttgccatttacacctattttggcatcagtaaatcgccttattcgttaccacctaggtacggtggcaaaaggatctttcattatcacattagtcaaaattccgcgaatgatccttatgtatattcacagtcagctcaaaggaaaggaaaatgcttgtgcacgatgtgtgctgaaatcttgcatttgttgcctttggtgtcttgaaaagtgcctaaattatttaaatcagaatgcatacacagccacagctatcaacagcaccaacttctgcacctcagcaaaggatgcctttgtcattctggtggagaatgctttgcgagtggctaccatcaacacagtaggagattttatgttattccttggcaaggtgctgatagtctgcagcacaggtttagctgggattatgctgctcaactaccagcaggactacacagtatgggtgctgcctctgatcatcgtctgcctctttgctttcctagtcgctcattgcttcctgtctatttatgaaatggtagtggatgtattattcttgtgttttgccattgatacaaaatacaatgatgggagccctggcagagaattctatatggataaagtgctgatggagtttgtggaaaacagtaggaaagcaatgaaagaagctggtaagggaggcgtcgctgattccagagagctaaagccgatgctgaagaaaaggtgactggtctcatgagccctgaagaatgaactcagaggaggttgtttacatgaggttctcccactcaccagctgttgagagtctgcgattatgaagagcaggatcttattacttcaatgaaagcatgtaacaagtttctcaaaccaccaacagccaagtggatttggtacagtgcggctgtctaataaataatcaaaagcatttgataacaaaaagaagaaaagaagaaaaagactagagaaacaattgttggggcgcgctgggccccggaaaaaagtcttctaaaacccctcggtggggcggggggcgccagtgggctcgggaactgggcaaaagctggcccacaggagacccgggcgcctaaacagggggctggggttcccacccataataaaacgcgcggggggaaaccgagggtgtgtgagaacaacccaaggcgagccagaaggaaaacgggggcctcaacgggggccaaggaaccagataatacg

SEQ ID NO: 344926 - DNA, 758 bp, Homo sapiens
cgcgaacgggaagactatcttgcgagttgctggacagaacgagtcgccccgttccagaacaggacatacgacgtcaccgcgccgcctcttgagtaccagccgccgctgcagccgccgccgccgcctagccgtgcggtgccaggccgcgccctccccgggcgcccgccggctcgcatgccgaggggctccggggcgtagctgcgcgcccggcgccgcctccgggctccttcggccccgccatgggctgctgcagctccgcctcctccgccgcgcagagctccaaacgagaatggaagccgctggaggaccgtagctgcacagacataccatggctgctgctcttcatcctcttctgcattgggatggtaaggaaactctcacagatggtccaaactggactcatgatccaagggaatgacgagtagttgttttaatgagggcagttgtggaatataccagtcctcatacaattcagtggtattttgtgtcactcttgatttgtttttctacatgaaaactgagctcaaattaaggagcagctgggactcatatgccattcaatagaccatttcagaaagcaaatcatttgacgtaagtctctgaatgttgatcttgatagagtggtgagcaaaacagtgaccatgagtcatgagccctgcatattcacccaacccagtcacaccaacttgttggttatctttagggcagtcatttcctctcagggacttggtgttccacagttcttcctagatgggagg

SEQ ID NO: 344927 - DNA, 454 bp, Homo sapiens
agcaagaggagcccaaagtagtgatgggcagtggtaccttccagttcagtagaaacattgttgtgtcgctgggtggatacatttcttcctttggaaccaagacctctgagccaacacagcataaggtcatgaggatgggaagcagaaatttttctagtggatcactaaagatcactcatcctgggagataccatcagccacgttatgagactactccagcagttctgtggtgaggaagcaactttccagcaacaactcattatctatgggattatgtcacctggaagtgaattttctagcctcagtcaagccttcagataattgcagcctcagctcacatctgactacaaactcatgagagatttcaatccagaaacactcaagccagaaacttccaaattcctgacccagagaaattgtaacagatagtaaattagattactattgttttaaa

SEQ ID NO: 344928 - DNA, 1105 bp, Homo sapiens
cttcaggatgtttcctgctggtattagctgtgcatcaaggctaagaggtcacagcgctgtccttgccattctcaataaatcagttttgcaaaatctccaggccttcttgcagaggattcagacatagagggtgatataggtgatatagttttgctgtgtccccacccaaatctcattttgaattgtaactcccacaatgcccacatgttacaggagagacccagtggaaggtcattgaataatgggggcgggtctttaccatgctattcttgtgatagtgaataaatctcacaagatttgatgattatataagggggagtttaccctgtacaagatctctctttttgcctgctgccatctgtgtaagacatggctttctcctccttaccttctgccatgattgtgaggcatccccaattacgtgcaactgtaagtcaataaacctttttttcctatataaattacccagtctcgagtatgtctttatcagcagcatgaaaacggactaatacatagggttgtagcggatcagctataaagatgggcctccctttaggccctgcagcagtatggcaccagtttgaaagcctccatccagtccacataatgaaaatcagaaaaagaacattcaccacttatctgtgctttctgcaaagaaacagataccggggtgaggaccaagactgccttcttcttcatgtcattttgtatgtctgtgtagacagagtcggcaagaagggagatatgaagtgcttgcaaggtacctagatctgtccttgcattcagacattcccttgctacttgtaattccttgacagaagacattgtggtagtgggtacttaggagggaaacaactagaatggggcatttttcccaaggcaaacattgaatcctctcttgctgttacagagtaaaattccctgaggcctgggcttggtttttcatgcagattgaatgatagcttttaatactgtctctaatttagtaattctctgtgagctcccttgagaagagggcccaggtactcttattttccatctctcacaaagaatcaataatgaaactaagtattgaccattatatatgtcaagcatatgatatctg

SEQ ID NO: 344929 - DNA, 218 bp, Homo sapiens
ttaaaatatatatagactgaaaatatatgacaatataaaaaaaggcaggagagacagtaaatggagataaagtatactaaggttctaacatcaggaaaggaaataaagcagtaacttatatttgaccatagtcaaggatgcatgctataatctctcgagcaactattaaaagagcagtaaatggccaggtgtggtgtcttaggcctataatcccagca

SEQ ID NO: 344930 - DNA, 212 bp, Homo sapiens
ctgccactctcccctggaggctgcagtgcattggctataaagtctggtgagggaaaggcagatttccccacgaggcctgccaggtaaagccattgtaattgcctatggtcaggcctgaaaattcacacatggattttaaccaggggctgtactcttcagggacttcttcagaggacttgagattgtagtttaatttcattcccgctgcactg

SEQ ID NO: 344931 - DNA, 122 bp, Homo sapiens
attggagccagggaggctgctaaaaatcccacaatgcacaggaaaatccccccctggcaaagaaaagcaaattacccaaaatattaatagtgctaagactgagaagccctgacttatagtaa

SEQ ID NO: 344932 - DNA, 283 bp, Homo sapiens
gagatcaaggaagaggaacacgataaaatgcttatggctccaagaagaaatagggtgagagataggaccacaaattgtttactcatttcaaccagtaaacatgtcctgcaatgtcaatctgtctttctgccacagcagttctgcgcctcctgagttgtttccatctccctccagtcattcaggaccaccaatgagatttgtgatatttggaaaactgccacccagtgcctccttttcctaatctgctgaataaagttaataagactaaactatgttgccatca

SEQ ID NO: 344933 - DNA, 254 bp, Homo sapiens
acagctctgggtttgaatccccccaccatgtgaccttggccgaatgacttagcctcttgataaggtggagataatcatcatacatatctccccaggaagttaagggactcaaataagatggtgaacatgaagccctcactgattggtgggtgttacacctggtaagtgatattttccgagtggttgtgaaggggccctaaaggaagggcatgcttctgaaccgggaggtgaagtcccttcttcgcagctctgat

SEQ ID NO: 344934 - DNA, 388 bp, Homo sapiens
tgcactccagcctgggcgacagagcgagactccgtctcaaaaataaaaaatagtggctcaccagaatactctaagagtccacatggtttgatttttttgctttggttttgtttgtttttgttgccatttggctttgttactttcatgactttagttagagtgaaagcctagacccagaaatgttttactaaatggtagacaaataaatgctgggtgttctgctgctggctggttatctcagtatgagtgccgtgagttaaaaagtgactgagaaatggattattcccaaagatgaaggagatcactcaacacccttgtgagctacctcattcacacgcctgccaagaggcacattttccggtattcttccatagtttagattgtttca

SEQ ID NO: 344935 - DNA, 273 bp, Homo sapiens
aactaaaggccaagctaatttgattatgtctataaatatccatagaattaggtagtgattcagagcctcacactgtcttaacaagaacacaaatagtctgtgttgtaatgactaattgttcttcactccatgaaaatgattgaactatgtgtactgccattttctgaatacagactcccgtgtcgcccagatactgcaaaggtggtattcatgcaaaaggaatgtagcttttcaaacagtacttcatttttctcattttcttaaaaaaaaaaa

SEQ ID NO: 344936 - DNA, 991 bp, Homo sapiens
agccagtaccaagaactatcagtggccctggattcaagctccgcaataatcagtcaactcactgaaaacatcaattcactgctgaacccctggccccagagcccccagcagggccatctaaggtagagcagctacaagatgagaccaaccacctaaggaaggagctagagagtgtgggaagacagctccaggctgaggtggaaaacaatcagatgttgagtctcctgaacaggagacaggaggagaggctacgtgaacaggaggagaggctacatgaacaggaggagaggcaacgtgaacaggaggataggctacatgaacaggaggagaggctacgtgaacatgaggagaggctacgtgaacaggaggagaggctgtgtgaacaggaggagaggctacgtgaacatgaggagaggctgtgtgaacaggaggagaggctacgtgaacaggaggagaggctgtgtgaacaggaggagaggctacgtgaacaggaggagaggctgtgtgaacaggaggagaggctacgtgaacaggaggagaggctgtgtgaacaggagaagctgccagggcaggagaggctgctggaagaggtggagaagctgttagaacaggagaggcggcaggaggagcaggagaggctgctggagagggagaggctgcatgccattcttttcgggctgccgagaacagggagctaaacatcaccatcatctaagagcgggtcaaggaattgaaaaaaaaaaacaaaacatttaaggggttaatatcctacacaattcatttacttcatttgaatgttagagccacttatgtttatttgtgtttctaatttatagtttaaatttatttgtgtttctaatttatagtttaaatttatttgtgtttctaatttatagtttaaatttatttgtgtttctaatttataatttaaatttatttgtaaaaagttaaatgagagtgggtgtttctctcatgttcactctggcatctt

SEQ ID NO: 344937 - DNA, 539 bp, Homo sapiens
gaatgacttgtgccctaaacaacctcctgcacagtctgcagcttcctgagtcctgttctgaaataaaacatgaggcttttaagaatcatgtgttcaatgtagacaatgcaaaatttgtagttaaatttgacctcagtgccctgactacaattggaaatgccaaaaactcactaataggggtgagcctttaattgtaatgactttgttttatcaacattacatatttatgtatttcactgttatgtcaacatgtctgcagaatcactgtatgtaacaaacagccatatttaagacatgcctggataaataaaattggtaggaatgttttcttgccattatatttaacttttcttctttttccttgacaaatcttgataagtttttttatattagttttattttctagaaaatgtcttatgaatttctcctatttgctctagcatgcttacagaaaatgtcagtgtttcttacagctcaaatttgtatagttgttttaaaatgcggtctctttcttcttcccctggtacttttttctttct

SEQ ID NO: 344938 - DNA, 376 bp, Homo sapiens
gaatgacttgtgccctaaacaacctcctgcacagtctgcagcttcctgagtcctgttctgaaataaaacatgaggcttttaagaatcatgtgttcaatgtagacaatgcaaaatttgtagttaaatttgacctcagtgccctgactacaattggaaatgccaaaaactcactaatagggatgtgggcgctatctccaactgtctttgcacttctgagtaagaatctgatgattgtgcacagtgacctggctgttcacttccctgccattcagtatgctgtgctctacacattgtatcctcattgtaccaggcatgatcactttatctttagtagcctcagttcttcctctccttctttgtttgatggagctgtgat

SEQ ID NO: 344939 - DNA, 416 bp, Homo sapiens
acatgcatcctggttgatgaatatatttgataaagggacattgcaaacccaaatgtcttgggctgtatggcacgggtaggaatggggcccaaggtctctggatccccaccagaggccaatggctctatactcctattaagataaaatggggccaggtgcagtggctcatacctataattccagtactttgtggggccaaggcaggaggatcccttgagcccaagacttagagaccagccaaagcaacaaagtgagacctcgtctctacagaaaatttaaaaataattaggtgtggtggtgtgcttctgtaatcccagctatgtgggaggctgaggctggaggattgtctgaacctgggaggttgaggctgcactccaacatggacaatggagagagatcctgtctcaaaaaaaaaa

SEQ ID NO: 344940 - DNA, 390 bp, Homo sapiens
ggaaaatggaagtaaattctttataatatgctaattgatgtatttgggaatttttagatgtagacaacatctgtgcatgccgttaacacagttaatagctcccgttcttcaatatgagaaggttttcagagtctatgtgtgatctagatgagaccttctgtgtccgcccccccaggacttggcagtgtcaaatttaaggctgttttttctggtgccttaggactgaatctgagcctgcgcaaagtcctgttttgaggatgcttctggccacagtgtgctgggattgtgttggttctgggaagagcctggctggccagacctggtcttatctatcacccccatccctactccgtcctagcctggaccagactggctggagtgatgggtcca

SEQ ID NO: 344941 - DNA, 153 bp, Homo sapiens
tccatcctggccacaaccagagaggatgctgggaatgctcttcctggctccagtctcatggaaggattctgattggtccagctcaggtcacgtgcctctcctccatggtctggggcaagatgtgctaggcagacagatacagagacagcagcc

SEQ ID NO: 344942 - DNA, 413 bp, Homo sapiens
attttttgtttgcaccagtggaacagagctcacccgaaaaatccacaactccaaagttcaagtcagagtcttcagtgtgactctggatgttccttgatatgcctgattcctcaaattttactttatttactcctgtacacatatgttccattcttcagaaaagattctcttggggatactatttaatatacctagaaaattgcatatgcagccatttttgaaatgaaaagtgcctgatatggtttggctgtgtccccacccaaatctcaccttgaattgtaataatccccacatgtcaagggtggggccaggtggagataattgaaccatgggggcagtttcctgcatactgttcttgtggtagtgaataagtctcataagatctgatggttttataaatgggagttccccta

SEQ ID NO: 344943 - DNA, 866 bp, Homo sapiens
agcagtaaggtgaactcctggaagaaaatgaaactcttggaaactttcaagtaccatactctgcatcttgcaattgaaagaccctagaggaaggtggtaggcaaggagccaggggatgcagtgtactgtgcaaagaagcagtagttggaaacagtgttcatgaggggtccttagctttttcaatttcaggtgttcttggggaatgagaacagaaatttcctttgaagaagcctatctggtaattgtggccacatccgttatgtatcatgcaggttgaaaacttagacaggctctgatgatttctctgctatgaggtgtccagagatggacctggctgcagtatgtaggcgccctcactattaaaatcagcaggtacccagaccctgactcccattattcactccagataaactgggctacccagtggcacctgtagagttgtccttccagaagtgagaatgcttcatgggaattgtgcttaccttatacccttgacctctgacagctacattaggaaaatatgtcatattgcagggaaaaagcagttgatatgtagatttctggtagtaataaaattagcagttttaacctggtgtcagctccagaattgactttttggggaatctgggaaagttgccttggaagttgttaggtttaaacataagtaataacagcacttaaaagcattttaaaaaattacaaaattaacacccttactgattttacaataatgtgtaggaactctcatatctcccttactctctgtaattgtggtagaatacacaggaggttgaccatcttaaccattctagagtacagttcagtagcattaagtacattcacattgttgtgcagccatcactacc

SEQ ID NO: 344944 - DNA, 609 bp, Homo sapiens
taaaattagcagttttaacctggtgtcagctccagaattgactttttggggaatctgggaaagttgccttggaagttgttaggtttaaacataagtaataacagcacttaaaagcattttaaaaaattacaaaattaacacccttactgattttacaataatgtgtaggaactctcatatctcccttactctctgtaattgtggtagaatacacaggaggttgaccatcttaaccattctagagtacagttcagtagcattaagtacattcacattgttgtgcagccatcactaccatccatctaaatgactcttttcatcttgcaaaactgaaactttatacccattaaacaacagctccctattccctcctgcccctgtctctggcaagcaccattgtactttgtctctatttgataactccagatactgcaggtaagtggaatcatattgtatatattttttgttactggcttatttcacttcctataatgtcctcaaagttcatccatgttgtagcatatgtccaaatttctttcttttttaaggttgaataatatttaattgtatgtatataccccattttgtttacccattcgttcattgatg

SEQ ID NO: 344945 - DNA, 520 bp, Homo sapiens
gactatttacaaagttgagggcagcattaagggaaatcctggaagcccataacagtggggctccattgccaccccatccctgagagtggaaatggaggaagtagttactggagcccagtgagacctttggtataaaacagagttaggctggaagcagtggctcatgtctgtaatcccagcattttgggaggccgaggccggcatatcagttgaggtcaggagttcaagactagcctggccaatatagtaaaaccccgtgtctactgaatatacaggtatatgtgtatatatatatatatacacacacatatacatacaaaattagccaggcatggtggcatgtgcctgtaatcccagctactcaggaggctgagacaggggcctaggattaaataaggagttttggcaaaactaggctggaactccaaaacctgctacataagtactcacgagggttgctagttattagtattattactttgttgttatttggctctggtcagatttcaattaacgtcac

SEQ ID NO: 344946 - DNA, 446 bp, Homo sapiens
tgctgggattacaggcgtgagccaccgcgcccagcctcagtttttaagagttttaacggtaaacactcaatatatcttaactataatgaataaactgaagatacgtaatacagaaatgacatgaactgtatgtagcataagatgatccccaacattgtcttaatttcttcttgactccttccctttaaaacaaaaatttgaaagatatttaaagggcatgttttaagtgaaaaccagacatccaaaaaataaaaaagaaatgactgcttcttacttaaccatgttagatgttcagctggagaaggagagtaaatttctggatctgatgtaaattgttttcctagtgctgtaacctccataaattgatattattgtgcaccctgatcaattttgaggatatgtattgacatcgtccccatttcaccaataaaggattcatttgagag

SEQ ID NO: 344947 - DNA, 419 bp, Homo sapiens
tacgagagttctcattaacactccattcagcttcttctcatgtcaacatggtacatttgtcaaaactaagaaattaactttggtaaaatactattaactaaattgcagcatttattcagatttcactagtgttctctctctgttccaggacacaatggtgcatgccctgcccttcccttttttatctaattagtgctgaaatgtgagagtatatcagcccctcgatcttttgctgcctgtgtgctttaaagcccagagatctaatgcaaatctcatgagtgctgggcctagtgggaaccctgcttgtgctgctaggccagggacctttggacgagtgttagtgccttaggctcatttccaacttttctgaggtacctcactgagctactacaaaaagataccttttcatcccttctgtt

SEQ ID NO: 344948 - DNA, 724 bp, Homo sapiens
acctcatctgtaaaacaaaccaaaaaaccttttggtatatttactgtatttactcctagccttcttttccatgacgtttttaggtgagatcacatagtatatgtaatttattgtgctgctttttcattttaaatttatattacatgccatcattacttctgcaagttattcgctagttgtctgtctgcctgcctccttccctctcttcttctcttctttcccacctccctgccatctttcttccctccctccctccctcttttcctcctctgcctgcctgccttccttccttcttctattcttttgtcagcaaacattcattatgttccttctgtttgccagacactttactcaaacacagctttactgaaacacagctccaccctccagtgggggagatggatacctagcaaaaaataaggggtgctaaatacttaattttatgtgtataaacacacacacgtctgtttttgaggcatggtctcatgccatgctggagtgcagtggcacgatcatagcaccttgtaactttgaactcctgggctcaagcagtcctcctgcctcagcctccctggaggctgagagtacaagtgcatgtcaggatgcctggctgctttttctattttttgtagagaaagggccttgctgtgttccccaagctgttcttgaactcccggcctcaatcagtcctcatgttgggatcacaagcatgagccaccacacc

SEQ ID NO: 344949 - DNA, 271 bp, Homo sapiens
acctcatctgtaaaacaaaccaaaaaaccttttggtatatttactgtatttactcctagccttcttttccatgacgtttttaggtgagatcacatagtatatgtaatttattgtgctgctttttcattttaaatttatattacatgccatcattacttctgcaagttattcgctagttgtctgtctgcctgcctccttccctctcttcttctcttctttcccacctccctgccatctttcgtcgacgcggccgcgaatttagtagtagtaa

SEQ ID NO: 344950 - DNA, 239 bp, Homo sapiens
acatgtgacaaatgccatagaattagacccaaagaatgcctgcgaaagctgctgaaatccagtggggtctgcagcctggttcactctgtagtgaaatccagtggggtctgcagcctggttctatctgtattgaaatccagtggggtctgcagcctggtccactctgtagtgaaatccagtgtggtctgcagcctggttctatctgtattgaaatccagtggggtctgcagcctggtcca

SEQ ID NO: 344951 - DNA, 687 bp, Homo sapiens
aggtggagtccgaacccctgatgggaaactgcgggctgcccgcagtgccaccatgctgggtacatgggggacagggctgttccatcttgcgggtacctgccccttcaccaggggccttgggaggggccatcagaaatggcgtgacctgtgcagcctgtcctgggttctgtaagccagtgtaggtgctgtccctgtgaggcccgtgtgcctcccctcactgctccgagctctctggctgaggagctggggcaggagccccgggagggtctgagaagactcagagagaggtggactctttgtagctggtactaggtttgctttacagatggggaaactgaggcacagagaggttgaggcattagtagtactacatggctggctggagagccggacagtcagtgtcccagcccgggcttggctctcatggcatgcagagccccgggcacctcctctcctctgtgccccgcgtgggactctccagcccgacgggaggtgtgtccaggaggcgacaggctaagggcagagtcctccacagagcccaggctgacaccagtcccccccacagagagaggaggtcccgggctctgcatgccatgagaccaacccgggctggacactgactgtccggctctccagccagcaatgtagtacatactaatgcctcaacggatcctctaagtcggcgca

SEQ ID NO: 344952 - DNA, 515 bp, Homo sapiens
tgggaggggccatcagaaatggcgtgacctgtgcagcctgtcctgggttctgtaagccagtgtaggtgctgtccctgtgaggcccgtgtgcctcccctcactgctccgagctctctggctgaggagctggggcaggagccccgggagggtctgagaagactcagagagaggtggactctttgtagctggtactaggtttgctttacagatggggaaactgaggcacagagaggttgaggcattagtagtactacatggctggctggagagccggacagtcagtgtcccagcccgggcttggctctcatggcatgcagagccccgggcacctcctctcctctgtgccccgcgtgggactctccagcccgacgggaggtgtgtccaggaggcgacaggctaagggcagagtcctccacagagcccaggctgacaccagtccccccgcagaggtacagccccgtggtggaggccggctcggacatggtcttccggtggaccatcaacgacaagcagtc

SEQ ID NO: 344953 - DNA, 176 bp, Homo sapiens
cgcagactcgtttttggtccttgagtgtttgggaggaaaattaagaaagatgtgtgggacgttatttctttagtttggcacactcctcctgttttcttacttaagaagtgtttccttatctaagttacctagcggctttgggaagtgttccagtttgtaatttgtgtgtgaaaggg

SEQ ID NO: 344954 - DNA, 505 bp, Homo sapiens
ggtccttttgcagaccactcactaagcaacagggctgagaatgatttcacaatcacatagcaaatgggttaaggaacaggcttggagaaatttaagccaggagacaggaagaagagaaggtataggttcctagtgaccccaaggaaggctgagcagagaccagggtgttctgctaaacatgccaagggtggggtatcacaggacataggccacacaaactgttactcttacttttcataggatgagcataagagtagccttgatagtgggggattaaacaagaatcttgacatgaggcagtgtagagtgtagatactagctctttactgaggtgctctacaaaggccagctgcctcacacctggaaatctttgggacggtggaaatttactatgcctgctgctggtgccagggagccactggtcccttgaagctgagttcaagtgcggcttcttctacttagggtgaagggtgagggctctggtcctagctcgtccaactttttc

SEQ ID NO: 344955 - DNA, 556 bp, Homo sapiens
tggagtgcaatggcacaatctcggctcactactacctccgcctctcaggttcaagcaattctcctgcctcagcctcccgattagctgggactacaggcatgcaccaccacgccagactaattttctatttttagtagagtcggggtttctccatgttggtcaggctggtctcgaaggttttttttttttttaaatcatcctttttcaaatgctccaatacagttaattactactgcaaattttatctacttttgatctatttttctactgccacaaccctggatccaggcaacaggatttctggcttgactactacagcaggagtatattgtctccctgtatcttccctgatcttccctaatctattctacatgaaacatgcataacaatcttttaagaacacatatgtgatcacacatcactccctttgttaaatctgtcatgggtttcttactgttcttagaactaaacatatgtacaaggcaggcatgagctggtcttcatccagctccagcctcatctcctgacctgaactcacaaaactgttatcatcctg

SEQ ID NO: 344956 - DNA, 354 bp, Homo sapiens
  misc_feature (333)..(336): n is a, c, g, or t
  misc_feature (343)..(343): n is a, c, g, or t
aatctttatggagaaaggagcacacacgggacactggcttaatccagctactggaaggtttcagcaaaggagagacataacagacttgcatgaagacagagttctgggcactaagaaactgagggttggctggaaagaaatgggatatttcttgattatccctgcaaccctggaaaaaggaaaagtaatccttcatcttatgggacaactgatagtcctagaagcagttcacgcactggctgtgtttattcctctgcccaggtgtctctgtttgctgccaaggcagcagttcatgtctcgtccatgtccatgttgagtgtaagatcttcgttnnnnacaaaanccaatttgtct

SEQ ID NO: 344957 - DNA, 1883 bp, Homo sapiens
ggctggggggcttagaattttatttttggtttacagcgcagaagaagagcagtgaggccggggcgcgggtggggagggcaaggcggcggctcaaaaaaaaagccagcccctcgcggcccgacagagtctcggcgccccgcgggtcggtggagcctcaggggtgagcgcaggccggagacaggggaacccgccgcgggacaggggaaggccggacggaacgcgggtaagctgccgcagcttccggccgggccactagcgcggaccctacggccggggcgggacttccggcaaggcgcggaagcggcggtagctgcagctggcgaagttgggcgactggcggatgcaggccttgcggcacgtcgtgtgcgccctgtccggcggcgtggacagcgccgtggccgcgctgctgctgaggcggagaggttaccaggtgacaggggtgtttatgaagaactgggactcactggatgaacatggggtctgtactgccgacaaagactgtgaagatgcttacagagtttgccagatcttagacatccctttccatcaagtgtcctacgtaaaggagtattggaatgatgtgttcagtgactttttgaatgagtatgaaaaaggaaggactcccaatcctgacatagtttgcaacaagcacatcaaatttagttgcttttttcattatgctgtggataatcttggggcagatgccattgccacaggtcactatgcaagaacttccctggaagatgaagaagtctttgagcagaagcacgttaagaagcccgaagggcttttcagaaatcggtttgaagttagaaatgccaggtttcccaggatgccctgaggagaaccatcttccctctggggggattaacgaaagagtttgtaaagaaaatcgctgctgagaatagacttcatcatgtgcttcagaagaaagagagcatgggcatgtgtttcatcgggaagaggaattttgaacatttccttcttcagtatctgcagcctcgacctggtcactttatttccatagaagacaataaggttctgggaacacataaaggttggttcctgtataccttgggccagagagcaaacataggtggcctgagagagccctggtacgtggtggagaaggacagcgtcaagggtgacgtgtttgtggccccccggacagaccacccagccctgtacagggacctgctgaggaccagccgcgtgcactggattgcggaggagcctcccgcagcactggtccgggacaagatgatggagtgccacttccgattccgccaccagatggcactagtgccctgtgtgctgaccctcaatcaagatggcaccgtgtgggtgacagctgtgcaggctgtgcgtgcccttgccacaggacagtttgctgtgttctacaagggggacgagtgcctgggcagcgggaagatcctgcggctggggccgtctgcctacacgctccagaagggccagcgcagagctgggatggccactgagagccccagtgacagcccagaagatggtccaggcctgagtcccttgctctgacagagatggatctgctagaaggaacctggagagcaggacccatggctgggcggctggtgagcagtccaggtgcccaagggccagcttgctgctgcccaaagcagaggaagccgggctggctgagggtccgaaaagcctgcaggggcccggcgagccccaggaagagcctcagctccaggctggggctctggctgctggagcatctgctggctggtggggtggcccgagttccccttcaccgcccccagggagggtttcccacctcagagtacaccgaggggacctgcagagggggctgtcgggacagcgtggaataaacattatttcaagga

SEQ ID NO: 344958 - DNA, 1860 bp, Homo sapiens
cagtttgctgtgagaagaccagaagggttaaccaacggcctcctgtccctggacgggtcttggtgcctgcttagaacccaaagcccttaacttcatgctcctcgtcctgcttcaggggcggggcttggcacaatcccaggaggtgccaggtctcaatggcccgaggccatgggtgggtgacagggagcaggggcctcagaaccaacctagggtatctggggccccccagaccagggccagtcctggggcacctgtgggaagccagcagctaccagtccctcctttctcctcagccatttggtgtgtggaggaattcctggggtggccttgagagaagagcccgtggtgtggctggcccctgtccctgcgaatagaaaaaccagtcctcgaggggggccgtgctgctgccccacaggtggttgcaggtagagggcctgagtcagacttgaacctgcagcattcactgtcatgggctcggatctcacccctgcctcttgcccactctgacatggtacttccttcctgggccttagtctcctcatctgtaaaatggggattcaaaggcccggcgggtgatgagatgaatttctgtgggtagaacacttcgagcggtgccagcaccgttacctgtgtgtgtgtgtgctggtaggacagttgttcccagggaccacactgaggccggccttggggccaggtgcccctcggcgtccccaccttcacattccattctgcaggccccccggacagaccacccagccctgtacagggacctgctgaggaccagccgcgtgcactggattgcggaggagcctcccgcagcactggtccgggacaagatgatggagtgccacttccgattccgccaccagatggcactaggtgactgacgggagggctcctgaggacgggccccttgaagctgagcttcctgaggccagatttgggccagggatgggagaccctggggtaggaaagtcccgttgtggagatcatttggagattacctaaagtatttagaactcccgtgtcctgtgcctgccctgagcgaggcctgggggtgctgggagcagatgcaggcaggccccggcgtgttgggctgaagcaagtgtgtacactgccccgcagtgtcctgctgcgtccagggcccaggctggtgccctgcccttcccctctaagcaggggtttttgaccccgtgggctggtgctcctttctccctgggggcctgaggtcgaccaggaaaggcctgtgccccctccaagggcccctctcttctacccagtgccctgtgtgctgaccctcaatcaagatggcaccgtgtgggtgacagctgtgcaggctgtgcgtgcccttgccacaggacagtttgctgtgttctacaagggggacgagtgcctgggcagcgggaagatcctgcggctggggccgtctgcctacacgctccagaagggccagcgcagagctgggatggccactgagagccccagtgacagcccagaagatggtccaggcctgagtcccttgctctgacagagatggatctgctagaaggaacctggagagcaggacccatggctgggcggctggtgagcagtccaggtgcccaagggccagcttgctgctgcccaaagcagaggaagccgggctggctgagggtccgaaaagcctgcaggggcccggcgagccccaggaagagcctcagctccaggctggggctctggctgctggagcatctgctggctggtggggtggcccgagttccccttcaccgcccccagggagggtttcccacctcagagtacaccgaggggacctgcagagggggctgtcgggacagcgtggaataaacattatttcaagga

SEQ ID NO: 344959 - DNA, 1089 bp, Homo sapiens
gtcttctcatttcagagcatgggcatgtgtttcatcgggaagaggaattttgaacattcccttctctggtccctgtctctcccccactcctcgcaggacagtggcctgaaggacctgaccgggttctgctttcttccccggggcagctggtgtgagggtctcccgcgcagggtcagaccccgcgggccgagacaatgaggcgttctctaaggacttccagatgtggcctcagctgagatgctggagttcatgaaaagcgcgcctctgacttggaaggactatactctgtgagttacgtatcaagtccctgtaaaaagaatgatttccttcctgtgtaaggaaaatgttaaactacacaaaactccactctgattcagggagtaaggtggacgtcccggcatggtgtgaatgattaaggaccacatgcagcgatgggatcaggcgtccgcgctggccagagtgctgctcgctcatgtgcagacccttactgcggtgaggcctgcgtgagcctgtgctgtgcctggtgtcaggggacaggctccgagtcagtcacagtgtgcagtcctgctgtggggacagagtgcagccattgttgggttagtacagtggcggggatgtgcctgccggcgtgatgatcaggcaggtcttgacacagcacagacctgagctgtgggactggccaggagagccaggctgcagctcaggtgtagggcgtcttgcagtgaattgcacttggagatcttccacctcttgtggaggggagacggcaggcggagccggggctaggcattcctgagacaggtggaggtgacagctttgcttgggacagaactgccagacaggattgcccatgtatctgccagccctggccccagcaggagccagttggatgactcatggcttccacctgcagttcacttcactgaagaaggctgccggcccaggccacgtggtaaatccatgaggttctctctgcctgtgtgccccactgcaggggagggaggcagtgagtttgccatctgctgtgtgacattgtgagggtgcgcagagcagctgggggtagccctgatgcagttactgcattagatg

SEQ ID NO: 344960 - DNA, 425 bp, Homo sapiens
ttttttttttgaggaatgtttcacacttggaactgaagtcattttcttttattctagtgactttttgaatgagtatgaaaaaggaaggactcccaatcctgacatagtttgcaacaagcacatcaaatttagttgcttttttcattatgctgtggataatcttggtaagtaatttgggtttaaaacatttttttttttaaagacagggtctcgctctgtcacccaggctggattgcagtggtgcgatcatgactcactgcagcctcgacctcctgggctcaagagattctcccaccccaggctcctgagtagcttggaccacaggcatgccaccatggtggctaattttttgtggagatggtgtcacaactgtattgtccaggctggtctcagatttctggccttaagcagtcctcctgcctcgg

SEQ ID NO: 344961 - DNA, 1938 bp, Homo sapiens
ggctggggggcttagaattttatttttggtttacagcgcagaagaagagcagtgaggccggggcgcgggtggggagggcaaggcggcggctcaaaaaaaaagccagcccctcgcggcccgacagagtctcggcgccccgcgggtcggtggagcctcaggggtgagcgcaggccggagacaggggaacccgccgcgggacaggggaaggccggacggaacgcgggtaagctgccgcagcttccggccgggccactagcgcggaccctacggccggggcgggacttccggcaaggcgcggaagcggcggtagctgcagctggcgaagttgggcgactggcggatgcaggccttgcggcacgtcgtgtgcgccctgtccggcggcgtggacagcgccgtggccgcgctgctgctgaggcggagaggttaccaggtgacaggggtgtttatgaagaactgggactcactggatgaacatggggtctgtactgccgacaaagactgtgaagatgcttacagagtttgccagatcttagacatccctttccatcaagtgtcctacgtaaaggagtattggaatgatgtgttcagtgactttttgaatgagtatgaaaaaggaaggactcccaatcctgacatagtttgcaacaagcacatcaaatttagttgcttttttcattatgctgtggataatcttggggcagatgccattgccacaggtcactatgcaagaacttccctggaagatgaagaagtctttgagcagaagcacgttaagaagcccgaagggcttttcagaaatcggtttgaagttagaaatgcggtaaaactcctccaggcagctgacagctttaaagaccagaccttctttctcagccaggtttcccaggatgccctgaggagaaccatcttccctctggggggattaacgaaagagtttgtaaagaaaatcgctgctgagaatagacttcatcatgtgcttcagaagaaagagagcatgggcatgtgtttcatcgggaagaggaattttgaacatttccttcttcagtatctgcagcctcgacctggtcactttatttccatagaagacaataaggttctgggaacacataaaggttggttcctgtataccttgggccagagagcaaacataggtggcctgagagagccctggtacgtggtggagaaggacagcgtcaagggtgacgtgtttgtggccccccggacagaccacccagccctgtacagggacctgctgaggaccagccgcgtgcactggattgcggaggagcctcccgcagcactggtccgggacaagatgatggagtgccacttccgattccgccaccagatggcactagtgccctgtgtgctgaccctcaatcaagatggcaccgtgtgggtgacagctgtgcaggctgtgcgtgcccttgccacaggacagtttgctgtgttctacaagggggacgagtgcctgggcagcgggaagatcctgcggctggggccgtctgcctacacgctccagaagggccagcgcagagctgggatggccactgagagccccagtgacagcccagaagatggtccaggcctgagtcccttgctctgacagagatggatctgctagaaggaacctggagagcaggacccatggctgggcggctggtgagcagtccaggtgcccaagggccagcttgctgctgcccaaagcagaggaagccgggctggctgagggtccgaaaagcctgcaggggcccggcgagccccaggaagagcctcagctccaggctggggctctggctgctggagcatctgctggctggtggggtggcccgagttccccttcaccgcccccagggagggtttcccacctcagagtacaccgaggggacctgcagagggggctgtcgggacagcgtggaataaacattatttcaagga

SEQ ID NO: 344962 - DNA, 1558 bp, Homo sapiens
cgcgggtcggcaggaggataccccgtcctctgactttggttcggaggctcctcgccctccacctgtgtagtcggaggtgtgcgcgactgcagctccgactacctgggagcagttccgcgcccctctccacccacgcgcgcccacccacagttaccaggtgacaggggtgtttatgaagaactgggactcactggatgaacatggggtctgtactgccgacaaagactgtgaagatgcttacagagtttgccagatcttagacatccctttccatcaagtgtcctacgtaaaggagtattggaatgatgtgttcaggggcagatgccattgccacaggtcactatgcaagaacttccctggaagatgaagaagtctttgagcagaagcacgttaagaagcccgaagggcttttcagaaatcggtttgaagttagaaatgcggtaaaactcctccaggcagctgacagctttaaagaccagaccttctttctcagccaggtttcccaggatgccctgaggagaaccatcttccctctggggggattaacgaaagagtttgtaaagaaaatcgctgctgagaatagacttcatcatgtgcttcagaagaaagagagcatgggcatgtgtttcatcgggaagaggaattttgaacatttccttcttcagtatctgcagcctcgacctggtcactttatttccatagaagacaataaggttctgggaacacataaaggttggttcctgtataccttgggccagagagcaaacataggtggcctgagagagccctggtacgtggtggagaaggacagcgtcaagggtgacgtgtttgtggccccccggacagaccacccagccctgtacagggacctgctgaggaccagccgcgtgcactggattgcggaggagcctcccgcagcactggtccgggacaagatgatggagtgccacttccgattccgccaccagatggcactagtgccctgtgtgctgaccctcaatcaagatggcaccgtgtgggtgacagctgtgcaggctgtgcgtgcccttgccacaggacagtttgctgtgttctacaagggggacgagtgcctgggcagcgggaagatcctgcggctggggccgtctgcctacacgctccagaagggccagcgcagagctgggatggccactgagagccccagtgacagcccagaagatggtccaggcctgagtcccttgctctgacagagatggatctgctagaaggaacctggagagcaggacccatggctgggcggctggtgagcagtccaggtgcccaagggccagcttgctgctgcccaaagcagaggaagccgggctggctgagggtccgaaaagcctgcaggggcccggcgagccccaggaagagcctcagctccaggctggggctctggctgctggagcatctgctggctggtggggtggcccgagttccccttcaccgcccccagggagggtttcccacctcagagtacaccgaggggacctgcagagggggctgtcgggacagcgtggaataaacattatttcaagga

SEQ ID NO: 344963 - DNA, 1776 bp, Homo sapiens
ggctggggggcttagaattttatttttggtttacagcgcagaagaagagcagtgaggccggggcgcgggtggggagggcaaggcggcggctcaaaaaaaaagccagcccctcgcggcccgacagagtctcggcgccccgcgggtcggtggagcctcaggggtgagcgcaggccggagacaggggaacccgccgcgggacaggggaaggccggacggaacgcgggtaagctgccgcagcttccggccgggccactagcgcggaccctacggccggggcgggacttccggcaaggcgcggaagcggcggtagctgcagctggcgaagttgggcgactggcggatgcaggccttgcggcacgtcgtgtgcgccctgtccggcggcgtggacagcgccgtggccgcgctgctgctgaggcggagaggttaccaggtgacaggggtgtttatgaagaactgggactcactggatgaacatggggtctgtactgccgacaaagactgtgaagatgcttacagagtttgccagatcttagacatccctttccatcaagtgtcctacgtaaaggagtattggaatgatgtgttcaggggcagatgccattgccacaggtcactatgcaagaacttccctggaagatgaagaagtctttgagcagaagcacgttaagaagcccgaagggcttttcagaaatcggtttgaagttagaaatgccaggtttcccaggatgccctgaggagaaccatcttccctctggggggattaacgaaagagtttgtaaagaaaatcgctgctgagaatagacttcatcatgtgcttcagaagaaagagagcatgggcatgtgtttcatcgggaagaggaattttgaacatttccttcttcagtatctgcagcctcgacctggtcactttatttccatagaagacaataaggttctgggaacacataaaggttggttcctgtataccttgggccagagagcaaacataggtggcctgagagagccctggtacgtggtggagaaggacagcgtcaagggtgacgtgtttgtggccccccggacagaccacccagccctgtacagggacctgctgaggaccagccgcgtgcactggattgcggaggagcctcccgcagcactggtccgggacaagatgatggagtgccacttccgattccgccaccagatggcactagtgccctgtgtgctgaccctcaatcaagatggcaccgtgtgggtgacagctgtgcaggctgtgcgtgcccttgccacaggacagtttgctgtgttctacaagggggacgagtgcctgggcagcgggaagatcctgcggctggggccgtctgcctacacgctccagaagggccagcgcagagctgggatggccactgagagccccagtgacagcccagaagatggtccaggcctgagtcccttgctctgacagagatggatctgctagaaggaacctggagagcaggacccatggctgggcggctggtgagcagtccaggtgcccaagggccagcttgctgctgcccaaagcagaggaagccgggctggctgagggtccgaaaagcctgcaggggcccggcgagccccaggaagagcctcagctccaggctggggctctggctgctggagcatctgctggctggtggggtggcccgagttccccttcaccgcccccagggagggtttcccacctcagagtacaccgaggggacctgcagagggggctgtcgggacagcgtggaataaacattatttcaagga

SEQ ID NO: 344964 - DNA, 2057 bp, Homo sapiens
  misc_feature (1951)..(1953): n is a, c, g, or t
  misc_feature (1976)..(1976): n is a, c, g, or t
ggctggggggcttagaattttatttttggtttacagcgcagaagaagagcagtgaggccggggcgcgggtggggagggcaaggcggcggctcaaaaaaaaagccagcccctcgcggcccgacagagtctcggcgccccgcgggtcggtggagcctcaggggtgagcgcaggccggagacaggggaacccgccgcgggacaggggaaggccggacggaacgcgggtaagctgccgcagcttccggccgggccactagcgcggaccctacggccggggcgggacttccggcaaggcgcggaagcggcggtagctgcagctggcgaagttgggcgactggcggatgcaggccttgcggcacgtcgtgtgcgccctgtccggcggcgtggacagcgccgtggccgcgctgctgctgaggcggagaggttaccaggtgacaggggtgtttatgaagaactgggactcactggatgaacatggggtctgtactgccgacaaagactgtgaagatgcttacagagtttgccagatcttagacatccctttccatcaagtgtcctacgtaaaggagtattggaatgatgtgttcagtgactttttgaatgagtatgaaaaaggaaggactcccaatcctgacatagtttgcaacaagcacatcaaatttagttgcttttttcattatgctgtggataatcttggggcagatgccattgccacaggtcactatgcaagaacttccctggaagatgaagaagtctttgagcagaagcacgttaagaagcccgaagggcttttcagaaatcggtttgaagttagaaatgcggtaaaactcctccaggcagctgacagctttaaagaccagaccttctttctcagccaggtttcccaggatgccctgaggagaaccatcttccctctggggggattaacgaaagagtttgtaaagaaaatcgctgctgagaatagacttcatcatgtgcttcagaagaaagagagcatgggcatgtgtttcatcgggaagaggaattttgaacatttccttcttcagtatctgcagcctcgacctggtcactttatttccatagaagacaataaggttctgggaacacataaaggttggttcctgtataccttgggccagagagcaaacataggtggcctgagagagccctggtacgtggtggagaaggacagcgtcaagggtgacgtgtttgtggccccccggacagaccacccagccctgtacagggacctgctgaggaccagccgcgtgcactggattgcggaggagcctcccgcagcactggtccgggacaagatgatggagtgccacttccgattccgccaccagatggcactagtgccctgtgtgctgaccctcaatcaagatggcaccgtgtgggtgacagctgtgcaggctgtgcgtgcccttgccacaggacagtttgctgtgttctacaagggggacgagtgcctgggcagcgggaagatcctgcggctggggccgtctgcctacacgctccagaagggccagcgcagagctgggatggccactgagagccccagtgacagcccagaagatggtccaggcctgagtcccttgctctgacagagatggatctgctagaaggaacctggagagcaggacccatggctgggcggctggtgagcagtccaggtgcccaagggccagcttgctgctgcccaaagcagaggaagccgggctggctgagggtccgaaaagcctgcaggggcccggcgagccccaggaagagcctcagctccaggctggggctctggctgctggagcatctgctggctggtggggtggcccgagttccccttcaccgcccccagggagggtttcccacctcagagtacaccgaggggacctgcagagggggctgtcgggacagcgtggaataaacattatttcaaggaaaaaaaaaaaaannnaaagggcccttttcccaaattcnccctattgaccgggcttaaaattacaattgccgaccttttaaaacctctggttttgcgaaaattattgggtatcccactgt

SEQ ID NO: 344965 - DNA, 2068 bp, Homo sapiens
ggctggggggcttagaattttatttttggtttacagcgcagaagaagagcagtgaggccggggcgcgggtggggagggcaaggcggcggctcaaaaaaaaagccagcccctcgcggcccgacagagtctcggcgccccgcgggtcggtggagcctcaggggtgagcgcaggccggagacaggggaacccgccgcgggacaggggaaggccggacggaacgcgggtaagctgccgcagcttccggccgggccactagcgcggaccctacggccggggcgggacttccggcaaggcgcggaagcggcggtagctgcagctggcgaagttgggcgactggcggatgcaggccttgcggcacgtcgtgtgcgccctgtccggcggcgtggacagcgccgtggccgcgctgctgctgaggcggagaggttaccaggtgacaggggtgtttatgaagaactgggactcactggatgaacatggggtctgtactgccgacaaagactgtgaagatgcttacagagtttgccagatcttagacatccctttccatcaagtgtcctacgtaaaggagtattggaatgatgtgttcaggggcagatgccattgccacaggtcactatgcaagaacttccctggaagatgaagaagtctttgagcagaagcacgttaagaagcccgaagggcttttcagaaatcggtttgaagttagaaatgcggtaaaactcctccaggcagctgacagctttaaagaccagaccttctttctcagccaggtttcccaggatgccctgaggagaaccatcttccctctggggggattaacgaaagagtttgtaaagaaaatcgctgctgagaatagacttcatcatgtgcttcagaagaaagagagcatgggcatgtgtttcatcgggaagaggaattttgaacatttccttcttcagtatctgcagcctcgacctggtcactttatttccatagaagacaataaggttctgggaacacataaaggtgaggtgcagactctgccacttgtcatctgaaatgcctagagctgtggcgtttcagctctgggagactagaccagagttcctgtcgtcccttccacttggctggagaattgtagaaggctctgtggggcggccgggggcgggcacggcctagggtggaacagttgccttgatggtggctgggtgcacttccagatgtggcctcagctgagatgctggagttcatgaaaagcgcgcctctgacttggaaggactatactctgtgagttacgtatcaagtccctgtaaaaagaatgatttccttcctgtgtaaggaaaatgttaaactacacaaaactccactctgattcagggagtaaggtggacgtcccggcatggtgtgaatgattaaggaccacatgcagcgatgggatcaggcgtccgcgctggccagagtgctgctcgctcatgtgcagacccttactgcggtgaggcctgcgtgagcctgtgctgtgcctggtgtcaggggacaggctccgagtcagtcacagtgtgcagtcctgctgtggggacagagtgcagccattgttgggttagtacagtggcggggatgtgcctgccggcgtgatgatcaggcaggtcttgacacagcacagacctgagctgtgggactggccaggagagccaggctgcagctcaggtgtagggcgtcttgcagtgaattgcacttggagatcttccacctcttgtggaggggagacggcaggcggagccggggctaggcattcctgagacaggtggaggtgacagctttgcttgggacagaactgccagacaggattgcccatgtatctgccagccctggccccagcaggagccagttggatgactcatggcttccacctgcagttcacttcactgaagaaggctgccggcccaggccacgtggtaaatccatgaggttctctctgcctgtgtgccccactgcaggggagggaggcagtgagtttgccatctgctgtgtgacattgtgagggtgcgcagagcagctgggggtagccctgatgcagttactgcattagatg

SEQ ID NO: 344966 - DNA, 1317 bp, Homo sapiens
ggctggggggcttagaattttatttttggtttacagcgcagaagaagagcagtgaggccggggcgcgggtggggagggcaaggcggcggctcaaaaaaaaagccagcccctcgcggcccgacagagtctcggcgccccgcgggtcggtggagcctcaggggtgagcgcaggccggagacaggggaacccgccgcgggacaggggaaggccggacggaacgcgggtaagctgccgcagcttccggccgggccactagcgcggaccctacggccggggcgggacttccggcaaggcgcggaagcggcggtagctgcagctggcgaagttgggcgactggcggatgcaggccttgcggcacgtcgtgtgcgccctgtccggcggcgtggacagcgccgtggccgcgctgctgctgaggcggagaggttaccaggtgacaggggtgtttatgaagaactgggactcactggatgaacatggggtctgtactgccgacaaagactgtgaagatgcttacagagtttgccagatcttagacatccctttccatcaagtgtcctacgtaaaggagtattggaatgatgtgttcaggggcagatgccattgccacaggtcactatgcaagaacttccctggaagatgaagaagtctttgagcagaagcacgttaagaagcccgaagggcttttcagaaatcggtttgaagttagaaatgcggtaaaactcctccaggcagctgacagctttaaagaccagaccttctttctcagccaggtttcccaggatgccctgaggagaaccatcttccctctggggggattaacgaaagagtttgtaaagaaaatcgctgctgagaatagacttcatcatgtgcttcagaagaaagagagcatgggcatgtgtttcatcgggaagaggaattttgaacatttccttcttcagtatctgcagcctcgacctggtcactttatttccatagaagacaataaggttctgggaacacataaaggtgaggtgcagactctgccacttgtcatctgaaatgcctagagctgtggcgtttcagctctgggagactagaccagagttcctgtcgtcccttccacttggctggagaattgtagaaggctctgtggggcggccgggggcgggcacggcctagggtggaacagttgccttgatggtggctgggtgcacttccagatgtggcctcactgagaaggcccactctcagcaccctggctgccggctcatgttctggcacgaatgctggggcgccttctcttagacggaggcgggggccagcaggccccacccaccg

SEQ ID NO: 344967 - DNA, 801 bp, Homo sapiens
ccggcatctaaacggagccccacgggtgcttagcattcctcgggcccggcgctgaaatgagcacttgtttaacttcacctgtgtggctccccgcgggaggcctcattcacagagtcacgtttgtggagctctgctttgcgccatctttggctcctgaccttgggcaagtgaattaagccgtcccctgtaaaattcggctaacacctgcctcacggggtgactggagggattagatgacatagtacatactgatgagtacgtgctcagcacatacgaggttaccaggtgacaggggtgtttatgaagaactgggactcactggatgaacatggggtctgtactgccgacaaagactgtgaagatgcttacagagtttgccagatcttagacatccctttccatcaagtgtcctacgtaaaggagtattggaatgatgtgttcaggtgagtgcgggtcacagcacaaaggaagcttcctcacactgtggatccttgcagtggaaggatccggtaaccagccagaccgacgcctgtgctgcagcccagcgctctccctccacggtggtgctgaagactgcaagaggcctcagccaccctcggggctctgtgttagaggcgaggcctggaccccacagcacacccagctctctcactcctgtcattttgccacttgcctgaagtctctttaatgctttcttggaccttgagctgtttctgttgcccagttaggataggggagctaaggctgagggctcccctggaaggtgagcaccaatgcctgtgtgctatgtgggtcagcgat

SEQ ID NO: 344968 - DNA, 653 bp, Homo sapiens
gatgcagttactgcattagatggacactgtgaagacgtgcagctatgtcatgggctcagcaagaagggcccctggcgtcacacagggcacccagccgcatcctgggcctagggtcaggggctcctacagctggaacctgcaccttctggggcacaaggtgccttctttgtggccaccacaccccatgtccagcccaggcctggacaatgatgagatgtgctcaggtgcttggtcagggctggctttggtggttggagaatcgtatcttcctagtgagttacaccattgctgggcctgctctgggctgccctcccagcatctgccttcatgatgaggcgtgacatgtgggctgtaacttgttgcccagcctcatggagaaactgtctttctgtaggttggttcctgtataccttgggccagagagcaaacataggtggcctgagagagccctggtacgtggtggagaaggacagcgtcaagggtgacgtgtttgtggtgagtgggccggcctctgagacagcactggggctggttctggcagggccagcagtgcttccagaccagggcttgagaaggcctccagcagccgtggcttcctggaggctgtgactaactctgttcctgtccttggtcccctgcctttcctgggactg

SEQ ID NO: 344969 - DNA, 737 bp, Homo sapiens
ccctgagcgaggcctgggggtgctgggagcagatgcaggcaggccccggcgtgttgggctgaagcaagtgtgtacactgccccgcagtgtcctgctgcgtccagggcccaggctggtgccctgcccttcccctctaagcaggggtttttgaccccgtgggctggtgctcctttctccctgggggcctgaggtcgaccaggaaaggcctgtgccccctccaagggcccctctcttctacccagtgccctgtgtgctgaccctcaatcaagatggcaccgtgtgggtgacagctgtgcaggctgtgcgtgcccttgccacaggacaggtgcgtggggtgtgggggtgagcccggggaggactgtactgctctgcaccctgccagggcacccgggttacagaggaaggggctgaggcccaggagtagggtgtgctcgggtcacacagctggtgagggcagagtgccaccagccctgccctgggggctcctcccacagtgacaactgtgagaggatttccactctggtgtcaccaaccagccagttcctgctcgggccctgagaggctcagctgctgcccgggccccagaagcgaggacagaaaatggaaggggcatgaggacagtgctcaaagaggcagagggtcggggcccctgtgggccgagtgtgcaggagctcccagggtgggcgcctggtgggtgtaggcctgaggaatctccaggggcaggtggtgggagggaa

SEQ ID NO: 344970 - DNA, 1831 bp, Homo sapiens
ggctggggggcttagaattttatttttggtttacagcgcagaagaagagcagtgaggccggggcgcgggtggggagggcaaggcggcggctcaaaaaaaaagccagcccctcgcggcccgacagagtctcggcgccccgcgggtcggtggagcctcaggggtgagcgcaggccggagacaggggaacccgccgcgggacaggggaaggccggacggaacgcgggtaagctgccgcagcttccggccgggccactagcgcggaccctacggccggggcgggacttccggcaaggcgcggaagcggcggtagctgcagctggcgaagttgggcgactggcggatgcaggccttgcggcacgtcgtgtgcgccctgtccggcggcgtggacagcgccgtggccgcgctgctgctgaggcggagaggttaccaggtgacaggggtgtttatgaagaactgggactcactggatgaacatggggtctgtactgccgacaaagactgtgaagatgcttacagagtttgccagatcttagacatccctttccatcaagtgtcctacgtaaaggagtattggaatgatgtgttcaggggcagatgccattgccacaggtcactatgcaagaacttccctggaagatgaagaagtctttgagcagaagcacgttaagaagcccgaagggcttttcagaaatcggtttgaagttagaaatgcggtaaaactcctccaggcagctgacagctttaaagaccagaccttctttctcagccaggtttcccaggatgccctgaggagaaccatcttccctctggggggattaacgaaagagtttgtaaagaaaatcgctgctgagaatagacttcatcatgtgcttcagaagaaagagagcatgggcatgtgtttcatcgggaagaggaattttgaacatttccttcttcagtatctgcagcctcgacctggtcactttatttccatagaagacaataaggttctgggaacacataaaggttggttcctgtataccttgggccagagagcaaacataggtggcctgagagagccctggtacgtggtggagaaggacagcgtcaagggtgacgtgtttgtggccccccggacagaccacccagccctgtacagggacctgctgaggaccagccgcgtgcactggattgcggaggagcctcccgcagcactggtccgggacaagatgatggagtgccacttccgattccgccaccagatggcactagtgccctgtgtgctgaccctcaatcaagatggcaccgtgtgggtgacagctgtgcaggctgtgcgtgcccttgccacaggacagtttgctgtgttctacaagggggacgagtgcctgggcagcgggaagatcctgcggctggggccgtctgcctacacgctccagaagggccagcgcagagctgggatggccactgagagccccagtgacagcccagaagatggtccaggcctgagtcccttgctctgacagagatggatctgctagaaggaacctggagagcaggacccatggctgggcggctggtgagcagtccaggtgcccaagggccagcttgctgctgcccaaagcagaggaagccgggctggctgagggtccgaaaagcctgcaggggcccggcgagccccaggaagagcctcagctccaggctggggctctggctgctggagcatctgctggctggtggggtggcccgagttccccttcaccgcccccagggagggtttcccacctcagagtacaccgaggggacctgcagagggggctgtcgggacagcgtggaataaacattatttcaagga

SEQ ID NO: 344971 - DNA, 1793 bp, Homo sapiens
ccggcatctaaacggagccccacgggtgcttagcattcctcgggcccggcgctgaaatgagcacttgtttaacttcacctgtgtggctccccgcgggaggcctcattcacagagtcacgtttgtggagctctgctttgcgccatctttggctcctgaccttgggcaagtgaattaagccgtcccctgtaaaattcggctaacacctgcctcacggggtgactggagggattagatgacatagtacatactgatgagtacgtgctcagcacatacgaggttaccaggtgacaggggtgtttatgaagaactgggactcactggatgaacatggggtctgtactgccgacaaagactgtgaagatgcttacagagtttgccagatcttagacatccctttccatcaagtgtcctacgtaaaggagtattggaatgatgtgttcagtgactttttgaatgagtatgaaaaaggaaggactcccaatcctgacatagtttgcaacaagcacatcaaatttagttgcttttttcattatgctgtggataatcttggggcagatgccattgccacaggtcactatgcaagaacttccctggaagatgaagaagtctttgagcagaagcacgttaagaagcccgaagggcttttcagaaatcggtttgaagttagaaatgcggtaaaactcctccaggcagctgacagctttaaagaccagaccttctttctcagccaggtttcccaggatgccctgaggagaaccatcttccctctggggggattaacgaaagagtttgtaaagaaaatcgctgctgagaatagacttcatcatgtgcttcagaagaaagagagcatgggcatgtgtttcatcgggaagaggaattttgaacatttccttcttcagtatctgcagcctcgacctggtcactttatttccatagaagacaataaggttctgggaacacataaaggttggttcctgtataccttgggccagagagcaaacataggtggcctgagagagccctggtacgtggtggagaaggacagcgtcaagggtgacgtgtttgtggccccccggacagaccacccagccctgtacagggacctgctgaggaccagccgcgtgcactggattgcggaggagcctcccgcagcactggtccgggacaagatgatggagtgccacttccgattccgccaccagatggcactagtgccctgtgtgctgaccctcaatcaagatggcaccgtgtgggtgacagctgtgcaggctgtgcgtgcccttgccacaggacagtttgctgtgttctacaagggggacgagtgcctgggcagcgggaagatcctgcggctggggccgtctgcctacacgctccagaagggccagcgcagagctgggatggccactgagagccccagtgacagcccagaagatggtccaggcctgagtcccttgctctgacagagatggatctgctagaaggaacctggagagcaggacccatggctgggcggctggtgagcagtccaggtgcccaagggccagcttgctgctgcccaaagcagaggaagccgggctggctgagggtccgaaaagcctgcaggggcccggcgagccccaggaagagcctcagctccaggctggggctctggctgctggagcatctgctggctggtggggtggcccgagttccccttcaccgcccccagggagggtttcccacctcagagtacaccgaggggacctgcagagggggctgtcgggacagcgtggaataaacattatttcaagga

SEQ ID NO: 344972 - DNA, 1431 bp, Homo sapiens
cagtttgctgtgagaagaccagaagggttaaccaacggcctcctgtccctggacgggtcttggtgcctgcttagaacccaaagcccttaacttcatgctcctcgtcctgcttcaggggcggggcttggcacaatcccaggaggtgccaggtctcaatggcccgaggccatgggtgggtgacagggagcaggggccccccagaccagggccagtcctggggcacctgtgggaagccagcagctaccagtccctcctttctcctcagccatttggtgtgtggaggaattcctggggtggccttgagagaagagcccgtggtgtggctggcccctgtccctgcgaatagaaaaaccagtcctcgaggggggccgtgctgctgccccacaggtggttgcaggtagagggcctgagtcagacttgaacctgcagcattcactgtcatgggctcggatctcacccctgcctcttgcccactctgacatggtacttccttcctgggccttagtctcctcatctgtaaaatggggattcaaaggcccggcgggtgatgagatgaatttctgtgggtagaacacttcgagcggtgccagcaccgttacctgtgtgtgtgtgtgctggtaggacagttgttcccagggaccacactgaggccggccttggggccaggtgcccctcggcgtccccaccttcacattccattctgcaggccccccggacagaccacccagccctgtacagggacctgctgaggaccagccgcgtgcactggattgcggaggagcctcccgcagcactggtccgggacaagatgatggagtgccacttccgattccgccaccagatggcactagtgccctgtgtgctgaccctcaatcaagatggcaccgtgtgggtgacagctgtgcaggctgtgcgtgcccttgccacaggacagtttgctgtgttctacaagggggacgagtgcctgggcagcgggaagatcctgcggctggggccgtctgcctacacgctccagaagggccagcgcagagctgggatggccactgagagccccagtgacagcccagaagatggtccaggcctgagtcccttgctctgacagagatggatctgctagaaggaacctggagagcaggacccatggctgggcggctggtgagcagtccaggtgcccaagggccagcttgctgctgcccaaagcagaggaagccgggctggctgagggtccgaaaagcctgcaggggcccggcgagccccaggaagagcctcagctccaggctggggctctggctgctggagcatctgctggctggtggggtggcccgagttccccttcaccgcccccagggagggtttcccacctcagagtacaccgaggggacctgcagagggggctgtcgggacagcgtggaataaacattatttcaagga

SEQ ID NO: 344973 - DNA, 2140 bp, Homo sapiens
ggctggggggcttagaattttatttttggtttacagcgcagaagaagagcagtgaggccggggcgcgggtggggagggcaaggcggcggctcaaaaaaaaagccagcccctcgcggcccgacagagtctcggcgccccgcgggtcggtggagcctcaggggtgagcgcaggccggagacaggggaacccgccgcgggacaggggaaggccggacggaacgcgggtaagctgccgcagcttccggccgggccactagcgcggaccctacggccggggcgggacttccggcaaggcgcggaagcggcggtagctgcagctggcgaagttgggcgactggcggatgcaggccttgcggcacgtcgtgtgcgccctgtccggcggcgtggacagcgccgtggccgcgctgctgctgaggcggagaggttaccaggtgacaggggtgtttatgaagaactgggactcactggatgaacatggggtctgtactgccgacaaagactgtgaagatgcttacagagtttgccagatcttagacatccctttccatcaagtgtcctacgtaaaggagtattggaatgatgtgttcagtgactttttgaatgagtatgaaaaaggaaggactcccaatcctgacatagtttgcaacaagcacatcaaatttagttgcttttttcattatgctgtggataatcttggggcagatgccattgccacaggtcactatgcaagaacttccctggaagatgaagaagtctttgagcagaagcacgttaagaagcccgaagggcttttcagaaatcggtttgaagttagaaatgccaggtttcccaggatgccctgaggagaaccatcttccctctggggggattaacgaaagagtttgtaaagaaaatcgctgctgagaatagacttcatcatgtgcttcagaagaaagagagcatgggcatgtgtttcatcgggaagaggaattttgaacatttccttcttcagtatctgcagcctcgacctggtcactttatttccatagaagacaataaggttctgggaacacataaaggttggttcctgtataccttgggccagagagcaaacataggtggcctgagagagccctggtacgtggtggagaaggacagcgtcaagggtgacgtgtttgtggccccccggacagaccacccagccctgtacagggacctgctgaggaccagccgcgtgcactggattgcggaggagcctcccgcagcactggtccgggacaagatgatggagtgccacttccgattccgccaccagatggcactaggtgactgacgggagggctcctgaggacgggccccttgaagctgagcttcctgaggccagatttgggccagggatgggagaccctggggtaggaaagtcccgttgtggagatcatttggagattacctaaagtatttagaactcccgtgtcctgtgcctgccctgagcgaggcctgggggtgctgggagcagatgcaggcaggccccggcgtgttgggctgaagcaagtgtgtacactgccccgcagtgtcctgctgcgtccagggcccaggctggtgccctgcccttcccctctaagcaggggtttttgaccccgtgggctggtgctcctttctccctgggggcctgaggtcgaccaggaaaggcctgtgccccctccaagggcccctctcttctacccagtgccctgtgtgctgaccctcaatcaagatggcaccgtgtgggtgacagctgtgcaggctgtgcgtgcccttgccacaggacaggtgcgtggggtgtgggggtgagcccggggagctcagtgcctggtgctccgagcacaggccaggccccataggggagcactctgcccctgcctgccctcggctggctcccttgctgcccaaagcagaggaagccgggctggctgagggtccgaaaagcctgcaggggcccggcgagccccaggaagagcctcagctccaggctggggctctggctgctggagcatctgctggctggtggggtggcccgagttccccttcaccgcccccagggagggtttcccacctcagagtacaccgaggggacctgcagagggggctgtcgggacagcgtggaataaacattatttcaagga

SEQ ID NO: 344974 - DNA, 1044 bp, Homo sapiens
ggctggggggcttagaattttatttttggtttacagcgcagaagaagagcagtgaggccggggcgcgggtggggagggcaaggcggcggctcaaaaaaaaagccagcccctcgcggcccgacagagtctcggcgccccgcgggtcggtggagcctcaggggtgagcgcaggccggagacaggggaacccgccgcgggacaggggaaggccggacggaacgcgggtaagctgccgcagcttccggccgggccactagcgcggaccctacggccggggcgggacttccggcaaggcgcggaagcggcggtagctgcagctggcgaagttgggcgactggcggatgcaggccttgcggcacgtcgtgtgcgccctgtccggcggcgtggacagcgccgtggccgcgctgctgctgaggcggagaggttaccaggtgacaggggtgtttatgaagaactgggactcactggatgaacatggggtctgtactgccgacaaagactgtgaagatgcttacagagtttgccagatcttagacatccctttccatcaagtgtcctacgtaaaggagtattggaatgatgtgttcaggggcagatgccattgccacaggtcactatgcaagaacttccctggaagatgaagaagtctttgagcagaagcacgttaagaagcccgaagggcttttcagaaatcggtttgaagttagaaatgcggtaaaactcctccaggcagctgacagctttaaagaccagaccttctttctcagccaggtttcccaggatgccctgaggagaaccatcttccctctggggggattaacgaaagagtttgtaaagaaaatcgctgctgagaatagacttcatcatgtgcttcagaagaaagaggtacgagtgagcagttgcctttgattagtgcctgtttccctttcccgactgcatggcacggagcagctggacctgtgggtcccgcaccacttccccttctccaggacctaacatcaaaggcgggccttggagcaatagatggaggagtttgctgaggcgc

SEQ ID NO: 344975 - DNA, 368 bp, Homo sapiens
atatctcttccaaatgcttgatgaaaaaggtggaagggtcacttgacccagggagttgaaggctgcagtgagccctgtttttgccaccacactccagcctgggattgatttctaaagactcatgttacgtgaggaagcagctcagaagaggaaaggaaaggagtcaggcatggctcttcctcagatatctcttccaaacacatgatgaaggaggtcttgtcaacagggcaaggcaatagagaagtgatccacacagggacattgcaaagacatcaaagttatcacattggagacttttgcttccaggaaattgagaaagaaattcataacattgagtttcagtgtcaagaagatgaaagaaatggcca

SEQ ID NO: 344976 - DNA, 1256 bp, Homo sapiens
actatcacacaactatttccttggatgtaattctttgttaccctttacaagtataagtgtttacaagtataagtgttaccttacatggaaacgaagaaacaaaattcataaatttaaattcataaatttagctgaaagatactgattcaatttgtatacagtgaatataaatgagacgacagcaaaattttcatgaaatgtaaaatatttttatagtttgttcatactatatgaggttctattttaaatgactttctggattttaaaaaatttctttaaatacaatcatttttgtaatatttattttatgcttatgatctagataattgcagaatatcattttatctgactctgtcttcataagagagctgtggccgaattttgaacatctgttatagggagtgatcaaattagaaggcaatgtggaaaaacaattctgggaaagatttctttatatgaagtccctgccactagccagccatcctaattgatgaaagttatctgttcacaggcctgcagtgatggtgaggaatgttctgagatttgcgaaggcatttgagtagtgaaatgtaagcacaaaacctcctgaacccagagtgtgtatacacaggaataaactttatgacatttatgtatttttaaaaaactttgtatcgttataaaaaggctagtcattctttcaggagaacatctaggatcatagatgaaaaatcaagccccgatttagaactgtcttctccaggatggtctctaaggaaatttacatttggttctttcctactcagaactactcagaaacaactatatatttcaggttatttgagcacagtgaaagcagagtactatggttgtccaacacaggcctctcagatacaaggggaacacaattacatattgggctagattttgcccagttcaaaatagtatttgttatcaacttactttgttacttgtatcatgaattttaaaaccctaccactttaagaagacagggatgggttattcttttttggcaggtaggctatataactatgtgattttgaaatttaactgctctggattagggagcagtgaatcaaggcagacttatgaaatctgtattatatttgtaacagaatataggaaatttaacataattgatgagctcaaatcctgaaaaatgaaagaatccaaattatttcagaattatctaggttaaatattgatgtattatgatggttgcaaagtttttttgtgtgtccaataaacacattgta

SEQ ID NO: 344977 - DNA, 2790 bp, Homo sapiens
actatcacacaactatttccttggatgtaattctttgttaccctttacaagtataagtgtttacaagtataagtgttaccttacatggaaacgaagaaacaaaattcataaatttaaattcataaatttagctgaaagatactgattcaatttgtatacagtgaatataaatgagacgacagcaaaattttcatgaaatgtaaaatatttttatagtttgttcatactatatgaggttctattttaaatgactttctggattttaaaaaatttctttaaatacaatcatttttgtaatatttattttatgcttatgatctagataattgcagaatatcattttatctgactctgtcttcataagagagctgtggccgaattttgaacatctgttatagggagtgatcaaattagaaggcaatgtggaaaaacaattctgggaaagatttctttatatgaagtccctgccactagccagccatcctaattgatgaaagttatctgttcacaggcctgcagtgatggtgaggaatgttctgagatttgcgaaggcatttgagtagtgaaatgtaagcacaaaacctcctgaacccagagtgtgtatacacaggaataaactttatgacatttatgtatttttaaaaaactttgtatcgttataaaaaggctagtcattctttcaggagaacatctaggatcatagatgaaaaatcaagccccgatttagaactgtcttctccaggatggtctctaaggaaatttacatttggttctttcctactcagaactactcagaaacaactatatatttcaggttatttgagcacagtgaaagcagagtactatggttgtccaacacaggcctctcagatacaaggggaacacaattacatattgggctagattttgcccagttcaaaatagtatttgttatcaacttactttgttacttgtatcatgaattttaaaaccctaccactttaagaagacagggatgggttattcttttttggcaggtaggctatataactatgtgattttgaaatttaactgctctggattagggagcagtgaatcaaggcagacttatgaaatctgtattatatttgtaacagaatataggaaatttaacataattgatgagctcaaatcctgaaaaatgaaagaatccaaattatttcagaattatctaggttaaatattgatgtattatgatggttgcaaagtttttttgtgtgtccaataaacacattgtaaaaaaaagaatttgaattgatatctaaaaacagaatttgaattgatatttcatcttgacttttaaagccctagaggctaattgttagtaacatcaatttctattaggatatccgtttggccacacagcaggaggttagagcaatggagcattactgagttcctccccctgtcagatcagcagcagcattagattctcatagaagtgcgaaccatatggtgaactggtatgtgagggatctagagtgccatgttcctcaagagaatctaatgcctgatgatctgaggtggaacagttcatcctgaaaccattcccccatccacggaaaaattgtcttccatgaaactggtcccaaaaagggtggggaccacaggtttaaagcatggccacatttctttatattaaaattctagtttgtacatttcttttagaaacaattacatgttactttggaatcatttcttccatgcttcctccataaagactgataagtcttggatgcaatctgtaaagaaaatacattatttcatcaacttattttgttgtttttcacatacacctaataagtatggtacacaatgccaatgccaaatacaaattgataacaaacacagcattcccaacagagctgtaatctagaaaactgagaaggtctgattgataaatcatcaacaacaataattgctctaaaacctccttaactgacttccttgattgtccaatgctctccattacctctgtaaaacagtcagttatcccatgtctagtgggcacccctgcatgcttcttctaaccactgagtgtcacaatgcctaccaagaatgcgtttgcaggttcctaaacctgtttataccagttgctatgtaaaattgttcccaagggaagttgaatgctctgtaaaggcctaataaaagcaaattactgaacaaaacatgttacagtaattatgagtgagaggaaactaagatggaaggataaaaatctaacactttactattcagatggctccactaaaagatttaagatcttgatccatttttaaaaatccaaaatggaagttgtagacattatctgtagtttatgcacaacaataaattagaaagccaatgtagacacgcataaccaaagaaaatgccttgggtctacataacagttgaataaatgtaaagttgctttttatttattgaaatttgtgcatgtctctttatgcttccctgatttactgattttttaaaaactaaccaactgcctgctttgatagttcagagaagagagctttcgttgtaatattagatttatgtttactggttgacatataagcggtgaaataaatagacttacctaatatggacctctgatgcaacttccattaaatcaccatctacattccaagggaaacaattttctgaagcagtttcatcctcctcctcctctggattatatccaccagtattattccttggatgaacttttacttcctcaacagtgtaagtctcaacaaatggaaaattgaactaaaaataaatacaaataat

SEQ ID NO: 344978 - DNA, 2404 bp, Homo sapiens
actatcacacaactatttccttggatgtaattctttgttaccctttacaagtataagtgtttacaagtataagtgttaccttacatggaaacgaagaaacaaaattcataaatttaaattcataaatttagctgaaagatactgattcaatttgtatacagtgaatataaatgagacgacagcaaaattttcatgaaatgtaaaatatttttatagtttgttcatactatatgaggttctattttaaatgactttctggattttaaaaaatttctttaaatacaatcatttttgtaatatttattttatgcttatgatctagataattgcagaatatcattttatctgactctgtcttcataagagagctgtggccgaattttgaacatctgttatagggagtgatcaaattagaaggcaatgtggaaaaacaattctgggaaagatttctttatatgaagtccctgccactagccagccatcctaattgatgaaagttatctgttcacaggcctgcagtgatggtgaggaatgttctgagatttgcgaaggcatttgagtagtgaaatgtaagcacaaaacctcctgaacccagagtgtgtatacacaggaataaactttatgacatttatgtatttttaaaaaactttgtatcgttataaaaaggctagtcattctttcaggagaacatctaggatcatagatgaaaaatcaagccccgatttagaactgtcttctccaggatggtctctaaggaaatttacatttggttctttcctactcagaactactcagaaacaactatatatttcaggttatttgagcacagtgaaagcagagtactatggttgtccaacacaggcctctcagatacaaggggaacacaattacatattgggctagattttgcccagttcaaaatagtatttgttatcaacttactttgttacttgtatcatgaattttaaaaccctaccactttaagaagacagggatgggttattcttttttggcaggtaggctatataactatgtgattttgaaatttaactgctctggattagggagcagtgaatcaaggcagacttatgaaatctgtattatatttgtaacagaatataggaaatttaacataattgatgagctcaaatcctgaaaaatgaaagaatccaaattatttcagaattatctaggttaaatattgatgtattatgatggttgcaaagtttttttgtgtgtccaataaacacattgtaaaaaaaagaatttgaattgatatctaaaaacagaatttgaattgatatttcatcttgacttttaaagccctagaggctaattgttagtaacatcaatttctattaggatatccgtttggccacacagcaggaggttagagcaatggagcattactgagttcctccccctgtcagatcagcagcagcattagattctcatagaagtgcgaaccatatggtgaactggtatgtgagggatctagagtgccatgttcctcaagagaatctaatgcctgatgatctgaggtggaacagttcatcctgaaaccattcccccatccacggaaaaattgtcttccatgaaactggtcccaaaaagggtggggaccacaggtttaaagcatggccacatttctttatattaaaattctagtttgtacatttcttttagaaacaattacatgttactttggaatcatttcttccatgcttcctccataaagactgataagtcttggatgcaatctaatatggacctctgatgcaacttccattaaatcaccatctacattccaagggaaacaattttctgaagcagtttcatcctcctcctcctctggattatatccaccagtattattccttggatgaacttttacttcctcaacagtgtaagtctcaacaaatggaaaattgaactgattttttacactggcatatcttttcaggtgttttataaattctggccgagaagtgtttcgggcaattataagagccatacttccattatttaatctggtattaggtgccaagcctctaggtgccactgaacacaggcaaggaattgccataatgctgacattcaagaactgaccctggatcatttgccattgatcattacagtcagatttgggagatccctgtgccctcctttcttgcacatcatcagagctgttaaatggtaaaaatgatatttcacagtcttctgccttaagttttgccagtgccttaacaacagcaaaatctctccgttggttaggggacatccatcgatatttttctgccagagccaaagttcttccaccaaagccaaacatggctgagaacccaaagcgaagaagcttgccagcggtgctgaaggtgcagacgtcgaccagctgtacatgccc

SEQ ID NO: 344979 - DNA, 1954 bp, Homo sapiens
actatcacacaactatttccttggatgtaattctttgttaccctttacaagtataagtgtttacaagtataagtgttaccttacatggaaacgaagaaacaaaattcataaatttaaattcataaatttagctgaaagatactgattcaatttgtatacagtgaatataaatgagacgacagcaaaattttcatgaaatgtaaaatatttttatagtttgttcatactatatgaggttctattttaaatgactttctggattttaaaaaatttctttaaatacaatcatttttgtaatatttattttatgcttatgatctagataattgcagaatatcattttatctgactctgtcttcataagagagctgtggccgaattttgaacatctgttatagggagtgatcaaattagaaggcaatgtggaaaaacaattctgggaaagatttctttatatgaagtccctgccactagccagccatcctaattgatgaaagttatctgttcacaggcctgcagtgatggtgaggaatgttctgagatttgcgaaggcatttgagtagtgaaatgtaagcacaaaacctcctgaacccagagtgtgtatacacaggaataaactttatgacatttatgtatttttaaaaaactttgtatcgttataaaaaggctagtcattctttcaggagaacatctaggatcatagatgaaaaatcaagccccgatttagaactgtcttctccaggatggtctctaaggaaatttacatttggttctttcctactcagaactactcagaaacaactatatatttcaggttatttgagcacagtgaaagcagagtactatggttgtccaacacaggcctctcagatacaaggggaacacaattacatattgggctagattttgcccagttcaaaatagtatttgttatcaacttactttgttacttgtatcatgaattttaaaaccctaccactttaagaagacagggatgggttattcttttttggcaggtaggctatataactatgtgattttgaaatttaactgctctggattagggagcagtgaatcaaggcagacttatgaaatctgtattatatttgtaacagaatataggaaatttaacataattgatgagctcaaatcctgaaaaatgaaagaatccaaattatttcagaattatctaggttaaatattgatgtattatgatggttgcaaagtttttttgtgtgtccaataaacacattgtaaaaaaaagaatttgaattgatatctaaaaacagaatttgaattgatatttcatcttgacttttaaagccctagaggctaattgttagtaacatcaatttctattaggatatccgtttggccacacagcaggaggttagagcaatggagcattactgagttcctccccctgtcagatcagcagcagcattagattctcatagaagtgcgaaccatatggtgaactggtatgtgagggatctagagtgccatgttcctcaagagaatctaatgcctgatgatctgaggtggaacagttcatcctgaaaccattcccccatccacggaaaaattgtcttccatgaaactggtcccaaaaagggtggggaccacaggtttaaagcatggccacatttctttatattaaaattctagtttgtacatttcttttagaaacaattacatgttactttggaatcatttcttccatgcttcctccataaagactgataagtcttggatgcaatctaatatggacctctgatgcaacttccattaaatcaccatctacattccaagggaaacaattttctgaagcagtttcatcctcctcctcctctggattatatccaccagtattattccttggatgaacttttacttcctcaacagtgtaagtctcaacaaatggaaaattgaactaaaaataaatacaaataat

SEQ ID NO: 344980 - DNA, 2736 bp, Homo sapiens
actatcacacaactatttccttggatgtaattctttgttaccctttacaagtataagtgtttacaagtataagtgttaccttacatggaaacgaagaaacaaaattcataaatttaaattcataaatttagctgaaagatactgattcaatttgtatacagtgaatataaatgagacgacagcaaaattttcatgaaatgtaaaatatttttatagtttgttcatactatatgaggttctattttaaatgactttctggattttaaaaaatttctttaaatacaatcatttttgtaatatttattttatgcttatgatctagataattgcagaatatcattttatctgactctgtcttcataagagagctgtggccgaattttgaacatctgttatagggagtgatcaaattagaaggcaatgtggaaaaacaattctgggaaagatttctttatatgaagtccctgccactagccagccatcctaattgatgaaagttatctgttcacaggcctgcagtgatggtgaggaatgttctgagatttgcgaaggcatttgagtagtgaaatgtaagcacaaaacctcctgaacccagagtgtgtatacacaggaataaactttatgacatttatgtatttttaaaaaactttgtatcgttataaaaaggctagtcattctttcaggagaacatctaggatcatagatgaaaaatcaagccccgatttagaactgtcttctccaggatggtctctaaggaaatttacatttggttctttcctactcagaactactcagaaacaactatatatttcaggttatttgagcacagtgaaagcagagtactatggttgtccaacacaggcctctcagatacaaggggaacacaattacatattgggctagattttgcccagttcaaaatagtatttgttatcaacttactttgttacttgtatcatgaattttgctatataactatgtgattttgaaatttaactgctctggattagggagcagtgaatcaaggcagacttatgaaatctgtattatatttgtaacagaatataggaaatttaacataattgatgagctcaaatcctgaaaaatgaaagaatccaaattatttcagaattatctaggttaaatattgatgtattatgatggttgcaaagtttttttgtgtgtccaataaacacattgtaaaaaaaagaatttgaattgatatctaaaaacagaatttgaattgatatttcatcttgacttttaaagccctagaggctaattgttagtaacatcaatttctattaggatatccgtttggccacacagcaggaggttagagcaatggagcattactgagttcctccccctgtcagatcagcagcagcattagattctcatagaagtgcgaaccatatggtgaactggtatgtgagggatctagagtgccatgttcctcaagagaatctaatgcctgatgatctgaggtggaacagttcatcctgaaaccattcccccatccacggaaaaattgtcttccatgaaactggtcccaaaaagggtggggaccacaggtttaaagcatggccacatttctttatattaaaattctagtttgtacatttcttttagaaacaattacatgttactttggaatcatttcttccatgcttcctccataaagactgataagtcttggatgcaatctgtaaagaaaatacattatttcatcaacttattttgttgtttttcacatacacctaataagtatggtacacaatgccaatgccaaatacaaattgataacaaacacagcattcccaacagagctgtaatctagaaaactgagaaggtctgattgataaatcatcaacaacaataattgctctaaaacctccttaactgacttccttgattgtccaatgctctccattacctctgtaaaacagtcagttatcccatgtctagtgggcacccctgcatgcttcttctaaccactgagtgtcacaatgcctaccaagaatgcgtttgcaggttcctaaacctgtttataccagttgctatgtaaaattgttcccaagggaagttgaatgctctgtaaaggcctaataaaagcaaattactgaacaaaacatgttacagtaattatgagtgagaggaaactaagatggaaggataaaaatctaacactttactattcagatggctccactaaaagatttaagatcttgatccatttttaaaaatccaaaatggaagttgtagacattatctgtagtttatgcacaacaataaattagaaagccaatgtagacacgcataaccaaagaaaatgccttgggtctacataacagttgaataaatgtaaagttgctttttatttattgaaatttgtgcatgtctctttatgcttccctgatttactgattttttaaaaactaaccaactgcctgctttgatagttcagagaagagagctttcgttgtaatattagatttatgtttactggttgacatataagcggtgaaataaatagacttacctaatatggacctctgatgcaacttccattaaatcaccatctacattccaagggaaacaattttctgaagcagtttcatcctcctcctcctctggattatatccaccagtattattccttggatgaacttttacttcctcaacagtgtaagtctcaacaaatggaaaattgaactaaaaataaatacaaataat

SEQ ID NO: 344981 - DNA, 445 bp, Homo sapiens
ttttttaaagggagagagaaagcgatcttcggactttattgttaagtgaaaaaaagcaagatgcagacctgtgtgcattttatgctaccatttgtgtaaaataggaaatgaggtgtatttgtatttgcataacatgtttctagaaggatactcaagaaattgttggttggctgggaaacaaggaagggaggtcattttcacagtttacccttctgtgccttttggattttgcaccatattcaggtgttaaaaactcaaaacaagttttaagtattaaacatgaacagaaaaagcttcacataacaaatgccgaaaaagtcgagtgaatgaatctttcagtctgtacttaaattcttcttctgcctgggagctcgttatttcaccaagcagcccaatctctcattatgcacatccctcatcctgatgtgctgcttcgcaagatctg

SEQ ID NO: 344982 - DNA, 769 bp, Homo sapiens
ccagtattacaccaaggaaaacgttccagaaacgtcgataagccggtggtgaattactgccatcggaacatttacggcattcaaagacagaaaaaacttcatcttgaaaaatcacaatccaaaaacaacagccattcttacaccaattcataaaaaatatgtgaaccactttatccctaaatactgcaaaaacatcaaaatgagggaacagtggaacaacagagggtctttaaaagtgttattctttgtcgccctttgtttctgagtaatgctcacgatgatgctgattcaaccactgctcttctgggatcggggaccccagaaaagaacccaccgcccgagagccaaagtggaggggtgaccctcctccccttttcctgccatcagcctcccaagtagctggaactacaggcatgcctcaccatactttgccccttctacttttgtagagccaagcctgaccttcctggactgttgttttcaagcataatatctctggtacaacattgatacaatccacatgagttctttaagtaagtggctagttacttggggattcaaaggatcatcttgtctcagactttgggttcctattgtcaatacttaaattctatgataggatgccccaggaaagaaggaatacaaggccgagctgcgtggtgactttcaggggccctatttttgccttagtaggcctttctctccataaaacagttaataaaaatttcattttatagtcacattgctatgaagatgattatattaaaat

SEQ ID NO: 344983 - DNA, 400 bp, Homo sapiens
catctgaaccatcagtcactctctggcccagagaggtggtgttatttgccaaggacacacagcaggtggccaagatggagccaagccattttccccactgcagggacccctgatctccattcccctggacatctcaagggcacaaattctctggacacacggagggaataatgctgacattttatagaagctgacccactggatatccttctcacccaactccattaggctggggagagtaagaggcacggtgacaaggtggcaaagatgtcaccatgccatccaatcacgaggtctccaggaaactgtataagaaggacacctccagaaactcctggcactactgaacaaatgtataatatccctgggtaaaaccaagagtcctctcgccttctcgcca

SEQ ID NO: 344984 - DNA, 726 bp, Homo sapiens
cttctcccctttctctctcctctttactaaccaacctccagaacaattcttcttgaccgtaagtgactctgcccacctcctggtgggtttctcagctcgttctgatgggtggctcacaggggtgggaaggaaattaggttctgcaccaaatagatctaaggtactaaaatgaccctcctggacaggaggctcaagtggtaggactaaggcctaaaaccatgcaatgttttgggtttcctctgctttttcaactaaaatcagctctttcccaaagacctgcacctcccattctcctcttttcaatgtgtgtattccgagatggccttgcgtacctgccagatcatccatttccaggggcaagtctctgtctttgctttcactttgcatgccatgtgacttcttaaacaaatactccttgttattcttgtgcccacggctctctgcatatatgcagcagcagagacatgggctctcttgtagatatcccctgaaattgatacttgtttttaccctagcagctcaaataacctccagcccttctcctgcccattggcatatggctgggacagatactaattggaactctgcctttgccagttccttatgacttagtatatgctttttggtcctgttatgccccaggactgagttttttggtggctttcaaagcagattgtcagcgtgcatactggacttaaatccttaaaggactctggtcctataagg

SEQ ID NO: 344985 - DNA, 1078 bp, Homo sapiens
gttctccccacctttgcttaaccagagtcagcctcttctgttgtctgcatgggtccctgtgtgaacaggttggaggaaaggaggtgtcaaaaccgctgaactacgtgagctctgtggccccttcttactgggaagccctaggacactacagtcatggtccacacagcctgaacagctgttcctgtagatacgcatttatgctttaaaatgcctgggaaatgtgataagcatccaggttctctcccagccaccctgaccaggcagctactcctcaggagggctcaggagaacagtcccgccttcagccccaaggcgggggtgagtggtctcgggcactccgggccccacttccaggctctcctgcagggcagcagatagtggacctgcagaccccgcatggtggtcaggcagcaggtagaagaaaacagatggtgatttattgtttttgaatcttggttccacatattcccaaccagaccaagggcctttcctccttcctgccattctcccactccttttattaatacttgcacatatgtaaagctcccagtgaagtgtctggctcatcatttattgaacacaaaccatgtgctggtccctgcagtaagtgcctgacctccatcatctcagcagctgtgtgacagaggctcccttctccaggagaagacctagccccagctgcccaagagaagatcccaccggtgggaaaaggtggcagccgctggggttcccacccgttcctcctaccgtctggtgctcttacacttcagcaagtagccattttccactgtgcatttatctcttctgttccttcactcgttccttcctatattctttcatcctttgatccaagaagcttcaactgactacaatccaattccttaaggagtttctcatcagtatcttctcctaggataatttgtagctaccttctttttctaggggaaaataatgctcatagaatggttatgctgctgtaactgagacacatccttactttcctttggaataatttttcttatcatccacacttgttcaaatttcggtgtttcttgactgaaatgataggctgggcaca

SEQ ID NO: 344986 - DNA, 493 bp, Homo sapiens
agtatgatttgctgaaaagatgactttttctactgaatagtttttctacccttgttgaagataagtgaattgacaatgtaatggttgatttttggactcccaattctattcctttgatatatgtgtctatgcttatgctagtaccacactgtcttgacactgtagctttgccgtaagtgttgaaatatggaagtatgagtcttctacatttgcactctttttcaagattgtggttgctattctgggttctatgcatttacacatgaactttaggattaacatgtcaatttctacaaaaagtcatctgtaactttataggaattccatttagtttttagataaaatatggaaaattgcctgcctaagaatattgagtcttcaatccacaaacatggaatggctctctatttttatgtcttctttaatttctttcatcatgatttgttgttttcaacaaatgtacatgtcttgccattattttcttaaataaatt

SEQ ID NO: 344987 - DNA, 253 bp, Homo sapiens
ttatgaggaaaggaattagatacgtttaacccagaagaagacaggaaaggaagaacattgggggttggggagggacaattagaaaaccaacatatgaaaaagccttccatgtgaaaaattacctgaaagaaaatggactaaaaataaataacaattgaaaggcagagatgatcagactagtttaaaaatccaaaccacacatacatagtcttttcaacgagtgctggaacaaacaaatcatccatatgccaaa

SEQ ID NO: 344988 - DNA, 204 bp, Homo sapiens
gtggagtcaggattctaatccaggcaaatctgctccggatacttttgcttttagtattactaatcttcattcctgagaaaataacacattttatcaatgtccaataaactgctaaacagcccttaaatagcatttgaaactggaaggggtcttagaagttatccagtagaaaccttctactccttttctttaaagaaactgaag

SEQ ID NO: 344989 - DNA, 552 bp, Homo sapiens
cagtcatttgccaaacatctataccaacagataggcactatgattaatagggaagatgaaactgtaaacagttgtttcaaatagtgaaaggtcttataaagggccagggtgtcagggtggaagaactgattcattttgctgtagagaaaggattaatggcaagtttcacataggttgacatatttgcattgcgtctctcaagaagaggatgccataagagatacttcaggttgaagtgtactcatgtgcaaaggcatgagtatacatgtggtcacattctttaggaccagaggaaggggtgctggttttgaggggatgagaagagccaggtgatgggggcttgatggcccatgcaaactgttggacttaactgcaggtgaggaggaggctcgaaggctttaacggcagaggagtgctcttgcagcatgaggaagatggctcagacggaggcctcactgtttgtgaagagaaaaagaaagcttgccagagtccagatggtggtgacaataaggatagagagggggcagtggatttaggaggcaagcttgcctg

SEQ ID NO: 344990 - DNA, 548 bp, Homo sapiens
taaacattactttattagcaaccaagaaatgcgtattaaaaatactgaaacataatttttcagctataaaatcggcatgtattaaaaagtttaagcctacggccaggtgcgatgctcacgcctgtaatcccagcactttgggaggtcaaagcggatcacctgaggtcaggagttcgagaccagcctggccaacatggtgaaatcccgtctctactaaaaatacaaaaagttagccagtcgtggtggcaggcgcctgcaatcccagctactcgggaggctgaggcaggagaatcgcttgaacctgggaggcagaggttgcagtgagctgagatcatgccactgcactccagcctgggcaaaaagagtgaaactctgtctcaaaaaaaaaaaaaaaagtcacttaaatagcaaagtttattcttggatatccctcaatctcacttagaaacaccatagcacttaggaattctaagctgacaccagggtttactcaagattgctaacagccatgaaaagcacaactatactggacaatggatgatgggatt

SEQ ID NO: 344991 - DNA, 134 bp, Homo sapiens
cattttcgtgtaatttaatacctggaagccaagtattccttcctaagtagttttacctagtaattcttggagattctcttgtgactcatgtcatttattaaaaagggctgcattggcagcgcgtggtggctcac

SEQ ID NO: 344992 - DNA, 1009 bp, Homo sapiens
ctattataaatactttatttcaactagaaggtacaatctctcaggggtttcatagtttaaaaagctacaattacatcatgttgtaactacataaaaaacagagctgtagatggaactgcttggctttgaccatacacatttctgcacagcccttacagaatctgcacaaagaaatatctcccttttctccagttaattgttcttgtatgtaagttgctttctattccagcatacccagagtggtgaaataacaaggccagccacgtagccaaaggtcgctccaagcgtacaggagatgggccccatacctgaggagagaatgtatgagatcaaaaaagaacaaatgttttattacttgagcacaagtgtaacctaaatatttctatattaaagcttaatgtgctttcttaaaaaaaatcaggtcacagcatcctgcacttgccttgtcttgatatttgttatgcttataagtacttgtttaataactatctctcatcagattgtcaactctttaagtgtagttaccctgtcagtcttattcattgctatgtcccaagcccctattagagtacctggtacatagtgggttctgaatcaatagttgttgaaatctaaagcagatgcaacagcaatcattaattttttttaaattttaaatatgccatttatatagatgataatcattaaattttttttgagcactcattatgtgtcagtcatcgttctagcactcaggatagaatagcaaaggagacaagattcctgctctcatggagtttgtatataacctactgggaggtgtgcccaccccaggctaatggactgaagttatgaaggcaagtaactgctattggcaactcttcctacagttacatagttggaatgggagaaaaggagcattctctcaaaacatggtgatcctgttctcaaaggagagttactggacagacagagcagtaacatccaccaccagctagatgaggagtataacttcccaactgctaaaaaa

SEQ ID NO: 344993 - DNA, 368 bp, Homo sapiens
ctattataaatactttatttcaactagaaggtacaatctctcaggggtttcatagtttaaaaagctacaattacatcatgttgtaactacataaaaaacagagctgtagatggaactgcttggctttgaccatacacatttctgcacagcccttacagaatctgcacaaagaaatatctcccttttctccagttaattgttcttgtatgtaagttgctttctattccagcatacccagagtggtgaaataacaaggccagccacgtagccaaaggtcgctccaagcgtacaggagatgggcctgctcacactcgagtgtcttcttgtttttctgcaaggcacttgagaggaagtgatatagaataaaa

SEQ ID NO: 344994 - DNA, 353 bp, Homo sapiens
ctattataaatactttatttcaactagaaggtacaatctctcaggggtttcatagtttaaaaagctacaattacatcatgttgtaactacataaaaaacagagctgtagatggaactgcttggctttgaccatacacatttctgcacagcccttacagaatctgcacaaagaaatatctcccttttctccagttaattgttcttgtatgtaagttgctttctattccagcatacccagagtggtgaaataacaaggccagccacgtagccaaaggtcgctccaagcgtacaggagatgggcctgagtcaccataagctttgctacttcgttttatgaatttggaatatgataa

SEQ ID NO: 344995 - DNA, 334 bp, Homo sapiens
actactactactaaattcgcggccgcgtcgacgggacccatgttttaataatgctttatttttctccaaagaatatcttcattattttaccaagatgcataatagggaaaaattatcttatttaattgacatactgtgcctacagtgatgtgtgaggctacaaagattcaacaacctggttcagctatgttattactattgctcctcttgattagtgttaattggaatattttaattgatgcaatgtttcactgctttcacagcttgagtgagctgaagtacagagaacaatttttcaataatgaaaactaacaaaagctaccctgatattact

SEQ ID NO: 344996 - DNA, 10490 bp, Homo sapiens
  misc_feature (196)..(196): n is a, c, g, or t
ggcggcggctccggggaccggggccttttgtttggagcggctgcgggggggccccggagcggcgaggccggcggccttccccagcttgctcggtcccggccacccctcgcgggggtggggggccgccccctgggccgggcatctcctcaggcgccgccgccccgccctaggccggccccgcccggcctgaggggangaaccggccgggcctcgccgcgcggcccagccacctccggagtcgccgcctctgctctcagtgccccggatcggaggccgtccatcgcccctcgggccgacgccatgaagatcaaagatgccaagaaaccctctttcccatggtttggcatggacattgggggaactctagtaaagctctcgtactttgaacctattgatatcacagcagaggaagagcaagaagaagttgagagtttaaaaagtattcggaaatatttgacttctaacgtggcatatggatccaccggcattcgggatgtacaccttgaactgaaagatttaacactttttggccgaagagggaacttgcactttatcaggtttccaacccaggacctgcctacttttatccaaatgggaagagataaaaacttctcaacattgcagacggtgctatgtgctacaggaggtggtgcttacaagtttgaaaaagattttcgcacaattggaaacctccacctgcacaaactggatgaacttgactgccttgtaaagggcttgctgtatatagactctgtcagtttcaatggacaagccgagtgctattattttgctaatgcctcagaacctgagcgatgccaaaagatgccttttaacctggatgatccctatccactgcttgtagtgaacattggctcaggagtcagtattttagcagtccattccaaagacaactataaacgagtgactgggacaagccttggagggggtacctttctgggtttatgcagtttattgactggctgtgaaagttttgaagaggctcttgaaatggcatccaaaggtgatagcacacaagctgacaagctggtccgtgatatttatggaggagattatgaaagatttggtttgccaggttgggctgtagcatctagttttgggaatatgatttataaggagaagcgagaatctgttagtaaagaagatctggcaagagctactttagttactatcaccaataacattggttctgtggcacgaatgtgtgctgttaatgagaaaataaacagagttgtctttgttggaaactttttacgtgtcaataccctctcaatgaaacttttggcatatgcactggattactggtcaaaaggtcaactaaaagcattgtttctagaacatgagggttactttggagcagttggtgcacttcttgggctgccaaatttcagctaaagcatcaggtctctctctctgctaataaatgtcatccaagaggaactaaaaccagaggcattattactgcattgtttgtcactgggaaccaaaggataaaagagtagcataagctgctgaatgttgccatattaaaggagagaacttggtaacgtgaagtatttctcattgaaatgctttcccttttgtatatagccagtgttaaatccttaaatgcaatacagcctctgattattgagcttcctcttaaaaagatttttttattttatgtagccaacattgcagtactgtatgctcaaacacaaatcttaaagtatcggaactgtttagcttatgaaaataatcgactctgaatatttgttacaagtctgttttatgtgttttgattactagtgagcagaaaataacataccctgtattcaaaattactgaaatggcaatcaaagatgatcatttttatgtgattttagaaatgttaaggcaatactactaattattgtaggtttttttaacgtatcacccaaagcatgtatgtgatctttccccattagtatctttttctcaaatgccataattaactgaaatactattattaaattttcatgagaattctaaaatgaatcctgggaaatgcacgtttggtgatgttgcactttctgtattttacaggaattagtcaatacatgttgaaatgtttaacattttaagattggaggcttaattactgggagtctgtctaatgaagtcctgggactattgtaatggaatatgatttgagttcactgtgctctttttgtttgtttgttttggtcatatatacattcagaacttttattttaaaacaaccacaataacattaataatagaaaattcatctgtaaatattcacagtctagtcactgaaaaatgggaaaacctctaccatgccttattattaccctttgctgtttgaggagccagaaatagaggtgcagttagaggacggtcactttttccaacaaaacccactccatagccatgtggatttttatccaaaggctcaacaaccagagggaatggtgagacctgataactaaaatactgttattggcaagggtttgaaatgtgtaagaacctaggagggaaaggaagattgagcaacataggaaaaggggaagagaggctgagtgtcaccaaggtccaaactccatttataaaaatactgcaaaaccaggagttgatggtagaagtgcatatgatccatggcaggagtaaatctctccacctcctctaactctctgaaaactctagagttggagcaagtcttccatttgcttcttatccccttaaaagaatgccttccacttcccaacagcccccatcaagggaccccaagaggccaccatgctcttatctcgcactttctttcctattccccttgcctgaatctggagtggggttgagccctctgccttcaaccttaagatttaggaagttctttccccaactgtctaacttggaaaggtagatgagtctgaattttgaagtaacgaatgcaaattccactcagcagaggcaatgttatttatgtacatagggatagtggaatgagttttaatagattctgtccaaaaggggtttgttcctcttatttcctctatgtaggaagttgtgtcttaggcaactttatcagtatcaatggaaaaatgataggcactacaatgaaatggcaggatgccaatatgagatatttcaggaataataagaaatacagtttgtttgtataaaataaactatctcaagaaagttttcaacgacagtgatagtgttcatttgtaagagagagttctagaacttcgatgtccagtgcagtagccactacccatatgtagctgttgagcatttgaaatatggttagtccaaattgagatgtgctctaaaggacaataaaaggttaaatatctcctaattttttgtattgattacatgttgaaatgttaacattggaaatattgggttaaagaaaaatacacaattaaaatgaatcttggccaggcgcagtggctcacgcctctaatcccagcactttgagaggccagggtgggcaggtcacctgaggtcaggagttcgagaccagcctggccagtgtggcaaaaccctgcctactaaaaatacaaaaattagccaggcatggtggtgcgcacctgtagtcccagctacttgggaggctgaggcaggagaattgcttgaacccaggaggaggaggctgcagtgagctgagattgtgccactgcactccagcctgggcgacagagtgagactctgtctcaaaaaaaagaatcatctgtttccaattatttttaaatgtgcttactagaaaagataaaatcacacatggtttacattttatttctattaagacagcaccgttaagaacatagagctttgaggaattgtggtattagaaccaaatctatttaccacagtgagcttacagggagttactcgagatcttaataaaaaattataatctttggcagccttcattatgattttgtgttcttattattccagtacctctagattacatatgggaaaagctaaagagccacagtggtgagatggttgctcactctagcaggtaatttcagtttgaaaggataaaatatatgaatcatagttcacattaaccaaagtacagtgatgaaataacttagactctgaccattccatttttttcttaaagattgccctaaatctatagatgctaatacagtatttgccacaggtataaaacttgtagttactgtcattcaattaagattcttatctgtacagatatacaaatcagaaacttttaaaataaattgaactaatggaattttggctccaatatttagtcactacaatggaaatattaaagcaaggaacatgaagtcattgtagggttttaaaatggctactgactgacatgaattcagagtttcaaacagtctaaattctaaaaacttaactttacacgcttttcctcctaaataaccactctaataattcatacattcatatcttcaggtaaagaaaactgaattttaaacaattgaggctgggtgcagtggctcatgcctgtaatcgaatataaggacttgagtataaaatttgaaaactacatggggaaatgtctttatcatgcatctcttgatagtctactgaaaactattaagtaaacctgcggtctgtaaacaaaaaaacccatagtgatacttaccttgtgtaatgtaaacaattttttaagctctttaaagtacatctagatttactggtaatgtatagaagtcaattttatccccaagcatttctacttcctaaaccattagcaagagtctcaaaacaacttcactaaactattggacctccagtgttaacttgccaacataaaaatctgaaaaactttgtaatcactatcaaaaatacaaaagagagaataaattcccaggtaaaaggctttacaaattttggaactattatgcttttgtttactaaacactgatccttttagtaattctgcagtattgcctcagactcccacaaagtttcaaaatagctcatctattagattcctgtaacatttatttgggataaacgtggttttgttgccgttgttcataatagaataaaatatttagctttgatggttcagatgtaatacaaagaaataactaagtttgggcctgagataaatgtggtaaagcaagaatgcagagatgctgtaatgatgagtgagttttatagcattactgaggacctgaaaacttgctgccaaggacactttgaaggttttgttggctggaagaagtgtctctggaatcccactcctagctcttcttgaatatttgaaaagaattagataagggccatggggacccaggtcaccccacctcttcttttcagtttggctacaacattggagtcatcagtgctcctgagacagtcatacaggactttctcagttacactttgaaagagaggtcagaagactctccctctgaggttttgctcatgtccccctggcccttgtctgtggccatcttccccaatggtgatatgattggctcctttctgttgcactctttgtcaaccactttggcaggtgcagttcaatgcttatcataatttgttggctattactggttgccttatgggattctgcagacaagctgagttggttgaaatgctgatcctgggccactagattactggcttgtaatgcggactctgcacaagttttgtgcccatgtacattggagagatctcgcctactcccctttggggtacctttagtgctctcaaccagctggacgtcgttggtattctggagatccagatctttggtctggagttcatcttggggtctgaagagctatgcccagtgatactgggctttaccatccttccagctgtcctataaagtgtagcccttccattttgccctggaagtcgtaagtttttgctcattaacagaaaggaagagtactaatgagatccttcagcaattgtaggggactcaggatgtgtcccaggacatctaggagataagagtgctaggatgatacaagcaaagcaagtcactacactggcgctctttagagtacccagctaccaacaacccactgtcatttccatcatgctccagctctctcagtagctctctggaatcaatgttgtcttctattactcaatgagaatcttcaaggatgcaggtgttgagaagccaatctatagattagtgcaggagtggttaatattatcttcttgactgtagtctctctgtttgtggttgaaagggcaggaaggactttacatatgataggtcttgaggcatggcgttttgttctgtcctcatgattgtttctttgttattaaaggatgagtatggtgggatgagctttgtctgtagtggggctatcttggtctttgtggccttctctgaagttggaccagactccgttccctggaatactgtggccacactcttcagtttgcaatagcagtggctggttgctccaactggacctccaactttctagttggattgctcttcctgaacaattattatctagtttaagtgtgttgttgctttagggtcatggcatgcttatgtatttctgttaccatctgaccatggtactatgccaagttctcttaggggacctgaatctttccagtagaccacatttgagagagtatgagtcaactgggcatagttcccaacaacccaaaatacatacgtacttcactgaagcagatctcatgattccattgacttcatttctaaaattggactttgagcagccaatttctaaggattaaaaagaaactttaatgcattgtagacctctgtacacagaaaaatctttgtaacttttgggcttaattttcattcttaaaaaatctggtaactttttcaaatgcaaccactgtcagtttgctgtgaggctaggcaaacaacacaaggtatagaatttcccatcaccaccaccctgaccccgcgagaagattgccttttaattagagacttgtagaactagtgccttttaagttctacactcatcttttccaaagactattagtaaacttgccatgtaatttgacatggcagttccttgctcagctactctaaataaagttggaaattaggtggtctcttagtttgggtaaagtcagtactattgccagtaatatacatggtaattgaaagcccttaaagtggttcagattatttgccaaatattagactctataaaaatttctgaggttttttttcttttacctttgagtgtacatgtgattgctataatgtaaataccagtcccttaaagactgtttctataagcagaatgatgcagcacaaagtggaaaggttttcctcttattccagcagtattcttgccttcaaagagtagtccatcttgccttgatttttaaggttgttttcttggatggaaagcttaactggatagtaatttccatatgttctttataaccactctgtatattataagcaaagttttttcatattgtatctttttctgttgagcactttatgcattttagtctattgcatttgagaatgtagtttagaaattcactgtttaaagccatgtgaaaactgatagaggataatgaaaatgagtgtacattattttgaatttaacttaactgttttgtggtgggtgtgaacaaaacattagaaatatattatctttttgtgataatactctctgacctcacttaaagtgatctgccatgaggtatccatgatcaagtttatgtttattctaatacctaaggaattcagccaactttgtttctatcatcagataatctcagaaaatagtgtgttttatctatattactgcctcttttcaatatttaagagaataattgtcttctggtttctactgagcctagtaataatcactaaagacctaaaaaaggaattccttctgttaagagtatttggatagcccattcacgataatggtggtgtgaaaatcaatcatcccagcttttctgacatatctaaattttgaataattaatttccacttccaaaaaattcaaatgttttctcaaagcagtcactacttatttgcattattcctgcatattcagtgaatgtgaggtcatatttggtattgtattagaagtagtgttggtcactggtcttgcctctttgaacattatttttatttgtaaaatgagggagttggtttgttatgatgggaaatgagtcagttttcagggtcctgagaaaattgcttcattcatggctgtgtttgagataactaaagtaaattttttttcaggtatttggtgtcatgttttggagttaatatttagtgcttatataattttaagttattacataatttttattggtatatatttgataggtactaggtattggattctcaccaaaccagtagaatggtattctctcttaatatgtgattgcctgtaatggccaggtagatataccttaaagtaatatgaaaggttttatatgtatattaaaatgtttgtacttttaaatctgtaaaggttatctggaatttttactgtgttaacttcagaattatatgggcattatgactttttcattgtacaaaaaattattcataaatgttagaatacagatgttccttgacttacaatagggttatgttccagtagacccattgtaaattgaaaataccgtaagttgaaaatacatttaatacgcctaacctactgaacatcccagcttagcctagcctatcttaaatgtgttctgaacacttaacgttggcctttagctgggcaaaatcatctaatacaaaacctattttataatgaagtgtttaatatctcaaataagagtattgtaccacatatcgttatcccaggataatatcagagtacaaaatttgaagtacagtttttaactgaatgtgtattgcttttgccccattataaagttgaaaaaccataagtcaaaccattgttaagtcggactgtttgtgttacatatatttgggattttttagtggccctttttaaaaagctgtttcttatttctgatcattgtgagtggggatagatgtgggaagaaccatgtctctactaaaaatacaaaaaatagccaggcttgttggcacacacctatagtcccagctactcgggagaccgaggcaggagaatcacttgaaccgggaggcagagggcagatcatgccactgtattccagcctgggcaacagagtaagactctgtctcaaaaatgaatgaatgaatgaatgaacgaatgaatgtactatgagctgatactgggatttcaggtaccgcagtttgtgctgaatgatatgtttggggtaaatcagtttttttcttatagaatttcggcgtttttgctgcaactgccactaattttgcatttaaaagaacaaaagaggaatgtatttttcaaaggagtgaatgaggttaaaatcaagattttgaatggtataaatatgcaactaattcagttgtaggatattattaaattttttattgctaaatatgtttctttcatacgttgcagtgcttacagttccaacagctttccaagaaaacatttccatatttgtgttatttgtaaagtatacataaataatgtaaaataatttgggattatttcaactttacattgtatgtctgaatttcatcgatgttgtacctggctcagtcaatagttgtcacaggtattaagccattttggaatttgccacttttttctgggtaacctgttttagtttagtttacagcatttagaaacagaaggtaactttatagaagtaacaccaatatcctagtctgcttgccccgaatataactaatagtattaggatgtaagcaatattaagatggtttttattattttttatacactgtgtgcttttactttttatttaaactacagcaaaaaactgattttttaactaaaattgaatggcgtttatcttaatgaccagttattgaccaaagtgtactcagaagatgttattatgtcccaatctaaggaatcctttaatttggggattaattttacttacacatgccatttcagtttcagttgcctcattctattacatcattcttgtcaagtctaagctttatcatgtctgaattcttttaacactgaatctgtgatgtaaaaatgtatgatgtgccataaattttattcataataaactaagttatagcctattgtaatctgtaaaacatttcttgtaaattacctaatttattttttcatttatgtacagtatcttatgtaaatttgaaaaatgtttgccatggcgcattctgtaaacattcccgtattcttttccttaatgcttatttgcatgaaggtaacttgggttttgcttgtttgtattggataaccattaagccaacttcagtttctctgcctttttttctgtagtttaaccatttctaattttgttcatattctaaatagatgttagaatcatactttttattttctactttctaaataaattatctaagttgtttacta

SEQ ID NO: 344997 - DNA, 10436 bp, Homo sapiens
  misc_feature (196)..(196): n is a, c, g, or t
ggcggcggctccggggaccggggccttttgtttggagcggctgcgggggggccccggagcggcgaggccggcggccttccccagcttgctcggtcccggccacccctcgcgggggtggggggccgccccctgggccgggcatctcctcaggcgccgccgccccgccctaggccggccccgcccggcctgaggggangaaccggccgggcctcgccgcgcggcccagccacctccggagtcgccgcctctgctctcagtgccccggatcggaggccgtccatcgcccctcgggccgacgccatgaagatcaaagatgccaagaaaccctctttcccatggtttggcatggacattgggggaactctagtaaagctctcgtactttgaacctattgatatcacagcagaggaagagcaagaagaagttgagagtttaaaaagtattcggaaatatttgacttctaacgtggcatatggatccaccggcattcgggatgtacaccttgaactgaaagatttaacactttttggccgaagagggaacttgcactttatcaggtttccaacccaggacctgcctacttttatccaaatgggaagagataaaaacttctcaacattgcagacggtgctatgtgctacaggaggtggtgcttacaagtttgaaaaagattttcgcacaattggaaacctccacctgcacaaactggatgaacttgactgccttgtaaagggcttgctgtatatagactctgtcagtttcaatggacaagccgagtgctattattttgctaatgcctcagaacctgagcgatgccaaaagatgccttttaacctggatgatccctatccactgcttgtagtgaacattggctcaggagtcagtattttagcagtccattccaaagacaactataaacgagtgactgggacaagccttggagggggtacctttctgggtttatgcagtttattgactggctgtgaaagttttgaagaggctcttgaaatggcatccaaaggtgatagcacacaagctgacaagctggtccgtgatatttatggaggagattatgaaagatttggtttgccaggttgggctgtagcatctagttttgggaatatgatttataaggagaagcgagaatctgttagtaaagaagatctggcaagagctactttagttactatcaccaataacattggttctgtggcacgaatgtgtgctgttaatgagaaaataaacagagttgtctttgttggaaactttttacgtgtcaataccctctcaatgaaacttttggcatatgcactggattactggtcaaaaggtcaactaaaagcattgtttctagaacatgagggttactttggagcagttggtgcacttcttgggctgccaaatttcagctaaagcatcaggtctctctctctgctaataaatgtcatccaagaggaactaaaaccagaggcattattactgcattgtttgtcactgggaaccaaaggataaaagagtagcataagctgctgaatgttgccatattaaaggagagaacttggtaacgtgaagtatttctcattgaaatgctttcccttttgtatatagccagtgttaaatccttaaatgcaatacagcctctgattattgagcttcctcttaaaaagatttttttattttatgtagccaacattgcagtactgtatgctcaaacacaaatcttaaagtatcggaactgtttagcttatgaaaataatcgactctgaatatttgttacaagtctgttttatgtgttttgattactagtgagcagaaaataacataccctgtattcaaaattactgaaatggcaatcaaagatgatcatttttatgtgattttagaaatgttaaggcaatactactaattattgtaggtttttttaacgtatcacccaaagcatgtatgtgatctttccccattagtatctttttctcaaatgccataattaactgaaatactattattaaattttcatgagaattctaaaatgaatcctgggaaatgcacgtttggtgatgttgcactttctgtattttacaggaattagtcaatacatgttgaaatgtttaacattttaagattggaggcttaattactgggagtctgtctaatgaagtcctgggactattgtaatggaatatgatttgagttcactgtgctctttttgtttgtttgttttggtcatatatacattcagaacttttattttaaaacaaccacaataacattaataatagaaaattcatctgtaaatattcacagtctagtcactgaaaaatgggaaaacctctaccatgccttattattaccctttgctgtttgaggagccagaaatagaggtgcagttagaggacggtcactttttccaacaaaacccactccatagccatgtggatttttatccaaaggctcaacaaccagagggaatggtgagacctgataactaaaatactgttattggcaagggtttgaaatgtgtaagaacctaggagggaaaggaagattgagcaacataggaaaaggggaagagaggctgagtgtcaccaaggtccaaactccatttataaaaatactgcaaaaccaggagttgatggtagaagtgcatatgatccatggcaggagtaaatctctccacctcctctaactctctgaaaactctagagttggagcaagtcttccatttgcttcttatccccttaaaagaatgccttccacttcccaacagcccccatcaagggaccccaagaggccaccatgctcttatctcgcactttctttcctattccccttgcctgaatctggagtggggttgagccctctgccttcaaccttaagatttaggaagttctttccccaactgtctaacttggaaaggtagatgagtctgaattttgaagtaacgaatgcaaattccactcagcagaggcaatgttatttatgtacatagggatagtggaatgagttttaatagattctgtccaaaaggggtttgttcctcttatttcctctatgtaggaagttgtgtcttaggcaactttatcagtatcaatggaaaaatgataggcactacaatgaaatggcaggatgccaatatgagatatttcaggaataataagaaatacagtttgtttgtataaaataaactatctcaagaaagttttcaacgacagtgatagtgttcatttgtaagagagagttctagaacttcgatgtccagtgcagtagccactacccatatgtagctgttgagcatttgaaatatggttagtccaaattgagatgtgctctaaaggacaataaaaggttaaatatctcctaattttttgtattgattacatgttgaaatgttaacattggaaatattgggttaaagaaaaatacacaattaaaatgaatcttggccaggcgcagtggctcacgcctctaatcccagcactttgagaggccagggtgggcaggtcacctgaggtcaggagttcgagaccagcctggccagtgtggcaaaaccctgcctactaaaaatacaaaaattagccaggcatggtggtgcgcacctgtagtcccagctacttgggaggctgaggcaggagaattgcttgaacccaggaggaggaggctgcagtgagctgagattgtgccactgcactccagcctgggcgacagagtgagactctgtctcaaaaaaaagaatcatctgtttccaattatttttaaatgtgcttactagaaaagataaaatcacacatggtttacattttatttctattaagacagcaccgttaagaacatagagctttgaggaattgtggtattagaaccaaatctatttaccacagtgagcttacagggagttactcgagatcttaataaaaaattataatctttggcagccttcattatgattttgtgttcttattattccagtacctctagattacatatgggaaaagctaaagagccacagtggtgagatggttgctcactctagcaggtaatttcagtttgaaaggataaaatatatgaatcatagttcacattaaccaaagtacagtgatgaaataacttagactctgaccattccatttttttcttaaagattgccctaaatctatagatgctaatacagtatttgccacaggtataaaacttgtagttactgtcattcaattaagattcttatctgtacagatatacaaatcagaaacttttaaaataaattgaactaatggaattttggctccaatatttagtcactacaatggaaatattaaagcaaggaacatgaagtcattgtagggttttaaaatggctactgactgacatgaattcagagtttcaaacagtctaaattctaaaaacttaactttacacgcttttcctcctaaataaccactctaataattcatacattcatatcttcaggtaaagaaaactgaattttaaacaattgaggctgggtgcagtggctcatgcctgtaatcgaatataaggacttgagtataaaatttgaaaactacatggggaaatgtctttatcatgcatctcttgatagtctactgaaaactattaagtaaacctgcggtctgtaaacaaaaaaacccatagtgatacttaccttgtgtaatgtaaacaattttttaagctctttaaagtacatctagatttactggtaatgtatagaagtcaattttatccccaagcatttctacttcctaaaccattagcaagagtctcaaaacaacttcactaaactattggacctccagtgttaacttgccaacataaaaatctgaaaaactttgtaatcactatcaaaaatacaaaagagagaataaattcccaggtaaaaggctttacaaattttggaactattatgcttttgtttactaaacactgatccttttagtaattctgcagtattgcctcagactcccacaaagtttcaaaatagctcatctattagattcctgtaacatttatttgggataaacgtggttttgttgccgttgttcataatagaataaaatatttagctttgatggttcagatgtaatacaaagaaataactaagtttgggcctgagataaatgtggtaaagcaagaatgcagagatgctgtaatgatgagtgagttttatagcattactgaggacctgaaaacttgctgccaaggacactttgaaggttttgttggctggaagaagtgtctctggaatcccactcctagctcttcttgaatatttgaaaagaattagataagggccatggggacccaggtcaccccacctcttcttttcagtttggctacaacattggagtcatcagtgctcctgagacagtcatacaggactttctcagttacactttgaaagagaggtcagaagactctccctctgaggttttgctcatgtccccctggcccttgtctgtggccatcttccccaatggtgatatgattggctcctttctgttgcactctttgtcaaccactttggcaggtgcagttcaatgcttatcataatttgttggctattactggttgccttatgggattctgcagacaagctgagttggttgaaatgctgatcctgggccactagattactggcttgtaatgcggactctgcacaagttttgtgcccatgtacattggagagatctcgcctactcccctttggggtacctttagtgctctcaaccagctggacgtcgttggtattctggagatccagatctttggtctggagttcatcttggggtctgaagagctatgcccagtgatactgggctttaccatccttccagctgtcctataaagtgtagcccttccattttgccctggaagtcgtaagtttttgctcattaacagaaaggaagagtactaatgagatccttcagcaattgtaggggactcaggatgtgtcccaggacatctaggagataagagtgctaggatgatacaagctgtcatttccatcatgctccagctctctcagtagctctctggaatcaatgttgtcttctattactcaatgagaatcttcaaggatgcaggtgttgagaagccaatctatagattagtgcaggagtggttaatattatcttcttgactgtagtctctctgtttgtggttgaaagggcaggaaggactttacatatgataggtcttgaggcatggcgttttgttctgtcctcatgattgtttctttgttattaaaggatgagtatggtgggatgagctttgtctgtagtggggctatcttggtctttgtggccttctctgaagttggaccagactccgttccctggaatactgtggccacactcttcagtttgcaatagcagtggctggttgctccaactggacctccaactttctagttggattgctcttcctgaacaattattatctagtttaagtgtgttgttgctttagggtcatggcatgcttatgtatttctgttaccatctgaccatggtactatgccaagttctcttaggggacctgaatctttccagtagaccacatttgagagagtatgagtcaactgggcatagttcccaacaacccaaaatacatacgtacttcactgaagcagatctcatgattccattgacttcatttctaaaattggactttgagcagccaatttctaaggattaaaaagaaactttaatgcattgtagacctctgtacacagaaaaatctttgtaacttttgggcttaattttcattcttaaaaaatctggtaactttttcaaatgcaaccactgtcagtttgctgtgaggctaggcaaacaacacaaggtatagaatttcccatcaccaccaccctgaccccgcgagaagattgccttttaattagagacttgtagaactagtgccttttaagttctacactcatcttttccaaagactattagtaaacttgccatgtaatttgacatggcagttccttgctcagctactctaaataaagttggaaattaggtggtctcttagtttgggtaaagtcagtactattgccagtaatatacatggtaattgaaagcccttaaagtggttcagattatttgccaaatattagactctataaaaatttctgaggttttttttcttttacctttgagtgtacatgtgattgctataatgtaaataccagtcccttaaagactgtttctataagcagaatgatgcagcacaaagtggaaaggttttcctcttattccagcagtattcttgccttcaaagagtagtccatcttgccttgatttttaaggttgttttcttggatggaaagcttaactggatagtaatttccatatgttctttataaccactctgtatattataagcaaagttttttcatattgtatctttttctgttgagcactttatgcattttagtctattgcatttgagaatgtagtttagaaattcactgtttaaagccatgtgaaaactgatagaggataatgaaaatgagtgtacattattttgaatttaacttaactgttttgtggtgggtgtgaacaaaacattagaaatatattatctttttgtgataatactctctgacctcacttaaagtgatctgccatgaggtatccatgatcaagtttatgtttattctaatacctaaggaattcagccaactttgtttctatcatcagataatctcagaaaatagtgtgttttatctatattactgcctcttttcaatatttaagagaataattgtcttctggtttctactgagcctagtaataatcactaaagacctaaaaaaggaattccttctgttaagagtatttggatagcccattcacgataatggtggtgtgaaaatcaatcatcccagcttttctgacatatctaaattttgaataattaatttccacttccaaaaaattcaaatgttttctcaaagcagtcactacttatttgcattattcctgcatattcagtgaatgtgaggtcatatttggtattgtattagaagtagtgttggtcactggtcttgcctctttgaacattatttttatttgtaaaatgagggagttggtttgttatgatgggaaatgagtcagttttcagggtcctgagaaaattgcttcattcatggctgtgtttgagataactaaagtaaattttttttcaggtatttggtgtcatgttttggagttaatatttagtgcttatataattttaagttattacataatttttattggtatatatttgataggtactaggtattggattctcaccaaaccagtagaatggtattctctcttaatatgtgattgcctgtaatggccaggtagatataccttaaagtaatatgaaaggttttatatgtatattaaaatgtttgtacttttaaatctgtaaaggttatctggaatttttactgtgttaacttcagaattatatgggcattatgactttttcattgtacaaaaaattattcataaatgttagaatacagatgttccttgacttacaatagggttatgttccagtagacccattgtaaattgaaaataccgtaagttgaaaatacatttaatacgcctaacctactgaacatcccagcttagcctagcctatcttaaatgtgttctgaacacttaacgttggcctttagctgggcaaaatcatctaatacaaaacctattttataatgaagtgtttaatatctcaaataagagtattgtaccacatatcgttatcccaggataatatcagagtacaaaatttgaagtacagtttttaactgaatgtgtattgcttttgccccattataaagttgaaaaaccataagtcaaaccattgttaagtcggactgtttgtgttacatatatttgggattttttagtggccctttttaaaaagctgtttcttatttctgatcattgtgagtggggatagatgtgggaagaaccatgtctctactaaaaatacaaaaaatagccaggcttgttggcacacacctatagtcccagctactcgggagaccgaggcaggagaatcacttgaaccgggaggcagagggcagatcatgccactgtattccagcctgggcaacagagtaagactctgtctcaaaaatgaatgaatgaatgaatgaacgaatgaatgtactatgagctgatactgggatttcaggtaccgcagtttgtgctgaatgatatgtttggggtaaatcagtttttttcttatagaatttcggcgtttttgctgcaactgccactaattttgcatttaaaagaacaaaagaggaatgtatttttcaaaggagtgaatgaggttaaaatcaagattttgaatggtataaatatgcaactaattcagttgtaggatattattaaattttttattgctaaatatgtttctttcatacgttgcagtgcttacagttccaacagctttccaagaaaacatttccatatttgtgttatttgtaaagtatacataaataatgtaaaataatttgggattatttcaactttacattgtatgtctgaatttcatcgatgttgtacctggctcagtcaatagttgtcacaggtattaagccattttggaatttgccacttttttctgggtaacctgttttagtttagtttacagcatttagaaacagaaggtaactttatagaagtaacaccaatatcctagtctgcttgccccgaatataactaatagtattaggatgtaagcaatattaagatggtttttattattttttatacactgtgtgcttttactttttatttaaactacagcaaaaaactgattttttaactaaaattgaatggcgtttatcttaatgaccagttattgaccaaagtgtactcagaagatgttattatgtcccaatctaaggaatcctttaatttggggattaattttacttacacatgccatttcagtttcagttgcctcattctattacatcattcttgtcaagtctaagctttatcatgtctgaattcttttaacactgaatctgtgatgtaaaaatgtatgatgtgccataaattttattcataataaactaagttatagcctattgtaatctgtaaaacatttcttgtaaattacctaatttattttttcatttatgtacagtatcttatgtaaatttgaaaaatgtttgccatggcgcattctgtaaacattcccgtattcttttccttaatgcttatttgcatgaaggtaacttgggttttgcttgtttgtattggataaccattaagccaacttcagtttctctgcctttttttctgtagtttaaccatttctaattttgttcatattctaaatagatgttagaatcatactttttattttctactttctaaataaattatctaagttgtttacta

SEQ ID NO: 344998 - DNA, 9939 bp, Homo sapiens
  misc_feature (196)..(196): n is a, c, g, or t
  misc_feature (9867)..(9867): n is a, c, g, or t
  misc_feature (9869)..(9869): n is a, c, g, or t
  misc_feature (9872)..(9872): n is a, c, g, or t
  misc_feature (9874)..(9874): n is a, c, g, or t
  misc_feature (9877)..(9877): n is a, c, g, or t
ggcggcggctccggggaccggggccttttgtttggagcggctgcgggggggccccggagcggcgaggccggcggccttccccagcttgctcggtcccggccacccctcgcgggggtggggggccgccccctgggccgggcatctcctcaggcgccgccgccccgccctaggccggccccgcccggcctgaggggangaaccggccgggcctcgccgcgcggcccagccacctccggagtcgccgcctctgctctcagtgccccggatcggaggccgtccatcgcccctcgggccgacgccatgaagatcaaagatgccaagaaaccctctttcccatggtttggcatggacattgggggaactctagtaaagctctcgtactttgaacctattgatatcacagcagaggaagagcaagaagaagttgagagtttaaaaagtattcggaaatatttgacttctaacgtggcatatggatccaccggcattcgggatgtacaccttgaactgaaagatttaacactttttggccgaagagggaacttgcactttatcaggtttccaacccaggacctgcctacttttatccaaatgggaagagataaaaacttctcaacattgcagacggtgctatgtgctacaggaggtggtgcttacaagtttgaaaaagattttcgcacaattggaaacctccacctgcacaaactggatgaacttgactgccttgtaaagggcttgctgtatatagactctgtcagtttcaatggacaagccgagtgctattattttgctaatgcctcagaacctgagcgatgccaaaagatgccttttaacctggatgatccctatccactgcttgtagtgaacattggctcaggagtcagtattttagcagtccattccaaagacaactataaacgagtgactgggacaagccttggagggggtacctttctgggtttatgcagtttattgactggctgtgaaagttttgaagaggctcttgaaatggcatccaaaggtgatagcacacaagctgacaagctggtccgtgatatttatggaggagattatgaaagatttggtttgccaggttgggctgtagcatctagttttgggaatatgatttataaggagaagcgagaatctgttagtaaagaagatctggcaagagctactttagttactatcaccaataacattggttctgtggcacgaatgtgtgctgttaatgagaaaataaacagagttgtctttgttggaaactttttacgtgtcaataccctctcaatgaaacttttggcatatgcactggattactggtcaaaaggtcaactaaaagcattgtttctagaacatgagggttactttggagcagttggtgcacttcttgggctgccaaatttcagctaaagcatcaggtctctctctctgctaataaatgtcatccaagaggaactaaaaccagaggcattattactgcattgtttgtcactgggaaccaaaggataaaagagtagcataagctgctgaatgttgccatattaaaggagagaacttggtaacgtgaagtatttctcattgaaatgctttcccttttgtatatagccagtgttaaatccttaaatgcaatacagcctctgattattgagcttcctcttaaaaagatttttttattttatgtagccaacattgcagtactgtatgctcaaacacaaatcttaaagtatcggaactgtttagcttatgaaaataatcgactctgaatatttgttacaagtctgttttatgtgttttgattactagtgagcagaaaataacataccctgtattcaaaattactgaaatggcaatcaaagatgatcatttttatgtgattttagaaatgttaaggcaatactactaattattgtaggtttttttaacgtatcacccaaagcatgtatgtgatctttccccattagtatctttttctcaaatgccataattaactgaaatactattattaaattttcatgagaattctaaaatgaatcctgggaaatgcacgtttggtgatgttgcactttctgtattttacaggaattagtcaatacatgttgaaatgtttaacattttaagattggaggcttaattactgggagtctgtctaatgaagtcctgggactattgtaatggaatatgatttgagttcactgtgctctttttgtttgtttgttttggtcatatatacattcagaacttttattttaaaacaaccacaataacattaataatagaaaattcatctgtaaatattcacagtctagtcactgaaaaatgggaaaacctctaccatgccttattattaccctttgctgtttgaggagccagaaatagaggtgcagttagaggacggtcactttttccaacaaaacccactccatagccatgtggatttttatccaaaggctcaacaaccagagggaatggtgagacctgataactaaaatactgttattggcaagggtttgaaatgtgtaagaacctaggagggaaaggaagattgagcaacataggaaaaggggaagagaggctgagtgtcaccaaggtccaaactccatttataaaaatactgcaaaaccaggagttgatggtagaagtgcatatgatccatggcaggagtaaatctctccacctcctctaactctctgaaaactctagagttggagcaagtcttccatttgcttcttatccccttaaaagaatgccttccacttcccaacagcccccatcaagggaccccaagaggccaccatgctcttatctcgcactttctttcctattccccttgcctgaatctggagtggggttgagccctctgccttcaaccttaagatttaggaagttctttccccaactgtctaacttggaaaggtagatgagtctgaattttgaagtaacgaatgcaaattccactcagcagaggcaatgttatttatgtacatagggatagtggaatgagttttaatagattctgtccaaaaggggtttgttcctcttatttcctctatgtaggaagttgtgtcttaggcaactttatcagtatcaatggaaaaatgataggcactacaatgaaatggcaggatgccaatatgagatatttcaggaataataagaaatacagtttgtttgtataaaataaactatctcaagaaagttttcaacgacagtgatagtgttcatttgtaagagagagttctagaacttcgatgtccagtgcagtagccactacccatatgtagctgttgagcatttgaaatatggttagtccaaattgagatgtgctctaaaggacaataaaaggttaaatatctcctaattttttgtattgattacatgttgaaatgttaacattggaaatattgggttaaagaaaaatacacaattaaaatgaatcttggccaggcgcagtggctcacgcctctaatcccagcactttgagaggccagggtgggcaggtcacctgaggtcaggagttcgagaccagcctggccagtgtggcaaaaccctgcctactaaaaatacaaaaattagccaggcatggtggtgcgcacctgtagtcccagctacttgggaggctgaggcaggagaattgcttgaacccaggaggaggaggctgcagtgagctgagattgtgccactgcactccagcctgggcgacagagtgagactctgtctcaaaaaaaagaatcatctgtttccaattatttttaaatgtgcttactagaaaagataaaatcacacatggtttacattttatttctattaagacagcaccgttaagaacatagagctttgaggaattgtggtattagaaccaaatctatttaccacagtgagcttacagggagttactcgagatcttaataaaaaattataatctttggcagccttcattatgattttgtgttcttattattccagtacctctagattacatatgggaaaagctaaagagccacagtggtgagatggttgctcactctagcaggtaatttcagtttgaaaggataaaatatatgaatcatagttcacattaaccaaagtacagtgatgaaataacttagactctgaccattccatttttttcttaaagattgccctaaatctatagatgctaatacagtatttgccacaggtataaaacttgtagttactgtcattcaattaagattcttatctgtacagatatacaaatcagaaacttttaaaataaattgaactaatggaattttggctccaatatttagtcactacaatggaaatattaaagcaaggaacatgaagtcattgtagggttttaaaatggctactgactgacatgaattcagagtttcaaacagtctaaattctaaaaacttaactttacacgcttttcctcctaaataaccactctaataattcatacattcatatcttcaggtaaagaaaactgaattttaaacaattgaggctgggtgcagtggctcatgcctgtaatcgaatataaggacttgagtataaaatttgaaaactacatggggaaatgtctttatcatgcatctcttgatagtctactgaaaactattaagtaaacctgcggtctgtaaacaaaaaaacccatagtgatacttaccttgtgtaatgtaaacaattttttaagctctttaaagtacatctagatttactggtaatgtatagaagtcaattttatccccaagcatttctacttcctaaaccattagcaagagtctcaaaacaacttcactaaactattggacctccagtgttaacttgccaacataaaaatctgaaaaactttgtaatcactatcaaaaatacaaaagagagaataaattcccaggtaaaaggctttacaaattttggaactattatgcttttgtttactaaacactgatccttttagtaattctgcagtattgcctcagactcccacaaagtttcaaaatagctcatctattagattcctgtaacatttatttgggataaacgtggttttgttgccgttgttcataatagaataaaatatttagctttgatggttcagatgtaatacaaagaaataactaagtttgggcctgagataaatgtggtaaagcaagaatgcagagatgctgtaatgatgagtgagttttatagcattactgaggacctgaaaacttgctgccaaggacactttgaaggttttgttggctggaagaagtgtctctggaatcccactcctagctcttcttgaatatttgaaaagaattagataagggccatggggacccaggtcaccccacctcttcttttcagtttggctacaacattggagtcatcagtgctcctgagacagtcatacaggactttctcagttacactttgaaagagaggtcagaagactctccctctgaggttttgctcatgtccccctggcccttgtctgtggccatcttccccaatggtgatatgattggctcctttctgttgcactctttgtcaaccactttggcaggtgcagttcaatgcttatcataatttgttggctattactggttgccttatgggattctgcagacaagctgagttggttgaaatgctgatcctgggccactagattactggcttgtaatgcggactctgcacaagttttgtgcccatgtacattggagagatctcgcctactcccctttggggtacctttagtgctctcaaccagctggacgtcgttggtattctggagatccagatctttggtctggagttcatcttggggtctgaagagctatgcccagtgatactgggctttaccatccttccagctgtcctataaagtgtagcccttccattttgccctggaagtcgtaagtttttgctcattaacagaaaggaagagtactaatgagatccttcagcaattgtaggggactcaggatgtgtcccaggacatctaggagataagagtgctaggatgatacaagcaaagcaagtcactacactggcgctctttagagtacccagctaccaacaacccactgtcatttccatcatgctccagctctctcagtagctctctggaatcaatgttgtcttctattactcaatgagaatcttcaaggatgcaggtgttgagaagccaatctatagattagtgcaggagtggttaatattatcttcttgactgtagtctctctgtttgtggttgaaagggcaggaaggactttacatatgataggtcttgaggcatggcgttttgttctgtcctcatgattgtttctttgttattaaaggatgagtatggtgggatgagctttgtctgtagtggggctatcttggtctttgtggccttctctgaagttggaccagactccgttccctggaatactgtggccacactcttcagtttgcaatagcagtggctggttgctccaactggacctccaactttctagttggattgctcttcctgaacaattattatctagtttaagtgtgttgttgctttagggtcatggcatgcttatgtatttctgttaccatctgaccatggtactatgccaagttctcttaggggacctgaatctttccagtagaccacatttgagagagtatgagtcaactgggcatagttcccaacaacccaaaatacatacgtacttcactgaagcagatctcatgattccattgacttcatttctaaaattggactttgagcagccaatttctaaggattaaaaagaaactttaatgcattgtagacctctgtacacagaaaaatctttgtaacttttgggcttaattttcattcttaaaaaatctggtaactttttcaaatgcaaccactgtcagtttgctgtgaggctaggcaaacaacacaaggtatagaatttcccatcaccaccaccctgaccccgcgagaagattgccttttaattagagacttgtagaactagtgccttttaagttctacactcatcttttccaaagactattagtaaacttgccatgtaatttgacatggcagttccttgctcagctactctaaataaagttggaaattaggtggtctcttagtttgggtaaagtcagtactattgccagtaatatacatggtaattgaaagcccttaaagtggttcagattatttgccaaatattagactctataaaaatttctgaggttttttttcttttacctttgagtgtacatgtgattgctataatgtaaataccagtcccttaaagactgtttctataagcagaatgatgcagcacaaagtggaaaggttttcctcttattccagcagtattcttgccttcaaagagtagtccatcttgccttgatttttaaggttgttttcttggatggaaagcttaactggatagtaatttccatatgttctttataaccactctgtatattataagcaaagttttttcatattgtatctttttctgttgagcactttatgcattttagtctattgcatttgagaatgtagtttagaaattcactgtttaaagccatgtgaaaactgatagaggataatgaaaatgagtgtacattattttgaatttaacttaactgttttgtggtgggtgtgaacaaaacattagaaatatattatctttttgtgataatactctctgacctcacttaaagtgatctgccatgaggtatccatgatcaagtttatgtttattctaatacctaaggaattcagccaactttgtttctatcatcagataatctcagaaaatagtgtgttttatctatattactgcctcttttcaatatttaagagaataattgtcttctggtttctactgagcctagtaataatcactaaagacctaaaaaaggaattccttctgttaagagtatttggatagcccattcacgataatggtggtgtgaaaatcaatcatcccagcttttctgacatatctaaattttgaataattaatttccacttccaaaaaattcaaatgttttctcaaagcagtcactacttatttgcattattcctgcatattcagtgaatgtgaggtcatatttggtattgtattagaagtagtgttggtcactggtcttgcctctttgaacattatttttatttgtaaaatgagggagttggtttgttatgatgggaaatgagtcagttttcagggtcctgagaaaattgcttcattcatggctgtgtttgagataactaaagtaaattttttttcaggtatttggtgtcatgttttggagttaatatttagtgcttatataattttaagttattacataatttttattggtatatatttgataggtactaggtattggattctcaccaaaccagtagaatggtattctctcttaatatgtgattgcctgtaatggccaggtagatataccttaaagtaatatgaaaggttttatatgtatattaaaatgtttgtacttttaaatctgtaaaggttatctggaatttttactgtgttaacttcagaattatatgggcattatgactttttcattgtacaaaaaattattcataaatgttagaatacagatgttccttgacttacaatagggttatgttccagtagacccattgtaaattgaaaataccgtaagttgaaaatacatttaatacgcctaacctactgaacatcccagcttagcctagcctatcttaaatgtgttctgaacacttaacgttggcctttagctgggcaaaatcatctaatacaaaacctattttataatgaagtgtttaatatctcaaataagagtattgtaccacatatcgttatcccaggataatatcagagtacaaaatttgaagtacagtttttaactgaatgtgtattgcttttgccccattataaagttgaaaaaccataagtcaaaccattgttaagtcggactgtttgtgttacatatatttgggattttttagtggccctttttaaaaagctgtttcttatttctgatcattgtgagtggggatagatgtgggaagaaccatgtctctactaaaaatacaaaaaatagccaggcttgttggcacacacctatagtcccagctactcgggagaccgaggcaggagaatcacttgaaccgggaggcagagggcagatcatgccactgtattccagcctgggcaacagagtaagactctgtctcaaaaatgaatgaatgaatgaatgaacgaatgaatgtactatgagctgatactgggatttcaggtaccgcagtttgtgctgaatgatatgtttggggtaaatcagtttttttcttatagaatttcggcgtttttgctgcaactgccactaattttgcatttaaaagaacaaaagaggaatgtatttttcaaaggagtgaatgaggttaaaatcaagattttgaatggtataaatatgcaactaattcagttgtaggatattattaaattttttattgctaaatatgtttctttcatacgttgcagtgcttacagttccaacagctttccaagaaaacatttccatatttgtgttatttgtaaagtatacataaataatgtaaaataatttgggattatttcaactttacattgtatgtctgaatttcatcgatgttgtacctggctcagtcaatagttgtcacaggtattaagccattttggaatttgccacttttttctgggtaacctgttttagtttagtttacagcatttagaaacagaaggtaactttatagaagtaacaccaatatcctagtctgcttgccccgaatataactaatagtattaggatgtaagcaatatataagaaggcgtaattatttatacacgggggttattttantnaananagnaaaatggtttttcactaaatagaaggggttacttaagacagttttgcaagggtccgaaagtt

SEQ ID NO: 344999 - DNA, 10420 bp, Homo sapiens
ggcggcggctccggggaccggggccttttgtttggagcggctgcgggggggccccggagcggcgaggccggcggccttccccagcttgctcggtcccggccacccctcgcgggggtggggggccgccccctgggccgggcatctcctcaggcgccgccgccccgccctaggccgcctctgctctcagtgccccggatcggaggccgtccatcgcccctcgggccgacgccatgaagatcaaagatgccaagaaaccctctttcccatggtttggcatggacattgggggaactctagtaaagctctcgtactttgaacctattgatatcacagcagaggaagagcaagaagaagttgagagtttaaaaagtattcggaaatatttgacttctaacgtggcatatggatccaccggcattcgggatgtacaccttgaactgaaagatttaacactttttggccgaagagggaacttgcactttatcaggtttccaacccaggacctgcctacttttatccaaatgggaagagataaaaacttctcaacattgcagacggtgctatgtgctacaggaggtggtgcttacaagtttgaaaaagattttcgcacaattggaaacctccacctgcacaaactggatgaacttgactgccttgtaaagggcttgctgtatatagactctgtcagtttcaatggacaagccgagtgctattattttgctaatgcctcagaacctgagcgatgccaaaagatgccttttaacctggatgatccctatccactgcttgtagtgaacattggctcaggagtcagtattttagcagtccattccaaagacaactataaacgagtgactgggacaagccttggagggggtacctttctgggtttatgcagtttattgactggctgtgaaagttttgaagaggctcttgaaatggcatccaaaggtgatagcacacaagctgacaagctggtccgtgatatttatggaggagattatgaaagatttggtttgccaggttgggctgtagcatctagttttgggaatatgatttataaggagaagcgagaatctgttagtaaagaagatctggcaagagctactttagttactatcaccaataacattggttctgtggcacgaatgtgtgctgttaatgagaaaataaacagagttgtctttgttggaaactttttacgtgtcaataccctctcaatgaaacttttggcatatgcactggattactggtcaaaaggtcaactaaaagcattgtttctagaacatgagggttactttggagcagttggtgcacttcttgggctgccaaatttcagctaaagcatcaggtctctctctctgctaataaatgtcatccaagaggaactaaaaccagaggcattattactgcattgtttgtcactgggaaccaaaggataaaagagtagcataagctgctgaatgttgccatattaaaggagagaacttggtaacgtgaagtatttctcattgaaatgctttcccttttgtatatagccagtgttaaatccttaaatgcaatacagcctctgattattgagcttcctcttaaaaagatttttttattttatgtagccaacattgcagtactgtatgctcaaacacaaatcttaaagtatcggaactgtttagcttatgaaaataatcgactctgaatatttgttacaagtctgttttatgtgttttgattactagtgagcagaaaataacataccctgtattcaaaattactgaaatggcaatcaaagatgatcatttttatgtgattttagaaatgttaaggcaatactactaattattgtaggtttttttaacgtatcacccaaagcatgtatgtgatctttccccattagtatctttttctcaaatgccataattaactgaaatactattattaaattttcatgagaattctaaaatgaatcctgggaaatgcacgtttggtgatgttgcactttctgtattttacaggaattagtcaatacatgttgaaatgtttaacattttaagattggaggcttaattactgggagtctgtctaatgaagtcctgggactattgtaatggaatatgatttgagttcactgtgctctttttgtttgtttgttttggtcatatatacattcagaacttttattttaaaacaaccacaataacattaataatagaaaattcatctgtaaatattcacagtctagtcactgaaaaatgggaaaacctctaccatgccttattattaccctttgctgtttgaggagccagaaatagaggtgcagttagaggacggtcactttttccaacaaaacccactccatagccatgtggatttttatccaaaggctcaacaaccagagggaatggtgagacctgataactaaaatactgttattggcaagggtttgaaatgtgtaagaacctaggagggaaaggaagattgagcaacataggaaaaggggaagagaggctgagtgtcaccaaggtccaaactccatttataaaaatactgcaaaaccaggagttgatggtagaagtgcatatgatccatggcaggagtaaatctctccacctcctctaactctctgaaaactctagagttggagcaagtcttccatttgcttcttatccccttaaaagaatgccttccacttcccaacagcccccatcaagggaccccaagaggccaccatgctcttatctcgcactttctttcctattccccttgcctgaatctggagtggggttgagccctctgccttcaaccttaagatttaggaagttctttccccaactgtctaacttggaaaggtagatgagtctgaattttgaagtaacgaatgcaaattccactcagcagaggcaatgttatttatgtacatagggatagtggaatgagttttaatagattctgtccaaaaggggtttgttcctcttatttcctctatgtaggaagttgtgtcttaggcaactttatcagtatcaatggaaaaatgataggcactacaatgaaatggcaggatgccaatatgagatatttcaggaataataagaaatacagtttgtttgtataaaataaactatctcaagaaagttttcaacgacagtgatagtgttcatttgtaagagagagttctagaacttcgatgtccagtgcagtagccactacccatatgtagctgttgagcatttgaaatatggttagtccaaattgagatgtgctctaaaggacaataaaaggttaaatatctcctaattttttgtattgattacatgttgaaatgttaacattggaaatattgggttaaagaaaaatacacaattaaaatgaatcttggccaggcgcagtggctcacgcctctaatcccagcactttgagaggccagggtgggcaggtcacctgaggtcaggagttcgagaccagcctggccagtgtggcaaaaccctgcctactaaaaatacaaaaattagccaggcatggtggtgcgcacctgtagtcccagctacttgggaggctgaggcaggagaattgcttgaacccaggaggaggaggctgcagtgagctgagattgtgccactgcactccagcctgggcgacagagtgagactctgtctcaaaaaaaagaatcatctgtttccaattatttttaaatgtgcttactagaaaagataaaatcacacatggtttacattttatttctattaagacagcaccgttaagaacatagagctttgaggaattgtggtattagaaccaaatctatttaccacagtgagcttacagggagttactcgagatcttaataaaaaattataatctttggcagccttcattatgattttgtgttcttattattccagtacctctagattacatatgggaaaagctaaagagccacagtggtgagatggttgctcactctagcaggtaatttcagtttgaaaggataaaatatatgaatcatagttcacattaaccaaagtacagtgatgaaataacttagactctgaccattccatttttttcttaaagattgccctaaatctatagatgctaatacagtatttgccacaggtataaaacttgtagttactgtcattcaattaagattcttatctgtacagatatacaaatcagaaacttttaaaataaattgaactaatggaattttggctccaatatttagtcactacaatggaaatattaaagcaaggaacatgaagtcattgtagggttttaaaatggctactgactgacatgaattcagagtttcaaacagtctaaattctaaaaacttaactttacacgcttttcctcctaaataaccactctaataattcatacattcatatcttcaggtaaagaaaactgaattttaaacaattgaggctgggtgcagtggctcatgcctgtaatcgaatataaggacttgagtataaaatttgaaaactacatggggaaatgtctttatcatgcatctcttgatagtctactgaaaactattaagtaaacctgcggtctgtaaacaaaaaaacccatagtgatacttaccttgtgtaatgtaaacaattttttaagctctttaaagtacatctagatttactggtaatgtatagaagtcaattttatccccaagcatttctacttcctaaaccattagcaagagtctcaaaacaacttcactaaactattggacctccagtgttaacttgccaacataaaaatctgaaaaactttgtaatcactatcaaaaatacaaaagagagaataaattcccaggtaaaaggctttacaaattttggaactattatgcttttgtttactaaacactgatccttttagtaattctgcagtattgcctcagactcccacaaagtttcaaaatagctcatctattagattcctgtaacatttatttgggataaacgtggttttgttgccgttgttcataatagaataaaatatttagctttgatggttcagatgtaatacaaagaaataactaagtttgggcctgagataaatgtggtaaagcaagaatgcagagatgctgtaatgatgagtgagttttatagcattactgaggacctgaaaacttgctgccaaggacactttgaaggttttgttggctggaagaagtgtctctggaatcccactcctagctcttcttgaatatttgaaaagaattagataagggccatggggacccaggtcaccccacctcttcttttcagtttggctacaacattggagtcatcagtgctcctgagacagtcatacaggactttctcagttacactttgaaagagaggtcagaagactctccctctgaggttttgctcatgtccccctggcccttgtctgtggccatcttccccaatggtgatatgattggctcctttctgttgcactctttgtcaaccactttggcaggtgcagttcaatgcttatcataatttgttggctattactggttgccttatgggattctgcagacaagctgagttggttgaaatgctgatcctgggccactagattactggcttgtaatgcggactctgcacaagttttgtgcccatgtacattggagagatctcgcctactcccctttggggtacctttagtgctctcaaccagctggacgtcgttggtattctggagatccagatctttggtctggagttcatcttggggtctgaagagctatgcccagtgatactgggctttaccatccttccagctgtcctataaagtgtagcccttccattttgccctggaagtcgtaagtttttgctcattaacagaaaggaagagtactaatgagatccttcagcaattgtaggggactcaggatgtgtcccaggacatctaggagataagagtgctaggatgatacaagcaaagcaagtcactacactggcgctctttagagtacccagctaccaacaacccactgtcatttccatcatgctccagctctctcagtagctctctggaatcaatgttgtcttctattactcaatgagaatcttcaaggatgcaggtgttgagaagccaatctatagattagtgcaggagtggttaatattatcttcttgactgtagtctctctgtttgtggttgaaagggcaggaaggactttacatatgataggtcttgaggcatggcgttttgttctgtcctcatgattgtttctttgttattaaaggatgagtatggtgggatgagctttgtctgtagtggggctatcttggtctttgtggccttctctgaagttggaccagactccgttccctggaatactgtggccacactcttcagtttgcaatagcagtggctggttgctccaactggacctccaactttctagttggattgctcttcctgaacaattattatctagtttaagtgtgttgttgctttagggtcatggcatgcttatgtatttctgttaccatctgaccatggtactatgccaagttctcttaggggacctgaatctttccagtagaccacatttgagagagtatgagtcaactgggcatagttcccaacaacccaaaatacatacgtacttcactgaagcagatctcatgattccattgacttcatttctaaaattggactttgagcagccaatttctaaggattaaaaagaaactttaatgcattgtagacctctgtacacagaaaaatctttgtaacttttgggcttaattttcattcttaaaaaatctggtaactttttcaaatgcaaccactgtcagtttgctgtgaggctaggcaaacaacacaaggtatagaatttcccatcaccaccaccctgaccccgcgagaagattgccttttaattagagacttgtagaactagtgccttttaagttctacactcatcttttccaaagactattagtaaacttgccatgtaatttgacatggcagttccttgctcagctactctaaataaagttggaaattaggtggtctcttagtttgggtaaagtcagtactattgccagtaatatacatggtaattgaaagcccttaaagtggttcagattatttgccaaatattagactctataaaaatttctgaggttttttttcttttacctttgagtgtacatgtgattgctataatgtaaataccagtcccttaaagactgtttctataagcagaatgatgcagcacaaagtggaaaggttttcctcttattccagcagtattcttgccttcaaagagtagtccatcttgccttgatttttaaggttgttttcttggatggaaagcttaactggatagtaatttccatatgttctttataaccactctgtatattataagcaaagttttttcatattgtatctttttctgttgagcactttatgcattttagtctattgcatttgagaatgtagtttagaaattcactgtttaaagccatgtgaaaactgatagaggataatgaaaatgagtgtacattattttgaatttaacttaactgttttgtggtgggtgtgaacaaaacattagaaatatattatctttttgtgataatactctctgacctcacttaaagtgatctgccatgaggtatccatgatcaagtttatgtttattctaatacctaaggaattcagccaactttgtttctatcatcagataatctcagaaaatagtgtgttttatctatattactgcctcttttcaatatttaagagaataattgtcttctggtttctactgagcctagtaataatcactaaagacctaaaaaaggaattccttctgttaagagtatttggatagcccattcacgataatggtggtgtgaaaatcaatcatcccagcttttctgacatatctaaattttgaataattaatttccacttccaaaaaattcaaatgttttctcaaagcagtcactacttatttgcattattcctgcatattcagtgaatgtgaggtcatatttggtattgtattagaagtagtgttggtcactggtcttgcctctttgaacattatttttatttgtaaaatgagggagttggtttgttatgatgggaaatgagtcagttttcagggtcctgagaaaattgcttcattcatggctgtgtttgagataactaaagtaaattttttttcaggtatttggtgtcatgttttggagttaatatttagtgcttatataattttaagttattacataatttttattggtatatatttgataggtactaggtattggattctcaccaaaccagtagaatggtattctctcttaatatgtgattgcctgtaatggccaggtagatataccttaaagtaatatgaaaggttttatatgtatattaaaatgtttgtacttttaaatctgtaaaggttatctggaatttttactgtgttaacttcagaattatatgggcattatgactttttcattgtacaaaaaattattcataaatgttagaatacagatgttccttgacttacaatagggttatgttccagtagacccattgtaaattgaaaataccgtaagttgaaaatacatttaatacgcctaacctactgaacatcccagcttagcctagcctatcttaaatgtgttctgaacacttaacgttggcctttagctgggcaaaatcatctaatacaaaacctattttataatgaagtgtttaatatctcaaataagagtattgtaccacatatcgttatcccaggataatatcagagtacaaaatttgaagtacagtttttaactgaatgtgtattgcttttgccccattataaagttgaaaaaccataagtcaaaccattgttaagtcggactgtttgtgttacatatatttgggattttttagtggccctttttaaaaagctgtttcttatttctgatcattgtgagtggggatagatgtgggaagaaccatgtctctactaaaaatacaaaaaatagccaggcttgttggcacacacctatagtcccagctactcgggagaccgaggcaggagaatcacttgaaccgggaggcagagggcagatcatgccactgtattccagcctgggcaacagagtaagactctgtctcaaaaatgaatgaatgaatgaatgaacgaatgaatgtactatgagctgatactgggatttcaggtaccgcagtttgtgctgaatgatatgtttggggtaaatcagtttttttcttatagaatttcggcgtttttgctgcaactgccactaattttgcatttaaaagaacaaaagaggaatgtatttttcaaaggagtgaatgaggttaaaatcaagattttgaatggtataaatatgcaactaattcagttgtaggatattattaaattttttattgctaaatatgtttctttcatacgttgcagtgcttacagttccaacagctttccaagaaaacatttccatatttgtgttatttgtaaagtatacataaataatgtaaaataatttgggattatttcaactttacattgtatgtctgaatttcatcgatgttgtacctggctcagtcaatagttgtcacaggtattaagccattttggaatttgccacttttttctgggtaacctgttttagtttagtttacagcatttagaaacagaaggtaactttatagaagtaacaccaatatcctagtctgcttgccccgaatataactaatagtattaggatgtaagcaatattaagatggtttttattattttttatacactgtgtgcttttactttttatttaaactacagcaaaaaactgattttttaactaaaattgaatggcgtttatcttaatgaccagttattgaccaaagtgtactcagaagatgttattatgtcccaatctaaggaatcctttaatttggggattaattttacttacacatgccatttcagtttcagttgcctcattctattacatcattcttgtcaagtctaagctttatcatgtctgaattcttttaacactgaatctgtgatgtaaaaatgtatgatgtgccataaattttattcataataaactaagttatagcctattgtaatctgtaaaacatttcttgtaaattacctaatttattttttcatttatgtacagtatcttatgtaaatttgaaaaatgtttgccatggcgcattctgtaaacattcccgtattcttttccttaatgcttatttgcatgaaggtaacttgggttttgcttgtttgtattggataaccattaagccaacttcagtttctctgcctttttttctgtagtttaaccatttctaattttgttcatattctaaatagatgttagaatcatactttttattttctactttctaaataaattatctaagttgtttacta

SEQ ID NO: 345000 - DNA, 10313 bp, Homo sapiens
  misc_feature (196)..(196): n is a, c, g, or t
ggcggcggctccggggaccggggccttttgtttggagcggctgcgggggggccccggagcggcgaggccggcggccttccccagcttgctcggtcccggccacccctcgcgggggtggggggccgccccctgggccgggcatctcctcaggcgccgccgccccgccctaggccggccccgcccggcctgaggggangaaccggccgggcctcgccgcgcggcccagccacctccggagtcgccgcctctgctctcagtgccccggatcggaggccgtccatcgcccctcgggccgacgccatgaagatcaaagatgccaagaaaccctctttcccatggtttggcatggacattgggggaactctagtaaagctctcgtactttgaacctattgatatcacagcagaggaagagcaagaagaagttgagagtttaaaaagtattcggaaatatttgacttctaacgtggcatatggatccaccggcattcgggatgtacaccttgaactgaaagatttaacactttttggccgaagagggaacttgcactttatcaggtttccaacccaggacctgcctacttttatccaaatgggaagagataaaaacttctcaacattgcagacggtgctatgtgctacaggaggtggtgcttacaagtttgaaaaagattttcgcacaattggaaacctccacctgcacaaactggatgaacttgactgccttgtaaagggcttgctgtatatagactctgtcagtttcaatggacaagccgagtgctattattttgctaatgcctcagaacctgagcgatgccaaaagatgccttttaacctggatgatccctatccactgcttgtagtgaacattggctcaggagtcagtattttagcagtccattccaaagacaactataaacgagtgactgggacaagttttgggaatatgatttataaggagaagcgagaatctgttagtaaagaagatctggcaagagctactttagttactatcaccaataacattggttctgtggcacgaatgtgtgctgttaatgagaaaataaacagagttgtctttgttggaaactttttacgtgtcaataccctctcaatgaaacttttggcatatgcactggattactggtcaaaaggtcaactaaaagcattgtttctagaacatgagggttactttggagcagttggtgcacttcttgggctgccaaatttcagctaaagcatcaggtctctctctctgctaataaatgtcatccaagaggaactaaaaccagaggcattattactgcattgtttgtcactgggaaccaaaggataaaagagtagcataagctgctgaatgttgccatattaaaggagagaacttggtaacgtgaagtatttctcattgaaatgctttcccttttgtatatagccagtgttaaatccttaaatgcaatacagcctctgattattgagcttcctcttaaaaagatttttttattttatgtagccaacattgcagtactgtatgctcaaacacaaatcttaaagtatcggaactgtttagcttatgaaaataatcgactctgaatatttgttacaagtctgttttatgtgttttgattactagtgagcagaaaataacataccctgtattcaaaattactgaaatggcaatcaaagatgatcatttttatgtgattttagaaatgttaaggcaatactactaattattgtaggtttttttaacgtatcacccaaagcatgtatgtgatctttccccattagtatctttttctcaaatgccataattaactgaaatactattattaaattttcatgagaattctaaaatgaatcctgggaaatgcacgtttggtgatgttgcactttctgtattttacaggaattagtcaatacatgttgaaatgtttaacattttaagattggaggcttaattactgggagtctgtctaatgaagtcctgggactattgtaatggaatatgatttgagttcactgtgctctttttgtttgtttgttttggtcatatatacattcagaacttttattttaaaacaaccacaataacattaataatagaaaattcatctgtaaatattcacagtctagtcactgaaaaatgggaaaacctctaccatgccttattattaccctttgctgtttgaggagccagaaatagaggtgcagttagaggacggtcactttttccaacaaaacccactccatagccatgtggatttttatccaaaggctcaacaaccagagggaatggtgagacctgataactaaaatactgttattggcaagggtttgaaatgtgtaagaacctaggagggaaaggaagattgagcaacataggaaaaggggaagagaggctgagtgtcaccaaggtccaaactccatttataaaaatactgcaaaaccaggagttgatggtagaagtgcatatgatccatggcaggagtaaatctctccacctcctctaactctctgaaaactctagagttggagcaagtcttccatttgcttcttatccccttaaaagaatgccttccacttcccaacagcccccatcaagggaccccaagaggccaccatgctcttatctcgcactttctttcctattccccttgcctgaatctggagtggggttgagccctctgccttcaaccttaagatttaggaagttctttccccaactgtctaacttggaaaggtagatgagtctgaattttgaagtaacgaatgcaaattccactcagcagaggcaatgttatttatgtacatagggatagtggaatgagttttaatagattctgtccaaaaggggtttgttcctcttatttcctctatgtaggaagttgtgtcttaggcaactttatcagtatcaatggaaaaatgataggcactacaatgaaatggcaggatgccaatatgagatatttcaggaataataagaaatacagtttgtttgtataaaataaactatctcaagaaagttttcaacgacagtgatagtgttcatttgtaagagagagttctagaacttcgatgtccagtgcagtagccactacccatatgtagctgttgagcatttgaaatatggttagtccaaattgagatgtgctctaaaggacaataaaaggttaaatatctcctaattttttgtattgattacatgttgaaatgttaacattggaaatattgggttaaagaaaaatacacaattaaaatgaatcttggccaggcgcagtggctcacgcctctaatcccagcactttgagaggccagggtgggcaggtcacctgaggtcaggagttcgagaccagcctggccagtgtggcaaaaccctgcctactaaaaatacaaaaattagccaggcatggtggtgcgcacctgtagtcccagctacttgggaggctgaggcaggagaattgcttgaacccaggaggaggaggctgcagtgagctgagattgtgccactgcactccagcctgggcgacagagtgagactctgtctcaaaaaaaagaatcatctgtttccaattatttttaaatgtgcttactagaaaagataaaatcacacatggtttacattttatttctattaagacagcaccgttaagaacatagagctttgaggaattgtggtattagaaccaaatctatttaccacagtgagcttacagggagttactcgagatcttaataaaaaattataatctttggcagccttcattatgattttgtgttcttattattccagtacctctagattacatatgggaaaagctaaagagccacagtggtgagatggttgctcactctagcaggtaatttcagtttgaaaggataaaatatatgaatcatagttcacattaaccaaagtacagtgatgaaataacttagactctgaccattccatttttttcttaaagattgccctaaatctatagatgctaatacagtatttgccacaggtataaaacttgtagttactgtcattcaattaagattcttatctgtacagatatacaaatcagaaacttttaaaataaattgaactaatggaattttggctccaatatttagtcactacaatggaaatattaaagcaaggaacatgaagtcattgtagggttttaaaatggctactgactgacatgaattcagagtttcaaacagtctaaattctaaaaacttaactttacacgcttttcctcctaaataaccactctaataattcatacattcatatcttcaggtaaagaaaactgaattttaaacaattgaggctgggtgcagtggctcatgcctgtaatcgaatataaggacttgagtataaaatttgaaaactacatggggaaatgtctttatcatgcatctcttgatagtctactgaaaactattaagtaaacctgcggtctgtaaacaaaaaaacccatagtgatacttaccttgtgtaatgtaaacaattttttaagctctttaaagtacatctagatttactggtaatgtatagaagtcaattttatccccaagcatttctacttcctaaaccattagcaagagtctcaaaacaacttcactaaactattggacctccagtgttaacttgccaacataaaaatctgaaaaactttgtaatcactatcaaaaatacaaaagagagaataaattcccaggtaaaaggctttacaaattttggaactattatgcttttgtttactaaacactgatccttttagtaattctgcagtattgcctcagactcccacaaagtttcaaaatagctcatctattagattcctgtaacatttatttgggataaacgtggttttgttgccgttgttcataatagaataaaatatttagctttgatggttcagatgtaatacaaagaaataactaagtttgggcctgagataaatgtggtaaagcaagaatgcagagatgctgtaatgatgagtgagttttatagcattactgaggacctgaaaacttgctgccaaggacactttgaaggttttgttggctggaagaagtgtctctggaatcccactcctagctcttcttgaatatttgaaaagaattagataagggccatggggacccaggtcaccccacctcttcttttcagtttggctacaacattggagtcatcagtgctcctgagacagtcatacaggactttctcagttacactttgaaagagaggtcagaagactctccctctgaggttttgctcatgtccccctggcccttgtctgtggccatcttccccaatggtgatatgattggctcctttctgttgcactctttgtcaaccactttggcaggtgcagttcaatgcttatcataatttgttggctattactggttgccttatgggattctgcagacaagctgagttggttgaaatgctgatcctgggccactagattactggcttgtaatgcggactctgcacaagttttgtgcccatgtacattggagagatctcgcctactcccctttggggtacctttagtgctctcaaccagctggacgtcgttggtattctggagatccagatctttggtctggagttcatcttggggtctgaagagctatgcccagtgatactgggctttaccatccttccagctgtcctataaagtgtagcccttccattttgccctggaagtcgtaagtttttgctcattaacagaaaggaagagtactaatgagatccttcagcaattgtaggggactcaggatgtgtcccaggacatctaggagataagagtgctaggatgatacaagcaaagcaagtcactacactggcgctctttagagtacccagctaccaacaacccactgtcatttccatcatgctccagctctctcagtagctctctggaatcaatgttgtcttctattactcaatgagaatcttcaaggatgcaggtgttgagaagccaatctatagattagtgcaggagtggttaatattatcttcttgactgtagtctctctgtttgtggttgaaagggcaggaaggactttacatatgataggtcttgaggcatggcgttttgttctgtcctcatgattgtttctttgttattaaaggatgagtatggtgggatgagctttgtctgtagtggggctatcttggtctttgtggccttctctgaagttggaccagactccgttccctggaatactgtggccacactcttcagtttgcaatagcagtggctggttgctccaactggacctccaactttctagttggattgctcttcctgaacaattattatctagtttaagtgtgttgttgctttagggtcatggcatgcttatgtatttctgttaccatctgaccatggtactatgccaagttctcttaggggacctgaatctttccagtagaccacatttgagagagtatgagtcaactgggcatagttcccaacaacccaaaatacatacgtacttcactgaagcagatctcatgattccattgacttcatttctaaaattggactttgagcagccaatttctaaggattaaaaagaaactttaatgcattgtagacctctgtacacagaaaaatctttgtaacttttgggcttaattttcattcttaaaaaatctggtaactttttcaaatgcaaccactgtcagtttgctgtgaggctaggcaaacaacacaaggtatagaatttcccatcaccaccaccctgaccccgcgagaagattgccttttaattagagacttgtagaactagtgccttttaagttctacactcatcttttccaaagactattagtaaacttgccatgtaatttgacatggcagttccttgctcagctactctaaataaagttggaaattaggtggtctcttagtttgggtaaagtcagtactattgccagtaatatacatggtaattgaaagcccttaaagtggttcagattatttgccaaatattagactctataaaaatttctgaggttttttttcttttacctttgagtgtacatgtgattgctataatgtaaataccagtcccttaaagactgtttctataagcagaatgatgcagcacaaagtggaaaggttttcctcttattccagcagtattcttgccttcaaagagtagtccatcttgccttgatttttaaggttgttttcttggatggaaagcttaactggatagtaatttccatatgttctttataaccactctgtatattataagcaaagttttttcatattgtatctttttctgttgagcactttatgcattttagtctattgcatttgagaatgtagtttagaaattcactgtttaaagccatgtgaaaactgatagaggataatgaaaatgagtgtacattattttgaatttaacttaactgttttgtggtgggtgtgaacaaaacattagaaatatattatctttttgtgataatactctctgacctcacttaaagtgatctgccatgaggtatccatgatcaagtttatgtttattctaatacctaaggaattcagccaactttgtttctatcatcagataatctcagaaaatagtgtgttttatctatattactgcctcttttcaatatttaagagaataattgtcttctggtttctactgagcctagtaataatcactaaagacctaaaaaaggaattccttctgttaagagtatttggatagcccattcacgataatggtggtgtgaaaatcaatcatcccagcttttctgacatatctaaattttgaataattaatttccacttccaaaaaattcaaatgttttctcaaagcagtcactacttatttgcattattcctgcatattcagtgaatgtgaggtcatatttggtattgtattagaagtagtgttggtcactggtcttgcctctttgaacattatttttatttgtaaaatgagggagttggtttgttatgatgggaaatgagtcagttttcagggtcctgagaaaattgcttcattcatggctgtgtttgagataactaaagtaaattttttttcaggtatttggtgtcatgttttggagttaatatttagtgcttatataattttaagttattacataatttttattggtatatatttgataggtactaggtattggattctcaccaaaccagtagaatggtattctctcttaatatgtgattgcctgtaatggccaggtagatataccttaaagtaatatgaaaggttttatatgtatattaaaatgtttgtacttttaaatctgtaaaggttatctggaatttttactgtgttaacttcagaattatatgggcattatgactttttcattgtacaaaaaattattcataaatgttagaatacagatgttccttgacttacaatagggttatgttccagtagacccattgtaaattgaaaataccgtaagttgaaaatacatttaatacgcctaacctactgaacatcccagcttagcctagcctatcttaaatgtgttctgaacacttaacgttggcctttagctgggcaaaatcatctaatacaaaacctattttataatgaagtgtttaatatctcaaataagagtattgtaccacatatcgttatcccaggataatatcagagtacaaaatttgaagtacagtttttaactgaatgtgtattgcttttgccccattataaagttgaaaaaccataagtcaaaccattgttaagtcggactgtttgtgttacatatatttgggattttttagtggccctttttaaaaagctgtttcttatttctgatcattgtgagtggggatagatgtgggaagaaccatgtctctactaaaaatacaaaaaatagccaggcttgttggcacacacctatagtcccagctactcgggagaccgaggcaggagaatcacttgaaccgggaggcagagggcagatcatgccactgtattccagcctgggcaacagagtaagactctgtctcaaaaatgaatgaatgaatgaatgaacgaatgaatgtactatgagctgatactgggatttcaggtaccgcagtttgtgctgaatgatatgtttggggtaaatcagtttttttcttatagaatttcggcgtttttgctgcaactgccactaattttgcatttaaaagaacaaaagaggaatgtatttttcaaaggagtgaatgaggttaaaatcaagattttgaatggtataaatatgcaactaattcagttgtaggatattattaaattttttattgctaaatatgtttctttcatacgttgcagtgcttacagttccaacagctttccaagaaaacatttccatatttgtgttatttgtaaagtatacataaataatgtaaaataatttgggattatttcaactttacattgtatgtctgaatttcatcgatgttgtacctggctcagtcaatagttgtcacaggtattaagccattttggaatttgccacttttttctgggtaacctgttttagtttagtttacagcatttagaaacagaaggtaactttatagaagtaacaccaatatcctagtctgcttgccccgaatataactaatagtattaggatgtaagcaatattaagatggtttttattattttttatacactgtgtgcttttactttttatttaaactacagcaaaaaactgattttttaactaaaattgaatggcgtttatcttaatgaccagttattgaccaaagtgtactcagaagatgttattatgtcccaatctaaggaatcctttaatttggggattaattttacttacacatgccatttcagtttcagttgcctcattctattacatcattcttgtcaagtctaagctttatcatgtctgaattcttttaacactgaatctgtgatgtaaaaatgtatgatgtgccataaattttattcataataaactaagttatagcctattgtaatctgtaaaacatttcttgtaaattacctaatttattttttcatttatgtacagtatcttatgtaaatttgaaaaatgtttgccatggcgcattctgtaaacattcccgtattcttttccttaatgcttatttgcatgaaggtaacttgggttttgcttgtttgtattggataaccattaagccaacttcagtttctctgcctttttttctgtagtttaaccatttctaattttgttcatattctaaatagatgttagaatcatactttttattttctactttctaaataaattatctaagttgtttacta

SEQ ID NO: 345001 - DNA, 6387 bp, Homo sapiens
  misc_feature (196)..(196): n is a, c, g, or t
  misc_feature (6352)..(6352): n is a, c, g, or t
  misc_feature (6368)..(6368): n is a, c, g, or t
ggcggcggctccggggaccggggccttttgtttggagcggctgcgggggggccccggagcggcgaggccggcggccttccccagcttgctcggtcccggccacccctcgcgggggtggggggccgccccctgggccgggcatctcctcaggcgccgccgccccgccctaggccggccccgcccggcctgaggggangaaccggccgggcctcgccgcgcggcccagccacctccggagtcgccgcctctgctctcagtgccccggatcggaggccgtccatcgcccctcgggccgacgccatgaagatcaaagatgccaagaaaccctctttcccatggtttggcatggacattgggggaactctagtaaagctctcgtactttgaacctattgatatcacagcagaggaagagcaagaagaagttgagagtttaaaaagtattcggaaatatttgacttctaacgtggcatatggatccaccggcattcgggatgtacaccttgaactgaaagatttaacactttttggccgaagagggaacttgcactttatcaggtttccaacccaggacctgcctacttttatccaaatgggaagagataaaaacttctcaacattgcagacggtgctatgtgctacaggaggtggtgcttacaagtttgaaaaagattttcgcacaattggaaacctccacctgcacaaactggatgaacttgactgccttgtaaagggcttgctgtatatagactctgtcagtttcaatggacaagccgagtgctattattttgctaatgcctcagaacctgagcgatgccaaaagatgccttttaacctggatgatccctatccactgcttgtagtgaacattggctcaggagtcagtattttagcagtccattccaaagacaactataaacgagtgactgggacaagccttggagggggtacctttctgggtttatgcagtttattgactggctgtgaaagttttgaagaggctcttgaaatggcatccaaaggtgatagcacacaagctgacaagctggtccgtgatatttatggaggagattatgaaagatttggtttgccaggttgggctgtagcatctagttttgggaatatgatttataaggagaagcgagaatctgttagtaaagaagatctggcaagagctactttagttactatcaccaataacattggttctgtggcacgaatgtgtgctgttaatgagaaaataaacagagttgtctttgttggaaactttttacgtgtcaataccctctcaatgaaacttttggcatatgcactggattactggtcaaaaggtcaactaaaagcattgtttctagaacatgagggttactttggagcagttggtgcacttcttgggctgccaaatttcagctaaagcatcaggtctctctctctgctaataaatgtcatccaagaggaactaaaaccagaggcattattactgcattgtttgtcactgggaaccaaaggataaaagagtagcataagctgctgaatgttgccatattaaaggagagaacttggtaacgtgaagtatttctcattgaaatgctttcccttttgtatatagccagtgttaaatccttaaatgcaatacagcctctgattattgagcttcctcttaaaaagatttttttattttatgtagccaacattgcagtactgtatgctcaaacacaaatcttaaagtatcggaactgtttagcttatgaaaataatcgactctgaatatttgttacaagtctgttttatgtgttttgattactagtgagcagaaaataacataccctgtattcaaaattactgaaatggcaatcaaagatgatcatttttatgtgattttagaaatgttaaggcaatactactaattattgtaggtttttttaacgtatcacccaaagcatgtatgtgatctttccccattagtatctttttctcaaatgccataattaactgaaatactattattaaattttcatgagaattctaaaatgaatcctgggaaatgcacgtttggtgatgttgcactttctgtattttacaggaattagtcaatacatgttgaaatgtttaacattttaagattggaggcttaattactgggagtctgtctaatgaagtcctgggactattgtaatggaatatgatttgagttcactgtgctctttttgtttgtttgttttggtcatatatacattcagaacttttattttaaaacaaccacaataacattaataatagaaaattcatctgtaaatattcacagtctagtcactgaaaaatgggaaaacctctaccatgccttattattaccctttgctgtttgaggagccagaaatagaggtgcagttagaggacggtcactttttccaacaaaacccactccatagccatgtggatttttatccaaaggctcaacaaccagagggaatggtgagacctgataactaaaatactgttattggcaagggtttgaaatgtgtaagaacctaggagggaaaggaagattgagcaacataggaaaaggggaagagaggctgagtgtcaccaaggtccaaactccatttataaaaatactgcaaaaccaggagttgatggtagaagtgcatatgatccatggcaggagtaaatctctccacctcctctaactctctgaaaactctagagttggagcaagtcttccatttgcttcttatccccttaaaagaatgccttccacttcccaacagcccccatcaagggaccccaagaggccaccatgctcttatctcgcactttctttcctattccccttgcctgaatctggagtggggttgagccctctgccttcaaccttaagatttaggaagttctttccccaactgtctaacttggaaaggtagatgagtctgaattttgaagtaacgaatgcaaattccactcagcagaggcaatgttatttatgtacatagggatagtggaatgagttttaatagattctgtccaaaaggggtttgttcctcttatttcctctatgtaggaagttgtgtcttaggcaactttatcagtatcaatggaaaaatgataggcactacaatgaaatggcaggatgccaatatgagatatttcaggaataataagaaatacagtttgtttgtataaaataaactatctcaagaaagttttcaacgacagtgatagtgttcatttgtaagagagagttctagaacttcgatgtccagtgcagtagccactacccatatgtagctgttgagcatttgaaatatggttagtccaaattgagatgtgctctaaaggacaataaaaggttaaatatctcctaattttttgtattgattacatgttgaaatgttaacattggaaatattgggttaaagaaaaatacacaattaaaatgaatcttggccaggcgcagtggctcacgcctctaatcccagcactttgagaggccagggtgggcaggtcacctgaggtcaggagttcgagaccagcctggccagtgtggcaaaaccctgcctactaaaaatacaaaaattagccaggcatggtggtgcgcacctgtagtcccagctacttgggaggctgaggcaggagaattgcttgaacccaggaggaggaggctgcagtgagctgagattgtgccactgcactccagcctgggcgacagagtgagactctgtctcaaaaaaaagaatcatctgtttccaattatttttaaatgtgcttactagaaaagataaaatcacacatggtttacattttatttctattaagacagcaccgttaagaacatagagctttgaggaattgtggtattagaaccaaatctatttaccacagtgagcttacagggagttactcgagatcttaataaaaaattataatctttggcagccttcattatgattttgtgttcttattattccagtacctctagattacatatgggaaaagctaaagagccacagtggtgagatggttgctcactctagcaggtaatttcagtttgaaaggataaaatatatgaatcatagttcacattaaccaaagtacagtgatgaaataacttagactctgaccattccatttttttcttaaagattgccctaaatctatagatgctaatacagtatttgccacaggtataaaacttgtagttactgtcattcaattaagattcttatctgtacagatatacaaatcagaaacttttaaaataaattgaactaatggaattttggctccaatatttagtcactacaatggaaatattaaagcaaggaacatgaagtcattgtagggttttaaaatggctactgactgacatgaattcagagtttcaaacagtctaaattctaaaaacttaactttacacgcttttcctcctaaataaccactctaataattcatacattcatatcttcaggtaaagaaaactgaattttaaacaattgaggctgggtgcagtggctcatgcctgtaatcgaatataaggacttgagtataaaatttgaaaactacatggggaaatgtctttatcatgcatctcttgatagtctactgaaaactattaagtaaacctgcggtctgtaaacaaaaaaacccatagtgatacttaccttgtgtaatgtaaacaattttttaagctctttaaagtacatctagatttactggtaatgtatagaagtcaattttatccccaagcatttctacttcctaaaccattagcaagagtctcaaaacaacttcactaaactattggacctccagtgttaacttgccaacataaaaatctgaaaaactttgtaatcactatcaaaaatacaaaagagagaataaattcccaggtaaaaggctttacaaattttggaactattatgcttttgtttactaaacactgatccttttagtaattctgcagtattgcctcagactcccacaaagtttcaaaatagctcatctattagattcctgtaacatttatttgggataaacgtggttttgttgccgttgttcataatagaataaaatatttagctttgatggttcagatgtaatacaaagaaataactaagtttgggcctgagataaatgtggtaaagcaagaatgcagagatgctgtaatgatgagtgagttttatagcattactgaggacctgaaaacttgctgccaaggacactttgaaggttttgttggctggaagaagtgtctctggaatcccactcctagctcttcttgaatatttgaaaagaattagataagggccatggggacccaggtcaccccacctcttcttttcagtttggctacaacattggagtcatcagtgctcctgagacagtcatacaggactttctcagttacactttgaaagagaggtcagaagactctccctctgaggttttgctcatgtccccctggcccttgtctgtggccatcttccccaatggtgatatgattggctcctttctgttgcactctttgtcaaccactttggcaggtgcagttcaatgcttatcataatttgttggctattactggttgccttatgggattctgcagacaagctgagttggttgaaatgctgatcctgggccactagattactggcttgtaatgcggactctgcacaagttttgtgcccatgtacattggagagatctcgcctactcccctttggggtacctttagtgctctcaaccagctggacgtcgttggtattctggagatccagatctttggtctggagttcatcttggggtctgaagagctatgcccagtgatactgggctttaccatccttccagctgtcctataaagtgtagcccttccattttgccctggaagtcgtaagtttttgctcattaacagaaaggaagagtactaatgagatccttcagcaattgtaggggactcaggatgtgtcccaggacatctaggagataagagtgctaggatgatacaagctgtcatttccatcatgctccagctctctcagtagctctctggaatcaatgttgtcttctattactcaatgagaatcttcaaggatgcaggtgttgagaagccaatctatagattagtgcaggagtggttaatattatcttcttgactgtagtctctctgtttgtggttgaaagggcaggaaggactttacatatgataggtcttgaggcatggcgttttgttctgtcctcatgattgtttctttgttattaaaggatgagtatggtgggatgagctttgtctgtagtggggctatcttggtctttgtggccttctctgaagttggaccaagaactggctcaggatngccctcctgggatggnggggacccgaaaatgagga

SEQ ID NO: 345002 - DNA, 2948 bp, Homo sapiens
  misc_feature (20)..(20): n is a, c, g, or t
  misc_feature (23)..(23): n is a, c, g, or t
atccttaattaaattaatcnccnccccccccccaaatgagtgtacattattttgaatttaacttaactgttttgtggtgggtgtgaacaaaacattagaaatatattatctttttgtgataatactctctgacctcacttaaagtgatctgccatgaggtatccatgatcaagtttatgtttattctaatacctaaggaattcagccaactttgtttctatcatcagataatctcagaaaatagtgtgttttatctatattactgcctcttttcaatatttaagagaataattgtcttctggtttctactgagcctagtaataatcactaaagacctaaaaaaggaattccttctgttaagagtatttggatagcccattcacgataatggtggtgtgaaaatcaatcatcccagcttttctgacatatctaaattttgaataattaatttccacttccaaaaaattcaaatgttttctcaaagcagtcactacttatttgcattattcctgcatattcagtgaatgtgaggtcatatttggtattgtattagaagtagtgttggtcactggtcttgcctctttgaacattatttttatttgtaaaatgagggagttggtttgttatgatgggaaatgagtcagttttcagggtcctgagaaaattgcttcattcatggctgtgtttgagataactaaagtaaattttttttcaggtatttggtgtcatgttttggagttaatatttagtgcttatataattttaagttattacataatttttattggtatatatttgataggtactaggtattggattctcaccaaaccagtagaatggtattctctcttaatatgtgattgcctgtaatggccaggtagatataccttaaagtaatatgaaaggttttatatgtatattaaaatgtttgtacttttaaatctgtaaaggttatctggaatttttactgtgttaacttcagaattatatgggcattatgactttttcattgtacaaaaaattattcataaatgttagaatacagatgttccttgacttacaatagggttatgttccagtagacccattgtaaattgaaaataccgtaagttgaaaatacatttaatacgcctaacctactgaacatcccagcttagcctagcctatcttaaatgtgttctgaacacttaacgttggcctttagctgggcaaaatcatctaatacaaaacctattttataatgaagtgtttaatatctcaaataagagtattgtaccacatatcgttatcccaggataatatcagagtacaaaatttgaagtacagtttttaactgaatgtgtattgcttttgccccattataaagttgaaaaaccataagtcaaaccattgttaagtcggactgtttgtgttacatatatttgggattttttagtggccctttttaaaaagctgtttcttatttctgatcattgtgagtggggatagatgtgggaagaaccatgtctctactaaaaatacaaaaaatagccaggcttgttggcacacacctatagtcccagctactcgggagaccgaggcaggagaatcacttgaaccgggaggcagagggcagatcatgccactgtattccagcctgggcaacagagtaagactctgtctcaaaaatgaatgaatgaatgaatgaacgaatgaatgtactatgagctgatactgggatttcaggtaccgcagtttgtgctgaatgatatgtttggggtaaatcagtttttttcttatagaatttcggcgtttttgctgcaactgccactaattttgcatttaaaagaacaaaagaggaatgtatttttcaaaggagtgaatgaggttaaaatcaagattttgaatggtataaatatgcaactaattcagttgtaggatattattaaattttttattgctaaatatgtttctttcatacgttgcagtgcttacagttccaacagctttccaagaaaacatttccatatttgtgttatttgtaaagtatacataaataatgtaaaataatttgggattatttcaactttacattgtatgtctgaatttcatcgatgttgtacctggctcagtcaatagttgtcacaggtattaagccattttggaatttgccacttttttctgggtaacctgttttagtttagtttacagcatttagaaacagaaggtaactttatagaagtaacaccaatatcctagtctgcttgccccgaatataactaatagtattaggatgtaagcaatattaagatggtttttattattttttatacactgtgtgcttttactttttatttaaactacagcaaaaaactgattttttaactaaaattgaatggcgtttatcttaatgaccagttattgaccaaagtgtactcagaagatgttattatgtcccaatctaaggaatcctttaatttggggattaattttacttacacatgccatttcagtttcagttgcctcattctattacatcattcttgtcaagtctaagctttatcatgtctgaattcttttaacactgaatctgtgatgtaaaaatgtatgatgtgccataaattttattcataataaactaagttatagcctattgtaatctgtaaaacatttcttgtaaattacctaatttattttttcatttatgtacagtatcttatgtaaatttgaaaaatgtttgccatggcgcattctgtaaacattcccgtattcttttccttaatgcttatttgcatgaaggtaacttgggttttgcttgtttgtattggataaccattaagccaacttcagtttctctgcctttttttctgtagtttaaccatttctaattttgttcatattctaaatagatgttagaatcatactttttattttctactttctaaataaattatctaagttgtttacta

SEQ ID NO: 345003 - DNA, 2808 bp, Homo sapiens
  misc_feature (20)..(20): n is a, c, g, or t
  misc_feature (23)..(23): n is a, c, g, or t
atccttaattaaattaatcnccncccccccccctttatgtttattctaatacctaaggaattcagccaactttgtttctatcatcagataatctcagaaaatagtgtgttttatctatattactgcctcttttcaatatttaagagaataattgtcttctggtttctactgagcctagtaataatcactaaagacctaaaaaaggaattccttctgttaagagtatttggatagcccattcacgataatggtggtgtgaaaatcaatcatcccagcttttctgacatatctaaattttgaataattaatttccacttccaaaaaattcaaatgttttctcaaagcagtcactacttatttgcattattcctgcatattcagtgaatgtgaggtcatatttggtattgtattagaagtagtgttggtcactggtcttgcctctttgaacattatttttatttgtaaaatgagggagttggtttgttatgatgggaaatgagtcagttttcagggtcctgagaaaattgcttcattcatggctgtgtttgagataactaaagtaaattttttttcaggtatttggtgtcatgttttggagttaatatttagtgcttatataattttaagttattacataatttttattggtatatatttgataggtactaggtattggattctcaccaaaccagtagaatggtattctctcttaatatgtgattgcctgtaatggccaggtagatataccttaaagtaatatgaaaggttttatatgtatattaaaatgtttgtacttttaaatctgtaaaggttatctggaatttttactgtgttaacttcagaattatatgggcattatgactttttcattgtacaaaaaattattcataaatgttagaatacagatgttccttgacttacaatagggttatgttccagtagacccattgtaaattgaaaataccgtaagttgaaaatacatttaatacgcctaacctactgaacatcccagcttagcctagcctatcttaaatgtgttctgaacacttaacgttggcctttagctgggcaaaatcatctaatacaaaacctattttataatgaagtgtttaatatctcaaataagagtattgtaccacatatcgttatcccaggataatatcagagtacaaaatttgaagtacagtttttaactgaatgtgtattgcttttgccccattataaagttgaaaaaccataagtcaaaccattgttaagtcggactgtttgtgttacatatatttgggattttttagtggccctttttaaaaagctgtttcttatttctgatcattgtgagtggggatagatgtgggaagaaccatgtctctactaaaaatacaaaaaatagccaggcttgttggcacacacctatagtcccagctactcgggagaccgaggcaggagaatcacttgaaccgggaggcagagggcagatcatgccactgtattccagcctgggcaacagagtaagactctgtctcaaaaatgaatgaatgaatgaatgaacgaatgaatgtactatgagctgatactgggatttcaggtaccgcagtttgtgctgaatgatatgtttggggtaaatcagtttttttcttatagaatttcggcgtttttgctgcaactgccactaattttgcatttaaaagaacaaaagaggaatgtatttttcaaaggagtgaatgaggttaaaatcaagattttgaatggtataaatatgcaactaattcagttgtaggatattattaaattttttattgctaaatatgtttctttcatacgttgcagtgcttacagttccaacagctttccaagaaaacatttccatatttgtgttatttgtaaagtatacataaataatgtaaaataatttgggattatttcaactttacattgtatgtctgaatttcatcgatgttgtacctggctcagtcaatagttgtcacaggtattaagccattttggaatttgccacttttttctgggtaacctgttttagtttagtttacagcatttagaaacagaaggtaactttatagaagtaacaccaatatcctagtctgcttgccccgaatataactaatagtattaggatgtaagcaatattaagatggtttttattattttttatacactgtgtgcttttactttttatttaaactacagcaaaaaactgattttttaactaaaattgaatggcgtttatcttaatgaccagttattgaccaaagtgtactcagaagatgttattatgtcccaatctaaggaatcctttaatttggggattaattttacttacacatgccatttcagtttcagttgcctcattctattacatcattcttgtcaagtctaagctttatcatgtctgaattcttttaacactgaatctgtgatgtaaaaatgtatgatgtgccataaattttattcataataaactaagttatagcctattgtaatctgtaaaacatttcttgtaaattacctaatttattttttcatttatgtacagtatcttatgtaaatttgaaaaatgtttgccatggcgcattctgtaaacattcccgtattcttttccttaatgcttatttgcatgaaggtaacttgggttttgcttgtttgtattggataaccattaagccaacttcagtttctctgcctttttttctgtagtttaaccatttctaattttgttcatattctaaatagatgttagaatcatactttttattttctactttctaaataaattatctaagttgtttacta

SEQ ID NO: 345004 - DNA, 750 bp, Homo sapiens
gcacgaggggcaagcagactaggatataactaataatattgcttacatcctaatactattagttatattcggggcaagcagactaggtaagatggtttttattattttttatacactgtgtgcttttactttttatttaaactacagcaaaaaactgattttttaactaaaattgaatggcgtttatcttaatgaccagttattgaccaaagtgtactcagaagatgttattatgtcccaatctaaggaatcctttaatttggggattaattttacttacacatgccatttcagtttcagttgcctcattctattacatcattcttgtcaagtctaagctttatcatgtctgaattcttttaacactgaatctgtgatgtaaaaatgtatgatgtgccataaattttattcataataaactaagttatagcctattgtaatctgtaaaacatttcttgtaaattacctaatttattttttcatttatgtacagtatcttatgtaaatttgaaaaatgtttgccatggcgcattctgtaaacattcccgtattcttttccttaatgcttatttgcatgaaggtaacttgggttttgcttgtttgtattggataaccattaagccaacttcagtttctctgcctttttttctgtagtttaaccatttctaattttgttcatattctaaatagatgttagaatcatactttttattttctactttctaaataaattatctaagttgtttacta

SEQ ID NO: 345005 - DNA, 1593 bp, Homo sapiens
  misc_feature (196)..(196): n is a, c, g, or t
ggcggcggctccggggaccggggccttttgtttggagcggctgcgggggggccccggagcggcgaggccggcggccttccccagcttgctcggtcccggccacccctcgcgggggtggggggccgccccctgggccgggcatctcctcaggcgccgccgccccgccctaggccggccccgcccggcctgaggggangaaccggccgggcctcgccgcgcggcccagccacctccggagtcgccgcctctgctctcagtgccccggatcggaggccgtccatcgcccctcgggccgacgccatgaagatcaaagatgccaagaaaccctctttcccatggtttggcatggacattgggggaactctagtaaagctctcgtactttgaacctattgatatcacagcagaggaagagcaagaagaagttgagagtttaaaaagtattcggaaatatttgacttctaacgtggcatatggatccaccggcattcgggatgtacaccttgaactgaaagatttaacactttttggccgaagagggaacttgcactttatcaggtttccaacccaggacctgcctacttttatccaaatgggaagagataaaaacttctcaacattgcagacggtgctatgtgctacaggaggtggtgcttacaagtttgaaaaagattttcgcacaattggaaacctccacctgcacaaactggatgaacttgactgccttgtaaagggcttgctgtatatagactctgtcagtttcaatggacaagccgagtgctattattttgctaatgcctcagaacctgagcgatgccaaaagatgccttttaacctggatgatccctatccactgcttgtagtgaacattggctcaggagtcagtattttagcagtccattccaaagacaactataaacgagtgactgggacaagccttggagggggtacctttctgggtttatgcagtttattgactggctgtgaaagttttgaagaggctcttgaaatggcatccaaaggtgatagcacacaagctgacaagctggtccgtgatatttatggaggagattatgaaagatttggtttgccaggttgggctgtagcatctaggtaagtttaacatttgtgttatttaagttacagaagttaagtaattcaagttgcttatgtttttggaaagcaatgtaacagaaagttgtaagggtgctttctcttatccagtttaggttccaagttttgaacattgatgtcatttaaaaattaagtatacattaagaagtttaccctgagtgcgccttgtaagaaactttttttttttaatttttgagtgtctttccagtgtttatgcaaatacaaatacatatttttacttttctccccatatacaaaaggtaatctaccattatatggcatactatatatactctaaagtatccatatagaaatctttacatgttgttgaccttattttatacaggtgtaggataaattcccaaaagttggattgcaaatgcatttttgagatattgttaattatgcaaaagagcggtactgtttttcactctcaccagcggtaatatctatgctgctg

SEQ ID NO: 345006 - DNA, 2026 bp, Homo sapiens
  misc_feature (196)..(196): n is a, c, g, or t
ggcggcggctccggggaccggggccttttgtttggagcggctgcgggggggccccggagcggcgaggccggcggccttccccagcttgctcggtcccggccacccctcgcgggggtggggggccgccccctgggccgggcatctcctcaggcgccgccgccccgccctaggccggccccgcccggcctgaggggangaaccggccgggcctcgccgcgcggcccagccacctccggagtcgccgcctctgctctcagtgccccggatcggaggccgtccatcgcccctcgggccgacgccatgaagatcaaagatgccaagaaaccctctttcccatggtttggcatggacattgggggaactctagtaaagctctcgtactttgaacctattgatatcacagcagaggaagagcaagaagaagttgagagtttaaaaagtattcggaaatatttgacttctaacgtggcatatggatccaccggcattcgggatgtacaccttgaactgaaagatttaacactttttggccgaagagggaacttgcactttatcaggtttccaacccaggacctgcctacttttatccaaatgggaagagataaaaacttctcaacattgcagacggtgctatgtgctacaggaggtggtgcttacaagtttgaaaaagattttcgcacaattggaaacctccacctgcacaaactggatgaacttgactgccttgtaaagggcttgctgtatatagactctgtcagtttcaatggacaagccgagtgctattattttgctaatgcctcagaacctgagcgatgccaaaagatgccttttaacctggatgatccctatccactgcttgtagtgaacattggctcaggagtcagtattttagcagtccattccaaagacaactataaacgagtgactgggacaagccttggagggggtacctttctgggtttatgcagtttattgactggctgtgaaagttttgaagaggctcttgaaatggcatccaaaggtgatagcacacaagctgacaagctggtccgtgatatttatggaggagattatgaaagatttggtttgccaggttgggctgtagcatctagttttgggaatatgatttataaggagaagcgagaatctgttagtaaagaagatctggcaagagctactttagttactatcaccaataacattggttctgtggcacgaatgtgtgctgttaatgagaaaataaacagagttgtctttgttggaaactttttacgtgtcaataccctctcaatgaaacttttggcatatgcactggattactggtcaaaaggtcaactaaaagcattgtttctagaacatgagggttactttggagcagttggtgcacttcttgggctgccaaatttcagctaaagcatcaggtctctctctctgctaataaatgtcatccaagaggaactaaaaccagaggcattattactgcattgtttgtcactgggaaccaaaggataaaagagtagcataagctgctgaatgttgccatattaaaggagagaacttggtaacgtgaagtatttctcattgaaatgctttcccttttgtatatagccagtgttaaatccttaaatgcaatacagcctctgattattgagcttcctcttaaaaagatttttttattttatgtagccaacattgcagtactgtatgctcaaacacaaatcttaaagtatcggaactgtttagcttatgaaaataatcgactctgaatatttgttacaagtctgttttatgtgttttgattactagtgagcagaaaataacataccctgtattcaaaattactgaaatggcaatcaaagatgatcatttttatgtgattttagaaatgttaaggcaatactactaattattgtaggtttttttaacgtatcacccaaagcatgtatgtgatctttccccattagtatctttttctcaaatgccataattaactgaaatactattattaaattttcatgagaattct

SEQ ID NO: 345007 - DNA, 8240 bp, Homo sapiens
  misc_feature (55)..(55): n is a, c, g, or t
gcgacacgcagcggcggacgtactgtcgcagcccgtccgcctcgctcatggtacnggcgccctcacccgcagaaaccacctctaccatgccttattattaccctttgctgtttgaggagccagaaatagaggtgcagttagaggacggtcactttttccaacaaaacccactccatagccatgtggatttttatccaaaggctcaacaaccagagggaatggtgagacctgataactaaaatactgttattggcaagggtttgaaatgtgtaagaacctaggagggaaaggaagattgagcaacataggaaaaggggaagagaggctgagtgtcaccaaggtccaaactccatttataaaaatactgcaaaaccaggagttgatggtagaagtgcatatgatccatggcaggagtaaatctctccacctcctctaactctctgaaaactctagagttggagcaagtcttccatttgcttcttatccccttaaaagaatgccttccacttcccaacagcccccatcaagggaccccaagaggccaccatgctcttatctcgcactttctttcctattccccttgcctgaatctggagtggggttgagccctctgccttcaaccttaagatttaggaagttctttccccaactgtctaacttggaaaggtagatgagtctgaattttgaagtaacgaatgcaaattccactcagcagaggcaatgttatttatgtacatagggatagtggaatgagttttaatagattctgtccaaaaggggtttgttcctcttatttcctctatgtaggaagttgtgtcttaggcaactttatcagtatcaatggaaaaatgataggcactacaatgaaatggcaggatgccaatatgagatatttcaggaataataagaaatacagtttgtttgtataaaataaactatctcaagaaagttttcaacgacagtgatagtgttcatttgtaagagagagttctagaacttcgatgtccagtgcagtagccactacccatatgtagctgttgagcatttgaaatatggttagtccaaattgagatgtgctctaaaggacaataaaaggttaaatatctcctaattttttgtattgattacatgttgaaatgttaacattggaaatattgggttaaagaaaaatacacaattaaaatgaatcttggccaggcgcagtggctcacgcctctaatcccagcactttgagaggccagggtgggcaggtcacctgaggtcaggagttcgagaccagcctggccagtgtggcaaaaccctgcctactaaaaatacaaaaattagccaggcatggtggtgcgcacctgtagtcccagctacttgggaggctgaggcaggagaattgcttgaacccaggaggaggaggctgcagtgagctgagattgtgccactgcactccagcctgggcgacagagtgagactctgtctcaaaaaaaagaatcatctgtttccaattatttttaaatgtgcttactagaaaagataaaatcacacatggtttacattttatttctattaagacagcaccgttaagaacatagagctttgaggaattgtggtattagaaccaaatctatttaccacagtgagcttacagggagttactcgagatcttaataaaaaattataatctttggcagccttcattatgattttgtgttcttattattccagtacctctagattacatatgggaaaagctaaagagccacagtggtgagatggttgctcactctagcaggtaatttcagtttgaaaggataaaatatatgaatcatagttcacattaaccaaagtacagtgatgaaataacttagactctgaccattccatttttttcttaaagattgccctaaatctatagatgctaatacagtatttgccacaggtataaaacttgtagttactgtcattcaattaagattcttatctgtacagatatacaaatcagaaacttttaaaataaattgaactaatggaattttggctccaatatttagtcactacaatggaaatattaaagcaaggaacatgaagtcattgtagggttttaaaatggctactgactgacatgaattcagagtttcaaacagtctaaattctaaaaacttaactttacacgcttttcctcctaaataaccactctaataattcatacattcatatcttcaggtaaagaaaactgaattttaaacaattgaggctgggtgcagtggctcatgcctgtaatcgaatataaggacttgagtataaaatttgaaaactacatggggaaatgtctttatcatgcatctcttgatagtctactgaaaactattaagtaaacctgcggtctgtaaacaaaaaaacccatagtgatacttaccttgtgtaatgtaaacaattttttaagctctttaaagtacatctagatttactggtaatgtatagaagtcaattttatccccaagcatttctacttcctaaaccattagcaagagtctcaaaacaacttcactaaactattggacctccagtgttaacttgccaacataaaaatctgaaaaactttgtaatcactatcaaaaatacaaaagagagaataaattcccaggtaaaaggctttacaaattttggaactattatgcttttgtttactaaacactgatccttttagtaattctgcagtattgcctcagactcccacaaagtttcaaaatagctcatctattagattcctgtaacatttatttgggataaacgtggttttgttgccgttgttcataatagaataaaatatttagctttgatggttcagatgtaatacaaagaaataactaagtttgggcctgagataaatgtggtaaagcaagaatgcagagatgctgtaatgatgagtgagttttatagcattactgaggacctgaaaacttgctgccaaggacactttgaaggttttgttggctggaagaagtgtctctggaatcccactcctagctcttcttgaatatttgaaaagaattagataagggccatggggacccaggtcaccccacctcttcttttcagtttggctacaacattggagtcatcagtgctcctgagacagtcatacaggactttctcagttacactttgaaagagaggtcagaagactctccctctgaggttttgctcatgtccccctggcccttgtctgtggccatcttccccaatggtgatatgattggctcctttctgttgcactctttgtcaaccactttggcaggtgcagttcaatgcttatcataatttgttggctattactggttgccttatgggattctgcagacaagctgagttggttgaaatgctgatcctgggccactagattactggcttgtaatgcggactctgcacaagttttgtgcccatgtacattggagagatctcgcctactcccctttggggtacctttagtgctctcaaccagctggacgtcgttggtattctggagatccagatctttggtctggagttcatcttggggtctgaagagctatgcccagtgatactgggctttaccatccttccagctgtcctataaagtgtagcccttccattttgccctggaagtcgtaagtttttgctcattaacagaaaggaagagtactaatgagatccttcagcaattgtaggggactcaggatgtgtcccaggacatctaggagataagagtgctaggatgatacaagcaaagcaagtcactacactggcgctctttagagtacccagctaccaacaacccactgtcatttccatcatgctccagctctctcagtagctctctggaatcaatgttgtcttctattactcaatgagaatcttcaaggatgcaggtgttgagaagccaatctatagattagtgcaggagtggttaatattatcttcttgactgtagtctctctgtttgtggttgaaagggcaggaaggactttacatatgataggtcttgaggcatggcgttttgttctgtcctcatgattgtttctttgttattaaaggatgagtatggtgggatgagctttgtctgtagtggggctatcttggtctttgtggccttctctgaagttggaccagactccgttccctggaatactgtggccacactcttcagtttgcaatagcagtggctggttgctccaactggacctccaactttctagttggattgctcttcctgaacaattattatctagtttaagtgtgttgttgctttagggtcatggcatgcttatgtatttctgttaccatctgaccatggtactatgccaagttctcttaggggacctgaatctttccagtagaccacatttgagagagtatgagtcaactgggcatagttcccaacaacccaaaatacatacgtacttcactgaagcagatctcatgattccattgacttcatttctaaaattggactttgagcagccaatttctaaggattaaaaagaaactttaatgcattgtagacctctgtacacagaaaaatctttgtaacttttgggcttaattttcattcttaaaaaatctggtaactttttcaaatgcaaccactgtcagtttgctgtgaggctaggcaaacaacacaaggtatagaatttcccatcaccaccaccctgaccccgcgagaagattgccttttaattagagacttgtagaactagtgccttttaagttctacactcatcttttccaaagactattagtaaacttgccatgtaatttgacatggcagttccttgctcagctactctaaataaagttggaaattaggtggtctcttagtttgggtaaagtcagtactattgccagtaatatacatggtaattgaaagcccttaaagtggttcagattatttgccaaatattagactctataaaaatttctgaggttttttttcttttacctttgagtgtacatgtgattgctataatgtaaataccagtcccttaaagactgtttctataagcagaatgatgcagcacaaagtggaaaggttttcctcttattccagcagtattcttgccttcaaagagtagtccatcttgccttgatttttaaggttgttttcttggatggaaagcttaactggatagtaatttccatatgttctttataaccactctgtatattataagcaaagttttttcatattgtatctttttctgttgagcactttatgcattttagtctattgcatttgagaatgtagtttagaaattcactgtttaaagccatgtgaaaactgatagaggataatgaaaatgagtgtacattattttgaatttaacttaactgttttgtggtgggtgtgaacaaaacattagaaatatattatctttttgtgataatactctctgacctcacttaaagtgatctgccatgaggtatccatgatcaagtttatgtttattctaatacctaaggaattcagccaactttgtttctatcatcagataatctcagaaaatagtgtgttttatctatattactgcctcttttcaatatttaagagaataattgtcttctggtttctactgagcctagtaataatcactaaagacctaaaaaaggaattccttctgttaagagtatttggatagcccattcacgataatggtggtgtgaaaatcaatcatcccagcttttctgacatatctaaattttgaataattaatttccacttccaaaaaattcaaatgttttctcaaagcagtcactacttatttgcattattcctgcatattcagtgaatgtgaggtcatatttggtattgtattagaagtagtgttggtcactggtcttgcctctttgaacattatttttatttgtaaaatgagggagttggtttgttatgatgggaaatgagtcagttttcagggtcctgagaaaattgcttcattcatggctgtgtttgagataactaaagtaaattttttttcaggtatttggtgtcatgttttggagttaatatttagtgcttatataattttaagttattacataatttttattggtatatatttgataggtactaggtattggattctcaccaaaccagtagaatggtattctctcttaatatgtgattgcctgtaatggccaggtagatataccttaaagtaatatgaaaggttttatatgtatattaaaatgtttgtacttttaaatctgtaaaggttatctggaatttttactgtgttaacttcagaattatatgggcattatgactttttcattgtacaaaaaattattcataaatgttagaatacagatgttccttgacttacaatagggttatgttccagtagacccattgtaaattgaaaataccgtaagttgaaaatacatttaatacgcctaacctactgaacatcccagcttagcctagcctatcttaaatgtgttctgaacacttaacgttggcctttagctgggcaaaatcatctaatacaaaacctattttataatgaagtgtttaatatctcaaataagagtattgtaccacatatcgttatcccaggataatatcagagtacaaaatttgaagtacagtttttaactgaatgtgtattgcttttgccccattataaagttgaaaaaccataagtcaaaccattgttaagtcggactgtttgtgttacatatatttgggattttttagtggccctttttaaaaagctgtttcttatttctgatcattgtgagtggggatagatgtgggaagaaccatgtctctactaaaaatacaaaaaatagccaggcttgttggcacacacctatagtcccagctactcgggagaccgaggcaggagaatcacttgaaccgggaggcagagggcagatcatgccactgtattccagcctgggcaacagagtaagactctgtctcaaaaatgaatgaatgaatgaatgaacgaatgaatgtactatgagctgatactgggatttcaggtaccgcagtttgtgctgaatgatatgtttggggtaaatcagtttttttcttatagaatttcggcgtttttgctgcaactgccactaattttgcatttaaaagaacaaaagaggaatgtatttttcaaaggagtgaatgaggttaaaatcaagattttgaatggtataaatatgcaactaattcagttgtaggatattattaaattttttattgctaaatatgtttctttcatacgttgcagtgcttacagttccaacagctttccaagaaaacatttccatatttgtgttatttgtaaagtatacataaataatgtaaaataatttgggattatttcaactttacattgtatgtctgaatttcatcgatgttgtacctggctcagtcaatagttgtcacaggtattaagccattttggaatttgccacttttttctgggtaacctgttttagtttagtttacagcatttagaaacagaaggtaactttatagaagtaacaccaatatcctagtctgcttgccccgaatataactaatagtattaggatgtaagcaatattaagatggtttttattattttttatacactgtgtgcttttactttttatttaaactacagcaaaaaactgattttttaactaaaattgaatggcgtttatcttaatgaccagttattgaccaaagtgtactcagaagatgttattatgtcccaatctaaggaatcctttaatttggggattaattttacttacacatgccatttcagtttcagttgcctcattctattacatcattcttgtcaagtctaagctttatcatgtctgaattcttttaacactgaatctgtgatgtaaaaatgtatgatgtgccataaattttattcataataaactaagttatagcctattgtaatctgtaaaacatttcttgtaaattacctaatttattttttcatttatgtacagtatcttatgtaaatttgaaaaatgtttgccatggcgcattctgtaaacattcccgtattcttttccttaatgcttatttgcatgaaggtaacttgggttttgcttgtttgtattggataaccattaagccaacttcagtttctctgcctttttttctgtagtttaaccatttctaattttgttcatattctaaatagatgttagaatcatactttttattttctactttctaaataaattatctaagttgtttacta

SEQ ID NO: 345008 - DNA, 2252 bp, Homo sapiens
  misc_feature (196)..(196): n is a, c, g, or t
ggcggcggctccggggaccggggccttttgtttggagcggctgcgggggggccccggagcggcgaggccggcggccttccccagcttgctcggtcccggccacccctcgcgggggtggggggccgccccctgggccgggcatctcctcaggcgccgccgccccgccctaggccggccccgcccggcctgaggggangaaccggccgggcctcgccgcgcggcccagccacctccggagtcgccgcctctgctctcagtgccccggatcggaggccgtccatcgcccctcgggccgacgccatgaagatcaaagatgccaagaaaccctctttcccatggtttggcatggacattgggggaactctagtaaagctctcgtactttgaacctattgatatcacagcagaggaagagcaagaagaagttgagagtttaaaaagtattcggaaatatttgacttctaacgtggcatatggatccaccggcattcgggatgtacaccttgaactgaaagatttaacactttttggccgaagagggaacttgcactttatcaggtttccaacccaggacctgcctacttttatccaaatgggaagagataaaaacttctcaacattgcagacggtgctatgtgctacaggaggtggtgcttacaagtttgaaaaagattttcgcacaattggaaacctccacctgcacaaactggatgaacttgactgccttgtaaagggcttgctgtatatagactctgtcagtttcaatggacaagccgagtgctattattttgctaatgcctcagaacctgagcgatgccaaaagatgccttttaacctggatgatccctatccactgcttgtagtgaacattggctcaggagtcagtattttagcagtccattccaaagacaactataaacgagtgactgggacaagccttggagggggtacctttctgggtttatgcagtttattgactggctgtgaaagttttgaagaggctcttgaaatggcatccaaaggtgatagcacacaagctgacaagctggtccgtgatatttatggaggagattatgaaagatttggtttgccaggttgggctgtagcatctagttttgggaatatgatttataaggagaagcgagaatctgttagtaaagaagatctggcaagagctactttagttactatcaccaataacattggttctgtggcacgaatgtgtgctgttaatgagaaaataaacagagttgtctttgttggaaactttttacgtgtcaataccctctcaatgaaacttttggcatatgcactggattactggtcaaaaggtcaactaaaagcattgtttctagaacatgagggttactttggagcagttggtgcacttcttgggctgccaaatttcagctaaagcatcaggtctctctctctgctaataaatgtcatccaagaggaactaaaaccagaggcattattactgcattgtttgtcactgggaaccaaaggataaaagagtagcataagctgctgaatgttgccatattaaaggagagaacttggtaacgtgaagtatttctcattgaaatgctttcccttttgtatatagccagtgttaaatccttaaatgcaatacagcctctgattattgagcttcctcttaaaaagatttttttattttatgtagccaacattgcagtactgtatgctcaaacacaaatcttaaagtatcggaactgtttagcttatgaaaataatcgactctgaatatttgttacaagtctgttttatgtgttttgattactagtgagcagaaaataacataccctgtattcaaaattactgaaatggcaatcaaagatgatcatttttatgtgattttagaaatgttaaggcaatactactaattattgtaggtttttttaacgtatcacccaaagcatgtatgtgatctttccccattagtatctttttctcaaatgccataattaactgaaatactattattaaattttcatgagaattctaaaatgaatcctgggaaatgcacgtttggtgatgttgcactttctgtattttacaggaattagtcaatacatgttgaaatgtttaacattttaagattggaggcttaattactgggagtctgtctaatgaagtcctgggactataggcttgagccaccacggctggatgaatcataaattgtaaacctgaataaaatgctgcaacctccaatgagaggaaaataaa

SEQ ID NO: 345009 - DNA, 378 bp, Homo sapiens
tccacacacatcctcagacccatgctaagaggtacatcatgcccgtgtcttcataaagtgacctctcctttgccatttcagtcatccgcaacactctcctttgtggtaggaatatccctcctattgtgggtggtggggggaggggaatatgtgtgagaagtttgtccaggctcacacagctgccttattccagcacttctgtgggatgcgttcttcccattacgtcaaaacttccacccacatgcctgtaaagtagcaaatggagtgtctgtataaaaattctcaggttcacttcatttggcaattatctggttaatttgatcaaccaagctctaagtgtcttactgggatattatgcatttatagctttgtctgccc

SEQ ID NO: 345010 - DNA, 327 bp, Homo sapiens
ctcggcctcccaaagtgctgggattacaggcgtgacccaccgtgcctggccagaaacatttataatttctagactgtaaaatagcggaggcgattggccttctagatgcatagcaaggtgtgaccccacctgctgcactctgcctttcattgtccagacctaacttctcctgtcttctgtagtgtacgttcagtgataccacaaggaaggaataatgtgggacaccctgcaaaataaatggcctagtttccccaacaatgaatcagtggcactcttttaaagggtggtagtgatgggcgatggggattgttacataaaaaaagagac

SEQ ID NO: 345011 - DNA, 1227 bp, Homo sapiens
catcaaataaagggaagcggaaaacaccaccatcactatggatagtattgacattgggaaataattactaacatatctgtcacctctctgtctggccggctagggcccaacaaagtcagagccacgtgcaaatcactctatgttaaacggagaatgccacagtatgagtgacatttgctctgaagagagtcacccagagtaacttaaattgtgttcagtaagttctgtttcaaaatccattttaatacaaacttcaccaaaaaaatggctacaatgaagtctctatacttatgagaaaaggtgcaaaaagccacaaggatgttctttgcagcgctattcaaaatagtgaaaaattagaatgccacctaagtatctaaaaaggagatcagttaaataaaagtatttctacaaaatactatttagcaattttaaaatataattcaattatttactaatacagaaaaatattaatggtatatttcacatgaaaaaggtaggccatgaaacatgattatggtttgataccttttctttctttctttttttttttttttttttttttgagaaagggttttactctctcacccaggctggagtgcagtggtgccatctcggctcactgcagcttcgacctgctgggctcaagtgatactcctgcttcacttttttgtgaccagtgcactcacaccagcctcccaagtagctgggactacaggcatgcacctccaaacctggctaatttttttactttttggcaaagatgaggtctccctatgttgcccaggctggtctcgaactcctgggctcaagcgatcttcccatcttggcctcccaaagtgctgggattacagacatgagccactgtgcctggccagtacatattttttttttatcataaatgttattttcaaaaatactgaaatatgatttaaaaactgccaaaaatatcagcttagataatatcctctaaaaatatcctagggagaacctgagttcttaatccatataaaaaaggagcagtcttaaaattaagtaggtaagtaggctcttctccctatgtgtctgcatctttctgttgtccatccctagtagattagggcccttctgcagtcttccctttagcaaaaatctacattcagcaaaggatctgaatcatatcaatgacatgaagtagatgattactcatggtgtataagtattttactagggatcaaaggcttaagccaa

SEQ ID NO: 345012 - DNA, 718 bp, Homo sapiens
gactatttgagctctaagtataggatcatgaataccattgagaaatgaaggcaaacccgaaaatcactgaggaaaagtatataatttgatagtcactgttgacatgtatgattatacttaggaaacaaaacaaatattaaaataattttaattatgaggaacttggaagattcctgtaaagactccattcactttagcttcttcagtaactttaagtggaagagtccaagaaaaccacaaacaaggtagggataccatgtcacctctaatgcgtgaggagaaatattcttaggaatagtagagtactgtcaaggtgggaagtcctgagttactttagatttctacaatttattaattttagataataattatcaatgttaattttttaaaaaagttagttaagacagattttttcctttctaaatagaagtaaaataatgtataaatggaaagtaaaatacaaataaaaaagaacaagtgctcaggaagaaactgtagaaaccaataataaaagcctatagtcatcactaaataaagagacaaagatcacaacttctggatacagaaattaacaaaaagagactgtttctaatgtcgagaaagcttggcattcagtgttaaatgtcataacctttgttccctttttctttttttgtgctggtttcaattggtacagcatgtcttttgtaggaaataatcagtgcatttaactaaaaat

SEQ ID NO: 345013 - DNA, 525 bp, Homo sapiens
agctcccactggccaaacttaagacatttgagcatcaaacggataaataaaaagtagtcacagattttgacttaaaaaaaggacttcttgatattacaatagaggcagttagggtgaaagggaaagcactttttttttaagagaacaatgccaactaataaatgcaaaagaaggaatagatttggaaaatcattatttttgtaatccctaatgtaataagtgattcggacaggatcatcaatgaatgttaacacaattagatgaaatatagctggcatataggatatttacattattacaaaatatctcacagttattaattacagaaggaaaaagatttatttatgatggagaaatctagtcaatattgccttaagtgatcaaacttggcatcacaacaatgagatgcaccgatattttgtgcctcctgatttgatggaacttgactctagtcatgagggaaaaaaaatcaagcaattccagatatatgacattttacaaggcagcttgctgggactccagatt

SEQ ID NO: 345014 - DNA, 571 bp, Homo sapiens
ctgagcaatgagggtgttggctaaagacaacagcgtcttgatgggaaaggaggagcaatgggaaagactggagtatctcagtccctctcagtggatgggggttgtgggagagaggcagctgggagacaggcctccctctggagttcatagctgagttgctgtccaaatcagtggtccctagaatctataaaacaaaactgagaacttcagaggtgcatccagagaagccacactccaaaaggaccacttccaggtaagcatgacacactgctgggtgcacacactcctggcttcagattccaggatctttctcactgccttcaaccccagctagtaatagggagacccttcccctggagcctgggtggtgactcggagatctactggtcagcacagagagctggggcaggaatacacatctgcagtgatgagggatatggagcagtgacctcatggccagggcatggttaacggtatctttgccactcccaagctagcccatggctgccggatcttcctctgcttgatctcctagctgacctgtgcaaccctaggtagtccagaaattcca

SEQ ID NO: 345015 - DNA, 1755 bp, Homo sapiens
ctgagcaatgagggtgttggctaaagacaacagcgtcttgatgggaaaggaggagcaatgggaaagactggagtatctcagtccctctcagtggatgggggttgtgggagagaggcagctgggagacaggcctccctctggagttcatagctgagttgctgtccaaatcagtggtccctagaatctataaaacaaaactgagaacttcagaggtgcatccagagaagccacactccaaaaggaccacttccagccccagacgccatgcggcaaaccctaccgctgctgctgctgacggtgctgcgccccagctgggcagaccctccccaggagaaggtcccgctcttccgggtcactcagcagggcccctgggggagcagtggcagcaacgccaccgactcgccctgcgaggggctgcccgccgcggatgcgacggccttgaccctggcgaaccgcaacctggagcgcctgcccggctgcctaccgcgcacactgcgcagcctcgacgccagccacaacctgctgcgcgccctgagcacttccgagctcggccacctggagcagctgcaggtgctgaccctgcgccacaaccgcatcgccgcgctgcgctggggcccgggtgggccggcggggctgcacaccctggacctcagctacaaccagctggccgctctgccgccgtgcaccgggcccgcgctgagcagcctccgcgccctggcgctcgccgggaatccgctgcgggcgctgcagccccgggccttcgcctgcttccccgcgctgcagctcctcaacctctcctgcaccgcgctgggtcgcggagcccaggggggcatcgccgaggcggcgttcgctggagaggatggcgcgcccctggtcacgctcgaagtcctggatctcagcggcacgttccttgaacgggtgagtcaggtggatcagagacctgccgtaacgcctcaatcatccacttcgtaatcctgcagggagagattgccgttcgtgcgtgaccggagctcctgcgtaggaggtgcgagcgagttgtctcgaatgatatgatcactccccaaaactggcacgcagacatggacgtgtctaggatctccgcacagccagctgttgcttctgtcgccacacacatctttcaagatactccacatctacaggtccttctgttccagaagtaagtgcttctgaggcacatcttcatcacatgactgatttttgcccattacgctatgttgaattttatagaacaaaccagaccttaatttttctcccactactcttccaaatcctctctggggctttgttttcccccaccctttgggtgatatcttgggtaggtcccagatagtccacccagccatctagccttgcaacgtcagtccagttcagagtagcattagaacgccaaactcctatgcctttaaagtttattttaagcccagtcttagaaatttacagtgggaagaggtgaggaggacctcaggtctcctctctgtctggatctgctttcttccccacatgtcatgcaagttcagtcccttccagaatttgagtgggtctagggatgaaagtattgatattgttagaaaatcccttggaagtctatgggcaggccctgttagtcctcttttacacaatgcagtcactaaagatggaattattcttctaaaaggatgaacaacttttcaaagcaaaggcagaaccattcactcattctgtcctttattcaataaatagctattgagcacacga

SEQ ID NO: 345016 - DNA, 813 bp, Homo sapiens
ggggcacgttctccatgtattaggagagccacaaaatgaggtttctgggggcccctcgcctccttaattacgttccgcagaagttccccacacttgacagacatcagagcaaagtctggttattttctgtgtggactttaatgagaaggtggagcagcaacagacttggagacagtgtcctgggttcaagccttgtctctgccgctttccagctatgtagccttgggccaatcaatcccctctctggccttggccgactcagattggaagaaaggaaggactgcttgtccctgagcacccttccagctgaaatgaccacaattctgagattcccagagctgctaactgtgcccgtgctcagcgatgaccttcaccattcaccttgccactctcgttcttccttcatgccgtgctggcctcctgggtttgtgcgttctggagtagttggcagtttcccttctgtgtttcagttgagtcagggtggatcagagacctgccgaagctcacatccctctacctgaggaagatgcctcggctgacgaccctggagggggacattttcaagatgacccccaacctgcagcagctggactgtcaggactccccagcacttgcttctgtcgccacacacatctttcaagatactccacatctacaggtccttctgttccagaagtaagtgcttctgaggcacatcttcatcacatgactgatttttgcccattacgctatgttgaattttatagaacaaaccagaccttaatttttctcccactactcttccaaatcctctctggggctttgttttccccc

SEQ ID NO: 345017 - DNA, 1711 bp, Homo sapiens
ctgagcaatgagggtgttggctaaagacaacagcgtcttgatgggaaaggaggagcaatgggaaagactggagtatctcagtccctctcagtggatgggggttgtgggagagaggcagctgggagacaggcctccctctggagttcatagctgagttgctgtccaaatcagtggtccctagaatctataaaacaaaactgagaacttcagaggtgcatccagagaagccacactccaaaaggaccacttccagccccagacgccatgcggcaaaccctaccgctgctgctgctgacggtgctgcgccccagctgggcagaccctccccaggagaaggtcccgctcttccgggtcactcagcagggcccctgggggagcagtggcagcaacgccaccgactcgccctgcgaggggctgcccgccgcggatgcgacggccttgaccctggcgaaccgcaacctggagcgcctgcccggctgcctaccgcgcacactgcgcagcctcgacgccagccacaacctgctgcgcgccctgagcacttccgagctcggccacctggagcagctgcaggtgctgaccctgcgccacaaccgcatcgccgcgctgcgctggggcccgggtgggccggcggggctgcacaccctggacctcagctacaaccagctggccgctctgccgccgtgcaccgggcccgcgctgagcagcctccgcgccctggcgctcgccgggaatccgctgcgggcgctgcagccccgggccttcgcctgcttccccgcgctgcagctcctcaacctctcctgcaccgcgctgggtcgcggagcccaggggggcatcgccgaggcggcgttcgctggagaggatggcgcgcccctggtcacgctcgaagtcctggatctcagcggcacgttccttgaacgggtgagtcaggttgagtcagggtggatcagagacctgccgaagctcacatccctctacctgaggaagatgcctcggctgacgaccctggagggggacattttcaagatgacccccaacctgcagcagctggactgtcaggactccccagcacttgcttctgtcgccacacacatctttcaagatactccacatctacaggtccttctgttccagaagtaagtgcttctgaggcacatcttcatcacatgactgatttttgcccattacgctatgttgaattttatagaacaaaccagaccttaatttttctcccactactcttccaaatcctctctggggctttgttttcccccaccctttgggtgatatcttgggtaggtcccagatagtccacccagccatctagccttgcaacgtcagtccagttcagagtagcattagaacgccaaactcctatgcctttaaagtttattttaagcccagtcttagaaatttacagtgggaagaggtgaggaggacctcaggtctcctctctgtctggatctgctttcttccccacatgtcatgcaagttcagtcccttccagaatttgagtgggtctagggatgaaagtattgatattgttagaaaatcccttggaagtctatgggcaggccctgttagtcctcttttacacaatgcagtcactaaagatggaattattcttctaaaaggatgaacaacttttcaaagcaaaggcagaaccattcactcattctgtcctttattcaataaatagctattgagcacacga

SEQ ID NO: 345018 - DNA, 1662 bp, Homo sapiens
ctgagcaatgagggtgttggctaaagacaacagcgtcttgatgggaaaggaggagcaatgggaaagactggagtatctcagtccctctcagtggatgggggttgtgggagagaggcagctgggagacaggcctccctctggagttcatagctgagttgctccccagacgccatgcggcaaaccctaccgctgctgctgctgacggtgctgcgccccagctgggcagaccctccccaggagaaggtcccgctcttccgggtcactcagcagggcccctgggggagcagtggcagcaacgccaccgactcgccctgcgaggggctgcccgccgcggatgcgacggccttgaccctggcgaaccgcaacctggagcgcctgcccggctgcctaccgcgcacactgcgcagcctcgacgccagccacaacctgctgcgcgccctgagcacttccgagctcggccacctggagcagctgcaggtgctgaccctgcgccacaaccgcatcgccgcgctgcgctggggcccgggtgggccggcggggctgcacaccctggacctcagctacaaccagctggccgctctgccgccgtgcaccgggcccgcgctgagcagcctccgcgccctggcgctcgccgggaatccgctgcgggcgctgcagccccgggccttcgcctgcttccccgcgctgcagctcctcaacctctcctgcaccgcgctgggtcgcggagcccaggggggcatcgccgaggcggcgttcgctggagaggatggcgcgcccctggtcacgctcgaagtcctggatctcagcggcacgttccttgaacgggtgagtcaggtggatcagagacctgccgtaacgcctcaatcatccacttcgtaatcctgcagggagagattgccgttcgtgcgtgaccggagctcctgcgtaggaggtgcgagcgagttgtctcgaatgatatgatcactccccaaaactggcacgcagacatggacgtgtctaggatctccgcacagccagctgttgcttctgtcgccacacacatctttcaagatactccacatctacaggtccttctgttccagaagtaagtgcttctgaggcacatcttcatcacatgactgatttttgcccattacgctatgttgaattttatagaacaaaccagaccttaatttttctcccactactcttccaaatcctctctggggctttgttttcccccaccctttgggtgatatcttgggtaggtcccagatagtccacccagccatctagccttgcaacgtcagtccagttcagagtagcattagaacgccaaactcctatgcctttaaagtttattttaagcccagtcttagaaatttacagtgggaagaggtgaggaggacctcaggtctcctctctgtctggatctgctttcttccccacatgtcatgcaagttcagtcccttccagaatttgagtgggtctagggatgaaagtattgatattgttagaaaatcccttggaagtctatgggcaggccctgttagtcctcttttacacaatgcagtcactaaagatggaattattcttctaaaaggatgaacaacttttcaaagcaaaggcagaaccattcactcattctgtcctttattcaataaatagctattgagcacacga

SEQ ID NO: 345019 - DNA, 599 bp, Homo sapiens
aactttgaccagaataagctggaagaagaaatgagaaagcgaaaagaaagagtagaaaaatggcgagaagagcaacgtaaaaaggctatggaaaacataggagaactgaaaaaggaaatcgaagagatgaaacaagggaaaaagtggagtttagaggacgatgatgatgacgaagatgatcctgcagaagctgaaaaggagggaaatgaaatggagggtgaggagttagatccattagatgcttacatggaagaagtgaaagaggaagtaaaaaaatttaacatgagaagtgtaaaaggtggtgggggaaatgaaaagaagtctgggccaacggtcacaaaagttgtcactgttgtgacaaccaaaaaagcagttgtggattctgataagaagaaaggtgagctgatggagaatgaccaggatgccatggagtattcttcagaggaggaagaagttgatcttcagacagcccttacagggtatcaaacaaaacagcgaaagcttctagaaccagttgatcatggaaaaattgagtatgagccatttaggaaaaacttctatgttgaagttccagaactagcaaaaatgtctcaagaagg

SEQ ID NO: 345020 - DNA, 460 bp, Homo sapiens
aaataatcagaaaacaaatgaagatgtagaagacttaacactatcaactaacttgacagaaatgacatatataatacacttcacttgacaataacagaagacacactttttcgagtgcacatagaacatttaccaaaatagactataggctgagatggagagtaagtctcaaaaaacttacaataatttaaataatccagagtactaatactaatatgaatggtcatactaatttgaaattaaattataagtcagtaacagaaagatgcggaaaatatgcaaattcttagaaatgtaaaactcacttctaataagccacaggtcaaagaagaaatcacaaaggggatggaaacatatttgaacctaatgaaaatgaccatacaacatgtcaaagcttgtgagatgcagctaagcagtgtttgaaggatatttatagctttaaatgcttatattagaaaag

SEQ ID NO: 345021 - DNA, 818 bp, Homo sapiens
  misc_feature (1)..(1): n is a, c, g, or t
  misc_feature (64)..(64): n is a, c, g, or t
naggtcgcatcctcacacacgaaaatttacacattcaagaccccattcttcaccgtgtagagtntattcaaggaatggttccccaaataagttcagatcttcttcaaatcccccttagcacctctggtactgtaccgtaccttgcctttctgtccaggtttggtggaattgacctatatataaatggtataaagaggggaggtgggaatgaaatgaattgctgccgcacattaagagaacttgaaatccaagtgggagaaaaggttttcaaaaacattaagactgttatgaaagcctttgagctcattgatgttaacaagactggactggttcgaccgcaggagctaagaagggttctggagaccttctgtatgaagttaagagacgaggaatacgaaaagttttcgaaacactacaacatccacaaggatactgcagtagattacaacgtgtttttgaagaatctcagcataaataacgacttgaaccttagatattgtatgggaaatcaagaggtctcattggagaatcaacaagccaaaaattccaaaaaggaacgtttgctaggttctgcatcatctgaagatatctggagaaactactccttggatgaaattgagaggaacttttgtctacaagtaagatgttttcctaagccacaattacctacagagtaaacacagcaaagtagacaatatggaaaactattaggtttacacattatttctaaaatttgtttcgatcctacctatgtcttctccaatactgagaccccctctacctcccaataacagcaatacattgatcatggataatcg

SEQ ID NO: 345022 - DNA, 848 bp, Homo sapiens
ggctcatcgcagaggattggaagggcctagattactgcccaatgacaaaagtgtgggcttaatgtcctcactcttcagggagagaatgtggactttagcatttgaactgaatatttgagattgaagatttctgaataatcccccttagcacctctggtactgtaccgtaccttgcctttctgtccaggtttggtggaattgacctatatataaatggtataaagaggggaggtgggaatgaaatgaattgctgccgcacattaagagaacttgaaatccaagtgggagaaaaggttttcaaaaacattaagactgttatgaaagcctttgagctcattgatgttaacaagactggactggttcgaccgcaggagctaagaagggttctggagaccttctgtatgaagttaagagacgaggaatacgaaaagttttcgaaacactacaacatccacaaggatactgcagtagattacaacgtgtttttgaagaatctcagcataaataacgacttgaaccttagatattgtatgggaaatcaagaggtctcattggagaatcaacaagccaaaaattccaaaaaggaacgtttgctaggttctgcatcatctgaagatatctggagaaactactccttggatgaaattgagaggaacttttgtctacaagtaagatgttttcctaagccacaattacctacagagtaaacacagcaaagtagacaatatggaaaactattaggtttacacattatttctaaaatttgtttcgatcctacctatgtcttctccaatactgagaccccctctacctcccaataacagcaatacattgatcatggataatcg

SEQ ID NO: 345023 - DNA, 513 bp, Homo sapiens
atgtctctctccttccttcctcctttccttcgcctcattgatctgtttcccgttaccttttaccttacagtgatattaggagtggcaccacctttaaatggaaagattatttcttttaattaaatacttctgttaccaacaggtattgagaaacagtattggcagaaaagttgtcatgatcttaactggttcaatggcttttccaatcattaaagctttttctcccttctagacttcttactaataaagtcaggaataatgcttcctccctgcacatattaattactctacagtcaatgaagctgaagagattgagttgaagaaattgcaaatattttaaggagttattaccataaaaagtttaaatactctctggtagtggcaaggaatttatttcctttataaaatctccccctctatgtcctccaccctcgtgtgtattcaggttaactaatttcacacgatgaaacttgctcagctgcgtgaaaaataaatactttaaaaaatatcatc

SEQ ID NO: 345024 - DNA, 631 bp, Homo sapiens
ctataagcaatggatctttgacctagttgacaaagatatacattggagaaaggacaccctattcaataaatggtgctgggaaaattgggtagctatatgcagaaggatgaaaactggactcacacctttcaccatatgcaaaaattaactcaaggttgattgaagatttaaatgtaagacctgaaactattaaaatcctataagaaaaactgggaaaaactcttctggacatgggtttaggcaaataatttatgaccatgtcttcaaaatgaaatgcaacataaacaaaaatagataaatggaacttaattaaactaaaaagcttcttctcagcaaaagaaacaatcaacagtgtaaacagacaacttacagaatggaaaaaaaatttgcaagctatgcatccaacaaagggctaatatccagaatctacaaggaactcaaacaactcaacaagaaaaaaaaaaaaaagtaacctcattaaaaaaatctccatgctgttttccaaacaggttgccccgtttcaggtttcagattgtcctttttggagatttctgtaagaactaaaaatagaactatcattcgatccagcaatcccattactggatatgtacccaaagggaaagaaattatt

SEQ ID NO: 345025 - DNA, 286 bp, Homo sapiens
tatatcaaatcctaggaagtggtgtaaaatactttattttacattttcacagggaaaaaaacaatagattttagattaagaaatataaaatacacttccaataaaatgttttataaactcactattttgttaacaaagcttggtttaaacccaggagtgggataactgaatgatgtggtggaagaggcccccccaaaaaaacagaaattatacatttaaaaaataactaagagtagaattggattgtttgtaacacaaaggataaatacttgaggagatggatacc

SEQ ID NO: 345026 - DNA, 3231 bp, Homo sapiens
tgcttcctggagcatttttttccccttagagctgttcgctgttttccctgtcacgccgcttttctgaaagacgggttgtgcgctttgggcttattcctggacggtccccaaaggtccccgaaaggaccaggcccggacacgtggggccttggtttccggccggaagtcccgggaggtgtagggctagagttctggccgtggcgggccggtttctgcgtgctgcgtgcgcggccgcgtgggctatggggcggcggtcgcggggtcggcggctccagcaacagcagcggccggaggacgcggaggatggcgccgagggtggtggaaagcgcggcgaggcgggctgggaaggaggctaccccgagatcgtcaaggagaacaagctgttcgagcactactaccaggagctcaagatcgtgcccgagggcgagtggggccagttcatggacgctctcagggagccgctcccggccactttaagaattactggttacaaaagccacgcaaaagagattctccattgcttaaagaacaaatattttaaggaattggaggacctggaggtggacggtcagaaagttgaagttccacagccactgagttggtatcctgaagaacttgcctggcacacaaatttaagtcgaaaaatcttgagaaaatcgccacacttggaaaagtttcatcagtttctagttagtgaaacagaatctggaaatattagtcgtcaagaagctgttagcatgatcccaccactgctcctcaacgtgcggcctcatcataagatcttagatatgtgtgcagcacctggctcaaagaccacacagttaattgaaatgctacatgccgacatgaatgtcccctttccagagggatttgttattgcgaatgatgtggacaacaagcgctgctacctgctcgtccatcaagccaagaggctgagcagcccctgcatcatggtggtcaaccatgatgcctccagcatacccaggctccagatagatgtggacggcaggaaagagatcctcttctatgatcgaattttatgtgatgtcccttgcagtggagacggcactatgagaaaaaacattgatgtttggaaaaagtggaccaccttaaatagcttgcagctacatggcttacagctgcggattgcaacacgcggggctgaacagctggctgaaggtggaaggatggtgtattccacgtgttcactaaaccctattgaggatgaagcagtcatagcatctttactggaaaaaagtgaaggtgctttggagcttgctgatgtgtctaatgaactgccagggctgaagtggatgcctggaatcacacagtggaaggtaatgacgaaagatgggcagtggtttacagactgggacgctgttcctcacagcagacacacccagatccgacctaccatgttccctccgaaggacccagaaaagctgcaggccatgcacctggagcgatgccttaggatattaccccatcatcagaatactggagggttttttgtggcagtattggtgaaaaaatcttcaatgccgtggaataaacgtcagccaaagcttcagggtaaatctgcagagaccagagaaagcacacagctgagccctgcagatctcacagaagggaaacccacagatccctctaagctggaaagtccgtcattcacaggaactggtgacacagaaatagctcatgcaactgaggatttagagaataatggcagtaagaaagatggcgtgtgtggtcctcctccatcaaagaaaatgaagttatttggatttaaagaagatccatttgtatttattcctgaagatgacccattatttccacctattgagaaattttatgctttggatccttcattcccaaggatgaatttgttaactcggactacagaagggaagaaaaggcagctctacatggtttctaaggagttgcggaatgtgctgctgaataacagtgagaagatgaaggttattaacacggggatcaaagtctggtgtagaaataacagcggtgaagagtttgactgtgctttccggctggcacaggagggaatatatacattgtatccatttattaactcaagaattattactgtatcaatggaagatgttaagatactgttgacccaggaaaatcccttttttagaaaactcagcagtgagacctacagtcaagcaaaggacctggcaaagggaagcatcgtgctgaagtatgaaccagattctgcgaatccagacgctctgcagtgtcccatcgtcttatgcggatggcggggaaaggcctccattcgaacttttgtgcccaagaatgaacggcttcattatctcaggatgatggggctggaggtattgggagaaaagaagaaggaaggggttatcctcacaaatgagagtgcagccagcaccggacagccagacaatgacgtgactgagggacagagagcaggagagcccaacagcccagatgcagaagaggccaacagtccagacgtgacagcaggctgtgacccggcgggggtccatccaccccggtgagcaggcccaaggcagcgggggcccacacccctcacacgcaaaactggcttcttctggtcactggtgtctgaaaccaaatccagagcagcctgtggcctgtaaagcatatatttctaatgactgcagactggtgggatcataggagccttctgaatgaccaggactgctttctttggagctgatgaaaatgtactcttttagcgtgttagaaatcacttgttttattttgtttctttggccaagctgggtctagtgtttcttttgctgggaatagactttcaaaagttgtacttctatcaagaaacaaaactgcccttgcagaaatttcaggtcttttgttaagcctgtattggtcttaaggtgcagtattttttaaattattatttatagaaagaatctataaattcttggggaagtgtgttataagctttaataattacattgagctgcacctcagtggtgtgtcattaacatgcagtggggttaatatctgaggcctcagatgactttgtgccttttggaataaagggtaaaataaactctcccagagtaagagctgtatcgtgaattgtcatactaattattgagggggacttatgtgcttttattgaatggagtgctttacaatttttatttttaaatggggttgggatccttggaatatttcaataaaattgataaaata

SEQ ID NO: 345027 - DNA, 2948 bp, Homo sapiens
  misc_feature (35)..(35): n is a, c, g, or t
gatcccctcccccaccacacaacgaggaaaaacgntctctatcgaaaatatttgtgcctcaccccctgcactggacagaacagctgccacccaatgtttggtttttctccaccctgcgccttcaacccattcctgtctccccactccagcctgcttacttcatccagggccttgctgtctcttgcccactttaagaattactggttacaaaagccacgcaaaagagattctccattgcttaaagaacaaatattttaaggaattggaggacctggaggtggacggtcagaaagttgaagttccacagccactgagttggtatcctgaagaacttgcctggcacacaaatttaagtcgaaaaatcttgagaaaatcgccacacttggaaaagtttcatcagtttctagttagtgaaacagaatctggaaatattagtcgtcaagaagctgttagcatgatcccaccactgctcctcaacgtgcggcctcatcataagatcttagatatgtgtgcagcacctggctcaaagaccacacagttaattgaaatgctacatgccgacatgaatgtcccctttccagagggatttgttattgcgaatgatgtggacaacaagcgctgctacctgctcgtccatcaagccaagaggctgagcagcccctgcatcatggtggtcaaccatgatgcctccagcatacccaggctccagatagatgtggacggcaggaaagagatcctcttctatgatcgaattttatgtgatgtcccttgcagtggagacggcactatgagaaaaaacattgatgtttggaaaaagtggaccaccttaaatagcttgcagctacatggcttacagctgcggattgcaacacgcggggctgaacagctggctgaaggtggaaggatggtgtattccacgtgttcactaaaccctattgaggatgaagcagtcatagcatctttactggaaaaaagtgaaggtgctttggagcttgctgatgtgtctaatgaactgccagggctgaagtggatgcctggaatcacacagtggaaggtaatgacgaaagatgggcagtggtttacagactgggacgctgttcctcacagcagacacacccagatccgacctaccatgttccctccgaaggacccagaaaagctgcaggccatgcacctggagcgatgccttaggatattaccccatcatcagaatactggagggttttttgtggcagtattggtgaaaaaatcttcaatgccgtggaataaacgtcagccaaagcttcagggtaaatctgcagagaccagagaaagcacacagctgagccctgcagatctcacagaagggaaacccacagatccctctaagctggaaagtccgtcattcacaggaactggtgacacagaaatagctcatgcaactgaggatttagagaataatggcagtaagaaagatggcgtgtgtggtcctcctccatcaaagaaaatgaagttatttggatttaaagaagatccatttgtatttattcctgaagatgacccattatttccacctattgagaaattttatgctttggatccttcattcccaaggatgaatttgttaactcggactacagaagggaagaaaaggcagctctacatggtttctaaggagttgcggaatgtgctgctgaataacagtgagaagatgaaggttattaacacggggatcaaagtctggtgtagaaataacagcggtgaagagtttgactgtgctttccggctggcacaggagggaatatatacattgtatccatttattaactcaagaattattactgtatcaatggaagatgttaagatactgttgacccaggaaaatcccttttttagaaaactcagcagtgagacctacagtcaagcaaaggacctggcaaagggaagcatcgtgctgaagtatgaaccagattctgcgaatccagacgctctgcagtgtcccatcgtcttatgcggatggcggggaaaggcctccattcgaacttttgtgcccaagaatgaacggcttcattatctcaggatgatggggctggaggtattgggagaaaagaagaaggaaggggttatcctcacaaatgagagtgcagccagcaccggacagccagacaatgacgtgactgagggacagagagcaggagagcccaacagcccagatgcagaagaggccaacagtccagacgtgacagcaggctgtgacccggcgggggtccatccaccccggtgagcaggcccaaggcagcgggggcccacacccctcacacgcaaaactggcttcttctggtcactggtgtctgaaaccaaatccagagcagcctgtggcctgtaaagcatatatttctaatgactgcagactggtgggatcataggagccttctgaatgaccaggactgctttctttggagctgatgaaaatgtactcttttagcgtgttagaaatcacttgttttattttgtttctttggccaagctgggtctagtgtttcttttgctgggaatagactttcaaaagttgtacttctatcaagaaacaaaactgcccttgcagaaatttcaggtcttttgttaagcctgtattggtcttaaggtgcagtattttttaaattattatttatagaaagaatctataaattcttggggaagtgtgttataagctttaataattacattgagctgcacctcagtggtgtgtcattaacatgcagtggggttaatatctgaggcctcagatgactttgtgccttttggaataaagggtaaaataaactctcccagagtaagagctgtatcgtgaattgtcatactaattattgagggggacttatgtgcttttattgaatggagtgctttacaatttttatttttaaatggggttgggatccttggaatatttcaataaaattgataaaata

SEQ ID NO: 345028 - DNA, 4111 bp, Homo sapiens
  misc_feature (708)..(708): n is a, c, g, or t
  misc_feature (946)..(946): n is a, c, g, or t
acagcaggctgtttctcagatcttctcctgacctcctttcacctgctgctttttctccccaaggcaggccatagaaactaaaagtataatcttcctttgcccgtcttccagttggccataaaaagaatcctctgacctaccttgtctgattttaggtcatgagacccccatttcagaagggattctgccccatacctgagaggaagaaatgtagacaggccttgttggacttccccactccatctgtattagattatgcctcttttgtccaatcccatttctccagtgttgtccatgcttcaatcatccctatccaatgaggtctccataaaaggcccaagaagacaggtttagagagctttcggagaacagaacacttggctttgcaaagtggcacgcctggagagaacttggaagctccacgccccttctatacctcaccctatgcatctcttcagctgtatcttttgtgatatcctttataataaaccagtaaacggacctaagtgttcctctgagttctgcaagctgctccagcaaattaaaaagaaggggtgtgagccaccacgcccggctgcagatggtgtttctttatcaagcctacttacagaagatagatttcactgtttgaatttttagtaacaatttcccctttcccccacctttgttcattattattactattattattattattattacttactnccttacatgaagggtagtagtgtgtagttaaaagctaccatcagactccctgggttcaaatcctaatcggcaagttacttacagtgttagacatcccatgtgaaatgggacgaatcagtatgtagcttgcgaggtgctcaggaaatgttagctgttatagtgacaccacgcccctttctcttaagtggaaacaaatacccatcgtgatgttttagagtcagctttcatctcgtcctanctttgttcaggcaaacttctctagttctgttttaataggcatatttgttaggtctgttttttgaaatcctcttttttacattgtttaaagataatgccttggctaaaaagcctgcttcacttttccctgtttttagttgttttctccacattggcagtaaagagccttggcgtcccagcagcagcaggttctcctttttgtattgtggatgttttgcatttcatactgttgtgaagagtggctttgatcatacatgttgttggtatatttgcctttttgctgggggtgtgagaagaaccagagatgagcagaggtacacccagtagacttcccagcctgcagagcctcccgggaagagcttccgtgttcaggtgcttggggccccaccctaggagcctgactcacagtcagagcagggtcccggcttgtgttcaggattttgaaacatttgtaaggtgattttgttgtttctacacctttctcctcatcttttttttttgtagttaatcgttactaataacagaaaagacatttttggcatggtaattggcacaaagtgaataattgttgaatagatgacttttgaggctttcaaaattcgagtgtccataaaatccatccagagccacctggttcctttttttgaaccacttaacgtaattctggaaaaccttgactgtgggtcttaagtttggtggattgctgcttctcactggctgacctttggaggtcgcatatttcaggatgtgactccacttaggctccatttcacctgacactgcaattctgtgccttcagagggatttgttattgcgaatgatgtggacaacaagcgctgctacctgctcgtccatcaagccaagaggctgagcagcccctgcatcatggtggtcaaccatgatgcctccagcatacccaggctccagatagatgtggacggcaggaaagagatcctcttctatgatcgaattttatgtgatgtcccttgcagtggagacggcactatgagaaaaaacattgatgtttggaaaaagtggaccaccttaaatagcttgcagctacatggcttacagctgcggattgcaacacgcggggctgaacagctggctgaaggtggaaggatggtgtattccacgtgttcactaaaccctattgaggatgaagcagtcatagcatctttactggaaaaaagtgaaggtgctttggagcttgctgatgtgtctaatgaactgccagggctgaagtggatgcctggaatcacacagtggaaggtaatgacgaaagatgggcagtggtttacagactgggacgctgttcctcacagcagacacacccagatccgacctaccatgttccctccgaaggacccagaaaagctgcaggccatgcacctggagcgatgccttaggatattaccccatcatcagaatactggagggttttttgtggcagtattggtgaaaaaatcttcaatgccgtggaataaacgtcagccaaagcttcagggtaaatctgcagagaccagagaaagcacacagctgagccctgcagatctcacagaagggaaacccacagatccctctaagctggaaagtccgtcattcacaggaactggtgacacagaaatagctcatgcaactgaggatttagagaataatggcagtaagaaagatggcgtgtgtggtcctcctccatcaaagaaaatgaagttatttggatttaaagaagatccatttgtatttattcctgaagatgacccattatttccacctattgagaaattttatgctttggatccttcattcccaaggatgaatttgttaactcggactacagaagggaagaaaaggcagctctacatggtttctaaggagttgcggaatgtgctgctgaataacagtgagaagatgaaggttattaacacggggatcaaagtctggtgtagaaataacagcggtgaagagtttgactgtgctttccggctggcacaggagggaatatatacattgtatccatttattaactcaagaattattactgtatcaatggaagatgttaagatactgttgacccaggaaaatcccttttttagaaaactcagcagtgagacctacagtcaagcaaaggacctggcaaagggaagcatcgtgctgaagtatgaaccagattctgcgaatccagacgctctgcagtgtcccatcgtcttatgcggatggcggggaaaggcctccattcgaacttttgtgcccaagaatgaacggcttcattatctcaggatgatggggctggaggtattgggagaaaagaagaaggaaggggttatcctcacaaatgagagtgcagccagcaccggacagccagacaatgacgtgactgagggacagagagcaggagagcccaacagcccagatgcagaagaggccaacagtccagacgtgacagcaggctgtgacccggcgggggtccatccaccccggtgagcaggcccaaggcagcgggggcccacacccctcacacgcaaaactggcttcttctggtcactggtgtctgaaaccaaatccagagcagcctgtggcctgtaaagcatatatttctaatgactgcagactggtgggatcataggagccttctgaatgaccaggactgctttctttggagctgatgaaaatgtactcttttagcgtgttagaaatcacttgttttattttgtttctttggccaagctgggtctagtgtttcttttgctgggaatagactttcaaaagttgtacttctatcaagaaacaaaactgcccttgcagaaatttcaggtcttttgttaagcctgtattggtcttaaggtgcagtattttttaaattattatttatagaaagaatctataaattcttggggaagtgtgttataagctttaataattacattgagctgcacctcagtggtgtgtcattaacatgcagtggggttaatatctgaggcctcagatgactttgtgccttttggaataaagggtaaaataaactctcccagagtaagagctgtatcgtgaattgtcatactaattattgagggggacttatgtgcttttattgaatggagtgctttacaatttttatttttaaatggggttgggatccttggaatatttcaataaaattgataaaata

SEQ ID NO: 345029 - DNA, 1105 bp, Homo sapiens
cagaagaggccgacagtccatccgaagcagggaaaactcagcagtgagacctacagtcaagcaaaggacctggcaaagggaagcatcgtgctgaagtatgaaccagattctgcgaatccagacgctctgcagtgtcccatcgtcttatgcggatggcggggaaaggcctccattcgaacttttgtgcccaagaatgaacggcttcattatctcaggatgatggggctggaggtattgggagaaaagaagaaggaaggggttatcctcacaaatgagagtgcagccagcaccggacagccagacaatgacgtgactgagggacagagagcaggagagcccaacagcccagatgcagaagaggccaacagtccagacgtgacagcaggctgtgacccggcgggggtccatccaccccggtgagcaggcccaaggcagcgggggcccacacccctcacacgcaaaactggcttcttctggtcactggtgtctgaaaccaaatccagagcagcctgtggcctgtaaagcatatatttctaatgactgcagactggtgggatcataggagccttctgaatgaccaggactgctttctttggagctgatgaaaatgtactcttttagcgtgttagaaatcacttgttttattttgtttctttggccaagctgggtctagtgtttcttttgctgggaatagactttcaaaagttgtacttctatcaagaaacaaaactgcccttgcagaaatttcaggtcttttgttaagcctgtattggtcttaaggtgcagtattttttaaattattatttatagaaagaatctataaattcttggggaagtgtgttataagctttaataattacattgagctgcacctcagtggtgtgtcattaacatgcagtggggttaatatctgaggcctcagatgactttgtgccttttggaataaagggtaaaataaactctcccagagtaagagctgtatcgtgaattgtcatactaattattgagggggacttatgtgcttttattgaatggagtgctttacaatttttatttttaaatggggttgggatccttggaatatttcaataaaattgataaaata

SEQ ID NO: 345030 - DNA, 1077 bp, Homo sapiens
cacccccacaacccacccacaacctccgcccacaccgaccaattcgcaaaggcagcatcgcgcttttaattgagccacattctgcgaatccagacgctctgcagtgtcccatcgtcttatgcggatggcggggaaaggcctccattcgaacttttgtgcccaagaatgaacggcttcattatctcaggatgatggggctggaggtattgggagaaaagaagaaggaaggggttatcctcacaaatgagagtgcagccagcaccggacagccagacaatgacgtgactgagggacagagagcaggagagcccaacagcccagatgcagaagaggccaacagtccagacgtgacagcaggctgtgacccggcgggggtccatccaccccggtgagcaggcccaaggcagcgggggcccacacccctcacacgcaaaactggcttcttctggtcactggtgtctgaaaccaaatccagagcagcctgtggcctgtaaagcatatatttctaatgactgcagactggtgggatcataggagccttctgaatgaccaggactgctttctttggagctgatgaaaatgtactcttttagcgtgttagaaatcacttgttttattttgtttctttggccaagctgggtctagtgtttcttttgctgggaatagactttcaaaagttgtacttctatcaagaaacaaaactgcccttgcagaaatttcaggtcttttgttaagcctgtattggtcttaaggtgcagtattttttaaattattatttatagaaagaatctataaattcttggggaagtgtgttataagctttaataattacattgagctgcacctcagtggtgtgtcattaacatgcagtggggttaatatctgaggcctcagatgactttgtgccttttggaataaagggtaaaataaactctcccagagtaagagctgtatcgtgaattgtcatactaattattgagggggacttatgtgcttttattgaatggagtgctttacaatttttatttttaaatggggttgggatccttggaatatttcaataaaattgataaaata

SEQ ID NO: 345031 - DNA, 2546 bp, Homo sapiens
tgcttcctggagcatttttttccccttagagctgttcgctgttttccctgtcacgccgcttttctgaaagacgggttgtgcgctttgggcttattcctggacggtccccaaaggtccccgaaaggaccaggcccggacacgtggggccttggtttccggccggaagtcccgggaggtgtagggctagagttctggccgtggcgggccggtttctgcgtgctgcgtgcgcggccgcgtgggctatggggcggcggtcgcggggtcggcggctccagcaacagcagcggccggaggacgcggaggatggcgccgagggtggtggaaagcgcggcgaggcgggctgggaaggaggctaccccgagatcgtcaaggagaacaagctgttcgagcactactaccaggagctcaagatcgtgcccgagggcgagtggggccagttcatggacgctctcagggagccgctcccggccactttaagaattactggttacaaaagccacgcaaaagagattctccattgcttaaagaacaaatattttaaggaattggaggacctggaggtggacggtcagaaagttgaagttccacagccactgagttggtatcctgaagaacttgcctggcacacaaatttaagtcgaaaaatcttgagaaaatcgccacacttggaaaagtttcatcagtttctagttagtgaaacagaatctggaaatattagtcgtcaagaagctgttagcatgatcccaccactgctcctcaacgtgcggcctcatcataagatcttagatatgtgtgcagcacctggctcaaagaccacacagttaattgaaatgctacatgccgacatgaatgtcccctttccagagggatttgttattgcgaatgatgtggacaacaagcgctgctacctgctcgtccatcaagccaagaggctgagcagcccctgcatcatggtggtcaaccatgatgcctccagcatacccaggctccagatagatgtggacggcaggaaagagatcctcttctatgatcgaattttatgtgatgtcccttgcagtggagacggcactatgagaaaaaacattgatgtttggaaaaagtggaccaccttaaatagcttgcagctacatggcttacagctgcggattgcaacacgcggggctgaacagctggctgaaggtggaaggatggtgtattccacgtgttcactaaaccctattgaggatgaagcagtcatagcatctttactggaaaaaagtgaaggtgctttggagcttgctgatgtgtctaatgaactgccagggctgaagtggatgcctggaatcacacagtggaaggtaatgacgaaagatgggcagtggtttacagactgggacgctgttcctcacagcagacacacccagatccgacctaccatgttccctccgaaggacccagaaaagctgcaggccatgcacctggagcgatgccttaggatattaccccatcatcagaatactggagggttttttgtggcagtattggtgaaaaaatcttcaatgccgtggaataaacgtcagccaaagcttcagggtaaatctgcagagaccagagaaagcacacagctgagccctgcagatctcacagaagggaaacccacagatccctctaagctggaaagtccgtcattcacaggaactggtgacacagaaatagctcatgcaactgaggatttagagaataatggcagtaagaaagatggcgtgtgtggtcctcctccatcaaagaaaatgaagttatttggatttaaagaagatccatttgtatttattcctgaagatgacccattatttccacctattgagaaattttatgctttggatccttcattcccaaggatgaatttgttaactcggactacagaagggaagaaaaggcagctctacatggtttctaaggagttgcggaatgtgctgctgaataacagtgagaagatgaaggttattaacacggggatcaaagtctggtgtagaaataacagcggtgaagagtttgactgtgctttccggctggcacaggagggaatatatacattgtatccatttattaactcaagaattattactgtatcaatggaagatgttaagatactgttgacccaggaaaatcccttttttagaaaactcagcagtgagacctacagtcaagcaaaggacctggcaaagggaagcatcgtgctgaagtatgaaccagattctgcgtaagtcagtacacgccctgcccttagacgcacacgccttgtcattagctacagtgttctcgttggtgaggaaagtgacttgggaaggtgggaaccttcttcaggccttttgtgattgttcctcagaagtagccttgtgaaaacttcagaaccaaaatattcctgtaggtcatcatgaagatgctgtttcatagaacactcagctcaggctaagtgaatttttacttacagagaataaaatgcatagtacttattttttaagcattagaaaccaatgaaaatttctgtcttgtacagagtaagtgtg

SEQ ID NO: 345032 - DNA, 1317 bp, Homo sapiens
tgcttcctggagcatttttttccccttagagctgttcgctgttttccctgtcacgccgcttttctgaaagacgggttgtgcgctttgggcttattcctggacggtccccaaaggtccccgaaaggaccaggcccggacacgtggggccttggtttccggccggaagtcccgggaggtgtagggctagagttctggccgtggcgggccggtttctgcgtgctgcgtgcgcggccgcgtgggctatggggcggcggtcgcggggtcggcggctccagcaacagcagcggccggaggacgcggaggatggcgccgagggtggtggaaagcgcggcgaggcgggctgggaaggaggctaccccgagatcgtcaaggagaacaagctgttcgagcactactaccaggagctcaagatcgtgcccgagggcgagtggggccagttcatggacgctctcagggagccgctcccggccactttaagaattactggttacaaaagccacgcaaaagagattctccattgcttaaagaacaaatattttaaggaattggaggacctggaggtggacggtcagaaagttgaagttccacagccactgagttggtatcctgaagaacttgcctggcacacaaatttaagtcgaaaaatcttgagaaaatcgccacacttggaaaagtttcatcagtttctagttagtgaaacagaatctggaaatattagtcgtcaagaagctgttagcatgatcccaccactgctcctcaacgtgcggcctcatcataagatcttagatatgtgtgcagcacctggctcaaagaccacacagttaattgaaatgctacatgccgacatgaatgtcccctttccagagggatttgttattgcgaatgatgtggacaacaagcgctgctacctgctcgtccatcaagccaagaggctgagcagcccctgcatcatggtggtcaaccatgatgcctccagcatacccaggctccagatagatgtggacggcaggaaagagatcctcttctatgatcgaattttatgtgatgtcccttgcagtggagacggcactatgagaaaaaacattgatgtttggaaaaagtggaccaccttaaatagcttgcagctacatggcttacagctgcggattgcaacacgcggggctgaacagctggctgaaggtggaaggatggtgtattccacgtgttcactaaaccctattgaggatgaagcagtcatagcatctttactggaaaaaagtgaagtgtgataaaggatgctcgttgatgattacctaatgaatcttccagggctgaaag

SEQ ID NO: 345033 - DNA, 582 bp, Homo sapiens
aacgtggtatttttaacttttcgtagcagcacaaagaatgctcctctttgtgtgtcaatgaaattgttctttatgacagcttcagggtaaatctgcagagaccagagaaagcacacagctgagccctgcagatctcacagaagggaaacccacagatccctctaagctggaaagtccgtcattcacaggaactggtgacacagaaatagctcatgcaactgaggatttagagaataatggcagtaagaaagatggcgtgtgtgggtaagaaaagtggttatgtcttgatctaatacgctggtgtcttcacagtccttttggattaaatgggatcccagagccacttcttggtcggtttgagggggcagtacatgtgtggtatcaggcacatgcagtgtgagggctggactctgtggaagccggaaggtttcaacatctgccgcaaaccgttccatgttgcacagaactgacagaaaggaagaatgtgcttttggtattgaaggttaccacacattacagattgatttgtctcatcctgattccctttttagtcctcctccatcaaagaaaatgaagttattt

SEQ ID NO: 345034 - DNA, 401 bp, Homo sapiens
tctcagggagccgctcccggccactttaagaattactggttacaaaaggtagggaggcagtgcctgattttttgggagttggggccaggatgctggaggttaaaggcgacggtgttttcttcgacaagtgttacagtgccagagaaccgtggcgtttcagcggtttggattcaggaagcattgaggtggggagcacagggtccaatgaaatggtcacggaggtattgcaggcgcaaggttagaagacgaaatgaaaatgagatctgaggaagattcggctcctggggaatcttccaggagggaagctgagggtcttaccttttggaacgtaagagaatttatagagaatgcataaaaccccttggttctcccctcctccgcgccccccctccatctttgta

SEQ ID NO: 345035 - DNA, 4184 bp, Homo sapiens
  misc_feature (708)..(708): n is a, c, g, or t
  misc_feature (946)..(946): n is a, c, g, or t
acagcaggctgtttctcagatcttctcctgacctcctttcacctgctgctttttctccccaaggcaggccatagaaactaaaagtataatcttcctttgcccgtcttccagttggccataaaaagaatcctctgacctaccttgtctgattttaggtcatgagacccccatttcagaagggattctgccccatacctgagaggaagaaatgtagacaggccttgttggacttccccactccatctgtattagattatgcctcttttgtccaatcccatttctccagtgttgtccatgcttcaatcatccctatccaatgaggtctccataaaaggcccaagaagacaggtttagagagctttcggagaacagaacacttggctttgcaaagtggcacgcctggagagaacttggaagctccacgccccttctatacctcaccctatgcatctcttcagctgtatcttttgtgatatcctttataataaaccagtaaacggacctaagtgttcctctgagttctgcaagctgctccagcaaattaaaaagaaggggtgtgagccaccacgcccggctgcagatggtgtttctttatcaagcctacttacagaagatagatttcactgtttgaatttttagtaacaatttcccctttcccccacctttgttcattattattactattattattattattattacttactnccttacatgaagggtagtagtgtgtagttaaaagctaccatcagactccctgggttcaaatcctaatcggcaagttacttacagtgttagacatcccatgtgaaatgggacgaatcagtatgtagcttgcgaggtgctcaggaaatgttagctgttatagtgacaccacgcccctttctcttaagtggaaacaaatacccatcgtgatgttttagagtcagctttcatctcgtcctanctttgttcaggcaaacttctctagttctgttttaataggcatatttgttaggtctgttttttgaaatcctcttttttacattgtttaaagataatgccttggctaaaaagcctgcttcacttttccctgtttttagttgttttctccacattggcagtaaagagccttggcgtcccagcagcagcaggttctcctttttgtattgtggatgttttgcatttcatactgttgtgaagagtggctttgatcatacatgttgttggtatatttgcctttttgctgggggtgtgagaagaaccagagatgagcagaggtacacccagtagacttcccagcctgcagagcctcccgggaagagcttccgtgttcaggtgcttggggccccaccctaggagcctgactcacagtcagagcagggtcccggcttgtgttcaggattttgaaacatttgtaaggtgattttgttgtttctacacctttctcctcatcttttttttttgtagttaatcgttactaataacagaaaagacatttttggcatggtaattggcacaaagtgaataattgttgaatagatgacttttgaggctttcaaaattcgagtgtccataaaatccatccagagccacctggttcctttttttgaaccacttaacgtaattctggaaaaccttgactgtgggtcttaagtttggtggattgctgcttctcactggctgacctttggaggtcgcatatttcaggatgtgactccacttaggctccatttcacctgacactgcaattctgtgccttcagagggatttgttattgcgaatgatgtggacaacaagcgctgctacctgctcgtccatcaagccaagaggctgagcagcccctgcatcatggtggtcaaccatgatgcctccagcatacccaggctccagatagatgtggacggcaggaaagagatcctcttctatgatcgaattttatgtgatgtcccttgcagtggagacggcactatgagaaaaaacattgatgtttggaaaaagtggaccaccttaaatagcttgcagctacatggcttacagctgcggattgcaacacgcggggctgaacagctggctgaaggtggaaggatggtgtattccacgtgttcactaaaccctattgaggatgaagcagtcatagcatctttactggaaaaaagtgaaggtgctttggagcttgctgatgtgtctaatgaactgccagggctgaagtggatgcctggaatcacacagtggaaggtaatgacgaaagatgggcagtggtttacagactgggacgctgttcctcacagcagacacacccagatccgacctaccatgttccctccgaaggacccagaaaagctgcaggccatgcacctggagcgatgccttaggatattaccccatcatcagaatactggagggttttttgtggcagtattggtgaaaaaatcttcaatgccgtggaataaacgtcagccaaagcttcagggtaaatctgcagagaccagagaaagcacacagctgagccctgcagatctcacagaagggaaacccacagatccctctaagctggaaagtccgtcattcacaggaactggtgacacagaaatagctcatgcaactgaggatttagagaataatggcagtaagaaagatggcgtgtgtggtcctcctccatcaaagaaaatgaagttatttggatttaaagaagatccatttgtatttattcctgaagatgacccattatttccacctattgagaaattttatgctttggatccttcattcccaaggatgaatttgttaactcggactacagaagggaagaaaaggcagctctacatggtttctaaggagttgcggaatgtgctgctgaataacagtgagaagatgaaggttattaacacggggatcaaagtctggtgtagaaataacagcggtgaagagtttgactgtgctttccggctggcacaggagggaatatatacattgtatccatttattaactcaagaattattactgtatcaatggaagatgttaagatactgttgacccaggaaaatcccttttttagaaaactcagcagtgagacctacagtcaagcaaaggacctggcaaagggaagcatcgtgctgaagtatgaaccagattctgcgaatccagacgctctgcagtgtcccatcgtcttatgcggatggcggggaaaggcctccattcgaacttttgtgcccaagaatgaacggcttcattatctcaggatgatggggctggaggtattgggagaaaagaagaaggaaggggttatcctcacaaatgagagtgcagccagcaccggacagccagacaatgacgtgactgagggacagagagcaggagagcccaacagcccagatgcagaagaggccaacagtccagacgtgacagcaggctgtgacccggcgggggtccatccaccccggtgagcaggcccaaggcagcgggggcccacacccctcacacgcaaaactggcttcttctggtcactggtgtctgaaaccaaatccagagcagcctgtggcctgtaaagcatatatttctaatgactgcagactggtgggatcataggagccttctgaatgaccaggactgctttctttggagctgatgaaaatgtactcttttagcgtgttagaaatcacttgttttattttgtttctttggccaagctgggtctagtgtttcttttgctgggaatagactttcaaaagttgtacttctatcaagaaacaaaactgcccttgcagaaatttcaggtcttttgttaagcctgtattggtcttaaggtgcagtattttttaaattattatttatagaaagaatctataaattcttggggaagtgtgttataagctttaataattacattgagctgcacctcagtggtgtgtcattaacatgcagtggggttaatatctgaggcctcagatgactttgtgccttttggaataaagggtaaaataaactctcccagagtaagagctgtatcgtgaattgtcatactaattattgagggggacttatgtgcttttattgaatggagtgctttacaatttttatttttaaatggggttgggatccttggaatatttcaataaaattgataaaataccaaaacacacaagaacaaaacacacacaaaaacattttgaagccccctcgcccccgaaaaactcttagaaca

SEQ ID NO: 345036 - DNA, 3126 bp, Homo sapiens
tgcttcctggagcatttttttccccttagagctgttcgctgttttccctgtcacgccgcttttctgaaagacgggttgtgcgctttgggcttattcctggacggtccccaaaggtccccgaaaggaccaggcccggacacgtggggccttggtttccggccggaagtcccgggaggtgtagggctagagttctggccgtggcgggccggtttctgcgtgctgcgtgcgcggccgcgtgggctatggggcggcggtcgcggggtcggcggctccagcaacagcagcggccggaggacgcggaggatggcgccgagggtggtggaaagcgcggcgaggcgggctgggaaggaggctaccccgagatcgtcaaggagaacaagctgttcgagcactactaccaggagctcaagatcgtgcccgagggcgagtggggccagttcatggacgctctcagggagccgctcccggccactttaagaattactggttacaaaaggtatcctgaagaacttgcctggcacacaaatttaagtcgaaaaatcttgagaaaatcgccacacttggaaaagtttcatcagtttctagttagtgaaacagaatctggaaatattagtcgtcaagaagctgttagcatgatcccaccactgctcctcaacgtgcggcctcatcataagatcttagatatgtgtgcagcacctggctcaaagaccacacagttaattgaaatgctacatgccgacatgaatgtcccctttccagagggatttgttattgcgaatgatgtggacaacaagcgctgctacctgctcgtccatcaagccaagaggctgagcagcccctgcatcatggtggtcaaccatgatgcctccagcatacccaggctccagatagatgtggacggcaggaaagagatcctcttctatgatcgaattttatgtgatgtcccttgcagtggagacggcactatgagaaaaaacattgatgtttggaaaaagtggaccaccttaaatagcttgcagctacatggcttacagctgcggattgcaacacgcggggctgaacagctggctgaaggtggaaggatggtgtattccacgtgttcactaaaccctattgaggatgaagcagtcatagcatctttactggaaaaaagtgaaggtgctttggagcttgctgatgtgtctaatgaactgccagggctgaagtggatgcctggaatcacacagtggaaggtaatgacgaaagatgggcagtggtttacagactgggacgctgttcctcacagcagacacacccagatccgacctaccatgttccctccgaaggacccagaaaagctgcaggccatgcacctggagcgatgccttaggatattaccccatcatcagaatactggagggttttttgtggcagtattggtgaaaaaatcttcaatgccgtggaataaacgtcagccaaagcttcagggtaaatctgcagagaccagagaaagcacacagctgagccctgcagatctcacagaagggaaacccacagatccctctaagctggaaagtccgtcattcacaggaactggtgacacagaaatagctcatgcaactgaggatttagagaataatggcagtaagaaagatggcgtgtgtggtcctcctccatcaaagaaaatgaagttatttggatttaaagaagatccatttgtatttattcctgaagatgacccattatttccacctattgagaaattttatgctttggatccttcattcccaaggatgaatttgttaactcggactacagaagggaagaaaaggcagctctacatggtttctaaggagttgcggaatgtgctgctgaataacagtgagaagatgaaggttattaacacggggatcaaagtctggtgtagaaataacagcggtgaagagtttgactgtgctttccggctggcacaggagggaatatatacattgtatccatttattaactcaagaattattactgtatcaatggaagatgttaagatactgttgacccaggaaaatcccttttttagaaaactcagcagtgagacctacagtcaagcaaaggacctggcaaagggaagcatcgtgctgaagtatgaaccagattctgcgaatccagacgctctgcagtgtcccatcgtcttatgcggatggcggggaaaggcctccattcgaacttttgtgcccaagaatgaacggcttcattatctcaggatgatggggctggaggtattgggagaaaagaagaaggaaggggttatcctcacaaatgagagtgcagccagcaccggacagccagacaatgacgtgactgagggacagagagcaggagagcccaacagcccagatgcagaagaggccaacagtccagacgtgacagcaggctgtgacccggcgggggtccatccaccccggtgagcaggcccaaggcagcgggggcccacacccctcacacgcaaaactggcttcttctggtcactggtgtctgaaaccaaatccagagcagcctgtggcctgtaaagcatatatttctaatgactgcagactggtgggatcataggagccttctgaatgaccaggactgctttctttggagctgatgaaaatgtactcttttagcgtgttagaaatcacttgttttattttgtttctttggccaagctgggtctagtgtttcttttgctgggaatagactttcaaaagttgtacttctatcaagaaacaaaactgcccttgcagaaatttcaggtcttttgttaagcctgtattggtcttaaggtgcagtattttttaaattattatttatagaaagaatctataaattcttggggaagtgtgttataagctttaataattacattgagctgcacctcagtggtgtgtcattaacatgcagtggggttaatatctgaggcctcagatgactttgtgccttttggaataaagggtaaaataaactctcccagagtaagagctgtatcgtgaattgtcatactaattattgagggggacttatgtgcttttattgaatggagtgctttacaatttttatttttaaatggggttgggatccttggaatatttcaataaaattgataaaata

SEQ ID NO: 345037 - DNA, 3041 bp, Homo sapiens
tgcttcctggagcatttttttccccttagagctgttcgctgttttccctgtcacgccgcttttctgaaagacgggttgtgcgctttgggcttattcctggacggtccccaaaggtccccgaaaggaccaggcccggacacgtggggccttggtttccggccggaagtcccgggaggtgtagggctagagttctggccgtggcgggccggtttctgcgtgctgcgtgcgcggccgcgtgggctatggggcggcggtcgcggggtcggcggctccagcaacagcagcggccggaggacgcggaggatggcgccgagggtggtggaaagcgcggcgaggcgggctgggaaggaggctaccccgagatcgtcaaggagaacaagctgttcgagcactactaccaggagctcaagatcgtgcccgagggcgagtggggccagttcatggacgctctcagggagccgctcccggccactttaagaattactggttacaaaaggtatcctgaagaacttgcctggcacacaaatttaagtcgaaaaatcttgagaaaatcgccacacttggaaaagtttcatcagtttctagttagtgaaacagaatctggaaatattagtcgtcaagaagctgttagcatgatcccaccactgctcctcaacgtgcggcctcatcataagagggatttgttattgcgaatgatgtggacaacaagcgctgctacctgctcgtccatcaagccaagaggctgagcagcccctgcatcatggtggtcaaccatgatgcctccagcatacccaggctccagatagatgtggacggcaggaaagagatcctcttctatgatcgaattttatgtgatgtcccttgcagtggagacggcactatgagaaaaaacattgatgtttggaaaaagtggaccaccttaaatagcttgcagctacatggcttacagctgcggattgcaacacgcggggctgaacagctggctgaaggtggaaggatggtgtattccacgtgttcactaaaccctattgaggatgaagcagtcatagcatctttactggaaaaaagtgaaggtgctttggagcttgctgatgtgtctaatgaactgccagggctgaagtggatgcctggaatcacacagtggaaggtaatgacgaaagatgggcagtggtttacagactgggacgctgttcctcacagcagacacacccagatccgacctaccatgttccctccgaaggacccagaaaagctgcaggccatgcacctggagcgatgccttaggatattaccccatcatcagaatactggagggttttttgtggcagtattggtgaaaaaatcttcaatgccgtggaataaacgtcagccaaagcttcagggtaaatctgcagagaccagagaaagcacacagctgagccctgcagatctcacagaagggaaacccacagatccctctaagctggaaagtccgtcattcacaggaactggtgacacagaaatagctcatgcaactgaggatttagagaataatggcagtaagaaagatggcgtgtgtggtcctcctccatcaaagaaaatgaagttatttggatttaaagaagatccatttgtatttattcctgaagatgacccattatttccacctattgagaaattttatgctttggatccttcattcccaaggatgaatttgttaactcggactacagaagggaagaaaaggcagctctacatggtttctaaggagttgcggaatgtgctgctgaataacagtgagaagatgaaggttattaacacggggatcaaagtctggtgtagaaataacagcggtgaagagtttgactgtgctttccggctggcacaggagggaatatatacattgtatccatttattaactcaagaattattactgtatcaatggaagatgttaagatactgttgacccaggaaaatcccttttttagaaaactcagcagtgagacctacagtcaagcaaaggacctggcaaagggaagcatcgtgctgaagtatgaaccagattctgcgaatccagacgctctgcagtgtcccatcgtcttatgcggatggcggggaaaggcctccattcgaacttttgtgcccaagaatgaacggcttcattatctcaggatgatggggctggaggtattgggagaaaagaagaaggaaggggttatcctcacaaatgagagtgcagccagcaccggacagccagacaatgacgtgactgagggacagagagcaggagagcccaacagcccagatgcagaagaggccaacagtccagacgtgacagcaggctgtgacccggcgggggtccatccaccccggtgagcaggcccaaggcagcgggggcccacacccctcacacgcaaaactggcttcttctggtcactggtgtctgaaaccaaatccagagcagcctgtggcctgtaaagcatatatttctaatgactgcagactggtgggatcataggagccttctgaatgaccaggactgctttctttggagctgatgaaaatgtactcttttagcgtgttagaaatcacttgttttattttgtttctttggccaagctgggtctagtgtttcttttgctgggaatagactttcaaaagttgtacttctatcaagaaacaaaactgcccttgcagaaatttcaggtcttttgttaagcctgtattggtcttaaggtgcagtattttttaaattattatttatagaaagaatctataaattcttggggaagtgtgttataagctttaataattacattgagctgcacctcagtggtgtgtcattaacatgcagtggggttaatatctgaggcctcagatgactttgtgccttttggaataaagggtaaaataaactctcccagagtaagagctgtatcgtgaattgtcatactaattattgagggggacttatgtgcttttattgaatggagtgctttacaatttttatttttaaatggggttgggatccttggaatatttcaataaaattgataaaata

SEQ ID NO: 345038 - DNA, 1704 bp, Homo sapiens
tgcttcctggagcatttttttccccttagagctgttcgctgttttccctgtcacgccgcttttctgaaagacgggttgtgcgctttgggcttattcctggacggtccccaaaggtccccgaaaggaccaggcccggacacgtggggccttggtttccggccggaagtcccgggaggtgtagggctagagttctggccgtggcgggccggtttctgcgtgctgcgtgcgcggccgcgtgggctatggggcggcggtcgcggggtcggcggctccagcaacagcagcggccggaggacgcggaggatggcgccgagggtggtggaaagcgcggcgaggcgggctgggaaggaggctaccccgagatcgtcaaggagaacaagctgttcgagcactactaccaggagctcaagatcgtgcccgagggcgagtggggccagttcatggacgctctcagggagccgctcccggccactttaagaattactggttacaaaagccacgcaaaagagattctccattgcttaaagaacaaatattttaaggaattggaggacctggaggtggacggtcagaaagttgaagttccacagccactgagttggtatcctgaagaacttgcctggcacacaaatttaagtcgaaaaatcttgagaaaatcgccacacttggaaaagtttcatcagtttctagttagtgaaacagaatctggaaatattagtcgtcaagaagctgttagcatgatcccaccactgctcctcaacgtgcggcctcatcataagatcttagatatgtgtgcagcacctggctcaaagaccacacagttaattgaaatgctacatgccgacatgaatgtcccctttccagagggatttgttattgcgaatgatgtggacaacaagcgctgctacctgctcgtccatcaagccaagaggctgagcagcccctgcatcatggtggtcaaccatgatgcctccagcatacccaggctccagatagatgtggacggcaggaaagagatcctcttctatgatcgaattttatgtgatgtcccttgcagtggagacggcactatgagaaaaaacattgatgtttggaaaaagtggaccaccttaaatagcttgcagctacatggcttacagctgcggattgcaacacgcggggctgaacagctggctgaaggtggaaggatggtgtattccacgtgttcactaaaccctattgaggatgaagcagtcatagcatctttactggaaaaaagtgaaggtgctttggagcttgctgatgtgtctaatgaactgccagggctgaagtggatgcctggaatcacacagtggaaggtaatgacgaaagatgggcagtggtttacagactgggacgctgttcctcacagcagacacacccagatccgacctaccatgttccctccgaaggacccagaaaagctgcaggccatgcacctggagcgatgccttaggatattaccccatcatcagaatactggagggttttttgtggcagtattggtgaaaaaatcttcaatgccgtggaataaacgtcagccaaaggtgagtttttctttttccaaaatgacataacatttgatcttgtacatttaagacaaaaactaaccggagtttagtagaagtacagaggaaagaggagcttcttgctgtgggcagcaggagagctgaccctgaatgaggg

SEQ ID NO: 345039 - DNA, 219 bp, Homo sapiens
tgagttcttttcagaccatatttagatgtgcagtctacatttaatgtgtttttaaaaatagcattcttatccaaaatatgtgtttttggccagatttttgtcagtttaccttgtatgttttctgtgatagtttagagaaagggagtggtcttcagttcagaggtgatacagtattcagatggaatgttcactcttgccctttagggaaggtttcaaggt

SEQ ID NO: 345040 - DNA, 113 bp, Homo sapiens
ggtcgaagaggcaaacaagtttccttgggccccccttataacaataccaattccattcatcatgggtctgccctcataacccaattacctcccaaaagccataccttccaaca

SEQ ID NO: 345041 - DNA, 629 bp, Homo sapiens
tcttgttttgctaatcttctctgtatcatcccagttttagtatatgtgctgtcaaagcaggcacacaatatggtaaatattagtagatggaacccaatatccaaaaaagcccattgggtctcttttttctttttgagatggggtcacccaggctagagtacaatggcatgatcgggctcactgcaacctcttcacccccaggctcaagtggtccttctcatgagtggctgggactacagatgtgagccaccacacctggctaatttttctgtagtgatggggtttcaccacgttgtccaggctgggcttgaactcctgggctcaagcgatctgcccgcctcagcctcccagagtgtcaggattacagatggaagccaccacacccggcttgtttgggtctcaataattatgagtacacaggggtcctgagaccaactgatttgataactactgaactgccgtacagcaagacctcaagctcagaaataactcaggcgctaatgaaagttaaaggaaatatccctttcctccttttctctgaacttaatgccctagaattgtgtgaggtatcaacagaaaaaactttaatcatcatagcagagcctagtacagctataatccaaatttct

SEQ ID NO: 345042 - DNA, 368 bp, Homo sapiens
tttttcagctcccattttgtgtccagtactgcgttgagtcctggggattcaaagattccgttcttcttgtttgggtagctgagacctatcagaagtgcttcaggggccagctcagtttcctgatacgaaaaaagtatgcaagagtggatagaccagagtgctccagtggcccccatggttctcaagctctgattctaggtaaggctctgctggaaggaattgccagatgcaagccctagatgctgctgaatgcactgaagcccaggggcccagcaacccagtagccagccagcacctgccagactctgactcctctgtagattaattgcaaatcacggagaatatcacaaaataaatcacacaataaa

SEQ ID NO: 345043 - DNA, 679 bp, Homo sapiens
cgcgatcttggcacactgcaacctccacctccccggttcaagtgattctccttcctcagcctcctgagtagctgggattacaggcatgcaccaccacgccaggctaattttgtatttttagtagagatggagtctcaccatgttggtcagactggtctcgaactcccgacctcaggtgaactgcctgccttcgcctcccaaagtgctgggattacaggcgtgagccgctgcgcccggccgagaggcacacattctgctaagagctttttcctgactcccctaactccaagagggatttgtcactccttagctttgtactcatgactggagtagaatgaatttaatttgagtttagttgtttttgagactctccctggctagtgtagtgtcttattcgtctttgttgtgatcatggcctgcacctaacagatgatcagtagatgtttgcagacagaaagtaaaccactcatcaggtgtattcagtcccattcttgaacgggcttgctgcctcctttttgaggagatttgtgtatgtactcttctttcacgcatatgtgtgagcaaacacacacacactaacaaggaattcatctgaagatgtgcacaggaaatatcttgcatctttaccccctttgtgatcttacatatgggagaactgaggcacagaaataagttagga

SEQ ID NO: 345044 - DNA, 246 bp, Homo sapiens
acagtcaatcccagaagcagacagattcacttctcccagcacccaatggacccccaaatcactggtcaacatccccttcccactgctgcagcaatcataaaaacagtcaatcccagaagcagacagattcacttctcccagcacccaatggacccccaaatcactggtcaacatccccttcccactgctgcagcaatcataaaaacagtcaatcccagaagcagacaggttcacttctcccagcac

SEQ ID NO: 345045 - DNA, 388 bp, Homo sapiens
ctatttttattgaattcttaactatttttattgaatcatcagatctgtaaaattttaagtgagagctattgaacctgtattaagatagaaaactcttaagataagaattttaaatgacgagattcatttaggcagctggctgccaattctctgaattcacttcaagacaaagtttcttcttcatatataaatatacataggcatataaattattctatattatggtggtaaaacttaatgctgactttggatgttcagattcaggaaatgatcttagaattatgaactttgtatttttaaactatttggtgcagcatttcattttgggtcacatgtaagcagatattgatatgtcatttttaatctaataaagttggtgatcagagca

SEQ ID NO: 345046 - DNA, 492 bp, Homo sapiens
  misc_feature (44)..(45): n is a, c, g, or t
attcgcggccgcgtcgaccaatgatgatgctacaaagatttttnntgtgctgaaaatctttgtagcatcatcattgctctaaagaaaagctagaagcctgccataatgattagcaaactcatatagatatctccaggaaaggatttacaaaatgtcatcacatccttgtaatcatctaattatcaaactcagcagtgttgacaaagcacaagcccactcagctactgctaatgattattattcaaagctacatttctaccaaatcagaataacttacaggtagaagctcattagccttaggaaccaccctccttgaacactcacacgcacacgcacacgcgtgacacgcatacacacacgcgcacgcgcgcacacacacgcacacacaccccagccataactaggccttgctgaattgtcatttgctttcatgaccctccttcgtgtatatgagcagctttacgaattggttcaaaaatacccagcctttca

SEQ ID NO: 345047 - DNA, 757 bp, Homo sapiens
cattggcatcttggctgcaggtcattacgataatgagagctaggggtaaccatgtccatcagagggctgggacgtaagcatttgtgtgaaaaggctagctgttgttgatcttttacatttccgcaaggtatgacagaacaagcattcaaggcggtggtctgaggtgagttagttacagtaataacaaaggcgctagtaacaataaggaaaggaagcaatatgaaggtacaggaaaattaagctttctttaactttaacttagtaggattggtcctagtacagtcatccatgattctgagagaaagatgttttcttgactggagtgtggtcgtttttttcttggctctgcggatggcagtctcagtggttaacagcataaaatagggttcttcccaggctggctcaagttttttctttctgtcttttgatgaggacgtggttttcaggctggtgctggtgtactggaaattctaggggtggtacctagaactaaaagtcttttagttctgagggaagggaaactggaagataaattaagtatatcatttttgctgcatatcctggggcttgaggccccatggtgatgcctcccgctccattcctgctcagcgccgcccaggggacactgcggccctgcctcctcttaagctcttggccttcttggggccttcactgcccctgtgcactgtggccttggacatgaggggccttgtgacttacctggccaccttcaggccttaagaaagctaaacaccat

SEQ ID NO: 345048 - DNA, 1038 bp, Homo sapiens
ggaataatgccacaggtggacttcaacaaacaaacaaagagcacaactgtcaagaacagaagttcatggatgggagagttacaaaagttggtggcatgacttcccctttctgaaattctaatcccgaagagtacaaagcaactgcgcagccaaaaagctgtgcagcagtggcctgggaagggctcgacgaagggcatagctcaggggcactgctcaggggcagagctctggggcatcgcccactcatagggagagcagcagggagccacacttcccatcccaactcagcttctgtcccagctctcatcccaggctccccagcccacaggatgatccctgtgaagagaagcatgtgaagatggaggaatcccaaccaagattccaccaaggacaaaaatagctaacacgatgagagacagaggccagggaaggttgtagaacatgtgcctctattgaccgtggcagacatttctcagcaaccccttacccctgccacttccctgactttgccatgtgaggatgcaggtccagggggccaaatcaaccagtttttcaagagaaaaaaaaacactgcagtgtttataactgtgtggaccaaagagaacatgtctacaggccagtgtgcagttcctatattagaagaggggtctgagttgatcctgcctattgcactgggtccagtatcttgttcaaggtctaacaaaggtaggtgctcaatacatatctgttaaatcagtgcatgagaaccaaatattagattaggcagcaaattgtaagccaatgtctttccttcctcctccattaaagaaacgctacagcttaagagaggtagatggagtagcaggttctaagtaaaaggaaatctacatataagttactcaccaagtcactattaacagtgccagggttagtgttattgccctccacatcgcaattcttcaagctcttcagttatgctgttatgtttacctcaatcccaatctaattcttttcatcctcttttcccttctcacgttttttaaagacctcacttgggga

SEQ ID NO: 345049 - DNA, 898 bp, Homo sapiens
cagatgcttggacgataccgagaatacagtaatggacaggcgggtgcgatagaacatttaaaagaaagcttggaacaatcaatcgaccaactccggagtcaacgtttattgagaaactcaggagggagaagtatttctgttacaagtttgagtgcaagtgaccttgatggtggcactgggtcagagctccatcattttccacctacctcacctctcaaggactatggggatccacagggtattaaacgaatgagatcaagaactggtgtccggtttgttcaagagactgatgatatgactcagcttcatggttttcatcagtctcttcgagacctcagcagtgaacaaattcgccttggagatgatttcaacagggagctttccagaaggagccggtcagatgccgaaacaaaaagggctttggaagaattgactgaaaaacttaatgaagcccagaaacaagaagtggtttcagatcgggtggagcggcggcttcaggaactggagagagagatgcgcacagaaagggagctggtggaaagacgccaggatcaactgggactcatgtccctgcagctacaggaggcactaaagaaacaagaagctaaagcagatgagcatgagggggcaataaaaaataagctaagacaaactgaaactgagaagaatcaacttgaacaggaattggagctatctcgaaggttattgaatcaatcagaaggcagccgagaaacacttttgcatcaggtagaagaactgcgtacacaacttacgaaagcagaaggtgatcgaaagggtttacagcatcaagtatctcagatttccaagcaacagtcaaactatcaggatgaacaaggggaggactggagatttaggagaggtaaaagtagatttgtac

SEQ ID NO: 345050 - DNA, 385 bp, Homo sapiens
atgagtaaagatgcctcacaaggtcgtttcagcccttgcctgtaaagttcaccaattcagtatttgaatcaatttagtatctcctttactatgtttctccttttaatctcagccaaccccctacctgcaggtaaacccagcattcattaagagctgggttggggtactctattctgtatgcatcataatagcttaacattatttagtagctgtaacttacaggtttaatgctagatgaggatgtctcaagccgtgagtgtgcttgtgtaaaaatggtggcaacatcatctcgttggtaggaattttttacttgaattgttattttgggaaaatgttaacagatttcttctggataaagaaaataaattggatgatgtatatttta

SEQ ID NO: 345051 - DNA, 3251 bp, Homo sapiens
ttgagtgcaggtactctatctaactcaattgtactctctttgctgccctctctgacacctggcatattgtttgatacatgataagctttcagtaaaggctgatgagcgatgaacagctattaacaaaagataggagataagaaaataaacattttcttagtcctttgagatgtcccaataaaacggtacttttgaaataactgtatatcttttattaattataattttatgtcatgccaatgttttggttaagagtctaagaaggctgcatttgcctctgaatcactctatggtcaaggccttgtattgtgagaacagcccaatcatattgacctggcacatgcttctctgaagtcacatgtccagcattgtgacatgagcaagaatgcaggcaacctcttgattccactcattcaaagttctctgtggggactaggttcagaagatgtcatctcccccatagactagcttcccagagaatgtcacctgcaaactagaatgatgctagtctcagcttaactgtgcaaagagaaaaccagaacgcgctccccaggaacaaggttcattcacagttgtcagaaggttaacattcaagatggtacatgctgaagccttttctcgtcctttgagtcggaatgaagttgttggtttaattttccgtttgacaatatttggtgcagtgacatactttactatcaaatggatggtagatgcaattgatccaaccagaaagcaaaaagtagaagctcagaaacaggcagaaaaactaatgaagcaaattggagtgaaaaatgtgaagctctcagaatatgaaatgagtattgctgctcatcttgtagaccctcttaatatgcatgttacttggagtgatatagcaggtttagatgatgtcattacggatctgaaagacacagtcatcttacctatcaaaaagaaacatttgtttgagaattccaggcttctgcagcctccaaaaggtgttcttctctatgggcctccaggctgtggtaaaacgttgattgccaaggccacagccaaagaagcaggctgtcgatttattaaccttcagccttcgacactgaccgataagtggtatggagaatctcagaaattggctgctgctgtcttctcccttgccataaagctacaaccatccatcatctttatagatgaaatagactcctttctacgaaaccgttcaagttctgaccatgaagctacagccatgatgaaagctcagtttatgagtctctgggatggattggatactgatcacagctgccaggtcatagtaatgggagctaccaatcgtcctcaggaccttgactcggctataatgagaagaatgcctacaagatttcatatcaaccagcctgctttaaaacagagagaagcaatcctgaaactcatcttgaaaaatgaaaatgtggataggcatgtagacctgctagaagttgcccaggaaactgatgggttttcaggaagtgacctaaaagagatgtgtcgagatgctgccctcctctgtgttagagaatatgttaattctacatcagaagaaagccatgacgaagatgaaattcggcctgttcaacagcaggacctgcatcgggcaattgaaaagatgaagaaatcaaaggatgcagcatttcagaatgttttaacacatgtttgtttagattaagagtaaagatcatttgtacagttcagtgatctagtttggtgtgtcctcttatcagttagtggaaatagaacggaaagagtgctctttaaacaatgagggagctcagtgtttatggttttatactctgaattctaagttattgagatatagttgttacataggtggtattactgttggtcaaaaatcatgaggaggaacagttgaatccagcctgaacgtgggtgcttgtgtttgaccttttcagccatatattgtacagccttatagaatctaagctggtcttaaagtcataaatgattcattgggtcattagtgagaaacggggatgtggttaggtgctggttcctagacatgtgagtatgcgtttgtgtgtgtgcgtgtatgtatgtgtatattaaatgtatatatccacacattttatattgacattctgtagatatgtttgaatatagaaactttttttaccccaactactgaatccaggagtaccaaataatatatagtaaaactaagatttaaggttgtgtcaaaaaggtacagtgattcagccatttccatttgtcatttgtttcaaccttttttaagttgagtgtttttatttctgcagttattagttggatcctccacatcttgcatatatacatgggctcaattattatgtttgtcaggataatcaaatgaaaatactagttcagtgatcagcattgaatggttgttaggcagccatgtgctcaacactgatttcacctcttgagtataaactttttaaatttaaattggtttacatgaaagtggattaaaaggcctttcaaaagaatgggtttgaaaaacctcagtaccctttaatacatgtacatttctttccttttttcatttaatgtaacatgtctgttgtaactatgtttcttaaatattattttaaggttatgtgttctttaattatggtcaaatataatttggtcaccaaaaatgaaataatagtttaaaacaagtagctgttactaagtgtgctaaaaatactcattttataattaattttagttttcttagtatattattataaattgtgccctaagtcaggtacaaatgtacacatcaaaatgcccatattgtatctatctgtagtcgtttaatgtgaattatatgtgaatttttttcaaaattttactaaccagaattctgttataggcacctaaccacgcagcatgaggaaaacggcacaacacaatcttgaggtgccttctgaatcatcagattaaattatgcttcatatgtttttgcttttactgtatttctttaaaaactctaaatctttattcatgtgtcactggattaatttatctgataatgtgtctcacaagaatctgttagatcgtttattcttcagttgtactttgaatggtggggtggaagtttcaggtgaacaatggataacaaaaagcaagttatggaagattgtgaagaggatggaaaaactgaatacaagataccaaaaatgaaaaaaagtgtcccatttttaataactatattctattattttataaatgtgtaataaaggggtccctcttta

SEQ ID NO: 345052 - DNA, 4011 bp, Homo sapiens
ctcccaggttgcgtttccttcctgtgtgaggccggctgagggcacttgctcttgctgtttctgcccctgggttaacattcaagatggtacatgctgaagccttttctcgtcctttgagtcggaatgaagttgttggtttaattttccgtttgacaatatttggtgcagtgacatactttactatcaaatggatggtagatgcaattgatccaaccagaaagcaaaaagtagaagctcagaaacaggcagaaaaactaatgaagcaaattggagtgaaaaatgtgaagctctcagaatatgaaatgagtattgctgctcatcttgtagaccctcttaatatgcatgttacttggagtgatatagcaggtttagatgatgtcattacggatctgaaagacacagtcatcttacctatcaaaaagaaacatttgtttgagaattccaggcttctgcagcctccaaaaggtgttcttctctatgggcctccaggctgtggtaaaacgttgattgccaaggccacagccaaagaagcaggctgtcgatttattaaccttcagccttcgacactgaccgataagtggtatggagaatctcagaaattggctgctgctgtcttctcccttgccataaagctacaaccatccatcatctttatagatgaaatagactcctttctacgaaaccgttcaagttctgaccatgaagctacagccatgatgaaagctcagtttatgagtctctgggatggattggatactgatcacagctgccaggtcatagtaatgggagctaccaatcgtcctcaggaccttgactcggctataatgagaagaatgcctacaagatttcatatcaaccagcctgctttaaaacagagagaagcaatcctgaaactcatcttgaaaaatgaaaatgtggataggcatgtagacctgctagaagttgcccaggaaactgatgggttttcaggaagtgacctaaaagagatgtgtcgagatgctgccctcctctgtgttagagaatatgttaattctacatcagaagaaagccatgacgaagatgaaattcggcctgttcaacagcaggacctgcatcgggcaattgaaaagatgaagaaatcaaaggatgcagcatttcagaatgttttaacacatgtttgtttagattaagagtaaagatcatttgtacagttcagtgatctagtttggtgtgtcctcttatcagttagtggaaatagaacggaaagagtgctctttaaacaatgagggagctcagtgtttatggttttatactctgaattctaagttattgagatatagttgttacataggtggtattactgttggtcaaaaatcatgaggaggaacagttgaatccagcctgaacgtgggtgcttgtgtttgaccttttcagccatatattgtacagccttatagaatctaagctggtcttaaagtcataaatgattcattgggtcattagtgagaaacggggatgtggttaggtgctggttcctagacatgtgagtatgcgtttgtgtgtgtgcgtgtatgtatgtgtatattaaatgtatatatccacacattttatattgacattctgtagatatgtttgaatatagaaactttttttaccccaactactgaatccaggagtaccaaataatatatagtaaaactaagatttaaggttgtgtcaaaaaggtacagtgattcagccatttccatttgtcatttgtttcaaccttttttaagttgagtgtttttatttctgcagttattagttggatcctccacatcttgcatatatacatgggctcaattattatgtttgtcaggataatcaaatgaaaatactagttcagtgatcagcattgaatggttgttaggcagccatgtgctcaacactgatttcacctcttgagtataaactttttaaatttaaattggtttacatgaaagtggattaaaaggcctttcaaaagaatgggtttgaaaaacctcagtaccctttaatacatgtacatttctttccttttttcatttaatgtaacatgtctgttgtaactatgtttcttaaatattattttaaggttatgtgttctttaattatggtcaaatataatttggtcaccaaaaatgaaataatagtttaaaacaagtagctgttactaagtgtgctaaaaatactcattttataattaattttagttttcttagtatattattataaattgtgccctaagtcaggtacaaatgtacacatcaaaatgcccatattgtatctatctgtagtcgtttaatgtgaattatatgtgaatttttttcaaaattttactaaccagaattctgttataggcacctaaccacgcagcatgaggaaaacggcacaacacaatcttgaggtgccttctgaatcatcagattaaattatgcttcatatgtttttgcttttactgtatttctttaaaaactctaaatctttattcatgtgtcactggattaatttatctgataatgtgtctcacaagaatctgttagatcgtttattcttcagttgtactttgaatggtggggtggaagtttcaggtgaacaatggataacaaaaagcaagttatggaagattgtgaagaggatggaaaaactgaatacaagataccaaaaatgaaaaaaagtgtcccatttttaataactatattctattattttataaatgtgtaataaaggggtccctctttattggttgttctccacttaatctttggtctttttcagtaattttaagttttctgggattttttttggtttataaaacttgtgtttagactttatcttgctatggagttttcacacttctataggcacatatcctagtatctagtcatttctgttttaatatgaatttcagtaatttaattttaatctggtgacatattaatcgaaaataaggagtaatgtatacctccacatgtcctttctttttgtcttctcttaaattcacaatatccagtaggagtggttattcaatttcttcgtggttttaatcatcaaatgaagttagagaagtatactaatcccagcaactatgactcatctaggcatgttaagaccataaagtaattcaggaaactattttcctgatttttaaataacttttagtgttatgtaacatctatccttctgttttagacatgcatttcacatatagttgaattctagattctaagataattcattttgggtaatacttcagagtactggatctagaatcaggcttcctgaatttaaactcaggctccccattaactgtgtgtctgtgagcccagtttctcatctgtaaaatggggcaacagtggcactcatcttaaagggttggataataaaataatgcatgtaaggccctcagcatagtgcctggcacagaattactgctcaaatgttagctgtcgtattaatattgtcacttttgcacactgatgtacatttcctgttgaccaggctcattctttaagcattctccatgcttaaaccagttccataatccctaggcctgtactccagggattgagactgaaaggatcatttatgccatgtttctctaaaagcatcattgctggaagacttttgataagtctgatgtgtctcaagctattctcaggccttttttgtagagtttagaaatgaagtatttgaatcaatttagtatctcctttactatgtttctccttttaatctcagccaaccccctacctgcaggtaaacccagcattcattaagagctgggttggggtactctattctgtatgcatcataatagcttaacattatttagtagctgtaacttacaggtttaatgctagatgaggatgtctcaagccgtgagtgtgcttgtgtaaaaatggtggcaacatcatctcgttggtaggaattttttacttgaattgttattttgggaaaatgttaacagatttcttctggataaagaaaataaattggatgatgtatatttta

SEQ ID NO: 345053 - DNA, 4841 bp, Homo sapiens
ctcccaggttgcgtttccttcctgtgtgaggccggctgagggcacttgctcttgctgtttctgcccctgggttaacattcaagatggtacatgctgaagccttttctcgtcctttgagtcggaatgaagttgttggtttaattttccgtttgacaatatttggtgcagtgacatactttactatcaaatggatggtagatgcaattgatccaaccagaaagcaaaaagtagaagctcagaaacaggcagaaaaactaatgaagcaaattggagtgaaaaatgtgaagctctcagaatatgaaatgagtattgctgctcatcttgtagaccctcttaatatgcatgttacttggagtgatatagcaggtttagatgatgtcattacggatctgaaagacacagtcatcttacctatcaaaaagaaacatttgtttgagaattccaggcttctgcagcctccaaaaggtgttcttctctatgggcctccaggctgtggtaaaacgttgattgccaaggccacagccaaagaagcaggctgtcgatttattaaccttcagccttcgacactgaccgataagtggtatggagaatctcagaaattggctgctgctgtcttctcccttgccataaagctacaaccatccatcatctttatagatgaaatagactcctttctacgaaaccgttcaagttctgaccatgaagctacagccatgatgaaagctcagtttatgagtctctgggatggattggatactgatcacagctgccaggtcatagtaatgggagctaccaatcgtcctcaggaccttgactcggctataatgagaagaatgcctacaagatttcatatcaaccagcctgctttaaaacagagagaagcaatcctgaaactcatcttgaaaaatgaaaatgtggataggcatgtagacctgctagaagttgcccaggaaactgatgggttttcaggaagtgacctaaaagagatgtgtcgagatgctgccctcctctgtgttagagaatatgttaattctacatcagaagaaagccatgacgaagatgaaattcggcctgttcaacagcaggacctgcatcgggcaattgaaaagatgaagaaatcaaaggatgcagcatttcagaatgttttaacacatgtttgtttagattaagagtaaagatcatttgtacagttcagtgatctagtttggtgtgtcctcttatcagttagtggaaatagaacggaaagagtgctctttaaacaatgagggagctcagtgtttatggttttatactctgaattctaagttattgagatatagttgttacataggtggtattactgttggtcaaaaatcatgaggaggaacagttgaatccagcctgaacgtgggtgcttgtgtttgaccttttcagccatatattgtacagccttatagaatctaagctggtcttaaagtcataaatgattcattgggtcattagtgagaaacggggatgtggttaggtgctggttcctagacatgtgagtatgcgtttgtgtgtgtgcgtgtatgtatgtgtatattaaatgtatatatccacacattttatattgacattctgtagatatgtttgaatatagaaactttttttaccccaactactgaatccaggagtaccaaataatatatagtaaaactaagatttaaggttgtgtcaaaaaggtacagtgattcagccatttccatttgtcatttgtttcaaccttttttaagttgagtgtttttatttctgcagttattagttggatcctccacatcttgcatatatacatgggctcaattattatgtttgtcaggataatcaaatgaaaatactagttcagtgatcagcattgaatggttgttaggcagccatgtgctcaacactgatttcacctcttgagtataaactttttaaatttaaattggtttacatgaaagtggattaaaaggcctttcaaaagaatgggtttgaaaaacctcagtaccctttaatacatgtacatttctttccttttttcatttaatgtaacatgtctgttgtaactatgtttcttaaatattattttaaggttatgtgttctttaattatggtcaaatataatttggtcaccaaaaatgaaataatagtttaaaacaagtagctgttactaagtgtgctaaaaatactcattttataattaattttagttttcttagtatattattataaattgtgccctaagtcaggtacaaatgtacacatcaaaatgcccatattgtatctatctgtagtcgtttaatgtgaattatatgtgaatttttttcaaaattttactaaccagaattctgttataggcacctaaccacgcagcatgaggaaaacggcacaacacaatcttgaggtgccttctgaatcatcagattaaattatgcttcatatgtttttgcttttactgtatttctttaaaaactctaaatctttattcatgtgtcactggattaatttatctgataatgtgtctcacaagaatctgttagatcgtttattcttcagttgtactttgaatggtggggtggaagtttcaggtgaacaatggataacaaaaagcaagttatggaagattgtgaagaggatggaaaaactgaatacaagataccaaaaatgaaaaaaagtgtcccatttttaataactatattctattattttataaatgtgtaataaaggggtccctctttattggttgttctccacttaatctttggtctttttcagtaattttaagttttctgggattttttttggtttataaaacttgtgtttagactttatcttgctatggagttttcacacttctataggcacatatcctagtatctagtcatttctgttttaatatgaatttcagtaatttaattttaatctggtgacatattaatcgaaaataaggagtaatgtatacctccacatgtcctttctttttgtcttctcttaaattcacaatatccagtaggagtggttattcaatttcttcgtggttttaatcatcaaatgaagttagagaagtatactaatcccagcaactatgactcatctaggcatgttaagaccataaagtaattcaggaaactattttcctgatttttaaataacttttagtgttatgtaacatctatccttctgttttagacatgcatttcacatatagttgaattctagattctaagataattcattttgggtaatacttcagagtactggatctagaatcaggcttcctgaatttaaactcaggctccccattaactgtgtgtctgtgagcccagtttctcatctgtaaaatggggcaacagtggcactcatcttaaagggttggataataaaataatgcatgtaaggccctcagcatagtgcctggcacagaattactgctcaaatgttagctgtcgtattaatattgtcacttttgcacactgatgtacatttcctgttgaccaggctcattctttaagcattctccatgcttaaaccagttccataatccctaggcctgtactccagggattgagactgaaaggatcatttatgccatgtttctctaaaagcatcattgctggaagacttttgataagtctgatgtgtctcaagctattctcaggccttttttgtagagtttagaaatgaagtatttgaatcaatttagtatctcctttactatgtttctccttttaatctcagccaaccccctacctgcaggtaaacccagcattcattaagagctgggttggggtactctattctgtatgcatcataatagcttaacattatttagtagctgtaacttacaggtttaatgctagatgaggatgtctcaagccgtgagtgtgcttgtgtaaaaatggtggcaacatcatctcgttggtaggaattttttacttgaattgttattttgggaaaatgttaacagatttcttctggataaagaaaataaattggatgatgtatattttatgtttctttttagcttctcttaaaatcagaatattgaacagaattctgatatgctgaatatatatagtgcatggctgaaactccagcaccaactgggtgcttcaaatgaagtcatagaataattccatctagagctgacagaaatctttcagagccttcattattaaatttgttatagatttagttatcaaagatagagttctctaatcttttttttaaagctaaagttctctttatttacatgtataggaaaacattctgcctaaatcatgatgttaatgaaaatcatattgaggagaacttgaaccttattaaatatgagcttctaacataattgactaaaatgtgattgtcatatatgacacagatgctgtgtgcagatgatatcaaacctaaaaccacttagcaatgtgagaagaaacagaaaacatcccagttaccctggtgtaaaatttatactatttattaatggccgataagggtctcattactaaaacactgaagtgggattatatttttgtaatcgtctaatatttacagtcataaacctgcatgagaatactttcaaatactagcttttgtgcttttaaaataggtaacagtgaatgttagtattgggtgtgggatgcatcagggacacaggtttgtaaaccatgacaattcagttgtaaaactaaagccaagtgcacctgtagtcccagctgctggggaggatcacttgagcctaggaggtgaaaattgcagtgaactgatattgtgccattgcactccagactgggtgacatagtgagaccctgtctctacaaaaaaaaaaaaaaaaaaccctaaag

SEQ ID NO: 345054 - DNA, 4159 bp, Homo sapiens
ctgtatttttcaaataaaatgattaattctactaccaaataaatcttaatttctagtctacttctagtttgcaagaggagctttaaatgtatttgtttacttaacatttaaaaatccatttctccttaaaatgaaacactttttttaaggtaggtaatattttaatttgactagaagttagtttttctttcttagtttaagctactttgttagtcttacaattttaataagtatagttattacctagtgacatttctgtttgtttttttaaggttaacattcaagatggtacatgctgaagccttttctcgtcctttgagtcggaatgaagttgttggtttaattttccgtttgacaatatttggtgcagtgacatactttactatcaaatggatggtagatgcaattgatccaaccagaaagcaaaaagtagaagctcagaaacaggcagaaaaactaatgaagcaaattggagtgaaaaatgtgaagctctcagaatatgaaatgagtattgctgctcatcttgtagaccctcttaatatgcatgttacttggagtgatatagcaggtttagatgatgtcattacggatctgaaagacacagtcatcttacctatcaaaaagaaacatttgtttgagaattccaggcttctgcagcctccaaaaggtgttcttctctatgggcctccaggctgtggtcttcagccttcgacactgaccgataagtggtatggagaatctcagaaattggctgctgctgtcttctcccttgccataaagctacaaccatccatcatctttatagatgaaatagactcctttctacgaaaccgttcaagttctgaccatgaagctacagccatgatgaaagctcagtttatgagtctctgggatggattggatactgatcacagctgccaggtcatagtaatgggagctaccaatcgtcctcaggaccttgactcggctataatgagaagaatgcctacaagatttcatatcaaccagcctgctttaaaacagagagaagcaatcctgaaactcatcttgaaaaatgaaaatgtggataggcatgtagacctgctagaagttgcccaggaaactgatgggttttcaggaagtgacctaaaagagatgtgtcgagatgctgccctcctctgtgttagagaatatgttaattctacatcagaagaaagccatgacgaagatgaaattcggcctgttcaacagcaggacctgcatcgggcaattgaaaagatgaagaaatcaaaggatgcagcatttcagaatgttttaacacatgtttgtttagattaagagtaaagatcatttgtacagttcagtgatctagtttggtgtgtcctcttatcagttagtggaaatagaacggaaagagtgctctttaaacaatgagggagctcagtgtttatggttttatactctgaattctaagttattgagatatagttgttacataggtggtattactgttggtcaaaaatcatgaggaggaacagttgaatccagcctgaacgtgggtgcttgtgtttgaccttttcagccatatattgtacagccttatagaatctaagctggtcttaaagtcataaatgattcattgggtcattagtgagaaacggggatgtggttaggtgctggttcctagacatgtgagtatgcgtttgtgtgtgtgcgtgtatgtatgtgtatattaaatgtatatatccacacattttatattgacattctgtagatatgtttgaatatagaaactttttttaccccaactactgaatccaggagtaccaaataatatatagtaaaactaagatttaaggttgtgtcaaaaaggtacagtgattcagccatttccatttgtcatttgtttcaaccttttttaagttgagtgtttttatttctgcagttattagttggatcctccacatcttgcatatatacatgggctcaattattatgtttgtcaggataatcaaatgaaaatactagttcagtgatcagcattgaatggttgttaggcagccatgtgctcaacactgatttcacctcttgagtataaactttttaaatttaaattggtttacatgaaagtggattaaaaggcctttcaaaagaatgggtttgaaaaacctcagtaccctttaatacatgtacatttctttccttttttcatttaatgtaacatgtctgttgtaactatgtttcttaaatattattttaaggttatgtgttctttaattatggtcaaatataatttggtcaccaaaaatgaaataatagtttaaaacaagtagctgttactaagtgtgctaaaaatactcattttataattaattttagttttcttagtatattattataaattgtgccctaagtcaggtacaaatgtacacatcaaaatgcccatattgtatctatctgtagtcgtttaatgtgaattatatgtgaatttttttcaaaattttactaaccagaattctgttataggcacctaaccacgcagcatgaggaaaacggcacaacacaatcttgaggtgccttctgaatcatcagattaaattatgcttcatatgtttttgcttttactgtatttctttaaaaactctaaatctttattcatgtgtcactggattaatttatctgataatgtgtctcacaagaatctgttagatcgtttattcttcagttgtactttgaatggtggggtggaagtttcaggtgaacaatggataacaaaaagcaagttatggaagattgtgaagaggatggaaaaactgaatacaagataccaaaaatgaaaaaaagtgtcccatttttaataactatattctattattttataaatgtgtaataaaggggtccctctttattggttgttctccacttaatctttggtctttttcagtaattttaagttttctgggattttttttggtttataaaacttgtgtttagactttatcttgctatggagttttcacacttctataggcacatatcctagtatctagtcatttctgttttaatatgaatttcagtaatttaattttaatctggtgacatattaatcgaaaataaggagtaatgtatacctccacatgtcctttctttttgtcttctcttaaattcacaatatccagtaggagtggttattcaatttcttcgtggttttaatcatcaaatgaagttagagaagtatactaatcccagcaactatgactcatctaggcatgttaagaccataaagtaattcaggaaactattttcctgatttttaaataacttttagtgttatgtaacatctatccttctgttttagacatgcatttcacatatagttgaattctagattctaagataattcattttgggtaatacttcagagtactggatctagaatcaggcttcctgaatttaaactcaggctccccattaactgtgtgtctgtgagcccagtttctcatctgtaaaatggggcaacagtggcactcatcttaaagggttggataataaaataatgcatgtaaggccctcagcatagtgcctggcacagaattactgctcaaatgttagctgtcgtattaatattgtcacttttgcacactgatgtacatttcctgttgaccaggctcattctttaagcattctccatgcttaaaccagttccataatccctaggcctgtactccagggattgagactgaaaggatcatttatgccatgtttctctaaaagcatcattgctggaagacttttgataagtctgatgtgtctcaagctattctcaggccttttttgtagagtttagaaatgaagtatttgaatcaatttagtatctcctttactatgtttctccttttaatctcagccaaccccctacctgcaggtaaacccagcattcattaagagctgggttggggtactctattctgtatgcatcataatagcttaacattatttagtagctgtaacttacaggtttaatgctagatgaggatgtctcaagccgtgagtgtgcttgtgtaaaaatggtggcaacatcatctcgttggtaggaattttttacttgaattgttattttgggaaaatgttaacagatttcttctggataaagaaaataaattggatgatgtatatttta

SEQ ID NO: 345055 - DNA, 4098 bp, Homo sapiens
ctcccaggttgcgtttccttcctgtgtgaggccggctgagggcacttgctcttgctgtttctgcccctgggttaacattcaagatggtacatgctgaagccttttctcgtcctttgagtcggaatgaagttgttggtttaattttccgtttgacaatatttggtgcagtgacatactttactatcaaatggatggtagatgcaattgatccaaccagaaagcaaaaagtagaagctcagaaacaggcagaaaaactaatgaagcaaattggagtgaaaaatgtgaagctctcagaatatgaaatgagtattgctgctcatcttgtagaccctcttaatatgcatgttacttggagtgatatagcaggtttagatgatgtcattacggatctgaaagacacagtcatcttacctatcaaaaagaaacatttgtttgagaattccaggcttctgcagcctccaaaaggtgttcttctctatgggcctccaggctgtggtaaaacgttgattgccaaggccacagccaaagaagcaggctgtcgatttattaaccttcagccttcgacactgaccgataagtggtatggagaatctcagaaattggctgctgctgtcttctcccttgccataaagctacaaccatccatcatctttatagatgaaatagactcctttctacgaaaccgttcaagttctgaccatgaagctacagccatgatgaaagctcagtttatgagtctctgggatggattggatactgatcacagctgccaggtcatagtaatgggagctaccaatcgtcctcaggaccttgactcggctataatgagaagaatgcctacaagatttcatatcaaccagcctgctttaaaacagagagaagcaatcctgaaactcatcttgaaaaatgaaaatctgaggaaactgaaacccagagaagttttgtaataacttgcccaggattacacaaagaagtgatggagcctactcttaaccattagggtggataggcatgtagacctgctagaagttgcccaggaaactgatgggttttcaggaagtgacctaaaagagatgtgtcgagatgctgccctcctctgtgttagagaatatgttaattctacatcagaagaaagccatgacgaagatgaaattcggcctgttcaacagcaggacctgcatcgggcaattgaaaagatgaagaaatcaaaggatgcagcatttcagaatgttttaacacatgtttgtttagattaagagtaaagatcatttgtacagttcagtgatctagtttggtgtgtcctcttatcagttagtggaaatagaacggaaagagtgctctttaaacaatgagggagctcagtgtttatggttttatactctgaattctaagttattgagatatagttgttacataggtggtattactgttggtcaaaaatcatgaggaggaacagttgaatccagcctgaacgtgggtgcttgtgtttgaccttttcagccatatattgtacagccttatagaatctaagctggtcttaaagtcataaatgattcattgggtcattagtgagaaacggggatgtggttaggtgctggttcctagacatgtgagtatgcgtttgtgtgtgtgcgtgtatgtatgtgtatattaaatgtatatatccacacattttatattgacattctgtagatatgtttgaatatagaaactttttttaccccaactactgaatccaggagtaccaaataatatatagtaaaactaagatttaaggttgtgtcaaaaaggtacagtgattcagccatttccatttgtcatttgtttcaaccttttttaagttgagtgtttttatttctgcagttattagttggatcctccacatcttgcatatatacatgggctcaattattatgtttgtcaggataatcaaatgaaaatactagttcagtgatcagcattgaatggttgttaggcagccatgtgctcaacactgatttcacctcttgagtataaactttttaaatttaaattggtttacatgaaagtggattaaaaggcctttcaaaagaatgggtttgaaaaacctcagtaccctttaatacatgtacatttctttccttttttcatttaatgtaacatgtctgttgtaactatgtttcttaaatattattttaaggttatgtgttctttaattatggtcaaatataatttggtcaccaaaaatgaaataatagtttaaaacaagtagctgttactaagtgtgctaaaaatactcattttataattaattttagttttcttagtatattattataaattgtgccctaagtcaggtacaaatgtacacatcaaaatgcccatattgtatctatctgtagtcgtttaatgtgaattatatgtgaatttttttcaaaattttactaaccagaattctgttataggcacctaaccacgcagcatgaggaaaacggcacaacacaatcttgaggtgccttctgaatcatcagattaaattatgcttcatatgtttttgcttttactgtatttctttaaaaactctaaatctttattcatgtgtcactggattaatttatctgataatgtgtctcacaagaatctgttagatcgtttattcttcagttgtactttgaatggtggggtggaagtttcaggtgaacaatggataacaaaaagcaagttatggaagattgtgaagaggatggaaaaactgaatacaagataccaaaaatgaaaaaaagtgtcccatttttaataactatattctattattttataaatgtgtaataaaggggtccctctttattggttgttctccacttaatctttggtctttttcagtaattttaagttttctgggattttttttggtttataaaacttgtgtttagactttatcttgctatggagttttcacacttctataggcacatatcctagtatctagtcatttctgttttaatatgaatttcagtaatttaattttaatctggtgacatattaatcgaaaataaggagtaatgtatacctccacatgtcctttctttttgtcttctcttaaattcacaatatccagtaggagtggttattcaatttcttcgtggttttaatcatcaaatgaagttagagaagtatactaatcccagcaactatgactcatctaggcatgttaagaccataaagtaattcaggaaactattttcctgatttttaaataacttttagtgttatgtaacatctatccttctgttttagacatgcatttcacatatagttgaattctagattctaagataattcattttgggtaatacttcagagtactggatctagaatcaggcttcctgaatttaaactcaggctccccattaactgtgtgtctgtgagcccagtttctcatctgtaaaatggggcaacagtggcactcatcttaaagggttggataataaaataatgcatgtaaggccctcagcatagtgcctggcacagaattactgctcaaatgttagctgtcgtattaatattgtcacttttgcacactgatgtacatttcctgttgaccaggctcattctttaagcattctccatgcttaaaccagttccataatccctaggcctgtactccagggattgagactgaaaggatcatttatgccatgtttctctaaaagcatcattgctggaagacttttgataagtctgatgtgtctcaagctattctcaggccttttttgtagagtttagaaatgaagtatttgaatcaatttagtatctcctttactatgtttctccttttaatctcagccaaccccctacctgcaggtaaacccagcattcattaagagctgggttggggtactctattctgtatgcatcataatagcttaacattatttagtagctgtaacttacaggtttaatgctagatgaggatgtctcaagccgtgagtgtgcttgtgtaaaaatggtggcaacatcatctcgttggtaggaattttttacttgaattgttattttgggaaaatgttaacagatttcttctggataaagaaaataaattggatgatgtatatttta

SEQ ID NO: 345056 - DNA, 2983 bp, Homo sapiens
  misc_feature (18)..(18): n is a, c, g, or t
  misc_feature (20)..(20): n is a, c, g, or t
  misc_feature (22)..(22): n is a, c, g, or t
  misc_feature (25)..(25): n is a, c, g, or t
  misc_feature (30)..(30): n is a, c, g, or t
  misc_feature (52)..(53): n is a, c, g, or t
  misc_feature (55)..(55): n is a, c, g, or t
gccctatagtcattctanananganaaagnccctatactggactcgtaagtnntnaagacctgcatcgggcaattgaaaagatgaagaaatcaaaggatgcagcatttcagaatgttttaacacatgtttgtttagattaagagtaaagatcatttgtacagttcagtgatctagtttggtgtgtcctcttatcagttagtggaaatagaacggaaagagtgctctttaaacaatgagggagctcagtgtttatggttttatactctgaattctaagttattgagatatagttgttacataggtggtattactgttggtcaaaaatcatgaggaggaacagttgaatccagcctgaacgtgggtgcttgtgtttgaccttttcagccatatattgtacagccttatagaatctaagctggtcttaaagtcataaatgattcattgggtcattagtgagaaacggggatgtggttaggtgctggttcctagacatgtgagtatgcgtttgtgtgtgtgcgtgtatgtatgtgtatattaaatgtatatatccacacattttatattgacattctgtagatatgtttgaatatagaaactttttttaccccaactactgaatccaggagtaccaaataatatatagtaaaactaagatttaaggttgtgtcaaaaaggtacagtgattcagccatttccatttgtcatttgtttcaaccttttttaagttgagtgtttttatttctgcagttattagttggatcctccacatcttgcatatatacatgggctcaattattatgtttgtcaggataatcaaatgaaaatactagttcagtgatcagcattgaatggttgttaggcagccatgtgctcaacactgatttcacctcttgagtataaactttttaaatttaaattggtttacatgaaagtggattaaaaggcctttcaaaagaatgggtttgaaaaacctcagtaccctttaatacatgtacatttctttccttttttcatttaatgtaacatgtctgttgtaactatgtttcttaaatattattttaaggttatgtgttctttaattatggtcaaatataatttggtcaccaaaaatgaaataatagtttaaaacaagtagctgttactaagtgtgctaaaaatactcattttataattaattttagttttcttagtatattattataaattgtgccctaagtcaggtacaaatgtacacatcaaaatgcccatattgtatctatctgtagtcgtttaatgtgaattatatgtgaatttttttcaaaattttactaaccagaattctgttataggcacctaaccacgcagcatgaggaaaacggcacaacacaatcttgaggtgccttctgaatcatcagattaaattatgcttcatatgtttttgcttttactgtatttctttaaaaactctaaatctttattcatgtgtcactggattaatttatctgataatgtgtctcacaagaatctgttagatcgtttattcttcagttgtactttgaatggtggggtggaagtttcaggtgaacaatggataacaaaaagcaagttatggaagattgtgaagaggatggaaaaactgaatacaagataccaaaaatgaaaaaaagtgtcccatttttaataactatattctattattttataaatgtgtaataaaggggtccctctttattggttgttctccacttaatctttggtctttttcagtaattttaagttttctgggattttttttggtttataaaacttgtgtttagactttatcttgctatggagttttcacacttctataggcacatatcctagtatctagtcatttctgttttaatatgaatttcagtaatttaattttaatctggtgacatattaatcgaaaataaggagtaatgtatacctccacatgtcctttctttttgtcttctcttaaattcacaatatccagtaggagtggttattcaatttcttcgtggttttaatcatcaaatgaagttagagaagtatactaatcccagcaactatgactcatctaggcatgttaagaccataaagtaattcaggaaactattttcctgatttttaaataacttttagtgttatgtaacatctatccttctgttttagacatgcatttcacatatagttgaattctagattctaagataattcattttgggtaatacttcagagtactggatctagaatcaggcttcctgaatttaaactcaggctccccattaactgtgtgtctgtgagcccagtttctcatctgtaaaatggggcaacagtggcactcatcttaaagggttggataataaaataatgcatgtaaggccctcagcatagtgcctggcacagaattactgctcaaatgttagctgtcgtattaatattgtcacttttgcacactgatgtacatttcctgttgaccaggctcattctttaagcattctccatgcttaaaccagttccataatccctaggcctgtactccagggattgagactgaaaggatcatttatgccatgtttctctaaaagcatcattgctggaagacttttgataagtctgatgtgtctcaagctattctcaggccttttttgtagagtttagaaatgaagtatttgaatcaatttagtatctcctttactatgtttctccttttaatctcagccaaccccctacctgcaggtaaacccagcattcattaagagctgggttggggtactctattctgtatgcatcataatagcttaacattatttagtagctgtaacttacaggtttaatgctagatgaggatgtctcaagccgtgagtgtgcttgtgtaaaaatggtggcaacatcatctcgttggtaggaattttttacttgaattgttattttgggaaaatgttaacagatttcttctggataaagaaaataaattggatgatgtatatttta

SEQ ID NO: 345057 - DNA, 1796 bp, Homo sapiens
taggcggacctcccttccacagctccttcacagcgtacaaatgtacacatcaaaatgcccatattgtatctatctgtagtcgtttaatgtgaattatatgtgaatttttttcaaaattttactaaccagaattctgttataggcacctaaccacgcagcatgaggaaaacggcacaacacaatcttgaggtgccttctgaatcatcagattaaattatgcttcatatgtttttgcttttactgtatttctttaaaaactctaaatctttattcatgtgtcactggattaatttatctgataatgtgtctcacaagaatctgttagatcgtttattcttcagttgtactttgaatggtggggtggaagtttcaggtgaacaatggataacaaaaagcaagttatggaagattgtgaagaggatggaaaaactgaatacaagataccaaaaatgaaaaaaagtgtcccatttttaataactatattctattattttataaatgtgtaataaaggggtccctctttattggttgttctccacttaatctttggtctttttcagtaattttaagttttctgggattttttttggtttataaaacttgtgtttagactttatcttgctatggagttttcacacttctataggcacatatcctagtatctagtcatttctgttttaatatgaatttcagtaatttaattttaatctggtgacatattaatcgaaaataaggagtaatgtatacctccacatgtcctttctttttgtcttctcttaaattcacaatatccagtaggagtggttattcaatttcttcgtggttttaatcatcaaatgaagttagagaagtatactaatcccagcaactatgactcatctaggcatgttaagaccataaagtaattcaggaaactattttcctgatttttaaataacttttagtgttatgtaacatctatccttctgttttagacatgcatttcacatatagttgaattctagattctaagataattcattttgggtaatacttcagagtactggatctagaatcaggcttcctgaatttaaactcaggctccccattaactgtgtgtctgtgagcccagtttctcatctgtaaaatggggcaacagtggcactcatcttaaagggttggataataaaataatgcatgtaaggccctcagcatagtgcctggcacagaattactgctcaaatgttagctgtcgtattaatattgtcacttttgcacactgatgtacatttcctgttgaccaggctcattctttaagcattctccatgcttaaaccagttccataatccctaggcctgtactccagggattgagactgaaaggatcatttatgccatgtttctctaaaagcatcattgctggaagacttttgataagtctgatgtgtctcaagctattctcaggccttttttgtagagtttagaaatgaagtatttgaatcaatttagtatctcctttactatgtttctccttttaatctcagccaaccccctacctgcaggtaaacccagcattcattaagagctgggttggggtactctattctgtatgcatcataatagcttaacattatttagtagctgtaacttacaggtttaatgctagatgaggatgtctcaagccgtgagtgtgcttgtgtaaaaatggtggcaacatcatctcgttggtaggaattttttacttgaattgttattttgggaaaatgttaacagatttcttctggataaagaaaataaattggatgatgtatatttta

SEQ ID NO: 345058 - DNA, 474 bp, Homo sapiens
ggaattatattcccatttcaataaaccatataacattttttaccttatggtaatattgtgtacttatagatgtgaagtctttgtagctattttagcttcctacttcttagcactcagtgcttttaaaaaattccttatgatttctctatgtgtagataattcctggaagcatttacatgaagctgttcattgtggttgtctttggggtcttgaatggtaaagagatttcatttttatacccttttctacagttgaaaacaaaattttttttttaccacatgcatctcttttaaatcttggtaaaatattttagggaggcatattctaaagttatttgagtatttgatggttttgtttgcattttagccatgacgaagatgaaattcggcctgttcaacagcaggacctgcatcgggcaattgaaaagatgaagaaatcaaaggatgcagcatttcagaatgttttaacacatgt

SEQ ID NO: 345059 - DNA, 2739 bp, Homo sapiens
ctcccaggttgcgtttccttcctgtgtgaggccggctgagggcacttgctcttgctgtttctgcccctgggttaacattcaagatggtacatgctgaagccttttctcgtcctttgagtcggaatgaagttgttggtttaattttccgtttgacaatatttggtgcagtgacatactttactatcaaatggatggtagatgcaattgatccaaccagaaagcaaaaagtagaagctcagaaacaggcagaaaaactaatgaagcaaattggagtgaaaaatgtgaagctctcagaatatgaaatgagtattgctgctcatcttgtagaccctcttaatatgcatgttacttggagtgatatagcaggtttagatgatgtcattacggatctgaaagacacagtcatcttacctatcaaaaagaaacatttgtttgagaattccaggcttctgcagcctccaaaaggtgttcttctctatgggcctccaggctgtggtaaaacgttgattgccaaggccacagccaaagaagcaggctgtcgatttattaaccttcagccttcgacactgaccgataagtggtatggagaatctcagaaattggctgctgctgtcttctcccttgccataaagctacaaccatccatcatctttatagatgaaatagactcctttctacgaaaccgttcaagttctgaccatgaagctacagccatgatgaaagctcagtttatgagtctctgggatggattggatactgatcacagctgccaggtcatagtaatgggagctaccaatcgtcctcaggaccttgactcggctataatgagaagaatgcctacaagatttcatatcaaccagcctgctttaaaacagagagaagcaatcctgaaactcatcttgaaaaatgaaaatgtggataggcatgtagacctgctagaagttgcccaggaaactgatgggttttcaggaagtgacctaaaagagatgtgtcgagatgctgccctcctctgtgttagagaatatgttaattctacatcagaagaaagccatgacgaagatgaaattcggcctgttcaacagcaggacctgcatcgggcaattgaaaagatgaagaaatcaaaggatgcagcatttcagaatgttttaacacatgtttgtttagattaagagtaaagatcatttgtacagttcagtgatctagtttggtgtgtcctcttatcagttagtggaaatagaacggaaagagtgctctttaaacaatgagggagctcagtgtttatggttttatactctgaattctaagttattgagatatagttgttacataggtggtattactgttggtcaaaaatcatgaggaggaacagttgaatccagcctgaacgtgggtgcttgtgtttgaccttttcagccatatattgtacagccttatagaatctaagctggtcttaaagtcataaatgattcattgggtcattagtgagaaacggggatgtggttaggtgctggttcctagacatgtgagtatgcgtttgtgtgtgtgcgtgtatgtatgtgtatattaaatgtatatatccacacattttatattgacattctgtagatatgtttgaatatagaaactttttttaccccaactactgaatccaggagtaccaaataatatatagtaaaactaagatttaaggttgtgtcaaaaaggtacagtgattcagccatttccatttgtcatttgtttcaaccttttttaagttgagtgtttttatttctgcagttattagttggatcctccacatcttgcatatatacatgggctcaattattatgtttgtcaggataatcaaatgaaaatactagttcagtgatcagcattgaatggttgttaggcagccatgtgctcaacactgatttcacctcttgagtataaactttttaaatttaaattggtttacatgaaagtggattaaaaggcctttcaaaagaatgggtttgaaaaacctcagtaccctttaatacatgtacatttctttccttttttcatttaatgtaacatgtctgttgtaactatgtttcttaaatattattttaaggttatgtgttctttaattatggtcaaatataatttggtcaccaaaaatgaaataatagtttaaaacaagtagctgttactaagtgtgctaaaaatactcattttataattaattttagttttcttagtatattattataaattgtgccctaagtcaggtacaaatgtacacatcaaaatgcccatattgtatctatctgtagtcgtttaatgtgaattatatgtgaatttttttcaaaattttactaaccagaattctgttataggcacctaaccacgcagcatgaggaaaacggcacaacacaatcttgaggtgccttctgaatcatcagattaaattatgcttcatatgtttttgcttttactgtatttctttaaaaactctaaatctttattcatgtgtcactggattaatttatctgataatgtgtctcacaagaatctgttagatcgtttattcttcagttgtactttgaatggtggggtggaagtttcaggtgaacaatggataacaaaaagcaagttatggaagattgtgaagaggatggaaaaactgaatacaagataccaaaaatgaaaaaaagtgtcccatttttaataactatattctattattttataaatgtgtaataaaggggtccctcttta

SEQ ID NO: 345060 - DNA, 2941 bp, Homo sapiens
ctgtatttttcaaataaaatgattaattctactaccaaataaatcttaatttctagtctacttctagtttgcaagaggagctttaaatgtatttgtttacttaacatttaaaaatccatttctccttaaaatgaaacactttttttaaggtaggtaatattttaatttgactagaagttagtttttctttcttagtttaagctactttgttagtcttacaattttaataagtatagttattacctagtgacatttctgtttgtttttttaaggttaacattcaagatggtacatgctgaagccttttctcgtcctttgagtcggaatgaagttgttggtttaattttccgtttgacaatatttggtgcagtgacatactttactatcaaatggatggtagatgcaattgatccaaccagaaagcaaaaagtagaagctcagaaacaggcagaaaaactaatgaagcaaattggagtgaaaaatgtgaagctctcagaatatgaaatgagtattgctgctcatcttgtagaccctcttaatatgcatgttacttggagtgatatagcaggtttagatgatgtcattacggatctgaaagacacagtcatcttacctatcaaaaagaaacatttgtttgagaattccaggcttctgcagcctccaaaaggtgttcttctctatgggcctccaggctgtggtaaaacgttgattgccaaggccacagccaaagaagcaggctgtcgatttattaaccttcagccttcgacactgaccgataagtggtatggagaatctcagaaattggctgctgctgtcttctcccttgccataaagctacaaccatccatcatctttatagatgaaatagactcctttctacgaaaccgttcaagttctgaccatgaagctacagccatgatgaaagctcagtttatgagtctctgggatggattggatactgatcacagctgccaggtcatagtaatgggagctaccaatcgtcctcaggaccttgactcggctataatgagaagaatgcctacaagatttcatatcaaccagcctgctttaaaacagagagaagcaatcctgaaactcatcttgaaaaatgaaaatgtggataggcatgtagacctgctagaagttgcccaggaaactgatgggttttcaggaagtgacctaaaagagatgtgtcgagatgctgccctcctctgtgttagagaatatgttaattctacatcagaagaaagccatgacgaagatgaaattcggcctgttcaacagcaggacctgcatcgggcaattgaaaagatgaagaaatcaaaggatgcagcatttcagaatgttttaacacatgtttgtttagattaagagtaaagatcatttgtacagttcagtgatctagtttggtgtgtcctcttatcagttagtggaaatagaacggaaagagtgctctttaaacaatgagggagctcagtgtttatggttttatactctgaattctaagttattgagatatagttgttacataggtggtattactgttggtcaaaaatcatgaggaggaacagttgaatccagcctgaacgtgggtgcttgtgtttgaccttttcagccatatattgtacagccttatagaatctaagctggtcttaaagtcataaatgattcattgggtcattagtgagaaacggggatgtggttaggtgctggttcctagacatgtgagtatgcgtttgtgtgtgtgcgtgtatgtatgtgtatattaaatgtatatatccacacattttatattgacattctgtagatatgtttgaatatagaaactttttttaccccaactactgaatccaggagtaccaaataatatatagtaaaactaagatttaaggttgtgtcaaaaaggtacagtgattcagccatttccatttgtcatttgtttcaaccttttttaagttgagtgtttttatttctgcagttattagttggatcctccacatcttgcatatatacatgggctcaattattatgtttgtcaggataatcaaatgaaaatactagttcagtgatcagcattgaatggttgttaggcagccatgtgctcaacactgatttcacctcttgagtataaactttttaaatttaaattggtttacatgaaagtggattaaaaggcctttcaaaagaatgggtttgaaaaacctcagtaccctttaatacatgtacatttctttccttttttcatttaatgtaacatgtctgttgtaactatgtttcttaaatattattttaaggttatgtgttctttaattatggtcaaatataatttggtcaccaaaaatgaaataatagtttaaaacaagtagctgttactaagtgtgctaaaaatactcattttataattaattttagttttcttagtatattattataaattgtgccctaagtcaggtacaaatgtacacatcaaaatgcccatattgtatctatctgtagtcgtttaatgtgaattatatgtgaatttttttcaaaattttactaaccagaattctgttataggcacctaaccacgcagcatgaggaaaacggcacaacacaatcttgaggtgccttctgaatcatcagattaaattatgcttcatatgtttttgcttttactgtatttctttaaaaactctaaatctttattcatgtgtcactggattaatttatctgataatgtgtctcacaagaatctgttagatcgtttattcttcagttgtactttgaatggtggggtggaagtttcaggtgaacaatggataacaaaaagcaagttatggaagattgtgaagaggatggaaaaactgaatacaagataccaaaaatgaaaaaaagtgtcccatttttaataactatattctattattttataaatgtgtaataaaggggtccctcttta

SEQ ID NO: 345061 - DNA, 4317 bp, Homo sapiens
ctcccaggttgcgtttccttcctgtgtgaggccggctgagggcacttgctcttgctgtttctgcccctgggttaacattcaagatggtacatgctgaagccttttctcgtcctttgagtcggaatgaagttgttggtttaattttccgtttgacaatatttggtgcagtgacatactttactatcaaatggatggtagatgcaattgatccaaccagaaagcaaaaagtagaagctcagaaacaggcagaaaaactaatgaagcaaattggagtgaaaaatgtgaagctctcagaatatgaaatgagtattgctgctcatcttgtagaccctcttaatatgcatgttacttggagtgatatagcaggtttagatgatgtcattacggatctgaaagacacagtcatcttacctatcaaaaagaaacatttgtttgagaattccaggcttctgcagcctccaaaagctatatcaataaagtgcattaatttacatatcaaaggtaactgaagcctgtacctgtgcatttttatgaactacataatttttgtttctggaaaagattgtttggaaaaaggcacatgtcctttggctaaaacttaatctgtgagcaacagcaaaacagtgtttgccacaatctgttttgaagttgtttaccttctgtaggctaatatcaaagcactatggtgcattgtttgcttgtgaaggtggagggccttagatgattttgtttttcaactgttgataaagtggtatgaatttggatgtcaaggtgttcttctctatgggcctccaggctgtggtaaaacgttgattgccaaggccacagccaaagaagcaggctgtcgatttattaaccttcagccttcgacactgaccgataagtggtatggagaatctcagaaattggctgctgctgtcttctcccttgccataaagctacaaccatccatcatctttatagatgaaatagactcctttctacgaaaccgttcaagttctgaccatgaagctacagccatgatgaaagctcagtttatgagtctctgggatggattggatactgatcacagctgccaggtcatagtaatgggagctaccaatcgtcctcaggaccttgactcggctataatgagaagaatgcctacaagatttcatatcaaccagcctgctttaaaacagagagaagcaatcctgaaactcatcttgaaaaatgaaaatgtggataggcatgtagacctgctagaagttgcccaggaaactgatgggttttcaggaagtgacctaaaagagatgtgtcgagatgctgccctcctctgtgttagagaatatgttaattctacatcagaagaaagccatgacgaagatgaaattcggcctgttcaacagcaggacctgcatcgggcaattgaaaagatgaagaaatcaaaggatgcagcatttcagaatgttttaacacatgtttgtttagattaagagtaaagatcatttgtacagttcagtgatctagtttggtgtgtcctcttatcagttagtggaaatagaacggaaagagtgctctttaaacaatgagggagctcagtgtttatggttttatactctgaattctaagttattgagatatagttgttacataggtggtattactgttggtcaaaaatcatgaggaggaacagttgaatccagcctgaacgtgggtgcttgtgtttgaccttttcagccatatattgtacagccttatagaatctaagctggtcttaaagtcataaatgattcattgggtcattagtgagaaacggggatgtggttaggtgctggttcctagacatgtgagtatgcgtttgtgtgtgtgcgtgtatgtatgtgtatattaaatgtatatatccacacattttatattgacattctgtagatatgtttgaatatagaaactttttttaccccaactactgaatccaggagtaccaaataatatatagtaaaactaagatttaaggttgtgtcaaaaaggtacagtgattcagccatttccatttgtcatttgtttcaaccttttttaagttgagtgtttttatttctgcagttattagttggatcctccacatcttgcatatatacatgggctcaattattatgtttgtcaggataatcaaatgaaaatactagttcagtgatcagcattgaatggttgttaggcagccatgtgctcaacactgatttcacctcttgagtataaactttttaaatttaaattggtttacatgaaagtggattaaaaggcctttcaaaagaatgggtttgaaaaacctcagtaccctttaatacatgtacatttctttccttttttcatttaatgtaacatgtctgttgtaactatgtttcttaaatattattttaaggttatgtgttctttaattatggtcaaatataatttggtcaccaaaaatgaaataatagtttaaaacaagtagctgttactaagtgtgctaaaaatactcattttataattaattttagttttcttagtatattattataaattgtgccctaagtcaggtacaaatgtacacatcaaaatgcccatattgtatctatctgtagtcgtttaatgtgaattatatgtgaatttttttcaaaattttactaaccagaattctgttataggcacctaaccacgcagcatgaggaaaacggcacaacacaatcttgaggtgccttctgaatcatcagattaaattatgcttcatatgtttttgcttttactgtatttctttaaaaactctaaatctttattcatgtgtcactggattaatttatctgataatgtgtctcacaagaatctgttagatcgtttattcttcagttgtactttgaatggtggggtggaagtttcaggtgaacaatggataacaaaaagcaagttatggaagattgtgaagaggatggaaaaactgaatacaagataccaaaaatgaaaaaaagtgtcccatttttaataactatattctattattttataaatgtgtaataaaggggtccctctttattggttgttctccacttaatctttggtctttttcagtaattttaagttttctgggattttttttggtttataaaacttgtgtttagactttatcttgctatggagttttcacacttctataggcacatatcctagtatctagtcatttctgttttaatatgaatttcagtaatttaattttaatctggtgacatattaatcgaaaataaggagtaatgtatacctccacatgtcctttctttttgtcttctcttaaattcacaatatccagtaggagtggttattcaatttcttcgtggttttaatcatcaaatgaagttagagaagtatactaatcccagcaactatgactcatctaggcatgttaagaccataaagtaattcaggaaactattttcctgatttttaaataacttttagtgttatgtaacatctatccttctgttttagacatgcatttcacatatagttgaattctagattctaagataattcattttgggtaatacttcagagtactggatctagaatcaggcttcctgaatttaaactcaggctccccattaactgtgtgtctgtgagcccagtttctcatctgtaaaatggggcaacagtggcactcatcttaaagggttggataataaaataatgcatgtaaggccctcagcatagtgcctggcacagaattactgctcaaatgttagctgtcgtattaatattgtcacttttgcacactgatgtacatttcctgttgaccaggctcattctttaagcattctccatgcttaaaccagttccataatccctaggcctgtactccagggattgagactgaaaggatcatttatgccatgtttctctaaaagcatcattgctggaagacttttgataagtctgatgtgtctcaagctattctcaggccttttttgtagagtttagaaatgaagtatttgaatcaatttagtatctcctttactatgtttctccttttaatctcagccaaccccctacctgcaggtaaacccagcattcattaagagctgggttggggtactctattctgtatgcatcataatagcttaacattatttagtagctgtaacttacaggtttaatgctagatgaggatgtctcaagccgtgagtgtgcttgtgtaaaaatggtggcaacatcatctcgttggtaggaattttttacttgaattgttattttgggaaaatgttaacagatttcttctggataaagaaaataaattggatgatgtatatttta

SEQ ID NO: 345062 - DNA, 4201 bp, Homo sapiens
ctcccaggttgcgtttccttcctgtgtgaggccggctgagggcacttgctcttgctgtttctgcccctgggttaacattcaagatggtacatgctgaagccttttctcgtcctttgagtcggaatgaagttgttggtttaattttccgtttgacaatatttggtgcagtgacatactttactatcaaatggatggtagatgcaattgatccaaccagaaagcaaaaagtagaagctcagaaacaggcagaaaaactaatgaagcaaattggagtgaaaaatgtgaagctctcagaatatgaaatgagtattgctgctcatcttgtagaccctcttaatatgcatgttacttggagtgatatagcaggtttagatgatgtcattacggatctgaaagacacagtcatcttacctatcaaaaagaaacatttgtttgagaattccaggcttctgcagcctccaaaaggtgttcttctctatgggcctccaggctgtggtaaaacgttgattgccaaggccacagccaaagaagcaggctgtcgatttattaaccttcagccttcgacactgaccgataagtggtatggagaatctcagaaattggctgctgctgtcttctcccttgccataaagctacaaccatccatcatctttatagatgaaatagactcctttctacgaaaccgttcaagttctgaccatgaagctacagccatgatgaaagctcagtttatgagtctctgggatggattggatactgatcacagctgccaggtcatagtaatgggagctaccaatcgtcctcaggaccttgactcggctataatgagaagaatgcctacaagatttcatatcaaccagcctgctttaaaacagagagaagcaatcctgaaactcatcttgaaaaatgaaaatgtggataggcatgtagacctgctagaagttgcccaggaaactgatgggttttcaggaagtgacctaaaagagatgtgtcgagatgctgccctcctctgtgttagagaatatgttaattctacatcagaagaaagccatgacgaagatgaaattcggcctgttcaacagcaggacctgcatcgggcaattgaaaagatgaagaaatcaaaggatgcagcatttcagaatgttttaacacatgtttgtttagattaagagtaaagatcatttgtacagttcagtgatctagtttggtgtgtcctcttatcagttagtggaaatagaacggaaagagtgctctttaaacaatgagggagctcagtgtttatggttttatactctgaattctaagttattgagatatagttgttacataggtggtattactgttggtcaaaaatcatgaggaggaacagttgaatccagcctgaacgtgggtgcttgtgtttgaccttttcagccatatattgtacagccttatagaatctaagctggtcttaaagtcataaatgattcattgggtcattagtgagaaacggggatgtggttaggtgctggttcctagacatgtgagtatgcgtttgtgtgtgtgcgtgtatgtatgtgtatattaaatgtatatatccacacattttatattgacattctgtagatatgtttgaatatagaaactttttttaccccaactactgaatccaggagtaccaaataatatatagtaaaactaagatttaaggttgtgtcaaaaaggtacagtgattcagccatttccatttgtcatttgtttcaaccttttttaagttgagtgtttttatttctgcagttattagttggatcctccacatcttgcatatatacatgggctcaattattatgtttgtcaggataatcaaatgaaaatactagttcagtgatcagcattgaatggttgttaggcagccatgtgctcaacactgatttcacctcttgagtataaactttttaaatttaaattggtttacatgaaagtggattaaaaggcctttcaaaagaatgggtttgaaaaacctcagtaccctttaatacatgtacatttctttccttttttcatttaatgtaacatgtctgttgtaactatgtttcttaaatattattttaaggttatgtgttctttaattatggtcaaatataatttggtcaccaaaaatgaaataatagtttaaaacaagtagctgttactaagtgtgctaaaaatactcattttataattaattttagttttcttagtatattattataaattgtgccctaagtcaggtacaaatgtacacatcaaaatgcccatattgtatctatctgtagtcgtttaatgtgaattatatgtgaatttttttcaaaattttactaaccagaattctgttataggcacctaaccacgcagcatgaggaaaacggcacaacacaatcttgaggtgccttctgaatcatcagattaaattatgcttcatatgtttttgcttttactgtatttctttaaaaactctaaatctttattcatgtgtcactggattaatttatctgataatgtgtctcacaagaatctgttagatcgtttattcttcagttgtactttgaatggtggggtggaagtttcaggtgaacaatggataacaaaaagcaagttatggaagattgtgaagaggatggaaaaactgaatacaagataccaaaaatgaaaaaaagtgtcccatttttaataactatattctattattttataaatgtgtaataaaggggtccctctttattggttgttctccacttaatctttggtctttttcagtaattttaagttttctgggattttttttggtttataaaacttgtgtttagactttatcttgctatggagttttcacacttctataggcacatatcctagtatctagtcatttctgttttaatatgaatttcagtaatttaattttaatctggtgacatattaatcgaaaataaggagtaatgtatacctccacatgtcctttctttttgtcttctcttaaattcacaatatccagtaggagtggttattcaatttcttcgtggttttaatcatcaaatgaagttagagaagtatactaatcccagcaactatgactcatctaggcatgttaagaccataaagtaattcaggaaactattttcctgatttttaaataacttttagtgttatgtaacatctatccttctgttttagacatgcatttcacatatagttgaattctagattctaagataattcattttgggtaatacttcagagtactggatctagaatcaggcttcctgaatttaaactcaggctccccattaactgtgtgtctgtgagcccagtttctcatctgtaaaatggggcaacagtggcactcatcttaaagggttggataataaaataatgcatgtaaggccctcagcatagtgcctggcacagaattactgctcaaatgttagctgtcgtattaatattgtcacttttgcacactgatgtacatttcctgttgaccaggctcattctttaagcattctccatgcttaaaccagttccataatccctaggcctgtactccagggattgagactgaaaggatcatttatgccatgtttctctaaaagcatcattgctggaagacttttgataagtctgatgtgtctcaagctattctcaggccttttttgtagagtttagaaatgaagtatttgaatcaatttagtatctcctttactatgtttctccttttaatctcagccaaccccctacctgcaggtaaacccagcattcattaagagctgggttggggtactctattctgtatgcatcataatagcttaacattatttagtagctgtaacttacaggtttaatgctagatgaggatgtctcaagccgtgagtgtgcttgtgtaaaaatggtggcaacatcatctcgttggtaggaattttttacttgaattgttattttgggaaaatgttaacagatttcttctggataaagaaaataaattggatgatgtatattttatgtttctttttagcttctcttaaaatcagaatattgaacagaattctgatatgctgaatatatatagtgcatggctgaaactccagcaccaactgggtgcttcaaatgaagtcatagaataattccatctagagctgacagaaatctttcagagccttcattattaaatttgttatagatttagttatca

SEQ ID NO: 345063 - DNA, 3957 bp, Homo sapiens
ctcccaggttgcgtttccttcctgtgtgaggccggctgagggcacttgctcttgctgtttctgcccctgggttaacattcaagatggtacatgctgaagccttttctcgtcctttgagtcggaatgaagttgttggtttaattttccgtttgacaatatttggtgcagtgacatactttactatcaaatggatggtagatgcaattgatccaaccagaaagcaaaaagtagaagctcagaaacaggcagaaaaactaatgaagcaaattggagtgaaaaatgtgaagctctcagaatatgaaatgagtattgctgctcatcttgtagaccctcttaatatgcatgttacttggagtgatatagcaggtttagatgatgtcattacggatctgaaagacacagtcatcttacctatcaaaaagaaacatttgtttgagaattccaggcttctgcagcctccaaaaggtgttcttctctatgggcctccaggctgtggtaaaacgttgattgccaaggccacagccaaagaagcaggctgtcgatttattaaccttcagccttcgacactgaccgataagtggtatggagaatctcagaaattggctgctgctgtcttctcccttgccataaagctacaaccatccatcatctttatagatgaaatagactcctttctacgaaaccgttcaagttctgaccatgaagctacagccatgatgaaagctcagtttatgagtctctgggatggattggatactgatcacagctgccaggtcatagtaatgggagctaccaatcgtcctcaggaccttgactcggctataatgagaagaatgcctacaagatttcatatcaaccagcctgctttaaaacagagagaagcaatcctgaaactcatcttgaaaaatgaaaatgtggataggcatgtagacctgctagaagttgcccaggaaactgatgggttttcaggaagtgacctaaaagagatgtgtcgagatgctgccctcctctgtgttagagaatatgttaattctacatcagaagaaagccatgacgaagatgaaattcggcctgttcaacagcaggacctgcatcgggcaattggtttagattaagagtaaagatcatttgtacagttcagtgatctagtttggtgtgtcctcttatcagttagtggaaatagaacggaaagagtgctctttaaacaatgagggagctcagtgtttatggttttatactctgaattctaagttattgagatatagttgttacataggtggtattactgttggtcaaaaatcatgaggaggaacagttgaatccagcctgaacgtgggtgcttgtgtttgaccttttcagccatatattgtacagccttatagaatctaagctggtcttaaagtcataaatgattcattgggtcattagtgagaaacggggatgtggttaggtgctggttcctagacatgtgagtatgcgtttgtgtgtgtgcgtgtatgtatgtgtatattaaatgtatatatccacacattttatattgacattctgtagatatgtttgaatatagaaactttttttaccccaactactgaatccaggagtaccaaataatatatagtaaaactaagatttaaggttgtgtcaaaaaggtacagtgattcagccatttccatttgtcatttgtttcaaccttttttaagttgagtgtttttatttctgcagttattagttggatcctccacatcttgcatatatacatgggctcaattattatgtttgtcaggataatcaaatgaaaatactagttcagtgatcagcattgaatggttgttaggcagccatgtgctcaacactgatttcacctcttgagtataaactttttaaatttaaattggtttacatgaaagtggattaaaaggcctttcaaaagaatgggtttgaaaaacctcagtaccctttaatacatgtacatttctttccttttttcatttaatgtaacatgtctgttgtaactatgtttcttaaatattattttaaggttatgtgttctttaattatggtcaaatataatttggtcaccaaaaatgaaataatagtttaaaacaagtagctgttactaagtgtgctaaaaatactcattttataattaattttagttttcttagtatattattataaattgtgccctaagtcaggtacaaatgtacacatcaaaatgcccatattgtatctatctgtagtcgtttaatgtgaattatatgtgaatttttttcaaaattttactaaccagaattctgttataggcacctaaccacgcagcatgaggaaaacggcacaacacaatcttgaggtgccttctgaatcatcagattaaattatgcttcatatgtttttgcttttactgtatttctttaaaaactctaaatctttattcatgtgtcactggattaatttatctgataatgtgtctcacaagaatctgttagatcgtttattcttcagttgtactttgaatggtggggtggaagtttcaggtgaacaatggataacaaaaagcaagttatggaagattgtgaagaggatggaaaaactgaatacaagataccaaaaatgaaaaaaagtgtcccatttttaataactatattctattattttataaatgtgtaataaaggggtccctctttattggttgttctccacttaatctttggtctttttcagtaattttaagttttctgggattttttttggtttataaaacttgtgtttagactttatcttgctatggagttttcacacttctataggcacatatcctagtatctagtcatttctgttttaatatgaatttcagtaatttaattttaatctggtgacatattaatcgaaaataaggagtaatgtatacctccacatgtcctttctttttgtcttctcttaaattcacaatatccagtaggagtggttattcaatttcttcgtggttttaatcatcaaatgaagttagagaagtatactaatcccagcaactatgactcatctaggcatgttaagaccataaagtaattcaggaaactattttcctgatttttaaataacttttagtgttatgtaacatctatccttctgttttagacatgcatttcacatatagttgaattctagattctaagataattcattttgggtaatacttcagagtactggatctagaatcaggcttcctgaatttaaactcaggctccccattaactgtgtgtctgtgagcccagtttctcatctgtaaaatggggcaacagtggcactcatcttaaagggttggataataaaataatgcatgtaaggccctcagcatagtgcctggcacagaattactgctcaaatgttagctgtcgtattaatattgtcacttttgcacactgatgtacatttcctgttgaccaggctcattctttaagcattctccatgcttaaaccagttccataatccctaggcctgtactccagggattgagactgaaaggatcatttatgccatgtttctctaaaagcatcattgctggaagacttttgataagtctgatgtgtctcaagctattctcaggccttttttgtagagtttagaaatgaagtatttgaatcaatttagtatctcctttactatgtttctccttttaatctcagccaaccccctacctgcaggtaaacccagcattcattaagagctgggttggggtactctattctgtatgcatcataatagcttaacattatttagtagctgtaacttacaggtttaatgctagatgaggatgtctcaagccgtgagtgtgcttgtgtaaaaatggtggcaacatcatctcgttggtaggaattttttacttgaattgttattttgggaaaatgttaacagatttcttctggataaagaaaataaattggatgatgtatatttta

SEQ ID NO: 345064 - DNA, 576 bp, Homo sapiens
tcctgggctcaagcattcctcccactttgcctcccaaaatgctgagatttactggcatgagctactgcgcctggcatatcagctttttgtgtatgtgtctttagagatgcagtcccttggccagtataatttttacaagtctgaaattccagtttctaatcgtgtttattttgttagaaactgatttttttttctccttaagtcatgacagaggcattctatcaggtataattaattggtcacagttgaatcatgatgagatggcttagtttataatccaaattcatgtgagaaggacatatttctttgctctgttttctactctgtttattagaaaaaattagtattgaagtatttttcttaaggcagaataatattgaaataggggtattgtaacggcatattttacttcagatctaaagtttaaatatgatggttttaatctcaaaagaaatagtaaaattgctgtgtatgccaagaaaacttgtacaaacgtaatcttcataaaccaatagtaatatatatttatttctggttggttattttttaagctgccttcagtaggagcttttgctc

SEQ ID NO: 345065 - DNA, 467 bp, Homo sapiens
tgtagacactgggttttgtcatgttgcccaggctggactcaaactcctggcctcaagcaatcgcctgcctcagcctcccaaagtgctgggattacaagtgtaagacactacatccaacctacacttttaaaaattatcccacagttcttggatattctgctgtttttaaaaattttccattcctttttgaaatctttcaatttcaatttgggaagtttctattgacatatcttcaagttcactgattctttctggctgtgttcagtcttatgagcccatcaaagtcattcatctctgtttcagtgttttatttctagctttttcttttttttttttgagacagagtttcgctcttgttgcccaggctggagtgcaatgacacgatcttggctcactgcaacctccacctcccggattcaagctattctcctgcctcagcctctcgagtagctgggattacaggcatg

SEQ ID NO: 345066 - DNA, 2694 bp, Homo sapiens
tccgcgatgggcggaagtggtgaggcagctctgagggccgttgttcagtgcggggtctgacagaggaggctccgtgtctgcagctagtgtgtcaactcagcgtttctcctctcgtccctggaagagctaaagatggctgaatttctagatgaccaggaaactcgactgtgtgacaactgcaaaaaagaaattcctgtgtttaactttaccatccatgagatccactgtcaaaggaacattggtatgtgtcctacctgtaaggaaccatttcccaaatctgacatggagactcacatggctgcagaacactgtcaggtgacctgcaaatgtaacaagaagttggagaagaggctgttaaagaagcatgaggagactgagtgccctttgcggcttgctgtctgccagcactgtgatttagaactttccattctcaaactgaaggaacatgaagattattgtggtgcccggacggaactatgtggcaactgtggtcgcaatgtccttgtgaaagatctgaagactcaccctgaagtttgtgggagagagggggaggaaaagagaaatgaggttgccatacctcctaatgcatatgatgaatcttggggtcaggatggaatctggattgcatcccaactcctcagacaaattgaggctctggacccacccatgaggctgccgcgaaggcccctgagagcctttgaatcagatgttttccacaatagaactaccaaccaaaggaacattacagcccaggtttcaattcagaataatctgtttgaagaacaagagaggcaggaaaggaatagaggccaacagccccccaaagagggtggtgaagagagtgcaaacttggacttcatgttggccctaagtctgcaaaatgaaggccaagcctccagtgtggcagagcaggacttctggagggccgtatgtgaggccgaccagtctcatggcggtcccaggtctctcagtgacataaagggtgcagctgacgagatcatgttgccttgtgaattttgtgaggagctctacccagaggaactgctgattgaccatcagacaagctgtaacccttcacgtgccttaccttcactcaatactggcagctcttcccccagaggggtggaggaacctgatgtcatcttccagaacttcttgcaacaggctgcaagtaaccagttagactctttgatgggcctgagcaattcacaccctgtggaggagagcatcattatcccatgtgaattctgtggggtacagctggaagaggaggtgctgttccatcaccaggaccagtgtgaccaacgcccagccactgcaaccaaccatgtgacagaggggattcctagactggattcccagcctcaagagacctcaccagagctgcccaggaggcgtgtcagacaccagggagacctgtcttctggttacctggatgatactaagcaggaaacagctaatgggcccacctcctgtctgcctcccagccgacccattaacaatatgacagctacctataaccagctatcgagatcaacatcaggccccagacctgggtgccagcccagctctccttgtgtgccgaagctcagcaactcagacagccaggacatccaggggcggaatcgagacagccagaatggggccatagcccctgggcacgtttcagtgattcgccctcctcaaaatctctacccagaaaacattgtgccctctttctcccctgggccttcagggagatacggagctagtggtaggagtgaaggtggcaggaattcccgggtcacccctgcagctgccaactaccgcagcagaactgcaaaggcaaagccttccaagcaacagggagctggggatgcagaagaggaagaggaggagtaatggtgtctccagagactttacatcggttcctgtcttctgtgcacagcagcacttgccgctgtgcaggcccacctctttggctctttgggtgggagagtttttccagattttagatttttctaggttatggccattttgtgtcttttgaggttgtgctgtgggggtttgggtttgagggaagggagcagggtggcggttgaggaacgcttcagccttagctgctacctttcggcagcagtgaaatacaagctgcagcctcggctgccagggctcccttttgacttattgtcgccactgccccttggtgctgtgtggtcccagtggaaggaggggaagattttggaaacctggtagccaccagtaaggtgattctctgccctgttggggcctaaatttgggggcttttgggcaacctctccgtgtactgcgtctgtccacactcgattgggccccaggtgtgtatgaggcgctctggtaaggtgctcaggccagttgcaatgtctgtcagtaacgaggcttttgatgtgttgagctggaggtgagtggaccgggggctgtgttttaagctgcttccttggcatttggcatcactgccttctgttcccgggggagcatggatcttttgtcctcactgctttctaatggggagggctgagggctccctgtccccacagcaggtatgttgggctctgccccagccccacacttgctctgaaaaccaagtgtcagagccccttccccttgtttttattttactgttataataattattaacttccttgtaatagaaataaagtttgtacttggagttca

SEQ ID NO: 345067 - DNA, 688 bp, Homo sapiens
tccgcgatgggcggaagtggtgaggcagctctgagggccgttgttcagtgcggggtctgacagaggaggctccgtgtctgcagctagtgtgtcaactcagcgtttctcctctcgtccctggaagagctaaagatggctgaatttctagatgaccaggaaactcgactgtgtgacaactgcaaaaaagaaattcctgtgtttaactttaccatccatgagatccactgtcaaaggaacattggtatgtgtcctacctgtaaggaaccatttcccaaatctgacatggagactcacatggctgcagaacactgtcaggtgacctgcaaatgtaacaagaagttggagaagaggctgttaaagaagcatgaggagactgagtgccctttgcggcttgctgtctgccagcactgtgatttagaactttccattctcaaactgaaggaacatgaagattattgtggtgcccggacggaactatgtggcaactgtggtcgcaatgtccttgtgaaagatctgaagactcaccctgaagtttgtgggagagagggggaggaaaagagaaatgaggttgccataccttatgagtgcaatgcgtgaacccccggtggctagaaaggaatccaggatttgaatctgaactccttaaacacaaatgggggcttttttatcccccccatttaggaaaccc

SEQ ID NO: 345068 - DNA, 281 bp, Homo sapiens
ctctgagtttgttgacctttgctcagggacacttcaggagctagtttctaattgttttctttcagtggtaggagtgaaggtggcaggaattcccgggtcacccctgcagctgccaactaccgcagcagaactgcaaagtaaggtgggctccagcccatgatgctcagtgggggactcagacatggtggggcttgtgtggctcctgaagttgtagaagttgttgggaccaggctggttgtggttcaaagattgttcctttggcttttgagaaggaggtttct

SEQ ID NO: 345069 - DNA, 2801 bp, Homo sapiens
  misc_feature (2748)..(2748): n is a, c, g, or t
  misc_feature (2750)..(2750): n is a, c, g, or t
  misc_feature (2752)..(2752): n is a, c, g, or t
  misc_feature (2772)..(2772): n is a, c, g, or t
  misc_feature (2774)..(2775): n is a, c, g, or t
  misc_feature (2777)..(2778): n is a, c, g, or t
  misc_feature (2784)..(2785): n is a, c, g, or t
tccgcgatgggcggaagtggtgaggcagctctgagggccgttgttcagtgcggggtctgacagaggaggctccgtgtctgcagctagtgtgtcaactcagcgtttctcctctcgtccctggaagagctaaagatggctgaatttctagatgaccaggaaactcgactgtgtgacaactgcaaaaaagaaattcctgtgtttaactttaccatccatgagatccactgtcaaaggaacattggtatgtgtcctacctgtaaggaaccatttcccaaatctgacatggagactcacatggctgcagaacactgtcaggtgacctgcaaatgtaacaagaagttggagaagaggctgttaaagaagcatgaggagactgagtgccctttgcggcttgctgtctgccagcactgtgatttagaactttccattctcaaactgaaggaacatgaagattattgtggtgcccggacggaactatgtggcaactgtggtcgcaatgtccttgtgaaagatctgaagactcaccctgaagtttgtgggagagagggggaggaaaagagaaatgaggttgccatacctcctaatgcatatgatgaatcttggggtcaggatggaatctggattgcatcccaactcctcagacaaattgaggctctggacccacccatgaggctgccgcgaaggcccctgagagcctttgaatcagatgttttccacaatagaactaccaaccaaaggaacattacagcccaggtttcaattcagaataatctgtttgaagaacaagagaggcaggaaaggaatagaggccaacagccccccaaagagggtggtgaagagagtgcaaacttggacttcatgttggccctaagtctgcaaaatgaaggccaagcctccagtgtggcagagcaggacttctggagggccgtatgtgaggccgaccagtctcatggcggtcccaggtctctcagtgacataaagggtgcagctgacgagatcatgttgccttgtgaattttgtgaggagctctacccagaggaactgctgattgaccatcagacaagctgtaacccttcacgtgccttaccttcactcaatactggcagctcttcccccagaggggtggaggaacctgatgtcatcttccagaacttcttgcaacaggctgcaagtaaccagttagactctttgatgggcctgagcaattcacaccctgtggaggagagcatcattatcccatgtgaattctgtggggtacagctggaagaggaggtgctgttccatcaccaggaccagtgtgaccaacgcccagccactgcaaccaaccatgtgacagaggggattcctagactggattcccagcctcaagagacctcaccagagctgcccaggaggcgtgtcagacaccagggagacctgtcttctggttacctggatgatactaagcaggaaacagctaatgggcccacctcctgtctgcctcccagccgacccattaacaatatgacagctacctataaccagctatcgagatcaacatcaggccccagacctgggtgccagcccagctctccttgtgtgccgaagctcagcaactcagacagccaggacatccaggggcggaatcgagacagccagaatggggccatagcccctgggcacgtttcagtgattcgccctcctcaaaatctctacccagaaaacattgtgccctctttctcccctgggccttcagggagatacggagctagtggtaggagtgaaggtggcaggaattcccgggtcacccctgcagctgccaactaccgcagcagaactgcaaaggcaaagccttccaagcaacagggagctggggatgcagaagaggaagaggaggagtaatggtgtctccagagactttacatcggttcctgtcttctgtgcacagcagcacttgccgctgtgcaggcccacctctttggctctttgggtgggagagtttttccagattttagatttttctaggttatggccattttgtgtcttttgaggttgtgctgtgggggtttgggtttgagggaagggagcagggtggcggttgaggaacgcttcagccttagctgctacctttcggcagcagtgaaatacaagctgcagcctcggctgccagggctcccttttgacttattgtcgccactgccccttggtgctgtgtggtcccagtggaaggaggggaagattttggaaacctggtagccaccagtaaggtgattctctgccctgttggggcctaaatttgggggcttttgggcaacctctccgtgtactgcgtctgtccacactcgattgggccccaggtgtgtatgaggcgctctggtaaggtgctcaggccagttgcaatgtctgtcagtaacgaggcttttgatgtgttgagctggaggtgagtggaccgggggctgtgttttaagctgcttccttggcatttggcatcactgccttctgttcccgggggagcatggatcttttgtcctcactgctttctaatggggagggctgagggctccctgtccccacagcaggtatgttgggctctgccccagccccacacttgctctgaaaaccaagtgtcagagccccttccccttgtttttattttactgttataataattattaacttccttgtaatagaaataaagtttgtacttggagttcaaaacaaaaacaaaaaaacaaaaaaaacaacaaaggggggcgcgcggcccaaaanantntccccgcggggggcgcccangnntnnacgcgnngtcacccaggtttttt

SEQ ID NO: 345070 - DNA, 2875 bp, Homo sapiens
tccgcgatgggcggaagtggtgaggcagctctgagggccgttgttcagtgcggggtctgacagaggaggctccgtgtctgcagctagtgtgtcaactcagcgtttctcctctcgtccctggaagagctaaagatggctgaatttctagatgaccaggaaactcgactgtgtgacaactgcttagatatgatctttgaaccactaaactaagtgagaaaggcaaaaatgaagtggagagaccagactggtggaggaaagggttcaggatttcatttttgtacagctttacagtgaagtttctaccaacccagccagagagcatgttcctgtagtcaggaagcatccagcctgcttcgaaagcaaaaaagaaattcctgtgtttaactttaccatccatgagatccactgtcaaaggaacattggtatgtgtcctacctgtaaggaaccatttcccaaatctgacatggagactcacatggctgcagaacactgtcaggtgacctgcaaatgtaacaagaagttggagaagaggctgttaaagaagcatgaggagactgagtgccctttgcggcttgctgtctgccagcactgtgatttagaactttccattctcaaactgaaggaacatgaagattattgtggtgcccggacggaactatgtggcaactgtggtcgcaatgtccttgtgaaagatctgaagactcaccctgaagtttgtgggagagagggggaggaaaagagaaatgaggttgccatacctcctaatgcatatgatgaatcttggggtcaggatggaatctggattgcatcccaactcctcagacaaattgaggctctggacccacccatgaggctgccgcgaaggcccctgagagcctttgaatcagatgttttccacaatagaactaccaaccaaaggaacattacagcccaggtttcaattcagaataatctgtttgaagaacaagagaggcaggaaaggaatagaggccaacagccccccaaagagggtggtgaagagagtgcaaacttggacttcatgttggccctaagtctgcaaaatgaaggccaagcctccagtgtggcagagcaggacttctggagggccgtatgtgaggccgaccagtctcatggcggtcccaggtctctcagtgacataaagggtgcagctgacgagatcatgttgccttgtgaattttgtgaggagctctacccagaggaactgctgattgaccatcagacaagctgtaacccttcacgtgccttaccttcactcaatactggcagctcttcccccagaggggtggaggaacctgatgtcatcttccagaacttcttgcaacaggctgcaagtaaccagttagactctttgatgggcctgagcaattcacaccctgtggaggagagcatcattatcccatgtgaattctgtggggtacagctggaagaggaggtgctgttccatcaccaggaccagtgtgaccaacgcccagccactgcaaccaaccatgtgacagaggggattcctagactggattcccagcctcaagagacctcaccagagctgcccaggaggcgtgtcagacaccagggagacctgtcttctggttacctggatgatactaagcaggaaacagctaatgggcccacctcctgtctgcctcccagccgacccattaacaatatgacagctacctataaccagctatcgagatcaacatcaggccccagacctgggtgccagcccagctctccttgtgtgccgaagctcagcaactcagacagccaggacatccaggggcggaatcgagacagccagaatggggccatagcccctgggcacgtttcagtgattcgccctcctcaaaatctctacccagaaaacattgtgccctctttctcccctgggccttcagggagatacggagctagtggtaggagtgaaggtggcaggaattcccgggtcacccctgcagctgccaactaccgcagcagaactgcaaaggcaaagccttccaagcaacagggagctggggatgcagaagaggaagaggaggagtaatggtgtctccagagactttacatcggttcctgtcttctgtgcacagcagcacttgccgctgtgcaggcccacctctttggctctttgggtgggagagtttttccagattttagatttttctaggttatggccattttgtgtcttttgaggttgtgctgtgggggtttgggtttgagggaagggagcagggtggcggttgaggaacgcttcagccttagctgctacctttcggcagcagtgaaatacaagctgcagcctcggctgccagggctcccttttgacttattgtcgccactgccccttggtgctgtgtggtcccagtggaaggaggggaagattttggaaacctggtagccaccagtaaggtgattctctgccctgttggggcctaaatttgggggcttttgggcaacctctccgtgtactgcgtctgtccacactcgattgggccccaggtgtgtatgaggcgctctggtaaggtgctcaggccagttgcaatgtctgtcagtaacgaggcttttgatgtgttgagctggaggtgagtggaccgggggctgtgttttaagctgcttccttggcatttggcatcactgccttctgttcccgggggagcatggatcttttgtcctcactgctttctaatggggagggctgagggctccctgtccccacagcaggtatgttgggctctgccccagccccacacttgctctgaaaaccaagtgtcagagccccttccccttgtttttattttactgttataataattattaacttccttgtaatagaaataaagtttgtacttggagttca

SEQ ID NO: 345071 - DNA, 2540 bp, Homo sapiens
tccgcgatgggcggaagtggtgaggcagctctgagggccgttgttcagtgcggggtctgacagaggaggctccgtgtctgcagctagtgtgtcaactcagcgtttctcctctcgtccctggaagagctaaagatggctgaatttctagatgaccaggaaactcgactgtgtgacaactgcaaaaaagaaattcctgtgtttaactttaccatccatgagatccactgtcaaaggaacattggtatgtgtcctacctgtaaggaaccatttcccaaatctgacatggagactcacatggctgcagaacactgtcaggtgacctgcaaatgtaacaagaagttggagaagaggctgttaaagaagcatgaggagactgagtgccctttgcggcttgctgtctgccagcactgtgatttagaactttccattctcaaactgaaggaacatgaagattattgtggtgcccggacggaactatgtggcaactgtggtcgcaatgtccttgtgaaagatctgaagactcaccctgaagtttgtgggagagagggggaggaaaagagaaatgaggttgccatacctcctaatgcatatgatgaatcttggggtcaggatggaatctggattgcatcccaactcctcagacaaattgaggctctggacccacccatgaggctgccgcgaaggcccctgagagcctttgaatcagatgttttccacaatagaactaccaaccaaaggaacattacagcccaggtttcaattcagaataatctgtttgaagaacaagagaggcaggaaaggaatagaggccaacagccccccaaagagggtggtgaagagagtgcaaacttggacttcatgttggccctaagtctgcaaaatgaaggccaagcctccagtgtggcagagcaggacttctggagggccgtatgtgaggccgaccagtctcatggcggtcccaggtctctcagtgacataaagggtgcagctgacgagatcatgttgccttgtgaattttgtgaggagctctacccagaggaactgctgattgaccatcagacaagctgtaacccttcacgtgccttaccttcactcaatactggcagctcttcccccagaggggtggaggaacctgatgtcatcttccagaacttcttgcaacaggctgcaagtaaccagttagactctttgatgggcctgagcaattcacaccctgtggaggagagcatcattatcccatgtgaattctgtggggtacagctggaagaggaggtgctgttccatcaccaggaccagtgtgaccaacgcccagccactgcaaccaaccatgtgacagaggggattcctagactggattcccagcctcaagagacctcaccagagctgcccaggaggcgtgtcagacaccagggagacctgtcttctggttacctggatgatactaagcaggaaacagctaatgggcccacctcctgtctgcctcccagccgacccattaacaatatgacagctacctataaccagctatcgagatcaacatcaggccccagacctgggtgccagcccagctctccttgtgtgccgaagctcagcaactcagacagccaggacatccaggggcggaatcgagacagccagaatggggccatagcccctgggcacgtttcagtgattcgccctcctcaaaatctctacccagaaaacattgtgccctctttctcccctgggccttcagggagatacggagctagtggtaggagtgaaggtggcaggaattcccgggtcacccctgcagctgccaactaccgcagcagaactgcaaaggcaaagccttccaagcaacagggagctggggatgcagaagaggaagaggaggagtaatggtgtctccagagactttacatcggttcctgtcttctgtgcacagcagcacttgccgctgtgcaggcccacctctttggctctttgggtgggagagtttttccagattttagatttttctaggttatggccattttgtgtcttttgaggttgtgctgtgggggtttgggtttgagggaagggagcagggtggcggttgaggaacgcttcagccttagctgctacctttcggcagcagtgaaatacaagctgcagcctcggctgccagggctcccttttgacttattgtcgccactgccccttggtgctgtgtggtcccagtggaaggaggggaagattttggaaacctggtagccaccagtaaggtgattctctgccctgttggggcctaaatttgggggcttttgggcaacctctccgtgtactgcgtctgtccacactcgattgggccccaggtgtgtatgaggcgctctggtaaggtgctcaggccagttgcaatgtctgtcagtaacgaggcttttgatgtgttgagctggaggtgagtggaccgggggctgtgttttaagctgcttccttggcatttggcatcactgccttctgttcccgggacggtgcgttgcccaacgggatcctgtagaatcgactacaaggatacagct

SEQ ID NO: 345072 - DNA, 2338 bp, Homo sapiens
tccgcgatgggcggaagtggtgaggcagctctgagggccgttgttcagtgcggggtctgacagaggaggctccgtgtctgcagctagtgtgtcaactcagcgtttctcctctcgtccctggaagagctaaagatggctgaatttctagatgaccaggaaactcgactgtgtgacaactgcaaaaaagaaattcctgtgtttaactttaccatccatgagatccactgtcaaaggaacattggtatgtgtcctacctgtaaggaaccatttcccaaatctgacatggagactcacatggctgcagaacactgtcaggtgacctgcaaatgtaacaagaagttggagaagaggctgttaaagaagcatgaggagactgagtgccctttgcggcttgctgtctgccagcactgtgatttagaactttccattctcaaactgaaggaacatgaagattattgtggtgcccggacggaactatgtggcaactgtggtcgcaatgtccttgtgaaagatctgaagactcaccctgaagtttgtgggagagagggggaggaaaagagaaatgaggttgccatacctcctaatgcatatgatgaatcttggggtcaggatggaatctggattgcatcccaactcctcagacaaattgaggctctggacccacccatgaggctgccgcgaaggcccctgagagcctttgaatcagatgttttccacaatagaactaccaaccaaaggaacattacagcccaggtttcaattcagaataatctgtttgaagaacaagagaggcaggaaaggaatagaggccaacagccccccaaagagggtggtgaagagagtgcaaacttggacttcatgttggccctaagtctgcaaaatgaaggccaagcctccagtgtggcagagcaggacttctggagggccgtatgtgaggccgaccagtctcatggcggtcccaggtctctcagtgacataaagggtgcagctgacgagatcatgttgccttgtgaattttgtgaggagctctacccagaggaactgctgattgaccatcagacaagctgtaacccttcacgtgccttaccttcactcaatactggcagctcttcccccagaggggtggaggaacctgatgtcatcttccagaacttcttgcaacaggctgcaagtaaccagttagactctttgatgggcctgagcaattcacaccctgtggaggagagcatcattatcccatgtgaattctgtggggtacagctggaagaggaggtgctgttccatcaccaggaccagtgtgaccaacgcccagccactgcaaccaaccatgtgacagaggggattcctagactggattcccagcctcaagagacctcaccagagctgcccaggaggcgtgtcagacaccagggagacctgtcttctggttacctggatgatactaagcaggaaacagctaatgggcccacctcctgtctgcctcccagccgacccattaacaatatgacagctacctataaccagctatcgagatcaacatcaggccccagacctgggtgccagcccagctctccttgtgtgccgaagctcagcaactcagacagccaggacatccaggggcggaatcgagacagccagaatggggccatagcccctgggcacgtttcagtgattcgccctcctcaaaatctctacccagaaaacattgtgccctctttctcccctgggccttcagggagatacggagctagtggtaggagtgaaggtggcaggaattcccgggtcacccctgcagctgccaactaccgcagcagaactgcaaaggcaaagccttccaagcaacagggagctggggatgcagaagaggaagaggaggagtaatggtgtctccagagactttacatcggttcctgtcttctgtgcacagcagcacttgccgctgtgcaggcccacctctttggctctttgggtgggagagtttttccagattttagatttttctaggttatggccattttgtgtcttttgaggttgtgctgtgggggtttgggtttgagggaagggagcagggtggcggttgaggaacgcttcagccttagctgctacctttcggcagcagtgaaatacaagctgcagcctcggctgccagggctcccttttgacttattgtcgccactgccccttggtgctgtgtggtcccaggtatgttgggctctgccccagccccacacttgctctgaaaaccaagtgtcagagccccttccccttgtttttattttactgttataataattattaacttccttgtaatagaaataaagtttgtacttggagttca

SEQ ID NO: 345073 - DNA, 2450 bp, Homo sapiens
  misc_feature (2397)..(2397): n is a, c, g, or t
  misc_feature (2399)..(2399): n is a, c, g, or t
  misc_feature (2401)..(2401): n is a, c, g, or t
  misc_feature (2421)..(2421): n is a, c, g, or t
  misc_feature (2423)..(2424): n is a, c, g, or t
  misc_feature (2426)..(2427): n is a, c, g, or t
  misc_feature (2433)..(2434): n is a, c, g, or t
tccgcgatgggcggaagtggtgaggcagctctgagggccgttgttcagtgcggggtctgacagaggaggctccgtgtctgcagctagtgtgtcaactcagcgtttctcctctcgtccctggaagagctaaagatggctgaatttctagatgaccaggaaactcgactgtgtgacaactgcaaaaaagaaattcctgtgtttaactttaccatccatgagatccactgtcaaaggaacattggtatgtgtcctacctgtaaggaaccatttcccaaatctgacatggagactcacatggctgcagaacactgtcaggtgacctgcaaatgtaacaagaagttggagaagaggctgttaaagaagcatgaggagactgagtgccctttgcggcttgctgtctgccagcactgtgatttagaactttccattctcaaactgaaggaacatgaagattattgtggtgcccggacggaactatgtggcaactgtggtcgcaatgtccttgtgaaagatctgaagactcaccctgaagtttgtgggagagagggggaggaaaagagaaatgaggttgccatacctcctaatgcatatgatgaatcttggggtcaggatggaatctggattgcatcccaactcctcagacaaattgaggctctggacccacccatgaggctgccgcgaaggcccctgagagcctttgaatcagatgttttccacaatagaactaccaaccaaaggaacattacagcccaggtttcaattcagaataatctgtttgaagaacaagagaggcaggaaaggaatagaggccaacagccccccaaagagggtggtgaagagagtgcaaacttggacttcatgttggccctaagtctgcaaaatgaaggccaagcctccagtgtggcagagcaggacttctggagggccgtatgtgaggccgaccagtctcatggcggtcccaggtctctcagtgacataaagggtgcagctgacgagatcatgttgccttgtgaattttgtgaggagctctacccagaggaactgctgattgaccatcagacaagctgtaacccttcacgtgccttaccttcactcaatactggcagctcttcccccagaggggtggaggaacctgatgtcatcttccagaacttcttgcaacaggctgcaagtaaccagttagactctttgatgggcctgagcaattcacaccctgtggaggagagcatcattatcccatgtgaattctgtggggtacagctggaagaggaggtgctgttccatcaccaggaccagtgtgaccaacgcccagccactgcaaccaaccatgtgacagaggggattcctagactggattcccagcctcaagagacctcaccagagctgcccaggaggcgtgtcagacaccagggagacctgtcttctggttacctggatgatactaagcaggaaacagctaatgggcccacctcctgtctgcctcccagccgacccattaacaatatgacagctacctataaccagctatcgagatcaacatcaggccccagacctgggtgccagcccagctctccttgtgtgccgaagctcagcaactcagacagccaggacatccaggggcggaatcgagacagccagaatggggccatagcccctgggcacgtttcagtgattcgccctcctcaaaatctctacccagaaaacattgtgccctctttctcccctgggccttcagggagatacggagctagtggtaggagtgaaggtggcaggaattcccgggtcacccctgcagctgccaactaccgcagcagaactgcaaagtggaaggaggggaagattttggaaacctggtagccaccagtaaggtgattctctgccctgttggggcctaaatttgggggcttttgggcaacctctccgtgtactgcgtctgtccacactcgattgggccccaggtgtgtatgaggcgctctggtaaggtgctcaggccagttgcaatgtctgtcagtaacgaggcttttgatgtgttgagctggaggtgagtggaccgggggctgtgttttaagctgcttccttggcatttggcatcactgccttctgttcccgggggagcatggatcttttgtcctcactgctttctaatggggagggctgagggctccctgtccccacagcaggtatgttgggctctgccccagccccacacttgctctgaaaaccaagtgtcagagccccttccccttgtttttattttactgttataataattattaacttccttgtaatagaaataaagtttgtacttggagttcaaaaaagaaacaaaaaaacaaacaagcgaaacaaaaacaaaaaaacaaaaaaaacaacaaaggggggcgcgcggcccaaaanantntccccgcggggggcgcccangnntnnacgcgnngtcacccaggtttttt

SEQ ID NO: 345074 - DNA, 1967 bp, Homo sapiens
tccgcgatgggcggaagtggtgaggcagctctgagggccgttgttcagtgcggggtctgacagaggaggctccgtgtctgcagctagtgtgtcaactcagcgtttctcctctcgtccctggaagagctaaagatggctgaatttctagatgaccaggaaactcgactgtgtgacaactgcaaaaaagaaattcctgtgtttaactttaccatccatgagatccactgtcaaaggaacattggtatgtgtcctacctgtaaggaaccatttcccaaatctgacatggagactcacatggctgcagaacactgtcaggtgacctgcaaatgtaacaagaagttggagaagaggctgttaaagaagcatgaggagactgagtgccctttgcggcttgctgtctgccagcactgtgatttagaactttccattctcaaactgaaggaacatgaagattattgtggtgcccggacggaactatgtggcaactgtggtcgcaatgtccttgtgaaagatctgaagactcaccctgaagtttgtgggagagagggggaggaaaagagaaatgaggttgccatacctcctaatgcatatgatgaatcttggggtcaggatggaatctggattgcatcccaactcctcagacaaattgaggctctggacccacccatgaggctgccgcgaaggcccctgagagcctttgaatcagatgttttccacaatagaactaccaaccaaaggaacattacagcccaggtttcaattcagaataatctgtttgaagaacaagagaggcaggaaaggaatagaggccaacagccccccaaagagggtggtgaagagagtgcaaacttggacttcatgttggccctaagtctgcaaaatgaaggccaagcctccagtgtggcagagcaggacttctggagggccgtatgtgaggccgaccagtctcatggcggtcccaggtctctcagtgacataaagggtgcagctgacgagatcatgttgccttgtgaattttgtgaggagctctacccagaggaactgctgattgaccatcagacaagctgtaacccttcacgtgccttaccttcactcaatactggcagctcttcccccagaggggtggaggaacctgatgtcatcttccagaacttcttgcaacaggctgcaagtaaccagttagactctttgatgggcctgagcaattcacaccctgtggaggagagcatcattatcccatgtgaattctgtggggtacagctggaagaggaggtgctgttccatcaccaggaccagtgtgaccaacgcccagccactgcaaccaaccatgtgacagaggggattcctagactggattcccagcctcaagagacctcaccagagctgcccaggaggcgtgtcagacaccagggagacctgtcttctggttacctggatgatactaagcaggaaacagctaatgggcccacctcctgtctgcctcccagccgacccattaacaatatgacagctacctataaccagctatcgagatcaacatcaggccccagacctgggtgccagcccagctctccttgtgtgccgaagctcagcaactcagacagccaggacatccaggggcggaatcgagacagccagaatggggccatagcccctgggcacgtttcagtgattcgccctcctcaaaatctctacccagaaaacattgtgccctctttctcccctgggccttcagggagatacggagctagtggtaggagtgaaggtggcaggaattcccgggtcacccctgcagctgccaactaccgcagcagaactgcaaagtaaggtgggctccagcccatgatgctcagtgggggactcagacatggtggggcttgtgtggctcctgaagttgtagaagttgttgggaccaggctggttgtggttcaaagattgttcctttggcttttgagaaggaggtttct

SEQ ID NO: 345075 - DNA, 1945 bp, Homo sapiens
tccgcgatgggcggaagtggtgaggcagctctgagggccgttgttcagtgcggggtctgacagaggaggctccgtgtctgcagctagtgtgtcaactcagcgtttctcctctcgtccctggaagagctaaagatggctgaatttctagatgaccaggaaactcgactgtgtgacaactgcaaaaaagaaattcctgtgtttaactttaccatccatgagatccactgtcaaaggaacattggtatgtgtcctacctgtaaggaaccatttcccaaatctgacatggagactcacatggctgcagaacactgtcaggtgacctgcaaatgtaacaagaagttggagaagaggctgttaaagaagcatgaggagactgagtgccctttgcggcttgctgtctgccagcactgtgatttagaactttccattctcaaactgaaggaacatgaagattattgtggtgcccggacggaactatgtggcaactgtggtcgcaatgtccttgtgaaagatctgaagactcaccctgaagtttgtgggagagagggggaggaaaagagaaatgaggttgccatacctcctaatgcatatgatgaatcttggggtcaggatggaatctggattgcatcccaactcctcagacaaattgaggctctggacccacccatgaggctgccgcgaaggcccctgagagcctttgaatcagatgttttccacaatagaactaccaaccaaaggaacattacagcccaggtttcaattcagaataatctgtttgaagaacaagagaggcaggaaaggaatagaggccaacagccccccaaagagggtggtgaagagagtgcaaacttggacttcatgttggccctaagtctgcaaaatgaaggccaagcctccagtgtggcagagcaggacttctggagggccgtatgtgaggccgaccagtctcatggcggtcccaggtctctcagtgacataaagggtgcagctgacgagatcatgttgccttgtgaattttgtgaggagctctacccagaggaactgctgattgaccatcagacaagctgtaacccttcacgtgccttaccttcactcaatactggcagctcttcccccagaggggtggaggaacctgatgtcatcttccagaacttcttgcaacaggctgcaagtaaccagttagactctttgatgggcctgagcaattcacaccctgtggaggagagcatcattatcccatgtgaattctgtggggtacagctggaagaggaggtgctgttccatcaccaggaccagtgtgaccaacgcccagccactgcaaccaaccatgtgacagaggggattcctagactggattcccagcctcaagagacctcaccagagctgcccaggaggcgtgtcagacaccagggagacctgtcttctggttacctggatgatactaagcaggaaacagctaatgggcccacctcctgtctgcctcccagccgacccattaacaatatgacagctacctataaccagctatcgagatcaacatcaggccccagacctgggtgccagcccagctctccttgtgtgccgaagctcagcaactcagacagccaggacatccaggggcggaatcgagacagccagaatggggccatagcccctgggcacgtttcagtgattcgccctcctcaaaatctctacccagaaaacattgtgccctctttctcccctgggccttcagggagatacggagctaggtaagaatcagtagcccaggaatggggcttgggagtagctgaagcgaacatgggcaaaggcctggttacccttgccaggcctggggtaagactgaggtacttgcatggtaaggggaggagtatggattttccctgtattgtcacctgactccaaaaaaaaaattattttgtggcctatgggttttttggggttt

SEQ ID NO: 345076 - DNA, 2487 bp, Homo sapiens
  misc_feature (786)..(786): n is a, c, g, or t
  misc_feature (834)..(834): n is a, c, g, or t
  misc_feature (862)..(862): n is a, c, g, or t
ggctgggttgaggctgcagaacactgtcaggtgacctgcaaatgtaacaagaagttggagaagaggctgttaaagaagcatgaggagactgagtgccctttgcggcttgctgtctgccagcactgtgatttagaactttccattctcaaactgaaggaacatgaagattattgtggtgcccggacggaactatgtggcaactgtggtcgcaatgtccttgtgaaagatctgaagactcaccctgaagtttgtgggagagagggggaggaaaagagaaatgaggttgccatacctcctaatgcatatgatgaatcttggggtcaggatggaatctggattgcatcccaactcctcagacaaattgaggctctggacccacccatgaggctgccgcgaaggcccctgagagcctttgaatcagatgttttccacaatagaactaccaaccaaaggaacattacagcccaggtttcaattcagaataatctgtttgaagaacaagagaggcaggaaaggaatagaggccaacagccccccaaagagggtggtgaagagagtgcaaacttggacttcatgttggccctaagtctgcaaaatgaaggccaagcctccagtgtggcagagcaggacttctggagggccgtatgtgaggccgaccagtctcatggcggtcccaggtctctcagtgacataaagggtgcagctgacgagatcatgttgccttgtgaattttgtgaggagctctacccagaggaactgctgattgaccatcagacaagctgtaanccttcacgtgccttacccttcgacatccaaataagctggaccagggcntccgtgtcccccacgcccaggaagcgcngggcatgggggaacggcggaaaaccccggtgagaactggggttccaagttccgtgtccgcaaagggaaaaacccgatctatcgtgtggcaaacaggctgcaagtaaccagttagactctttgatgggcctgagcaattcacaccctgtggaggagagcatcattatcccatgtgaattctgtggggtacagctggaagaggaggtgctgttccatcaccaggaccagtgtgaccaacgcccagccactgcaaccaaccatgtgacagaggggattcctagactggattcccagcctcaagagacctcaccagagctgcccaggaggcgtgtcagacaccagggagacctgtcttctggttacctggatgatactaagcaggaaacagctaatgggcccacctcctgtctgcctcccagccgacccattaacaatatgacagctacctataaccagctatcgagatcaacatcaggccccagacctgggtgccagcccagctctccttgtgtgccgaagctcagcaactcagacagccaggacatccaggggcggaatcgagacagccagaatggggccatagcccctgggcacgtttcagtgattcgccctcctcaaaatctctacccagaaaacattgtgccctctttctcccctgggccttcagggagatacggagctagtggtaggagtgaaggtggcaggaattcccgggtcacccctgcagctgccaactaccgcagcagaactgcaaaggcaaagccttccaagcaacagggagctggggatgcagaagaggaagaggaggagtaatggtgtctccagagactttacatcggttcctgtcttctgtgcacagcagcacttgccgctgtgcaggcccacctctttggctctttgggtgggagagtttttccagattttagatttttctaggttatggccattttgtgtcttttgaggttgtgctgtgggggtttgggtttgagggaagggagcagggtggcggttgaggaacgcttcagccttagctgctacctttcggcagcagtgaaatacaagctgcagcctcggctgccagggctcccttttgacttattgtcgccactgccccttggtgctgtgtggtcccagtggaaggaggggaagattttggaaacctggtagccaccagtaaggtgattctctgccctgttggggcctaaatttgggggcttttgggcaacctctccgtgtactgcgtctgtccacactcgattgggccccaggtgtgtatgaggcgctctggtaaggtgctcaggccagttgcaatgtctgtcagtaacgaggcttttgatgtgttgagctggaggtgagtggaccgggggctgtgttttaagctgcttccttggcatttggcatcactgccttctgttcccgggggagcatggatcttttgtcctcactgctttctaatggggagggctgagggctccctgtccccacagcaggtatgttgggctctgccccagccccacacttgctctgaaaaccaagtgtcagagccccttccccttgtttttattttactgttataataattattaacttccttgtaatagaaataaagtttgtacttggagttca

SEQ ID NO: 345077 - DNA, 1527 bp, Homo sapiens
atatgagctggcccactattccacggttggctcaccaattcacaccctgtggaggagagcatcattatcccatgtgaattctgtggggtacagctggaagaggaggtgctgttccatcaccaggaccagtgtgaccaacgcccagccactgcaaccaaccatgtgacagaggggattcctagactggattcccagcctcaagagacctcaccagagctgcccaggaggcgtgtcagacaccagggagacctgtcttctggttacctggatgatactaagcaggaaacagctaatgggcccacctcctgtctgcctcccagccgacccattaacaatatgacagctacctataaccagctatcgagatcaacatcaggccccagacctgggtgccagcccagctctccttgtgtgccgaagctcagcaactcagacagccaggacatccaggggcggaatcgagacagccagaatggggccatagcccctgggcacgtttcagtgattcgccctcctcaaaatctctacccagaaaacattgtgccctctttctcccctgggccttcagggagatacggagctagtggtaggagtgaaggtggcaggaattcccgggtcacccctgcagctgccaactaccgcagcagaactgcaaaggcaaagccttccaagcaacagggagctggggatgcagaagaggaagaggaggagtaatggtgtctccagagactttacatcggttcctgtcttctgtgcacagcagcacttgccgctgtgcaggcccacctctttggctctttgggtgggagagtttttccagattttagatttttctaggttatggccattttgtgtcttttgaggttgtgctgtgggggtttgggtttgagggaagggagcagggtggcggttgaggaacgcttcagccttagctgctacctttcggcagcagtgaaatacaagctgcagcctcggctgccagggctcccttttgacttattgtcgccactgccccttggtgctgtgtggtcccagtggaaggaggggaagattttggaaacctggtagccaccagtaaggtgattctctgccctgttggggcctaaatttgggggcttttgggcaacctctccgtgtactgcgtctgtccacactcgattgggccccaggtgtgtatgaggcgctctggtaaggtgctcaggccagttgcaatgtctgtcagtaacgaggcttttgatgtgttgagctggaggtgagtggaccgggggctgtgttttaagctgcttccttggcatttggcatcactgccttctgttcccgggggagcatggatcttttgtcctcactgctttctaatggggagggctgagggctccctgtccccacagcaggtatgttgggctctgccccagccccacacttgctctgaaaaccaagtgtcagagccccttccccttgtttttattttactgttataataattattaacttccttgtaatagaaataaagtttgtacttggagttca

SEQ ID NO: 345078 - DNA, 1280 bp, Homo sapiens
tccgcgatgggcggaagtggtgaggcagctctgagggccgttgttcagtgcggggtctgacagaggaggctccgtgtctgcagctagtgtgtcaactcagcgtttctcctctcgtccctggaagagctaaagatggctgaatttctagatgaccaggaaactcgactgtgtgacaactgcaaaaaagaaattcctgtgtttaactttaccatccatgagatccactgtcaaaggaacattggtatgtgtcctacctgtaaggaaccatttcccaaatctgacatggagactcacatggctgcagaacactgtcaggtgacctgcaaatgtaacaagaagttggagaagaggctgttaaagaagcatgaggagactgagtgccctttgcggcttgctgtctgccagcactgtgatttagaactttccattctcaaactgaaggaacatgaagattattgtggtgcccggacggaactatgtggcaactgtggtcgcaatgtccttgtgaaagatctgaagactcaccctgaagtttgtgggagagagggggaggaaaagagaaatgaggttgccatacctcctaatgcatatgatgaatcttggggtcaggatggaatctggattgcatcccaactcctcagacaaattgaggctctggacccacccatgaggctgccgcgaaggcccctgagagcctttgaatcagatgttttccacaatagaactaccaaccaaaggaacattacagcccaggtttcaattcagaataatctgtttgaagaacaagagaggcaggaaaggaatagaggccaacagccccccaaagagggtggtgaagagagtgcaaacttggacttcatgttggccctaagtctgcaaaatgaaggccaagcctccagtgtggcagagcaggacttctggagggccgtatgtgaggccgaccagtctcatggcggtcccaggtctctcagtgacataaagggtgcagctgacgagatcatgttgccttgtgaattttgtgaggagctctacccagaggaactgctgattgaccatcagacaagctgtaacccttcacgtgccttaccttcactcaatactggcagctcttcccccagaggggtggaggaacctgatgtcatcttccagaacttcttgcaacaggctgcaagtaaccagttagactctttgatgggcctgagctcaatcagcagttcctctgggtagagctcctcacaaaattcacaaggcaacatgatctcgtcagctcaccctttatg

SEQ ID NO: 345079 - DNA, 1008 bp, Homo sapiens
ctctgagtttgttgacctttgctcagggacacttcaggagctagtttctaattgttttctttcagtggtaggagtgaaggtggcaggaattcccgggtcacccctgcagctgccaactaccgcagcagaactgcaaaggcaaagccttccaagcaacagggagctggggatgcagaagaggaagaggaggagtaatggtgtctccagagactttacatcggttcctgtcttctgtgcacagcagcacttgccgctgtgcaggcccacctctttggctctttgggtgggagagtttttccagattttagatttttctaggttatggccattttgtgtcttttgaggttgtgctgtgggggtttgggtttgagggaagggagcagggtggcggttgaggaacgcttcagccttagctgctacctttcggcagcagtgaaatacaagctgcagcctcggctgccagggctcccttttgacttattgtcgccactgccccttggtgctgtgtggtcccagtggaaggaggggaagattttggaaacctggtagccaccagtaaggtgattctctgccctgttggggcctaaatttgggggcttttgggcaacctctccgtgtactgcgtctgtccacactcgattgggccccaggtgtgtatgaggcgctctggtaaggtgctcaggccagttgcaatgtctgtcagtaacgaggcttttgatgtgttgagctggaggtgagtggaccgggggctgtgttttaagctgcttccttggcatttggcatcactgccttctgttcccgggggagcatggatcttttgtcctcactgctttctaatggggagggctgagggctccctgtccccacagcaggtatgttgggctctgccccagccccacacttgctctgaaaaccaagtgtcagagccccttccccttgtttttattttactgttataataattattaacttccttgtaatagaaataaagtttgtacttggagttca

SEQ ID NO: 345080 - DNA, 1101 bp, Homo sapiens
tccgcgatgggcggaagtggtgaggcagctctgagggccgttgttcagtgcggggtctgacagaggaggctccgtgtctgcagctagtgtgtcaactcagcgtttctcctctcgtccctggaagagctaaagatggctgaatttctagatgaccaggaaactcgactgtgtgacaactgcaaaaaagaaattcctgtgtttaactttaccatccatgagatccactgtcaaaggaacattggtatgtgtcctacctgtaaggaaccatttcccaaatctgacatggagactcacatggctgcagaacactgtcaggtgacctgcaaatgtaacaagaagttggagaagaggctgttaaagaagcatgaggagactgagtgccctttgcggcttgctgtctgccagcactgtgatttagaactttccattctcaaactgaaggaacatgaagattattgtggtgcccggacggaactatgtggcaactgtggtcgcaatgtccttgtgaaagatctgaagactcaccctgaagtttgtgggagagagggggaggaaaagagaaatgaggttgccatacctcctaatgcatatgatgaatcttggggtcaggatggaatctggattgcatcccaactcctcagacaaattgaggctctggacccacccatgaggctgccgcgaaggcccctgagagcctttgaatcagatgttttccacaatagaactaccaaccaaaggaacattacagcccaggtttcaattcagaataatctgtttgaagaacaagagaggcaggaaaggaatagaggccaacagccccccaaagagggtggtgaagagagtgcaaacttggacttcatgttggccctaagtctgcaaaatgaaggccaagcctccagtgtggcagagcaggacttctggagggccgtatgtgaggccgaccagtctcatggcggtcccaggtctctcagtgacataaagggtaggcttgcttattctgcactagcctctttctctacagttttgtaagtcttaggttatacaattcttatacaattgaaagattttaatgaaatagaatttgccttactcttttttgtt

SEQ ID NO: 345081 - DNA, 364 bp, Homo sapiens
tcttggctcactgcagtcttcacctcctgggtttaagtgattctcctggtctcagcctcctgagtagctgagactatagctgtgtgccacctcacctggctaattttgtattttttttttagtagagatggaatttcaccatgttggccaggctggtctctaactcttgacctcaggtgatccccgcacctcggcctcccaaagtgctgggtttacaggcatgagccaccacgcctggctgagcagttgtcttctatctggaatctttttgttcctgccctaaacctggcactatagccagagcaggctttttcctaaagctgttaccattttctcttctcaggagacctgtcttctggttacc

SEQ ID NO: 345082 - DNA, 410 bp, Homo sapiens
tgaattctgtggggtacagctggaagaggaggtgctgttccatcaccaggtaagggtccctggagtccctgtccatgtggctctgtgcgtgaacctgaggcttccagagctgagaacacttccttagcctttaagttgcattccatcctgacaaggaatgcacacacttggcttctggccaagtcatctttgtgagctgtctgtggtaaccaataccgcaggctttcagactttccctccctttgggcaactgaagccatcttgttactagctgaggaccaaagagccaggactctatttgagcaggtgtggaaggaagccttgtcagagagtttagatgacagtctccctgcttttcaccaggtgggtttttcccattgtggtggcatttgagacttgcattctaggag

SEQ ID NO: 345083 - DNA, 96 bp, Homo sapiens
ccagaggaactgctgattgaccatcaggtgtgttatgaattacttgaggacttttagtaggattgtatgcaggccataattggtgttgcaggccac

SEQ ID NO: 345084 - DNA, 2316 bp, Homo sapiens
tccgcgatgggcggaagtggtgaggcagctctgagggccgttgttcagtgcggggtctgacagaggaggctccgtgtctgcagctagtgtgtcaactcagcgtttctcctctcgtccctggaagagctaaagatggctgaatttctagatgaccaggaaactcgactgtgtgacaactgcaaaaaagaaattcctgtgtttaactttaccatccatgagatccactgtcaaaggaacattggtatgtgtcctacctgtaaggaaccatttcccaaatctgacatggagactcacatggctgcagaacactgtcaggtgacctgcaaatgtaacaagaagttggagaagaggctgttaaagaagcatgaggagactgagtgccctttgcggcttgctgtctgccagcactgtgatttagaactttccattctcaaactgaaggaacatgaagattattgtggtgcccggacggaactatgtggcaactgtggtcgcaatgtccttgtgaaagatctgaagactcaccctgaagtttgtgggagagagggggaggaaaagagaaatgaggttgccatacctcctaatgcatatgatgaatcttggggtcaggatggaatctggattgcatcccaactcctcagacaaattgaggctctggacccacccatgaggctgccgcgaaggcccctgagagcctttgaatcagatgttttccacaatagaactaccaaccaaaggaacattacagcccaggtttcaattcagaataatctgtttgaagaacaagagaggcaggaaaggaatagaggccaacagccccccaaagagggtggtgaagagagtgcaaacttggacttcatgttggccctaagtctgcaaaatgaaggccaagcctccagtgtggcagagcaggacttctggagggccgtatgtgaggccgaccagtctcatggcggtcccaggtctctcagtgacataaagggtgcagctgacgagatcatgttgccttgtgaattttgtgaggagctctacccagaggaactgctgattgaccatcagacaagctgtaacccttcacgtgccttaccttcactcaatactggcagctcttcccccagaggggtggaggaacctgatgtcatcttccagaacttcttgcaacaggctgcaagtaaccagttagactctttgatgggcctgagcaattcacaccctgtggaggagagcatcattatcccatgtgaattctgtggggtacagctggaagaggaggtgctgttccatcaccaggaccagtgtgaccaacgcccagccactgcaaccaaccatgtgacagaggggattcctagactggattcccagcctcaagagacctcaccagagctgcccaggaggcgtgtcagacaccagggagacctgtcttctggttacctggatgatactaagcaggaaacagctaatgggcccacctcctgtctgcctcccagccgacccattaacaatatgacagctacctataaccagctatcgagatcaacatcaggccccagacctgggtgccagcccagctctccttgtgtgccgaagctcagcaactcagacagccaggacatccaggggcggaatcgagacagccagaatggggccatagcccctgggcacgtttcagtgattcgccctcctcaaaatctctacccagaaaacattgtgccctctttctcccctgggccttcagggagatacggagctagtggtaggagtgaaggtggcaggaattcccgggtcacccctgcagctgccaactaccgcagcagaactgcaaagtggaaggaggggaagattttggaaacctggtagccaccagtaaggtgattctctgccctgttggggcctaaatttgggggcttttgggcaacctctccgtgtactgcgtctgtccacactcgattgggccccaggtgtgtatgaggcgctctggtaaggtgctcaggccagttgcaatgtctgtcagtaacgaggcttttgatgtgttgagctggaggtgagtggaccgggggctgtgttttaagctgcttccttggcatttggcatcactgccttctgttcccgggggagcatggatcttttgtcctcactgctttctaatggggagggctgagggctccctgtccccacagcaggtatgttgggctctgccccagccccacacttgctctgaaaaccaagtgtcagagccccttccccttgtttttattttactgttataataattattaacttccttgtaatagaaataaagtttgtacttggagttca

SEQ ID NO: 345085 - DNA, 2772 bp, Homo sapiens
  misc_feature (1071)..(1071): n is a, c, g, or t
  misc_feature (1119)..(1119): n is a, c, g, or t
  misc_feature (1147)..(1147): n is a, c, g, or t
tccgcgatgggcggaagtggtgaggcagctctgagggccgttgttcagtgcggggtctgacagaggaggctccgtgtctgcagctagtgtgtcaactcagcgtttctcctctcgtccctggaagagctaaagatggctgaatttctagatgaccaggaaactcgactgtgtgacaactgcaaaaaagaaattcctgtgtttaactttaccatccatgagatccactgtcaaaggaacattggtatgtgtcctacctgtaaggaaccatttcccaaatctgacatggagactcacatggctgcagaacactgtcaggtgacctgcaaatgtaacaagaagttggagaagaggctgttaaagaagcatgaggagactgagtgccctttgcggcttgctgtctgccagcactgtgatttagaactttccattctcaaactgaaggaacatgaagattattgtggtgcccggacggaactatgtggcaactgtggtcgcaatgtccttgtgaaagatctgaagactcaccctgaagtttgtgggagagagggggaggaaaagagaaatgaggttgccatacctcctaatgcatatgatgaatcttggggtcaggatggaatctggattgcatcccaactcctcagacaaattgaggctctggacccacccatgaggctgccgcgaaggcccctgagagcctttgaatcagatgttttccacaatagaactaccaaccaaaggaacattacagcccaggtttcaattcagaataatctgtttgaagaacaagagaggcaggaaaggaatagaggccaacagccccccaaagagggtggtgaagagagtgcaaacttggacttcatgttggccctaagtctgcaaaatgaaggccaagcctccagtgtggcagagcaggacttctggagggccgtatgtgaggccgaccagtctcatggcggtcccaggtctctcagtgacataaagggtgcagctgacgagatcatgttgccttgtgaattttgtgaggagctctacccagaggaactgctgattgaccatcagacaagctgtaanccttcacgtgccttacccttcgacatccaaataagctggaccagggcntccgtgtcccccacgcccaggaagcgcngggcatgggggaacggcggaaaaccccggtgagaactggggttccaagttccgtgtccgcaaagggaaaaacccgatctatcgtgtggcaaacaggctgcaagtaaccagttagactctttgatgggcctgagcaattcacaccctgtggaggagagcatcattatcccatgtgaattctgtggggtacagctggaagaggaggtgctgttccatcaccaggaccagtgtgaccaacgcccagccactgcaaccaaccatgtgacagaggggattcctagactggattcccagcctcaagagacctcaccagagctgcccaggaggcgtgtcagacaccagggagacctgtcttctggttacctggatgatactaagcaggaaacagctaatgggcccacctcctgtctgcctcccagccgacccattaacaatatgacagctacctataaccagctatcgagatcaacatcaggccccagacctgggtgccagcccagctctccttgtgtgccgaagctcagcaactcagacagccaggacatccaggggcggaatcgagacagccagaatggggccatagcccctgggcacgtttcagtgattcgccctcctcaaaatctctacccagaaaacattgtgccctctttctcccctgggccttcagggagatacggagctagtggtaggagtgaaggtggcaggaattcccgggtcacccctgcagctgccaactaccgcagcagaactgcaaaggcaaagccttccaagcaacagggagctggggatgcagaagaggaagaggaggagtaatggtgtctccagagactttacatcggttcctgtcttctgtgcacagcagcacttgccgctgtgcaggcccacctctttggctctttgggtgggagagtttttccagattttagatttttctaggttatggccattttgtgtcttttgaggttgtgctgtgggggtttgggtttgagggaagggagcagggtggcggttgaggaacgcttcagccttagctgctacctttcggcagcagtgaaatacaagctgcagcctcggctgccagggctcccttttgacttattgtcgccactgccccttggtgctgtgtggtcccagtggaaggaggggaagattttggaaacctggtagccaccagtaaggtgattctctgccctgttggggcctaaatttgggggcttttgggcaacctctccgtgtactgcgtctgtccacactcgattgggccccaggtgtgtatgaggcgctctggtaaggtgctcaggccagttgcaatgtctgtcagtaacgaggcttttgatgtgttgagctggaggtgagtggaccgggggctgtgttttaagctgcttccttggcatttggcatcactgccttctgttcccgggggagcatggatcttttgtcctcactgctttctaatggggagggctgagggctccctgtccccacagcaggtatgttgggctctgccccagccccacacttgctctgaaaaccaagtgtcagagccccttccccttgtttttattttactgttataataattattaacttccttgtaatagaaataaagtttgtacttggagttca

SEQ ID NO: 345086 - DNA, 3226 bp, Homo sapiens
tccgcgatgggcggaagtggtgaggcagctctgagggccgttgttcagtgcggggtctgacagaggaggctccgtgtctgcagctagtgtgtcaactcagcgtttctcctctcgtccctggtgaggtgtagcggcggcacgcggctggagatcccctgtggcctccagtttaggaagggtccagcatcccaagggaggggtgtgtgggcgaggggtctctgggcccggggtcgcggctgtgaggagaggatgcccgcgcggcggcatctcaggcacctggaggaggccgcgctttctcctcagggaaccggcgccttggcagcccccggcgacgccgcccccttcgcggcctaggttggtctggtgagccgggaagcgggcgtcgttcgcagcgccgctgtgaccaccgcgtcccgggcggagctgggctcagtgccggcctgggcctagagtccgagcctcgagctgccggcgtggggggtcgcgagtggcctaatgcggcctcgaagccgaaggacccgagtccgagctcgcactccgacccgctggtgctgtggaaaactcaggtggccttccgctttcgtagcctctaaagtggggaccaagactttcacctcttaggattgtagtcgggattaacaagattttcccggaagagctaaagatggctgaatttctagatgaccaggaaactcgactgtgtgacaactgcaaaaaagaaattcctgtgtttaactttaccatccatgagatccactgtcaaaggaacattggtatgtgtcctacctgtaaggaaccatttcccaaatctgacatggagactcacatggctgcagaacactgtcaggtgacctgcaaatgtaacaagaagttggagaagaggctgttaaagaagcatgaggagactgagtgccctttgcggcttgctgtctgccagcactgtgatttagaactttccattctcaaactgaaggaacatgaagattattgtggtgcccggacggaactatgtggcaactgtggtcgcaatgtccttgtgaaagatctgaagactcaccctgaagtttgtgggagagagggggaggaaaagagaaatgaggttgccatacctcctaatgcatatgatgaatcttggggtcaggatggaatctggattgcatcccaactcctcagacaaattgaggctctggacccacccatgaggctgccgcgaaggcccctgagagcctttgaatcagatgttttccacaatagaactaccaaccaaaggaacattacagcccaggtttcaattcagaataatctgtttgaagaacaagagaggcaggaaaggaatagaggccaacagccccccaaagagggtggtgaagagagtgcaaacttggacttcatgttggccctaagtctgcaaaatgaaggccaagcctccagtgtggcagagcaggacttctggagggccgtatgtgaggccgaccagtctcatggcggtcccaggtctctcagtgacataaagggtgcagctgacgagatcatgttgccttgtgaattttgtgaggagctctacccagaggaactgctgattgaccatcagacaagctgtaacccttcacgtgccttaccttcactcaatactggcagctcttcccccagaggggtggaggaacctgatgtcatcttccagaacttcttgcaacaggctgcaagtaaccagttagactctttgatgggcctgagcaattcacaccctgtggaggagagcatcattatcccatgtgaattctgtggggtacagctggaagaggaggtgctgttccatcaccaggaccagtgtgaccaacgcccagccactgcaaccaaccatgtgacagaggggattcctagactggattcccagcctcaagagacctcaccagagctgcccaggaggcgtgtcagacaccagggagacctgtcttctggttacctggatgatactaagcaggaaacagctaatgggcccacctcctgtctgcctcccagccgacccattaacaatatgacagctacctataaccagctatcgagatcaacatcaggccccagacctgggtgccagcccagctctccttgtgtgccgaagctcagcaactcagacagccaggacatccaggggcggaatcgagacagccagaatggggccatagcccctgggcacgtttcagtgattcgccctcctcaaaatctctacccagaaaacattgtgccctctttctcccctgggccttcagggagatacggagctagtggtaggagtgaaggtggcaggaattcccgggtcacccctgcagctgccaactaccgcagcagaactgcaaaggcaaagccttccaagcaacagggagctggggatgcagaagaggaagaggaggagtaatggtgtctccagagactttacatcggttcctgtcttctgtgcacagcagcacttgccgctgtgcaggcccacctctttggctctttgggtgggagagtttttccagattttagatttttctaggttatggccattttgtgtcttttgaggttgtgctgtgggggtttgggtttgagggaagggagcagggtggcggttgaggaacgcttcagccttagctgctacctttcggcagcagtgaaatacaagctgcagcctcggctgccagggctcccttttgacttattgtcgccactgccccttggtgctgtgtggtcccagtggaaggaggggaagattttggaaacctggtagccaccagtaaggtgattctctgccctgttggggcctaaatttgggggcttttgggcaacctctccgtgtactgcgtctgtccacactcgattgggccccaggtgtgtatgaggcgctctggtaaggtgctcaggccagttgcaatgtctgtcagtaacgaggcttttgatgtgttgagctggaggtgagtggaccgggggctgtgttttaagctgcttccttggcatttggcatcactgccttctgttcccgggggagcatggatcttttgtcctcactgctttctaatggggagggctgagggctccctgtccccacagcaggtatgttgggctctgccccagccccacacttgctctgaaaaccaagtgtcagagccccttccccttgtttttattttactgttataataattattaacttccttgtaatagaaataaagtttgtacttggagttca

SEQ ID NO: 345087 - DNA, 2828 bp, Homo sapiens
  misc_feature (2775)..(2775): n is a, c, g, or t
  misc_feature (2777)..(2777): n is a, c, g, or t
  misc_feature (2779)..(2779): n is a, c, g, or t
  misc_feature (2799)..(2799): n is a, c, g, or t
  misc_feature (2801)..(2802): n is a, c, g, or t
  misc_feature (2804)..(2805): n is a, c, g, or t
  misc_feature (2811)..(2812): n is a, c, g, or t
tccgcgatgggcggaagtggtgaggcagctctgagggccgttgttcagtgcggggtctgacagaggaggctccgtgtctgcagctagtgtgtcaactcagcgtttctcctctcgtccctggaagagctaaagatggctgaatttctagatgaccaggaaactcgactgtgtgacaactgcaaaaaagaaattcctgtgtttaactttaccatccatgagatccactgtcaaaggaacattggtatgtgtcctacctgtaaggaaccatttcccaaatctgacatggagactcacatggctgcagaacactgtcaggtgacctgcaaatgtaacaagaagttggagaagaggctgttaaagaagcatgaggagactgagtgccctttgcggcttgctgtctgccagcactgtgatttagaactttccattctcaaactgaaggaacatgaagattattgtggtgcccggacggaactatgtggcaactgtggtcgcaatgtccttgtgaaagatctgaagactcaccctgaagtttgtgggagagagggggaggaaaagagaaatgaggttgccatacctcctaatgcatatgatgaatcttggggtcaggatggaatctggattgcatcccaactcctcagacaaattgaggctctggacccacccatgaggctgccgcgaaggcccctgagagcctttgaatcagatgttttccacaatagaactaccaaccaaaggaacattacagcccaggtttcaattcagaataatctgtttgaagaacaagagaggcaggaaaggaatagaggccaacagccccccaaagagggtggtgaagagagtgcaaacttggacttcatgttggccctaagtctgcaaaatgaaggccaagcctccagtgtggcagagcaggacttctggagggccgtatgtgaggccgaccagtctcatggcggtcccaggtctctcagtgacataaagggtgcagctgacgagatcatgttgccttgtgaattttgtgaggagctctacccagaggaactgctgattgaccatcagacaagctgtaacccttcacgtgccttaccttcactcaatactggcagctcttcccccagaggggtggaggaacctgatgtcatcttccagaacttcttgcaacaggctgcaagtaaccagttagactctttgatgggcctgagcaattcacaccctgtggaggagagcatcattatcccatgtgaattctgtggggtacagctggaagaggaggtgctgttccatcaccaggaccagtgtgaccaacgcccagccactgcaaccaaccatgtgacagaggggattcctagactggattcccagcctcaagagacctcaccagagctgcccaggaggcgtgtcagacaccagggagacctgtcttctggttacctggatgatactaagcaggaaacagctaatgggcccacctcctgtctgcctcccagccgacccattaacaatatgacagctacctataaccagctatcgagatcaacatcaggccccagacctgggtgccagcccagctctccttgtgtgccgaagctcagcaactcagacagccaggacatccaggggcggaatcgagacagccagaatggggccatagcccctgggcacgtttcagtgattcgccctcctcaaaatctctacccagaaaacattgtgccctctttctcccctgggccttcagggagatacggagctagtggtaggagtgaaggtggcaggaattcccgggtcacccctgcagctgccaactaccgcagcagaactgcaaaggcaaagccttccaagcaacagggagctggggatgcagaagaggaagaggaggagtaatggtgtctccagagactttacatcggttcctgtcttctgtgcacagcagcacttgccgctgtgcaggcccacctctttggctctttgggtgggagagtttttccagattttagatttttctaggttatggccattttgtgtcttttgaggttgtgctgtgggggtttgggtttgagggaagggagcagggtggcggttgaggaacgcttcagccttagctgctacctttcggcagcagtgaaatacaagctgcagcctcggctgccagggctcccttttgacttattgtcgccactgccccttggtgctgtgtggtcccagtggaaggaggggaagattttggaaacctggtagccaccagtaaggtgattctctgccctgttggggcctaaatttgggggcttttgggcaacctctccgtgtactgcgtctgtccacactcgattgggccccaggtgtgtatgaggcgctctggtaaggtgctcaggccagttgcaatgtctgtcagtaacgaggcttttgatgtgttgagctggaggtgagtggaccgggggctgtgttttaagctgcttccttggcatttggcatcactgccttctgttcccgggggagcatggatcttttgtcctcactgctttctaatggggagggctgagggctccctgtccccacagcaggtatgttgggctctgccccagccccacacttgctctgaaaaccaagtgtcagagccccttccccttgtttttattttactgttataataattattaacttccttgtaatagaaataaagtttgtacttggagttcaaaaaagaaacaaaaaaacaaacaagcgaaacaaaaacaaaaaaacaaaaaaaacaacaaaggggggcgcgcggcccaaaanantntccccgcggggggcgcccangnntnnacgcgnngtcacccaggtttttt

SEQ ID NO: 345088 - DNA, 2393 bp, Homo sapiens
  misc_feature (24)..(24): n is a, c, g, or t
catggaagagggcggcgggtgaantcggcacggaggagttggagaagaggctgttaaagaagcatgaggagactgagtgccctttgcggcttgctgtctgccagcactgtgatttagaactttccattctcaaactgaaggaacatgaagattattgtggtgcccggacggaactatgtggcaactgtggtcgcaatgtccttgtgaaagatctgaagactcaccctgaagtttgtgggagagagggggaggaaaagagaaatgaggttgccatacctcctaatgcatatgatgaatcttggggtcaggatggaatctggattgcatcccaactcctcagacaaattgaggctctggacccacccatgaggctgccgcgaaggcccctgagagcctttgaatcagatgttttccacaatagaactaccaaccaaaggaacattacagcccaggtttcaattcagaataatctgtttgaagaacaagagaggcaggaaaggaatagaggccaacagccccccaaagagggtggtgaagagagtgcaaacttggacttcatgttggccctaagtctgcaaaatgaaggccaagcctccagtgtggcagagcaggacttctggagggccgtatgtgaggccgaccagtctcatggcggtcccaggtctctcagtgacataaagggtgcagctgacgagatcatgttgccttgtgaattttgtgaggagctctacccagaggaactgctgattgaccatcagacaagctgtaacccttcacgtgccttaccttcactcaatactggcagctcttcccccagaggggtggaggaacctgatgtcatcttccagaacttcttgcaacaggctgcaagtaaccagttagactctttgatgggcctgagcaattcacaccctgtggaggagagcatcattatcccatgtgaattctgtggggtacagctggaagaggaggtgctgttccatcaccaggaccagtgtgaccaacgcccagccactgcaaccaaccatgtgacagaggggattcctagactggattcccagcctcaagagacctcaccagagctgcccaggaggcgtgtcagacaccagggagacctgtcttctggttacctggatgatactaagcaggaaacagctaatgggcccacctcctgtctgcctcccagccgacccattaacaatatgacagctacctataaccagctatcgagatcaacatcaggccccagacctgggtgccagcccagctctccttgtgtgccgaagctcagcaactcagacagccaggacatccaggggcggaatcgagacagccagaatggggccatagcccctgggcacgtttcagtgattcgccctcctcaaaatctctacccagaaaacattgtgccctctttctcccctgggccttcagggagatacggagctagtggtaggagtgaaggtggcaggaattcccgggtcacccctgcagctgccaactaccgcagcagaactgcaaaggcaaagccttccaagcaacagggagctggggatgcagaagaggaagaggaggagtaatggtgtctccagagactttacatcggttcctgtcttctgtgcacagcagcacttgccgctgtgcaggcccacctctttggctctttgggtgggagagtttttccagattttagatttttctaggttatggccattttgtgtcttttgaggttgtgctgtgggggtttgggtttgagggaagggagcagggtggcggttgaggaacgcttcagccttagctgctacctttcggcagcagtgaaatacaagctgcagcctcggctgccagggctcccttttgacttattgtcgccactgccccttggtgctgtgtggtcccagtggaaggaggggaagattttggaaacctggtagccaccagtaaggtgattctctgccctgttggggcctaaatttgggggcttttgggcaacctctccgtgtactgcgtctgtccacactcgattgggccccaggtgtgtatgaggcgctctggtaaggtgctcaggccagttgcaatgtctgtcagtaacgaggcttttgatgtgttgagctggaggtgagtggaccgggggctgtgttttaagctgcttccttggcatttggcatcactgccttctgttcccgggggagcatggatcttttgtcctcactgctttctaatggggagggctgagggctccctgtccccacagcaggtatgttgggctctgccccagccccacacttgctctgaaaaccaagtgtcagagccccttccccttgtttttattttactgttataataattattaacttccttgtaatagaaataaagtttgtacttggagttca

SEQ ID NO: 345089 - DNA, 1350 bp, Homo sapiens
tccgcgatgggcggaagtggtgaggcagctctgagggccgttgttcagtgcggggtctgacagaggaggctccgtgtctgcagctagtgtgtcaactcagcgtttctcctctcgtccctggaagagctaaagatggctgaatttctagatgaccaggaaactcgactgtgtgacaactgcaaaaaagaaattcctgtgtttaactttaccatccatgagatccactgtcaaaggaacattggtatgtgtcctacctgtaaggaaccatttcccaaatctgacatggagactcacatggctgcagaacactgtcaggtgacctgcaaatgtaacaagaagttggagaagaggctgttaaagaagcatgaggagactgagtgccctttgcggcttgctgtctgccagcactgtgatttagaactttccattctcaaactgaaggaacatgaagattattgtggtgcccggacggaactatgtggcaactgtggtcgcaatgtccttgtgaaagatctgaagactcaccctgaagtttgtgggagagagggggaggaaaagagaaatgaggttgccatacctcctaatgcatatgatgaatcttggggtcaggatggaatctggattgcatcccaactcctcagacaaattgaggctctggacccacccatgaggctgccgcgaaggcccctgagagcctttgaatcagatgttttccacaatagaactaccaaccaaaggaacattacagcccaggtttcaattcagaataatctgtttgaagaacaagagaggcaggaaaggaatagaggccaacagccccccaaagagggtggtgaagagagtgcaaacttggacttcatgttggccctaagtctgcaaaatgaaggccaagcctccagtgtggcagagcaggacttctggagggccgtatgtgaggccgaccagtctcatggcggtcccaggtctctcagtgacataaagggtgcagctgacgagatcatgttgccttgtgaattttgtgaggagctctacccagaggaactgctgattgaccatcagacaagctgtaacccttcacgtgccttaccttcactcaatactggcagctcttcccccagaggggtggaggaacctgatgtcatcttccagaacttcttgcaacaggctgcaagtaaccagttagactctttgatgggcctgagcaattcacaccctgtggaggagagcatcattatcccatgtgaattctgtggggtacagctggaagaggaggtgctgttccatcaccaggaccagtgtgaccgacgcccagccattggcaaccacggtctctcaaggtaccgagctcga

SEQ ID NO: 345090 - DNA, 1256 bp, Homo sapiens
tccgcgatgggcggaagtggtgaggcagctctgagggccgttgttcagtgcggggtctgacagaggaggctccgtgtctgcagctagtgtgtcaactcagcgtttctcctctcgtccctggaagagctaaagatggctgaatttctagatgaccaggaaactcgactgtgtgacaactgcaaaaaagaaattcctgtgtttaactttaccatccatgagatccactgtcaaaggaacattggtatgtgtcctacctgtaaggaaccatttcccaaatctgacatggagactcacatggctgcagaacactgtcaggtgacctgcaaatgtaacaagaagttggagaagaggctgttaaagaagcatgaggagactgagtgccctttgcggcttgctgtctgccagcactgtgatttagaactttccattctcaaactgaaggaacatgaagattattgtggtgcccggacggaactatgtggcaactgtggtcgcaatgtccttgtgaaagatctgaagactcaccctgaagtttgtgggagagagggggaggaaaagagaaatgaggttgccatacctcctaatgcatatgatgaatcttggggtcaggatggaatctggattgcatcccaactcctcagacaaattgaggctctggacccacccatgaggctgccgcgaaggcccctgagagcctttgaatcagatgttttccacaatagaactaccaaccaaaggaacattacagcccaggtttcaattcagaataatctgtttgaagaacaagagaggcaggaaaggaatagaggccaacagccccccaaagagggtggtgaagagagtgcaaacttggacttcatgttggccctaagtctgcaaaatgaaggccaagccccaggtgtgtatgaggcgctctggtaaggtgctcaggccagttgcaatgtctgtcagtaacgaggcttttgatgtgttgagctggaggtgagtggaccgggggctgtgttttaagctgcttccttggcatttggcatcactgccttctgttcccgggggagcatggatcttttgtcctcactgctttctaatggggagggctgagggctccctgtccccacagcaggtatgttgggctctgccccagccccacacttgctctgaaaaccaagtgtcagagccccttccccttgtttttattttactgttataataattattaacttccttgtaatagaaataaagtttgtacttggagttca

SEQ ID NO: 345091 - DNA, 1112 bp, Homo sapiens
tccgcgatgggcggaagtggtgaggcagctctgagggccgttgttcagtgcggggtctgacagaggaggctccgtgtctgcagctagtgtgtcaactcagcgtttctcctctcgtccctggaagagctaaagatggctgaatttctagatgaccaggaaactcgactgtgtgacaactgcaaaaaagaaattcctgtgtttaactttaccatccatgagatccactgtcaaaggaacattggtatgtgtcctacctgtaaggaaccatttcccaaatctgacatggagactcacatggctgcagaacactgtcaggtgacctgcaaatgtaacaagaagttggagaagaggctgttaaagaagcatgaggagactgagtgccctttgcggcttgctgtctgccagcactgtgatttagaactttccattctcaaactgaaggaacatgaagattattgtggtgcccggacggaactatgtggcaactgtggtcgcaatgtccttgtgaaagatctgaagactcaccctgaagtttgtgggagagagggggaggaaaagagaaatgaggttgccatacctcctaatgcatatgatgaatcttggggtcaggatggaatctggattgcatcccaactcctcagacaaattgaggctctggacccacccatgaggctgccgcgaaggcccctgagagcctttgaatcagatgttttccacaatagaactaccaaccaaaggaacattacagcccaggtttcaattcagaataatctgtttgaagaacaagagaggcaggaaaggaatagaggccaacagccccccaaagagggtggtgaagagagtgcaaacttggacttcatgttggccctaagtctgcaaaatgaaggccaagcctccagtgtggcagagcaggacttctggagggccgtatgtgaggccgaccagtctcatggcggtcccaggtctctcagtgacataaagggtgcagctgacgagatcatgttgccttgtgaattttgtgaggagctcttggagcacctttgtctgcgcccacacgggtatcatcttctatgctcaatacacaggagtctgttagcagcacaagcgaatga

SEQ ID NO: 345092 - DNA, 1164 bp, Homo sapiens
tccgcgatgggcggaagtggtgaggcagctctgagggccgttgttcagtgcggggtctgacagaggaggctccgtgtctgcagctagtgtgtcaactcagcgtttctcctctcgtccctggtgaggtgtagcggcggcacgcggctggagatcccctgtggcctccagtttaggaagggtccagcatcccaagggaggggtgtgtgggcgaggggtctctgggcccggggtcgcggctgtgaggagaggatgcccgcgcggcggcatctcaggcacctggaggaggccgcgctttctcctcagggaaccggcgccttggcagcccccggcgacgccgcccccttcgcggcctaggttggtctggtgagccgggaagcgggcgtcgttcgcagcgccgctgtgaccaccgcgtcccgggcggagctgggctcagtgccggcctgggcctagagtccgagcctcgagctgccggcgtggggggtcgcgagtggcctaatgcggcctcgaagccgaaggacccgagtccgagctcgcactccgacccgctggtgctgtggaaaactcaggtggccttccgctttcgtagcctctaaagtggggaccaagactttcacctcttaggattgtagtcgggattaacaagattttcccggaagagctaaagatggctgaatttctagatgaccaggaaactcgactgtgtgacaactgcaaaaaagaaattcctgtgtttaactttaccatccatgagatccactgtcaaaggaacattggtatgtgtcctacctgtaaggaaccatttcccaaatctgacatggagactcacatggctgcagaacactgtcaggtgacctgcaaatgtaacaagaagttggagaagaggctgttaaagaagcatgaggagactgagtgccctttgcggcttgctgtctgccagcactgtgatttagaactttccattctcaaactgatgggagcaagatgggtcttgctcccatcagtacacaacgctgtagttgttgtcctgcaatcctttgtatttacctcattctttcccatctaagtcctcactgagttttaaagttagggctggaaaagctatgccttactgggacagcaggaaccaatttttttctgatggaagcagactgcggtccgagccta

SEQ ID NO: 345093 - DNA, 410 bp, Homo sapiens
gggttcatgacacagaacagggtaagagccactggcatggacactagaaacctacaccaatgctgttgtatcacttttcagacaagctctgtgcagtcggaattttttaaagatgcactgtcacttgaggaagacaggtgatcttctgcggcacaaatagaagcaaagagatttctcttcttctctgtagagcaacacaattgataaatggccgataatctccaccaaattggcagcagtaggctgcccgaaggcagcaggcatattcgtctttgtgaattgttttactatgatgctgtcacatttccaggaataagacggttaaaatgatatattgttgtggtttggcatttgcagctttgctctgacttccctggtaactgccaacatctgcaaattattatgtgctt

SEQ ID NO: 345094 - DNA, 407 bp, Homo sapiens
tcccagagtgctgggattacaggaatgcaccactgtgcccagccctaaataactatttttatttccctttctgtaaccgctcatcttttgtgcatttttcttgggtattggccttcttatcaaagtttaagaactgtttatatatagggattaacccttagtctgttgtatgaattgcaaatatacatgtatttatttgtatatgcaaagtttgtcttttatctttgtatatgggatagttttccaaacacagttttattttattttatttttcatcttgcatgtctttccaaagtaccaagcagagtttttttaaaagttgttttatggcttctgggttttttaagtcatatttagaaagatctttcccactctgaaattaaaaaaataaataaataaaatctccc

SEQ ID NO: 345095 - DNA, 1014 bp, Homo sapiens
atattttgcacttttattataaaaagaagcattttcttatatagatatacaataaattactatgagatgaaagattataaagctcacttataactatttagagttaaccacacacttgaaaaaaatgcaattttacaacaaagttataattcccattagggaaactaaggaaaaattaacctatagaagaaacaaagagacaaaatttccacattttaattacatagtgatcaaacacacaatgtaattgtctaaattaccaaattcttagggtaaagatgttattaatacttagagtaaattaaagagaacctcaccaaaactaatcaaagacttaaatggatatttataaatgtagggtctaacagaaaaaacagatgtccgagaactacaaacaaatcagacaaagcccacagacatcttagggacagaagatattcaaattttatccaatgttctccttaaagtagcagcagatacgctatacacttcctattggtctgatgtaatcttcacacatacacaaaatcacaccagacaagcactatcatacacacatctggaagatggggaagggaaggcccagagaggtgaaggtatttgcccaggatacagagtcatcagaacctgaagccaacagccagacccaaatcagacttcagaacctaagctcttgagctcaaacccacagagataaagtagtcagatgagttacaatgagataaaccggtaggtggtatatgcccactggtattgcagtactaaacatagcagacccatggcaaagaacacaatatactttatgtcaagaaagattaattttagctccatcaatcacaatgcatttctgaaaaaacctacaagcaaaattagtgaagcaaacaagagtatctcaggtgtaaagagctatttggacaaaatgactagcaaatttaaaaattacaaatcatgaacttcctagagctctatctaatctcagaccctaggtacgtgcatcagtaaatacagaacctt

SEQ ID NO: 345096 - DNA, 759 bp, Homo sapiens
tgaggatcccctgctcttccgtgccctaatttttagttacatggcttttatttgctttaatagcatgcgagaaggtagaggaaaatgtggttgcatcttgtagggtctaacagaaaaaacagatgtccgagaactacaaacaaatcagacaaagcccacagacatcttagggacagaagatattcaaattttatccaatgttctccttaaagtagcagcagatacgctatacacttcctattggtctgatgtaatcttcacacatacacaaaatcacaccagacaagcactatcatacacacatctggaagatggggaagggaaggcccagagaggtgaaggtatttgcccaggatacagagtcatcagaacctgaagccaacagccagacccaaatcagacttcagaacctaagctcttgagctcaaacccacagagataaagtagtcagatgagttacaatgagataaaccggtaggtggtatatgcccactggtattgcagtactaaacatagcagacccatggcaaagaacacaatatactttatgtcaagaaagattaattttagctccatcaatcacaatgcatttctgaaaaaacctacaagcaaaattagtgaagcaaacaagagtatctcaggtgtaaagagctatttggacaaaatgactagcaaatttaaaaattacaaatcatgaacttcctagagctctatctaatctcagaccctaggtacgtgcatcagtaaatacagaacctt

SEQ ID NO: 345097 - DNA, 1105 bp, Homo sapiens
tgttacaaaacagtaaaccatattaatacacatgtacacacatacataggcccagaaaatcacctagaaagatgtggactggtgtttaatactggatagtggaaagattttaatattaacttttatatttttaatgtttttcactattttcatatttttctactatgactatgtataacttttacaagtttttaaaacctttaaaaaaagccgggtgcggtggctcacacctcaatcagcacatatttttaagcagtttacacatggcaaactaattcccaaacaggtcattcaaaatgtttcatgacaaacaacctcaattatatattattagtggatggattttcatcctgtgtcaaaagccacttagtatgaaaatctcacctggtatctgtctatccatccctcacaagtactagtacttcatgattaccaaaagatgctggcaacataatacaagaaaaggaataaaataaaggagcacccagagccttctgcctggagagattatcagttattttttgtctgtcttagaaaaccttctgcctgggcattccaatctttttagcaaatctggtattcattatccacacttgttggtattctctcatacaattctaaggttgccctggggccacccctctgaaaacagatttgccctgtgatgtacaatcccaagcaactggccatatctttcattggtaatgggtgaggagaaaggagcagagctcctgcaagtgaagcagggaactgtacaacataaacatttcaggatcactgacatccacatcatggctaacgtgcctatgtactgcaagatgagactgtcagcagatcattttcaaattttaacagactacttggtcatgtttgattcctaaatacgcctttggcttatttattatctgtagtataattttatagtcatagagtttataaagtaaaaagtactaatccaaaagctagaagaagacaagaaataactaagatcagagaagaattgaaggagacagagacaagaaaaactctccaaaaaaatcaatgaatccagaagctggttttttgaaaaaattaaaatagaccactagctagacttataaagacg

SEQ ID NO: 345098 - DNA, 620 bp, Homo sapiens
agagcagccagattgtaagcaggcttgttcaatgtcgcgattatattactaaagctagttccatgcgggaagatcttgtagagaaaaatgagagtctccgtcgaactagttcacggagactctcatacaattctaaggttgccctggggccacccctctgaaaacagatttgccctgtgatgtacaatcccaagcaactggccatatctttcattggtaatgggtgaggagaaaggagcagagctcctgcaagtgaagcagggaactgtacaacataaacatttcaggatcactgacatccacatcatggctaacgtgcctatgtactgcaagatgagactgtcagcagatcattttcaaattttaacagactacttggtcatgtttgattcctaaatacgcctttggcttatttattatctgtagtataattttatagtcatagagtttataaagtaaaaagtactaatccaaaagctagaagaagacaagaaataactaagatcagagaagaattgaaggagacagagacaagaaaaactctccaaaaaaatcaatgaatccagaagctggttttttgaaaaaattaaaatagaccactagctagacttataaagacg

SEQ ID NO: 345099 - DNA, 458 bp, Homo sapiens
ttttttgaaatgaagtctcactctgtcacccaggctggagtacagtaacacaatcttggctccctgtaacctccacctcccaagttcaagcaattcctgtctcagcctcctgtgtagctgggactacaggcatgtgacaccacacctggctaatttttgtatttttagtagtgacgggtttcgccatgttggccaggctggtctcaaactcctgacctcaggtgatccacccacctcaagctcccaaagtgctgggattacaggcgtgagtcactgcacctggccaatcagcacatatttttaagcagtttacacatggcaaactaattcccaaacaggtcattcaaaatgtttcatgacaaacaacctcaattatatattattagtggatggattttcatcctgtgtcaaaagccacttagtatgaaaatctcacctggtatctgtctatccatccc

SEQ ID NO: 345100 - DNA, 629 bp, Homo sapiens
ggggaacctgaggccgacttggcctgaaggaagtgacatgagcataaggaagtggggtgcggtgggagcgggtcaagtgacagaggagggctgggaaatattaatgaatagagtctgttgagaatcagccaatgtgacttgaagcaacaggcaaccagaatcgtgatgggtcagtatttcccccaggcctatccagaccaggtcttatcctcctagcaacgcggccctctcggctcttaaggcgtgacttgccatggatgttctgcctttggaaccagtgggtggtcacagcacagaggctgttggtttcatggctgtcacatgcacagagacagccctgtccactgagcctgttctgtggcagaaggaaccccctagcctggaccatctttgggtggaaacaccagcccctcacgtctgactgtcattttcagatgtgaagagaacacacagtgttgctgatgtgtttgtattgcctgtaaacaacgaagagtttctttgacttcttaactgccttaaagctagaagcccggcattaggatggcagtggtggtaatgaggttatgttttgagacttggcctcattagaagtgatgttctttatttgggcacttaggccacatataaaa

SEQ ID NO: 345101 - DNA, 642 bp, Homo sapiens
gtaatagattcaagcccatttaatatacttcctggacttgaattgttacctggatcaccccactgtcattccagcaaaaagatccatgatacgttcttctcaccattaggttctcttagatatgggaattcttttttcttttctctctctcttttttgagatggagtctcactctgtcaccaggctggagtttagtggtgtgatcttggctcactgcaacctctgcctcccaggttcaagtgattctcctgcctcagcctcccaagtagctgggattacaggcttgtgccaccacacccagctaatttttgtatatttagtagagactgggtttcaccttgttggccaggatggtctcagtctcctgaccttgtgatctgcccacctcggcctcccaaagtgctgggattacaggcatgagccatggcgcccagccagatatgggaattcttatgacactatggcagtatgcatcataattcttacaaaccagatacattatctctgagggctttctgtggtttccttaacatataaacagaaagtcagaacttgttgtattttggtatactagaatttgaaagagtttgatttctacagttttctgaccacagtaaatccagtgttgacatcttgatgcct

SEQ ID NO: 345102 - DNA, 360 bp, Homo sapiens
ctcaagcttctcggtctgcctgtgcgaaggggcctaaggctgggtgttaagtcccatagcatgagcaaaacctgtaatttagggttaaccagctttacttaactcccattaccccttttccttctcctcattcttagaattctcacgtgagtggtagtaagcccctaggatgtatgtatgctgctgtgtatgtgcttagccatttcctgtgtatttaatggtgaacctttggtgattcctcacatggaacccttttgcccttggtcacacttgtgaaagcacctccacatctttgcaatcagatcagcctaggccaggaagcaccttagaggaggtgattgactctagttccttgtttgg

SEQ ID NO: 345103 - DNA, 2149 bp, Homo sapiens
ggaagtagaaggcggtggctgaggcggttccggaggttctagtgtcggagttgggtgcaggcaggtgccatgggcccgcttgaggcacactgaggggacgcggggctgggccatggccggcgctcgggccgccgccgccgctgcctcggcggggtcctcggcctcttcaggcaaccagccgcctcaggagctggggcttggggagctgctggaggagttctcccggactcagtaccgggccaaggatggcagcgggaccggcggctctaaggttgagcgcattgagaagagatgtctggagctgtttggccgagactactgtttcagcgtgattccaaacacgaatggggatatctgtggccactatccccggcacatcgtgttcctggagtatgagagttctgagaaggagaaagacacgtttgagagtaccgtacaggtgagcaagttgcaagacctcatccaccgcagcaagatggcccggtgcagaggacggtttgtctgcccagtaatcctgttcaagggcaagcacatttgcaggtcggccacactggctggatggggagagctgtatggacgctcaggctacaactattttttctcagggggtgcagatgatgcctgggcagatgtggaggacgtcacggaggaggactgtgctcttcgaagtggtgacacgcatctttttgataaggtcagaggctatgacatcaagctgcttcgatacctgtcagtcaaatacatctgtgacctgatggtggagaacaagaaggtgaagtttggcatgaatgtaacctcctctgagaaggtggacaaagcccagcgctatgccgacttcactctcctctccatcccgtatccaggctgtgaatttttcaaggaatataaagatcgggattacatggcagaagggctcatatttaactggaagcaggactacgttgatgccccattgagcatccccgacttcctgactcactctctgaacattgactggagccagtatcagtgttgggatctggtgcaacaaacacaaaactacctgaagctgctgctttccttagttaacagtgatgatgacagcgggctgctggtacactgtatctcaggctgggatcggacccccctcttcatctccctcctgcgcctttccttgtgggctgatgggctcatccacacgtccctgaagcccactgagatcctctacctcactgtggcctatgactggttcctcttcgggcacatgttggtagatcggctcagcaaaggggaggagattttcttcttctgcttcaattttttgaagcatattacctccgaggagttctctgctctgaagacccagaggaggaagagtttgccagcccgggatggaggcttcaccctggaagacatctgcatgctgagacgaaaggaccgtggcagcaccaccagccttggcagcgacttctccctggtcatggagagttccccaggagccactgggagcttcacctatgaggccgtggagctggtcccagcaggagcgccaactcaggcagcttggcttgcagccctgagtgatcgagagactcggctgcaggaggtgcgctcagccttcttggctgcgtacagcagcacagtggggcttcgggcagtagcccccagtccttccggtgccatcgggggcctgctggagcaatttgcccgtggtgttggactccggagcatcagcagcaatgccttgtgaagaagccagcccatgacattttcctgctcctctctcagctgagcccttagcagagaatcaaagccatgcctggccgaaggggtacttccaggtcaggggaaatttcagtcccccatctccatcatgaacatggcagccccaaagctgagcaaggccaaagacagggttttccaacccccagcctcttgactggtgaccaccaccccttcttgtcactgtctcccacccaccccatctttgctgggattcccatcaactctcagaactgtgtggggtttccctggggccttgtggaagccatgacttcacaaagaccctacctgtcagttcttgtttctggggaggagggatcacctgcactgagaatgaggcagtttgacacagatcacaaaataaaatcaaagtctttttgaatagcca

SEQ ID NO: 345104 - DNA, 2270 bp, Homo sapiens
attgcctccccgacccacactggctggactactgcccaggacagaagaggggggttggctgtgagtggggaggaggtggaagcggtagattcccagcacaaccttcttcctcccacccccaaaacctccatctgaagaaggcctgaggaagctgtcaggctgcctgcctgattcatcccttccctctgggcgtagccactgagtctgctgggctgatgcttctgaatacaaactatggcacctggaaggcactgcagagaaaggggggacctcagggctcccattccatcactcttgagtctaggtcataccctccacaatccccaagaggcccgtactgtctcttctgatgggactcctgggttctgtgttgcccaccctgcaaatctgcatgccagcaagtatgggtgacccggctggctgctgggtcaccttcatttgggtgctagccttgctgccttcctttggtgctgttgagattgtccttgccgtgttcactcccagcgcaggcatgccctggccccaggctgtggctccgattcactcttactgccatgctttgttctcattttttgcttccacagtaagtctgcacaaaatactgtcctcacagctgagcttacctggtgatctattcttttttctcggtcactacttgtccagcttttttttttagacttttggagacagtgattgacaacagaacctagcagccagggctgcgctagtcccctagccccctccagagcctgtgtcaggcatatgactgactgcatcctctcccctctctctcctctctgccccagatcagtggaccatcccctgcccggatcctctctctccacagactatggcagctggcagatggtaacgggctgtggcagtattcaggagcgggctgtcctgcacacagactcctctctccctttcagcttcccggatgagctccctaacagttgtctgtaagtgtcttgcttgagaaggcaggatgctcccctgcccatgggaaaagctggtgagcagtcaggagtgctgggtaggaatgaggctggcgctcaggagctggcctggcctcctgccctcccctctctcagctgctggacccgaggtatgaaggaggcctgtggctggtcaggaagtgcactggtttgtgtgttcactctgcagcctctaaaacccatccactggtgtctcaggtgcacccaaagggaaagctgctggactgtaactatagaagattctatttctgtataagcctttgcctgacatgagaatcgtttgaaggcagaacagtgggatagtgaaggtaggtgtatggtggaggccagagccagagtggtgctgggttagcccgaagctttgctcctgagcagaacctagggttacttgctgtctctacccgccttgtcttctgtttttgcctctgggcaggaataagaattggatggggattctagatcccacacctacaaaaccctgagtttccagcccttaacagtgtgtccacctgactggagcagctgcctctggggaaaccacctgcccctggcctgttctgccgcttcatggatgtcaggcaggagaaagcctctggtggccaggggagcaagccctgctcctcagctgtggtgcctgagggcctctcagcaagccttccataccatgggctggatgaatggcacatgctggggccttaccaccagcaccgcaatccagctcatcccccccacccctgttggcaggtgggaggcagggtgccttggggagttgggaagggaaagggggccctggatcctagctgagggcagtcaggagccagtcagaccttgaaattccaggatggcacaggtcctggctctgcagctgtgaagtcatcaaagagcttctgaggtcactgtgcctggcacagcctcctctgcagccagcccctaggctagaaacaagatcttagatgttcgaaggcttaaaaaaaaaaaaattgcaggccgggcatggtggctcacgcctgtagtcccagcacttagggaggccgaggcgggcggatcacctaaggttgggagttcgagaccaacctgaccaacatggagaaaccccgtctctactaaaaatacaaaattagctgggcgaggtggtgaatgcctattagtaatcccagctactcgggaggctgaggcaggagaatcgtttgaacctgggaagcggaggttgccgtgagtcgagatcatgccattgcactccagcctgggcaacaagagcgaaactctctcaaa

SEQ ID NO: 345105 - DNA, 2305 bp, Homo sapiens
ggaagtagaaggcggtggctgaggcggttccggaggttctagtgtcggagttgggtgcaggcaggtgccatgggcccgcttgaggcacactgaggggacgcggggctgggccatggccggcgctcgggccgccgccgccgctgcctcggcggggtcctcggcctcttcaggcaaccagccgcctcaggagctggggcttggggagctgctggaggagttctcccggactcagtaccgggccaaggatggcagcgggaccggcggctctaaggttgagcgcattgagaagagatgtctggagctgtttggccgagactactgtttcagcgtgattccaaacacgaatggggatatctgtggccactatccccggcacatcgtgttcctggagtatgagagttctgagaaggagaaagacacgtttgagagtaccgtacaggtgagcaagttgcaagacctcatccaccgcagcaagatggcccggtgcagaggacggtttgtctgcccagtaatcctgttcaagggcaagcacatttgcaggtcggccacactggctggatggggagagctgtatggacgctcaggctacaactattttttctcagggggtgcagatgatgcctgggcagatgtggaggacgtcacggaggaggactgtgctcttcgaagtggtgacacgcatctttttgataaggtcagaggctatgacatcaagctgcttcgatacctgtcagtcaaatacatctgtgacctgatggtggagaacaagaaggtgaagtttggcatgaatgtaacctcctctgagaaggtggacaaagcccagcgctatgccgacttcactctcctctccatcccgtatccaggctgtgaatttttcaaggaatataaagatcgggattacatggcagaagggctcatatttaactggaagcaggactacgttgatgccccattgagcatccccgacttcctgactcactctctgaacattgactggagccagtatcagtgttgggatctggtgcaacaaacacaaaactacctgaagctgctgctttccttagttaacagtgatgatgacagcgggctgctggtacactgtatctcaggctgggatcggacccccctcttcatctccctcctgcgcctttccttgtgggctgatgggctcatccacacgtccctgaagcccactgagatcctctacctcactgtggcctatgactggttcctcttcgggcacatgttggtagatcggctcagcaaaggggaggagattttcttcttctgcttcaattttttgaagcatattacctccgaggagttctctgctctgaagacccagaggaggaagagtttgccagcccgggatggaggcttcaccctggaagacatctgcatgctgagacgaaaggaccgtggcagcaccaccagccttggcagcgacttctccctggtcatggagagttccccaggagccactgggagcttcacctatgaggccgtggagctggtcccagcaggagcgccaactcaggcagcttgatcagtggaccatcccctgcccggatcctctctctccacagactatggcagctggcagatggtaacgggctgtggcagtattcaggagcgggctgtcctgcacacagactcctctctccctttcagcttcccggatgagctccctaacagttgtctgcttgcagccctgagtgatcgagagactcggctgcaggaggtgcgctcagccttcttggctgcgtacagcagcacagtggggcttcgggcagtagcccccagtccttccggtgccatcgggggcctgctggagcaatttgcccgtggtgttggactccggagcatcagcagcaatgccttgtgaagaagccagcccatgacattttcctgctcctctctcagctgagcccttagcagagaatcaaagccatgcctggccgaaggggtacttccaggtcaggggaaatttcagtcccccatctccatcatgaacatggcagccccaaagctgagcaaggccaaagacagggttttccaacccccagcctcttgactggtgaccaccaccccttcttgtcactgtctcccacccaccccatctttgctgggattcccatcaactctcagaactgtgtggggtttccctggggccttgtggaagccatgacttcacaaagaccctacctgtcagttcttgtttctggggaggagggatcacctgcactgagaatgaggcagtttgacacagatcacaaaataaaatcaaagtctttttgaatagcca

SEQ ID NO: 345106 - DNA, 2329 bp, Homo sapiens
ggaagtagaaggcggtggctgaggcggttccggaggttctagtgtcggagttgggtgcaggcaggtgccatgggcccgcttgaggcacactgaggggacgcggggctgggccatggccggcgctcgggccgccgccgccgctgcctcggcggggtcctcggcctcttcaggcaaccagccgcctcaggagctggggcttggggagctgctggaggagttctcccggactcagtaccgggccaaggatggcagcgggaccggcggctctaaggttgagcgcattgagaagagatgtctggagctgtttggccgagactactgtttcagcgtgattccaaacacgaatggggatatctgtggccactatccccggcacatcgtgttcctggagtatgagagttctgagaaggagaaagacacgtttgagagtaccgtacaggtgagcaagttgcaagacctcatccaccgcagcaagatggcccggtgcagaggacggtttgtctgcccagtaatcctgttcaagggcaagcacatttgcaggtcggccacactggctggatggggagagctgtatggacgctcaggctacaactattttttctcagggggtgcagatgatgcctgggcagatgtggaggacgtcacggaggaggactgtgctcttcgaagtggtgacacgcatctttttgataaggtcagaggctatgacatcaagctgcttcgatacctgtcagtcaaatacatctgtgacctgatggtggagaacaagaaggtgaagtttggcatgaatgtaacctcctctgagaaggtggacaaagcccagcgctatgccgacttcactctcctctccatcccgtatccaggctgtgaatttttcaaggaatataaagatcgggattacatggcagaagggctcatatttaactggaagcaggactacgttgatgccccattgagcatccccgacttcctgactcactctctgaacattgactggagccagtatcagtgttgggatctggtgcaacaaacacaaaactacctgaagctgctgctttccttagttaacagtgatgatgacagcgggctgctggtacactgtatctcaggctgggatcggacccccctcttcatctccctcctgcgcctttccttgtgggctgatgggctcatccacacgtccctgaagcccactgagatcctctacctcactgtggcctatgactggttcctcttcgggcacatgttggtagatcggctcagcaaaggggaggagattttcttcttctgcttcaattttttgaagcatattacctccgaggagttctctgctctgaagacccagaggaggaagagtttgccagcccgggatggaggcttcaccctggaagacatctgcatgctgagacgaaaggaccgtggcagcaccaccagccttggcagcgacttctccctggtcatggagagttccccaggagccactgggagcttcacctatgaggccgtggagctggtcccagcaggagcgccaactcaggcagcttggaggaagagccactcatcctctccacagagtgtcctctggaaccggccacaaccctcagaggaccgcttgccttcccagcaggggctggcggaagccaggtcttccagctcctcttcctcaaaccattctgataactttttcaggatgggtagcagtcccctggaggtccccaaacccaggcttgcagccctgagtgatcgagagactcggctgcaggaggtgcgctcagccttcttggctgcgtacagcagcacagtggggcttcgggcagtagcccccagtccttccggtgccatcgggggcctgctggagcaatttgcccgtggtgttggactccggagcatcagcagcaatgccttgtgaagaagccagcccatgacattttcctgctcctctctcagctgagcccttagcagagaatcaaagccatgcctggccgaaggggtacttccaggtcaggggaaatttcagtcccccatctccatcatgaacatggcagccccaaagctgagcaaggccaaagacagggttttccaacccccagcctcttgactggtgaccaccaccccttcttgtcactgtctcccacccaccccatctttgctgggattcccatcaactctcagaactgtgtggggtttccctggggccttgtggaagccatgacttcacaaagaccctacctgtcagttcttgtttctggggaggagggatcacctgcactgagaatgaggcagtttgacacagatcacaaaataaaatcaaagtctttttgaatagcca

SEQ ID NO: 345107 - DNA, 3136 bp, Homo sapiens
ggaagtagaaggcggtggctgaggcggttccggaggttctagtgtcggagttgggtgcaggcaggtgccatgggcccgcttgaggcacactgaggggacgcggggctgggccatggccggcgctcgggccgccgccgccgctgcctcggcggggtcctcggcctcttcaggcaaccagccgcctcaggagctggggcttggggagctgctggaggagttctcccggactcagtaccgggccaaggatggcagcgggaccggcggctctaaggttgagcgcattgagaagagatgtctggagctgtttggccgagactactgtttcagcgtgattccaaacacgaatggggatatctgtggccactatccccggcacatcgtgttcctggagtatgagagttctgagaaggagaaagacacgtttgagagtaccgtacaggtgagcaagttgcaagacctcatccaccgcagcaagatggcccggtgcagaggacggtttgtctgcccagtaatcctgttcaagggcaagcacatttgcaggtcggccacactggctggatggggagagctgtatggacgctcaggctacaactattttttctcagggggtgcagatgatgcctgggcagatgtggaggacgtcacggaggaggactgtgctcttcgaagtggtgacacgcatctttttgataaggtcagaggctatgacatcaagctgcttcgatacctgtcagtcaaatacatctgtgacctgatggtggagaacaagaaggtgaagtttggcatgaatgtaacctcctctgagaaggtggacaaagcccagcgctatgccgacttcactctcctctccatcccgtatccaggctgtgaatttttcaaggaatataaagatcgggattacatggcagaagggctcatatttaactggaagcaggactacgttgatgccccattgagcatccccgacttcctgactcactctctgaacattgactggagccagtatcagtgttgggatctggtgcaacaaacacaaaactacctgaagctgctgctttccttagttaacagtgatgatgacagcgggctgctggtacactgtatctcaggctgggatcggacccccctcttcatctccctcctgcgcctttccttgtgggctgatgggctcatccacacgtccctgaagcccactgagatcctctacctcactgtggcctatgactggttcctcttcgggcacatgttggtagatcggctcagcaaaggggaggagattttcttcttctgcttcaattttttgaagcatattacctccgaggagttctctgctctgaagacccagaggaggaagagtttgccagcccgggatggaggcttcaccctggaagacatctgcatgctgagacgaaaggaccgtggcagcaccaccagccttggcagcgacttctccctggtcatggagagttccccaggagccactgggagcttcacctatgaggccgtggagctggtcccagcaggagcgccaactcaggcagcttggaggaagagccactcatcctctccacagagtgtcctctggaaccggccacaaccctcagaggaccgcttgccttcccagcaggggctggcggaagccaggtcttccagctcctcttcctcaaaccattctgataactttttcaggatgggtagcagtcccctggaggtccccaaacccagatcagtggaccatcccctgcccggatcctctctctccacagactatggcagctggcagatggtaacgggctgtggcagtattcaggagcgggctgtcctgcacacagactcctctctccctttcagcttcccggatgagctccctaacagttgtctgcttgcagccctgagtgatcgagagactcggctgcaggaggtgcgctcagccttcttggctgcgtacagcagcacagtggggcttcgggcagtagcccccagtccttccggtgccatcgggggcctgctggagcaatttgcccgtggtgttggactccggagcatcagcagcaatgccttgtgaagaagccagcccatgacattttcctgctcctctctcagctgagcccttagcagagaatcaaagccatgcctggccgaaggggtacttccaggtcaggggaaatttcagtcccccatctccatcatgaacatggcagccccaaagctgagcaaggccaaagacagggttttccaacccccagcctcttgactggtgaccaccaccccttcttgtcactgtctcccacccaccccatctttgctgggattcccatcaactctcagaactgtgtggggtttccctggggccttgtggaagccatgacttcacaaagaccctacctgtcagttcttgtttctggggaggagggatcacctgcactgagaatgaggcagtttgacacagatcacaaaataaaatcaaagtctttttgaatagccaaaaaaaaaaaaaaaaaaaaaaaaaaaaaaaaacaaaaaaaaaaaaaaaaaaacaaaaacaaacaaaacaaacaaaaaacaaaaaaaaaaaaaaaaaaacaaaaaagaaagaagcgagggggcgccaaggaccatcacctacaccaagaagaaagacgaaagaaccacgcgccaccactgcacaagcagacgcagaccaaagaaaggagggacgggaacagtaaaaaaaacgaaagacgaagagggaaagaaagcaaatacaacaaaacccaagagagcgaggaggaaagagaaaacaaggagagacagacaacaaacaacgagaaggcaaaacaacaacgcaactcgaagcggagacaaaacagaaagacacaacagagaaacaaacaaagaagaaagaagagcaaacgacaacgaccacggacggcaagacataaccacgaaaaccaaaaaagcagagaacagaagaaaagaaagcaagagggagccggactacacgcaacaagactgcaacaagagacagatagagccagcaggcagcagaagcagaacgcaagagcgaacgacgcagcagaaacaatagaaaacacatgacaacaaaaaagaaccctacactaccgccggacacgaagaggcaaggaacaagaccgaa

SEQ ID NO: 345108 - DNA, 2627 bp, Homo sapiens
ggaagtagaaggcggtggctgaggcggttccggaggttctagtgtcggagttgggtgcaggcaggtgccatgggcccgcttgaggcacactgaggggacgcggggctgggccatggccggcgctcgggccgccgccgccgctgcctcggcggggtcctcggcctcttcaggcaaccagccgcctcaggagctggggcttggggagctgctggaggagttctcccggactcagtaccgggccaaggatggcagcgggaccggcggctctaaggttgagcgcattgagaagagatgtctggagctgtttggccgagactactgtttcagcgtgattccaaacacgaatggggatatctgtggccactatccccggcacatcgtgttcctggagtatgagagttctgagaaggagaaagacacgtttgagagtaccgtacaggtgagcaagttgcaagacctcatccaccgcagcaagatggcccggtgcagaggacggtttgtctgcccagtaatcctgttcaagggcaagcacatttgcaggtcggccacactggctggatggggagagctgtatggacgctcaggctacaactattttttctcagggggtgcagatgatgcctgggcagatgtggaggacgtcacggaggaggactgtgctcttcgaagtggtgacacgcatctttttgataaggtcagaggctatgacatcaagctgcttcgatacctgtcagtcaaatacatctgtgacctgatggtggagaacaagaaggtgaagtttggcatgaatgtaacctcctctgagaaggtggacaaagcccagcgctatgccgacttcactctcctctccatcccgtatccaggctgtgaatttttcaaggaatataaagatcgggattacatggcagaagggctcatatttaactggaagcaggactacgttgatgccccattgagcatccccgacttcctgactcactctctgaacattgactggagccagtatcagtgttgggatctggtgcaacaaacacaaaactacctgaagctgctgctttccttagttaacagtgatgatgacagcgggctgctggtacactgtatctcaggctgggatcggacccccctcttcatctccctcctgcgcctttccttgtgggctgatgggctcatccacacgtccctgaagcccactgagatcctctacctcactgtggcctatgactggttcctcttcgggcacatgttggtagatcggctcagcaaaggggaggagattttcttcttctgcttcaattttttgaagcatattacctccgaggagttctctgctctgaagacccagaggaggaagagtttgccagcccgggatggaggcttcaccctggaagacatctgcatgctgagacgaaaggaccgtggcagcaccaccagccttggcagcgacttctccctggtcatggagagttccccaggagccactgggagcttcacctatgaggccgtggagctggtcccagcaggagcgccaactcaggcagcttggaggaagagccactcatcctctccacagagtgtcctctggaaccggccacaaccctcagaggaccgcttgccttcccagcaggggctggcggaagccaggtcttccagctcctcttcctcaaaccattctgataactttttcaggatgggtagcagtcccctggaggtccccaaacccagatcagtggaccatcccctgcccggatcctctctctccacagactatggcagctggcagatggtaacgggctgtggcagtattcaggagcgggctgtcctgcacacagactcctctctccctttcagcttcccggatgagctccctaacagttgtctgcttgcagccctgagtgatcgagagactcggctgcaggaggtgcgctcagccttcttggctgcgtacagcagcacagtggggcttcgggcagtagcccccagtccttccggtgccatcgggggcctgctggagcaatttgcccgtggtgttggactccggagcatcagcagcaatgccttgtgaagaagccagcccatgacattttcctgctcctctctcagctgagcccttagcagagaatcaaagccatgcctggccgaaggggtacttccaggtcaggggaaatttcagtcccccatctccatcatgaacatggcagccccaaagctgagcaaggccaaagacagggttttccaacccccagcctcttgactggtgaccaccaccccttcttgtcactgtctcccacccaccccatctttgctgggattcccatcaactctcagaactgtgtggggtttccctggggccttgtggaagccatgacttcacaaagaccctacctgtcagttcttgtttctggggaggagggatcacctgcactgagaatgaggcagtttgacacagatcacaaaataaaatcaaagtctttttgaatagccaaaaaaaaaaaaaaaaaactcgagctctcttttttacttttctttctttttctctttttttttttttttctttttttttttgggaaagggaatttaactttgtcatggaggctggagtgcaggggccctgtgtcaccttgggc

SEQ ID NO: 345109 - DNA, 2156 bp, Homo sapiens
ggaagtagaaggcggtggctgaggcggttccggaggttctagtgtcggagttgggtgcaggcaggtgccatgggcccgcttgaggcacactgaggggacgcggggctgggccatggccggcgctcgggccgccgccgccgctgcctcggcggggtcctcggcctcttcaggcaaccagccgcctcaggagctggggcttggggagctgctggaggagttctcccggactcagtaccgggccaaggatggcagcgggaccggcggctctaaggtttgagagtaccgtacaggtgagcaagttgcaagacctcatccaccgcagcaagatggcccggtgcagaggacggtttgtctgcccagtaatcctgttcaagggcaagcacatttgcaggtcggccacactggctggatggggagagctgtatggacgctcaggctacaactattttttctcagggggtgcagatgatgcctgggcagatgtggaggacgtcacggaggaggactgtgctcttcgaagtggtgacacgcatctttttgataaggtcagaggctatgacatcaagctgcttcgatacctgtcagtcaaatacatctgtgacctgatggtggagaacaagaaggtgaagtttggcatgaatgtaacctcctctgagaaggtggacaaagcccagcgctatgccgacttcactctcctctccatcccgtatccaggctgtgaatttttcaaggaatataaagatcgggattacatggcagaagggctcatatttaactggaagcaggactacgttgatgccccattgagcatccccgacttcctgactcactctctgaacattgactggagccagtatcagtgttgggatctggtgcaacaaacacaaaactacctgaagctgctgctttccttagttaacagtgatgatgacagcgggctgctggtacactgtatctcaggctgggatcggacccccctcttcatctccctcctgcgcctttccttgtgggctgatgggctcatccacacgtccctgaagcccactgagatcctctacctcactgtggcctatgactggttcctcttcgggcacatgttggtagatcggctcagcaaaggggaggagattttcttcttctgcttcaattttttgaagcatattacctccgaggagttctctgctctgaagacccagaggaggaagagtttgccagcccgggatggaggcttcaccctggaagacatctgcatgctgagacgaaaggaccgtggcagcaccaccagccttggcagcgacttctccctggtcatggagagttccccaggagccactgggagcttcacctatgaggccgtggagctggtcccagcaggagcgccaactcaggcagcttgatcagtggaccatcccctgcccggatcctctctctccacagactatggcagctggcagatggtaacgggctgtggcagtattcaggagcgggctgtcctgcacacagactcctctctccctttcagcttcccggatgagctccctaacagttgtctgcttgcagccctgagtgatcgagagactcggctgcaggaggtgcgctcagccttcttggctgcgtacagcagcacagtggggcttcgggcagtagcccccagtccttccggtgccatcgggggcctgctggagcaatttgcccgtggtgttggactccggagcatcagcagcaatgccttgtgaagaagccagcccatgacattttcctgctcctctctcagctgagcccttagcagagaatcaaagccatgcctggccgaaggggtacttccaggtcaggggaaatttcagtcccccatctccatcatgaacatggcagccccaaagctgagcaaggccaaagacagggttttccaacccccagcctcttgactggtgaccaccaccccttcttgtcactgtctcccacccaccccatctttgctgggattcccatcaactctcagaactgtgtggggtttccctggggccttgtggaagccatgacttcacaaagaccctacctgtcagttcttgtttctggggaggagggatcacctgcactgagaatgaggcagtttgacacagatcacaaaataaaatcaaagtctttttgaatagcca

SEQ ID NO: 345110 - DNA, 2273 bp, Homo sapiens
ggaagtagaaggcggtggctgaggcggttccggaggttctagtgtcggagttgggtgcaggcaggtgccatgggcccgcttgaggcacactgaggggacgcggggctgggccatggccggcgctcgggccgccgccgccgctgcctcggcggggtcctcggcctcttcaggcaaccagccgcctcaggagctggggcttggggagctgctggaggagttctcccggactcagtaccgggccaaggatggcagcgggaccggcggctctaaggttgagcgcattgagaagagatgtctggagctgtttggccgagactactgtttcagcgtgattccaaacacgaatggggatatctgtggccactatccccggcacatcgtgttcctggagtatgagagttctgagaaggagaaagacacgtttgagagtaccgtacaggtgagcaagttgcaagacctcatccaccgcagcaagatggcccggtgcagaggacggtttgtctgcccagtaatcctgttcaagggcaagaagtggtgacacgcatctttttgataaggtcagaggctatgacatcaagctgcttcgatacctgtcagtcaaatacatctgtgacctgatggtggagaacaagaaggtgaagtttggcatgaatgtaacctcctctgagaaggtggacaaagcccagcgctatgccgacttcactctcctctccatcccgtatccaggctgtgaatttttcaaggaatataaagatcgggattacatggcagaagggctcatatttaactggaagcagtgttgggatctggtgcaacaaacacaaaactacctgaagctgctgctttccttagttaacagtgatgatgacagcgggctgctggtacactgtatctcaggctgggatcggacccccctcttcatctccctcctgcgcctttccttgtgggctgatgggctcatccacacgtccctgaagcccactgagatcctctacctcactgtggcctatgactggttcctcttcgggcacatgttggtagatcggctcagcaaaggggaggagattttcttcttctgcttcaattttttgaagcatattacctccgaggagttctctgctctgaagacccagaggaggaagagtttgccagcccgggatggaggcttcaccctggaagacatctgcatgctgagacgaaaggaccgtggcagcaccaccagccttggcagcgacttctccctggtcatggagagttccccaggagccactgggagcttcacctatgaggccgtggagctggtcccagcaggagcgccaactcaggcagcttggaggaagagccactcatcctctccacagagtgtcctctggaaccggccacaaccctcagaggaccgcttgccttcccagcaggggctggcggaagccaggtcttccagctcctcttcctcaaaccattctgataactttttcaggatgggtagcagtcccctggaggtccccaaacccagatcagtggaccatcccctgcccggatcctctctctccacagactatggcagctggcagatggtaacgggctgtggcagtattcaggagcgggctgtcctgcacacagactcctctctccctttcagcttcccggatgagctccctaacagttgtctgcttgcagccctgagtgatcgagagactcggctgcaggaggtgcgctcagccttcttggctgcgtacagcagcacagtggggcttcgggcagtagcccccagtccttccggtgccatcgggggcctgctggagcaatttgcccgtggtgttggactccggagcatcagcagcaatgccttgtgaagaagccagcccatgacattttcctgctcctctctcagctgagcccttagcagagaatcaaagccatgcctggccgaaggggtacttccaggtcaggggaaatttcagtcccccatctccatcatgaacatggcagccccaaagctgagcaaggccaaagacagggttttccaacccccagcctcttgactggtgaccaccaccccttcttgtcactgtctcccacccaccccatctttgctgggattcccatcaactctcagaactgtgtggggtttccctggggccttgtggaagccatgacttcacaaagaccctacctgtcagttcttgtttctggggaggagggatcacctgcactgagaatgaggcagtttgacacagatcacaaaataaaatcaaagtctttttgaatagcca

SEQ ID NO: 345111 - DNA, 609 bp, Homo sapiens
ggaggcccctgtgtggagccctgggtcaccagcctcagtactgacagataggtttctctggcagggggtgcagatgatgcctgggcagatgtggaggacgtcacggaggaggactgtgctcttcggtcagtgctgggttgctgtggtcaggggcttgtgttggggatggggtgtctggccagagatggccatgttcatattgtccgtgggtatttgtcactggttcaggtgagtggattggcttcttcctcttctgtctgccaagtctgtgcccctgaaatatggctgttgaagtccactgggtagcagccaaatacctgagcagtctgtccccatcttgactgcacacctggattcacagagaacatcccactcttggggttcctggtactgcaggcccgagatagggcccagacatctatatttgttttaaagccccacagagttgccagtttgcagctatgatgctgattaccaacctgccagatctcacccagtacagctggtactgaggcacagggcaagggctacagtccatacataggagacatgaggtctagcctggaaggcacatttggagaccagatgtgtcacagctgcatgattggt

SEQ ID NO: 345112 - DNA, 418 bp, Homo sapiens
acccatgcgtccacctagcacacgccccagcttctggagaagagtgacatccatacttccctgaatgagtgcccacccccaagctcctgtgagtgaacatgccatgtaacttctccctctggctctttatttcagaagtggtgacacgcatctttttgataaggtcagaggctatgacatcaagctgcttcgatacctgtcagtcaaatacatctgtgacctgatggtggagaacaagaaggtgaagtttggcatgaagtaagtacaggcgcccactacaaaatgagcagaggcagtgtgtacagatttgcagggctggcgttagtatgtagctgtcactgcgtgctggccttcttacaaagggctttctgtacattatctcactgtatcttcagacagccctgcaaaataggtacca

SEQ ID NO: 345113 - DNA, 450 bp, Homo sapiens
ttcaagcaattctcctgcctcagcctcccgagtagctgggattagaggcgcgtgctgccacgcctgtctaatttttgtagttttagtatagacggggtttcaccatgttggccaggctggtctttacctcctgacctcaggtgatctgccgcctgagcctccccaagtgtgggattacaggcatgagccactgtgcctggccagaaactgaattggagcttgatgtaggggaaccggtaaaggaaccactggccgacctaacaagaaaaggtgggtcattacattaaaagatcctccctagaggaaaatgctgatgtgtcctccaccaggggtgttttgtttgtttgtttttaacagaagtttagcctgagaaatccaccttggttttgaggctacaactcaacctgggaaaatcagatgtaggcatttagggttcagagggctggtatg

SEQ ID NO: 345114 - DNA, 2485 bp, Homo sapiens
ggaagtagaaggcggtggctgaggcggttccggaggttctagtgtcggagttgggtgcaggcaggtgccatgggcccgcttgaggcacactgaggggacgcggggctgggccatggccggcgctcgggccgccgccgccgctgcctcggcggggtcctcggcctcttcaggcaaccagccgcctcaggagctggggcttggggagctgctggaggagttctcccggactcagtaccgggccaaggatggcagcgggaccggcggctctaaggttgagcgcattgagaagagatgtctggagctgtttggccgagactactgtttcagcgtgattccaaacacgaatggggatatctgtggccactatccccggcacatcgtgttcctggagtatgagagttctgagaaggagaaagacacgtttgagagtaccgtacaggtgagcaagttgcaagacctcatccaccgcagcaagatggcccggtgcagaggacggtttgtctgcccagtaatcctgttcaagggcaagcacatttgcaggtcggccacactggctggatggggagagctgtatggacgctcaggctacaactattttttctcagggggtgcagatgatgcctgggcagatgtggaggacgtcacggaggaggactgtgctcttcgaagtggtgacacgcatctttttgataaggtcagaggctatgacatcaagctgcttcgatacctgtcagtcaaatacatctgtgacctgatggtggagaacaagaaggtgaagtttggcatgaatgtaacctcctctgagaaggtggacaaagcccagcgctatgccgacttcactctcctctccatcccgtatccaggctgtgaatttttcaaggaatataaagatcgggattacatggcagaagggctcatatttaactggaagcaggactacgttgatgccccattgagcatccccgacttcctgactcactctctgaacattgactggagccagtatcagtgttgggatctggtgcaacaaacacaaaactacctgaagctgctgctttccttagttaacagtgatgatgacagcgggctgctggtacactgtatctcaggctgggatcggacccccctcttcatctccctcctgcgcctttccttgtgggctgatgggctcatccacacgtccctgaagcccactgagatcctctacctcactgtggcctatgactggttcctcttcgggcacatgttggtagatcggctcagcaaaggggaggagattttcttcttctgcttcaattttttgaagcatattacctccgaggagttctctgctctgaagacccagaggaggaagagtttgccagcccgggatggaggcttcaccctggaagacatctgcatgctgagacgaaaggaccgtggcagcaccaccagccttggcagcgacttctccctggtcatggagagttccccaggagccactgggagcttcacctatgaggccgtggagctggtcccagcaggagcgccaactcaggcagcttggaggaagagccactcatcctctccacagagtgtcctctggaaccggccacaaccctcagaggaccgcttgccttcccagcaggggctggcggaagccaggtcttccagctcctcttcctcaaaccattctgataactttttcaggatgggtagcagtcccctggaggtccccaaacccagatcagtggaccatcccctgcccggatcctctctctccacagactatggcagctggcagatggtaacgggctgtggcagtattcaggagcgggctgtcctgcacacagactcctctctccctttcagcttcccggatgagctccctaacagttgtctgcttgcagccctgagtgatcgagagactcggctgcaggaggtgcgctcagccttcttggctgcgtacagcagcacagtggggcttcgggcagtagcccccagtccttccggtgccatcgggggcctgctggagcaatttgcccgtggtgttggactccggagcatcagcagcaatgccttgtgaagaagccagcccatgacattttcctgctcctctctcagctgagcccttagcagagaatcaaagccatgcctggccgaaggggtacttccaggtcaggggaaatttcagtcccccatctccatcatgaacatggcagccccaaagctgagcaaggccaaagacagggttttccaacccccagcctcttgactggtgaccaccaccccttcttgtcactgtctcccacccaccccatctttgctgggattcccatcaactctcagaactgtgtggggtttccctggggccttgtggaagccatgacttcacaaagaccctacctgtcagttcttgtttctggggaggagggatcacctgcactgagaatgaggcagtttgacacagatcacaaaataaaatcaaagtctttttgaatagcca

SEQ ID NO: 345115 - DNA, 2515 bp, Homo sapiens
ggaagtagaaggcggtggctgaggcggttccggaggttctagtgtcggagttgggtgcaggcaggtgccatgggcccgcttgaggcacactgaggggacgcggggctgggccatggccggcgctcgggccgccgccgccgctgcctcggcggggtcctcggcctcttcaggcaaccagccgcctcaggagctggggcttggggagctgctggaggagttctcccggactcagtaccgggccaaggatggcagcgggaccggcggctctaaggttgagcgcattgagaagagatgtctggagctgtttggccgagactactgtttcagcgtgattccaaacacgaatggggatatctgtggccactatccccggcacatcgtgttcctggagtatgagagttctgagaaggagaaagacacgtttgagagtaccgtacaggtgagcaagttgcaagacctcatccaccgcagcaagatggcccggtgcagaggacggtttgtctgcccagtaatcctgttcaagggcaagcacatttgcaggtcggccacactggctggatggggagagctgtatggacgctcaggctacaactattttttctcagggggtgcagatgatgcctgggcagatgtggaggacgtcacggaggaggactgtgctcttcgaagtggtgacacgcatctttttgataaggtcagaggctatgacatcaagctgcttcgatacctgtcagtcaaatacatctgtgacctgatggtggagaacaagaaggtgaagtttggcatgaatgtaacctcctctgagaaggtggacaaagcccagcgctatgccgacttcactctcctctccatcccgtatccaggctgtgaatttttcaaggaatataaagatcgggattacatggcagaagggctcatatttaactggaagcaggactacgttgatgccccattgagcatccccgacttcctgactcactctctgaacattgactggagccagtatcagtgttgggatctggtgcaacaaacacaaaactacctgaagctgctgctttccttagttaacagtgatgatgacagcgggctgctggtacactgtatctcaggctgggatcggacccccctcttcatctccctcctgcgcctttccttgtgggctgatgggctcatccacacgtccctgaagcccactgagatcctctacctcactgtggcctatgactggttcctcttcgggcacatgttggtagatcggctcagcaaaggggaggagattttcttcttctgcttcaattttttgaagcatattacctccgaggagttctctgctctgaagacccagaggaggaagagtttgccagcccgggatggaggcttcaccctggaagacatctgcatgctgagacgaaaggaccgtggcagcaccaccagccttggcagcgacttctccctggtcatggagagttccccaggagccactgggagcttcacctatgaggccgtggagctggtcccagcaggagcgccaactcaggcagcttggaggaagagccactcatcctctccacagagtgtcctctggaaccggccacaaccctcagaggaccgcttgccttcccagcaggggctggcggaagccaggtcttccagctcctcttcctcaaaccattctgataactttttcaggatgggtagcagtcccctggaggtccccaaacccagatcagtggaccatcccctgcccggatcctctctctccacagactatggcagctggcagatggtaacgggctgtggcagtattcaggagcgggctgtcctgcacacagactcctctctccctttcagcttcccggatgagctccctaacagttgtctgcttgcagccctgagtgatcgagagactcggctgcaggaggtgcgctcagccttcttggctgcgtacagcagcacagtggggcttcgggcagtagcccccagtccttccggtgccatcgggggcctgctggagcaatttgcccgtggtgttggactccggagcatcagcagcaatgccttgtgaagaagccagcccatgacattttcctgctcctctctcagctgagcccttagcagagaatcaaagccatgcctggccgaaggggtacttccaggtcaggggaaatttcagtcccccatctccatcatgaacatggcagccccaaagctgagcaaggccaaagacagggttttccaacccccagcctcttgactggtgaccaccaccccttcttgtcactgtctcccacccaccccatctttgctgggattcccatcaactctcagaactgtgtggggtttccctggggccttgtggaagccatgacttcacaaagaccctacctgtcagttcttgtttctggggaggagggatcacctgcactgagaatgaggcagtttgacacagatcacaaaggcctatagggagtcgtttaccaattaactggccgtcggtttaccgtcgtgctgggct

SEQ ID NO: 345116 - DNA, 2055 bp, Homo sapiens
caccatgttggccaggctggtctttacctcctgacctcaggtgatctgccgcctgagcctccccaagtgtgggattacaggcatgagccactgtgcctggccagaaactgaattggagcttgatgtaggggaaccggtaaaggaaccactggccgacctaacaagaaaaggtttgagagtaccgtacaggtgagcaagttgcaagacctcatccaccgcagcaagatggcccggtgcagaggacggtttgtctgcccagtaatcctgttcaagggcaagcacatttgcaggtcggccacactggctggatggggagagctgtatggacgctcaggctacaactattttttctcagggggtgcagatgatgcctgggcagatgtggaggacgtcacggaggaggactgtgctcttcgaagtggtgacacgcatctttttgataaggtcagaggctatgacatcaagctgcttcgatacctgtcagtcaaatacatctgtgacctgatggtggagaacaagaaggtgaagtttggcatgaatgtaacctcctctgagaaggtggacaaagcccagcgctatgccgacttcactctcctctccatcccgtatccaggctgtgaatttttcaaggaatataaagatcgggattacatggcagaagggctcatatttaactggaagcaggactacgttgatgccccattgagcatccccgacttcctgactcactctctgaacattgactggagccagtatcagtgttgggatctggtgcaacaaacacaaaactacctgaagctgctgctttccttagttaacagtgatgatgacagcgggctgctggtacactgtatctcaggctgggatcggacccccctcttcatctccctcctgcgcctttccttgtgggctgatgggctcatccacacgtccctgaagcccactgagatcctctacctcactgtggcctatgactggttcctcttcgggcacatgttggtagatcggctcagcaaaggggaggagattttcttcttctgcttcaattttttgaagcatattacctccgaggagttctctgctctgaagacccagaggaggaagagtttgccagcccgggatggaggcttcaccctggaagacatctgcatgctgagacgaaaggaccgtggcagcaccaccagccttggcagcgacttctccctggtcatggagagttccccaggagccactgggagcttcacctatgaggccgtggagctggtcccagcaggagcgccaactcaggcagcttgatcagtggaccatcccctgcccggatcctctctctccacagactatggcagctggcagatggtaacgggctgtggcagtattcaggagcgggctgtcctgcacacagactcctctctccctttcagcttcccggatgagctccctaacagttgtctgcttgcagccctgagtgatcgagagactcggctgcaggaggtgcgctcagccttcttggctgcgtacagcagcacagtggggcttcgggcagtagcccccagtccttccggtgccatcgggggcctgctggagcaatttgcccgtggtgttggactccggagcatcagcagcaatgccttgtgaagaagccagcccatgacattttcctgctcctctctcagctgagcccttagcagagaatcaaagccatgcctggccgaaggggtacttccaggtcaggggaaatttcagtcccccatctccatcatgaacatggcagccccaaagctgagcaaggccaaagacagggttttccaacccccagcctcttgactggtgaccaccaccccttcttgtcactgtctcccacccaccccatctttgctgggattcccatcaactctcagaactgtgtggggtttccctggggccttgtggaagccatgacttcacaaagaccctacctgtcagttcttgtttctggggaggagggatcacctgcactgagaatgaggcagtttgacacagatcacaaaataaaatcaaagtctttttgaatagcca

SEQ ID NO: 345117 - DNA, 3189 bp, Homo sapiens
ggaagtagaaggcggtggctgaggcggttccggaggttctagtgtcggagttgggtgcaggcaggtgccatgggcccgcttgaggcacactgaggggacgcggggctgggccatggccggcgctcgggccgccgccgccgctgcctcggcggggtcctcggcctcttcaggcaaccagccgcctcaggagctggggcttggggagctgctggaggagttctcccggactcagtaccgggccaaggatggcagcgggaccggcggctctaaggttgagcgcattgagaagagatgtctggagctgtttggccgagactactgtttcagcgtgattccaaacacgaatggggatatctgtggccactatccccggcacatcgtgttcctggagtatgagagttctgagaaggagaaagacacgtttgagagtaccgtacaggtgagcaagttgcaagacctcatccaccgcagcaagatggcccggtgcagaggacggtttgtctgcccagtaatcctgttcaagggcaagcacatttgcaggtcggccacactggctggatggggagagctgtatggacgctcaggctacaactattttttctcagggggtgcagatgatgcctgggcagatgtggaggacgtcacggaggaggactgtgctcttcgaagtggtgacacgcatctttttgataaggtcagaggctatgacatcaagctgcttcgatacctgtcagtcaaatacatctgtgacctgatggtggagaacaagaaggtgaagtttggcatgaatgtaacctcctctgagaaggtggacaaagcccagcgctatgccgacttcactctcctctccatcccgtatccaggctgtgaatttttcaaggaatataaagatcgggattacatggcagaagggctcatatttaactggaagcaggactacgttgatgccccattgagcatccccgacttcctgactcactctctgaacattgactggagccagtatcagtgttgggatctggtgcaacaaacacaaaactacctgaagctgctgctttccttagttaacagtgatgatgacagcgggctgctggtacactgtatctcaggctgggatcggacccccctcttcatctccctcctgcgcctttccttgtgggctgatgggctcatccacacgtccctgaagcccactgagatcctctacctcactgtggcctatgactggttcctcttcgggcacatgttggtagatcggctcagcaaaggggaggagattttcttcttctgcttcaattttttgaagcatattacctccgaggagttctctgctctgaagacccagaggaggaagagtttgccagcccgggatggaggcttcaccctggaagacatctgcatgctgagacgaaaggaccgtggcagcaccaccagccttggcagcgacttctccctggtcatggagagttccccaggagccactgggagcttcacctatgaggccgtggagctggtcccagcaggagcgccaactcaggcagcttggaggaagagccactcatcctctccacagagtgtcctctggaaccggccacaaccctcagaggaccgcttgccttcccagcaggggctggcggaagccaggtcttccagctcctcttcctcaaaccattctgataactttttcaggatgggtagcagtcccctggaggtccccaaacccagatcagtggaccatcccctgcccggatcctctctctccacagactatggcagctggcagatggtaacgggctgtggcagtattcaggagcgggctgtcctgcacacagactcctctctccctttcagcttcccggatgagctccctaacagttgtctgtaagtgtcttgcttgagaaggcaggatgctcccctgcccatgggaaaagctggtgagcagtcaggagtgctgggtaggaatgaggctggcgctcaggagctggcctggcctcctgccctcccctctctcagctgctggacccgaggtatgaaggaggcctgtggctggtcaggaagtgcactggtttgtgtgttcactctgcagcctctaaaacccatccactggtgtctcaggtgcacccaaagggaaagctgctggactgtaactatagaagattctatttctgtataagcctttgcctgacatgagaatcgtttgaaggcagaacagtgggatagtgaaggtaggtgtatggtggaggccagagccagagtggtgctgggttagcccgaagctttgctcctgagcagaacctagggttacttgctgtctctacccgccttgtcttctgtttttgcctctgggcaggaataagaattggatggggattctagatcccacacctacaaaaccctgagtttccagcccttaacagtgtgtccacctgactggagcagctgcctctggggaaaccacctgcccctggcctgttctgccgcttcatggatgtcaggcaggagaaagcctctggtggccaggggagcaagccctgctcctcagctgtggtgcctgagggcctctcagcaagccttccataccatgggctggatgaatggcacatgctggggccttaccaccagcaccgcaatccagctcatcccccccacccctgttggcaggtgggaggcagggtgccttggggagttgggaagggaaagggggccctggatcctagctgagggcagtcaggagccagtcagaccttgaaattccaggatggcacaggtcctggctctgcagctgtgaagtcatcaaagagcttctgaggtcactgtgcctggcacagcctcctctgcagccagcccctaggctagaaacaagatcttagatgttcgaaggcttaaaaaaaaaaaaattgcaggccgggcatggtggctcacgcctgtagtcccagcacttagggaggccgaggcgggcggatcacctaaggttgggagttcgagaccaacctgaccaacatggagaaaccccgtctctactaaaaatacaaaattagctgggcgaggtggtgaatgcctattagtaatcccagctactcgggaggctgaggcaggagaatcgtttgaacctgggaagcggaggttgccgtgagtcgagatcatgccattgcactccagcctgggcaacaagagcgaaactctctcaaa

SEQ ID NO: 345118 - DNA, 2348 bp, Homo sapiens
ggaagtagaaggcggtggctgaggcggttccggaggttctagtgtcggagttgggtgcaggcaggtgccatgggcccgcttgaggcacactgaggggacgcggggctgggccatggccggcgctcgggccgccgccgccgctgcctcggcggggtcctcggcctcttcaggcaaccagccgcctcaggagctggggcttggggagctgctggaggagttctcccggactcagtaccgggccaaggatggcagcgggaccggcggctctaaggttgagcgcattgagaagagatgtctggagctgtttggccgagactactgtttcagcgtgattccaaacacgaatggggatatctgtggccactatccccggcacatcgtgttcctggagtatgagagttctgagaaggagaaagacacgtttgagagtaccgtacaggtgagcaagttgcaagacctcatccaccgcagcaagatggcccggtgcagaggacggtttgtctgcccagtaatcctgttcaagggcaagaagtggtgacacgcatctttttgataaggtcagaggctatgacatcaagctgcttcgatacctgtcagtcaaatacatctgtgacctgatggtggagaacaagaaggtgaagtttggcatgaatgtaacctcctctgagaaggtggacaaagcccagcgctatgccgacttcactctcctctccatcccgtatccaggctgtgaatttttcaaggaatataaagatcgggattacatggcagaagggctcatatttaactggaagcaggactacgttgatgccccattgagcatccccgacttcctgactcactctctgaacattgactggagccagtatcagtgttgggatctggtgcaacaaacacaaaactacctgaagctgctgctttccttagttaacagtgatgatgacagcgggctgctggtacactgtatctcaggctgggatcggacccccctcttcatctccctcctgcgcctttccttgtgggctgatgggctcatccacacgtccctgaagcccactgagatcctctacctcactgtggcctatgactggttcctcttcgggcacatgttggtagatcggctcagcaaaggggaggagattttcttcttctgcttcaattttttgaagcatattacctccgaggagttctctgctctgaagacccagaggaggaagagtttgccagcccgggatggaggcttcaccctggaagacatctgcatgctgagacgaaaggaccgtggcagcaccaccagccttggcagcgacttctccctggtcatggagagttccccaggagccactgggagcttcacctatgaggccgtggagctggtcccagcaggagcgccaactcaggcagcttggaggaagagccactcatcctctccacagagtgtcctctggaaccggccacaaccctcagaggaccgcttgccttcccagcaggggctggcggaagccaggtcttccagctcctcttcctcaaaccattctgataactttttcaggatgggtagcagtcccctggaggtccccaaacccagatcagtggaccatcccctgcccggatcctctctctccacagactatggcagctggcagatggtaacgggctgtggcagtattcaggagcgggctgtcctgcacacagactcctctctccctttcagcttcccggatgagctccctaacagttgtctgcttgcagccctgagtgatcgagagactcggctgcaggaggtgcgctcagccttcttggctgcgtacagcagcacagtggggcttcgggcagtagcccccagtccttccggtgccatcgggggcctgctggagcaatttgcccgtggtgttggactccggagcatcagcagcaatgccttgtgaagaagccagcccatgacattttcctgctcctctctcagctgagcccttagcagagaatcaaagccatgcctggccgaaggggtacttccaggtcaggggaaatttcagtcccccatctccatcatgaacatggcagccccaaagctgagcaaggccaaagacagggttttccaacccccagcctcttgactggtgaccaccaccccttcttgtcactgtctcccacccaccccatctttgctgggattcccatcaactctcagaactgtgtggggtttccctggggccttgtggaagccatgacttcacaaagaccctacctgtcagttcttgtttctggggaggagggatcacctgcactgagaatgaggcagtttgacacagatcacaaaataaaatcaaagtctttttgaatagcca

SEQ ID NO: 345119 - DNA, 1898 bp, Homo sapiens
ggaagtagaaggcggtggctgaggcggttccggaggttctagtgtcggagttgggtgcaggcaggtgccatgggcccgcttgaggcacactgaggggacgcggggctgggccatggccggcgctcgggccgccgccgccgctgcctcggcggggtcctcggcctcttcaggcaaccagccgcctcaggagctggggcttggggagctgctggaggagttctcccggactcagtaccgggccaaggatggcagcgggaccggcggctctaaggttgagcgcattgagaagagatgtctggagctgtttggccgagactactgtttcagcgtgattccaaacacgaatggggatatctgtggccactatccccggcacatcgtgttcctggagtatgagagttctgagaaggagaaagacacgtttgagagtaccgtacaggtgagcaagttgcaagacctcatccaccgcagcaagatggcccggtgcagaggacggtttgtctgcccagtaatcctgttcaagggcaagcacatttgcaggtcggccacactggctggatggggagagctgtatggacgctcaggctacaactattttttctcagggggtgcagatgatgcctgggcagatgtggaggacgtcacggaggaggactgtgctcttcgaagtggtgacacgcatctttttgataaggtcagaggctatgacatcaagctgcttcgatacctgtcagtcaaatacatctgtgacctgatggtggagaacaagaaggtgaagtttggcatgaatgtaacctcctctgagaaggtggacaaagcccagcgctatgccgacttcactctcctctccatcccgtatccaggctgtgaatttttcaaggaatataaagatcgggattacatggcagaagggctcatatttaactggaagcaggactacgttgatgccccattgagcatccccgacttcctgactcactctctgaacattgactggagccagtatcagtgttgggatctggtgcaacaaacacaaaactacctgaagctgctgctttccttagttaacagtgatgatgacagcgggctgctggtacactgtatctcaggctgggatcggacccccctcttcatctccctcctgcgcctttccttgtgggctgatgggctcatccacacgtccctgaagcccactgagatcctctacctcactgtggcctatgactggttcctcttcgggcacatgttggtagatcggctcagcaaaggggaggagattttcttcttctgcttcaattttttgaagcatattacctccgaggagttctctgctctgaagacccagaggaggaagagtttgccagcccgggatggaggcttcaccctggaagacatctgcatgctgagacgaaaggaccgtggcagcaccaccagccttggcagcgacttctccctggtcatggagagttccccaggagccactgggagcttcacctatgaggccgtggagctggtcccagcaggagcgccaactcaggcagcttggaggaagagccactcatcctctccacagagtgtcctctggaaccggccacaaccctcagaggaccgcttgccttcccagcaggggctggcggaagccaggtcttccagctcctcttcctcaaaccattctgataactttttcaggatgggtagcagtcccctggaggtccccaaacccaggtgaggagctccaaagcccttgctgttggaagtgcctagctttcccccttaataagactggagggtcgggggccagcacctgagctagggtctcaagatggggttcctaagcttgcaggcccagtatttggaggatgggttagtgtttggtaataaagcaagggctgatttgt

SEQ ID NO: 345120 - DNA, 1566 bp, Homo sapiens
attgcctccccgacccacactggctggactactgcccaggacagaagaggggggttggctgtgagtggggaggaggtggaagcggtagattcccagcacaaccttcttcctcccacccccaaaacctccatctgaagaaggcctgaggaagctgtcaggctgcctgcctgattcatcccttccctctgggcgtagccactgagtctgctgggctgatgcttctgaatacaaactatggcacctggaaggcactgcagagaaaggggggacctcagggctcccattccatcactcttgagtctaggtcataccctccacaatccccaagaggcccgtactgtctcttctgatgggactcctgggttctgtgttgcccaccctgcaaatctgcatgccagcaagtatgggtgacccggctggctgctgggtcaccttcatttgggtgctagccttgctgccttcctttggtgctgttgagattgtccttgccgtgttcactcccagcgcaggcatgccctggccccaggctgtggctccgattcactcttactgccatgctttgttctcattttttgcttccacagtaagtctgcacaaaatactgtcctcacagctgagcttacctggtgatctattcttttttctcggtcactacttgtccagcttttttttttagacttttggagacagtgattgacaacagaacctagcagccagggctgcgctagtcccctagccccctccagagcctgtgtcaggcatatgactgactgcatcctctcccctctctctcctctctgccccagatcagtggaccatcccctgcccggatcctctctctccacagactatggcagctggcagatggtaacgggctgtggcagtattcaggagcgggctgtcctgcacacagactcctctctccctttcagcttcccggatgagctccctaacagttgtctgcttgcagccctgagtgatcgagagactcggctgcaggaggtgcgctcagccttcttggctgcgtacagcagcacagtggggcttcgggcagtagcccccagtccttccggtgccatcgggggcctgctggagcaatttgcccgtggtgttggactccggagcatcagcagcaatgccttgtgaagaagccagcccatgacattttcctgctcctctctcagctgagcccttagcagagaatcaaagccatgcctggccgaaggggtacttccaggtcaggggaaatttcagtcccccatctccatcatgaacatggcagccccaaagctgagcaaggccaaagacagggttttccaacccccagcctcttgactggtgaccaccaccccttcttgtcactgtctcccacccaccccatctttgctgggattcccatcaactctcagaactgtgtggggtttccctggggccttgtggaagccatgacttcacaaagaccctacctgtcagttcttgtttctggggaggagggatcacctgcactgagaatgaggcagtttgacacagatcacaaaataaaatcaaagtctttttgaatagcca

SEQ ID NO: 345121 - DNA, 751 bp, Homo sapiens
gaaaatgtttcaacgtgcgcaagagttgcggcggcgggcagaggactaccacaaatgcaaaatccccccttctgcaagaaagcctctttgcaactgggtcagaatggtggcagcggagcatcgtcattcttcaggattgccctactggctctacctcacagctgaaactttaaaaaacaggatgggccgccagccacctcctccaactcaacaacattctataactgataactccctgagcctcaagacacctcctgagtgtctgctcactccccttccaccctcagtggatgataatatcaaggagtgtcctcttgctcctcttccaccctctcctcttccaccctcagtggatgataatctgaaggaatgtctctttgtcccgcttccaccctctcctcttccaccctcagtggatgataatctgaaggaatgtctctttgtcccgcttccaccctctcctcttccaccctcagtggatgataatctcaagactcctcccttagctactcaggaggccgaggtggaaaaaccacccaaacccaagaggtggagggtggatgaggtggaacaatcaccgaaacccaagaggcggagggtggatgaggtggaacaatcgcccaagcccaagaggcagagggaggccgaggcacaacaattacccaaacccaagaggcggaggttgagtaagctgagaacacgccattgcactcaagcctgggcaataagaataaatccgtaggtcgaaaaa

SEQ ID NO: 345122 - DNA, 709 bp, Homo sapiens
gaaaatgtttcaacgtgcgcaagagttgcggcggcgggcagaggactaccacaaatgcaaaatccccccttctgcaagaaagcctctttgcaactgggtcagaatggtggcagcggagcatcgtcattcttcaggattgccctactggctctacctcacagctgaaactttaaaaaacaggatgggccgccagccacctcctccaactcaacaacattctataactgataactccctgagcctcaagacacctcctgagtgtctgctcactccccttccaccctcagtggatgataatatcaaggagtgtcctcttgctcctcttccaccctctcctcttccaccctcagtggatgataatctgaaggaatgtctctttgtcccgcttccaccctctcctcttccaccctcagtggatgataatctgaaggaatgtctctttgtcccgcttccaccctctcctcttccaccctcagtggatgataatctcaagactcctcccttagctactcaggaggccgaggtggaaaaaccacccaaacccaagaggtggagggtggatgaggtggaacaatcgcccaagcccaagaggcagagggaggccgaggcacaacaattacccaaacccaagaggcggaggttgagtaagctgagaacacgccattgcactcaagcctgggcaataagaataaatccgtaggtcgaaaaa

SEQ ID NO: 345123 - DNA, 1705 bp, Homo sapiens
gtctatctactgaatataataagaacatgtttttcccaccttggtttggtttccttgtggcatagactgtagcaaggaatggaagttttccttccaatattcccagtgccagaacagcatctggcacacaaaggcattcaatatgagatggtaaattaatggacaaatgaatgatgaactaatgagtagaaaaatatataatgtatgtaaacacatttatctttcctgataagtacatgctctttgtttcaaatattttatttaattttataattcagctgttaaattattgaactctatatagcctctgtagcaatgaccaaagcctttgttgagaatcatttttagtcagagcactgtttttcctccattttcctccatgggtttctcttccagtaacaaatgtgatccaaagaaatgtaagcatagacatgaaaagggataatgccgcctttaaaactgttttctagtttgttgttagaagttataaaaatacacaggaacacagcattcacttgaaaataaatttttaggcattttaaatagattaaagcagaagaaagagtgagaaagtaaccattctaaattcttaaaaagagaatagcacctatgaaaatgaaataaagaatcatgaataacatcaggaagtcaggaaatgcagaccaacagtaaaagaatgctattaatgtccaaatgacttatttttattttgtgcagcaaaactcatcagatttatctgccaaacccaaattctcaaagcctttcaacccactgcaaaacaaaggccattatgcattttctcatactggagattcctccgacaacatcatgctaactcagtttgtctcaaatgaataaggcaaggaatcataaaatcaagaaaaaatttccagaacaacttgacatttagagacaaatgtcaatgaagaaattatgctcagtattcgatcgggttttctgatttaggggtctgggaataaaacaagaatgtctcagtggcttcattactgctcccttttgtcttcaattaaatgaaaagaagatttatttccatgtgatttgattcaaagaaagtgctccataaatgcagaagagtaggttttgttggaaatcgtgtcagttgtaccctgaccataaaatatggtttctattttcataaaacagcattattcacatggcatttccaataatctggattgaaggaagaaaattttatgaaatagctttagataaattaataggccacgttcattttcttgtcaaaaagttactggtggggggatggtgggaaaaagttattagtgcaaatttcctagagaaaaaaccatttctctttcaaattttccagttgaattttatgttcgcttttgcttcttaggttctatcacttaatattgaaagttaatcagaaataaaatgtaaacttctatttcagatagctttgtaaccatttatcagaaagtataataatgtgatatgatatataatgtggtatttttcagtttacaaggcacttccatctggtcctaaaccctgcaaacaaaagtgtcaaggcagacctagtgcagagatgagggcatgggggctcagagaggtaaagtgacttgccaaagattgtgaagccagttaagggaaattggggatttttaggacatttgtctcccagaccatttctacagccaataaaagccttgaaaattaccta

SEQ ID NO: 345124 - DNA, 1389 bp, Homo sapiens
atgtgtgttggcttaactggtccaatggaagcaaaccactcctggcttttgttgtccctgcactggctattgtggctgtgaacttcgttgtggtgctgctagttctcacaaagctctggaggccgactgttggggaaagactgagtcgggatgacaaggccaccatcatccgcgtggggaagagcctcctcattctgacccctctgctagggctcacctggggctttggaataggaacaatagtggacagccagaatctggcttggcatgttatttttgctttactcaatgcattccagggattttttatcttatgctttggaatactcttggacagtaagctgcgacaacttctgttcaacaagttgtctgccttaagttcttggaagcaaacagaaaagcaaaactcatcagatttatctgccaaacccaaattctcaaagcctttcaacccactgcaaaacaaaggccattatgcattttctcatactggagattcctccgacaacatcatgctaactcagtttgtctcaaatgaataaggcaaggaatcataaaatcaagaaaaaatttccagaacaacttgacatttagagacaaatgtcaatgaagaaattatgctcagtattcgatcgggttttctgatttaggggtctgggaataaaacaagaatgtctcagtggcttcattactgctcccttttgtcttcaattaaatgaaaagaagatttatttccatgtgatttgattcaaagaaagtgctccataaatgcagaagagtaggttttgttggaaatcgtgtcagttgtaccctgaccataaaatatggtttctattttcataaaacagcattattcacatggcatttccaataatctggattgaaggaagaaaattttatgaaatagctttagataaattaataggccacgttcattttcttgtcaaaaagttactggtggggggatggtgggaaaaagttattagtgcaaatttcctagagaaaaaaccatttctctttcaaattttccagttgaattttatgttcgcttttgcttcttaggttctatcacttaatattgaaagttaatcagaaataaaatgtaaacttctatttcagatagctttgtaaccatttatcagaaagtataataatgtgatatgatatataatgtggtatttttcagtttacaaggcacttccatctggtcctaaaccctgcaaacaaaagtgtcaaggcagacctagtgcagagatgagggcatgggggctcagagaggtaaagtgacttgccaaagattgtgaagccagttaagggaaattggggatttttaggacatttgtctcccagaccatttctacagccaataaaagccttgaaaattaccta

SEQ ID NO: 345125 - DNA, 538 bp, Homo sapiens
cccgtatctttatgtacagaaatgtccagtaggaaggagacaattgtcaattaagaccttctcttagaatcttagaattcataaattaaatgatcacaagcaataaataagggaacccaagttgtcatcaggcttcacctcactcccggtctagtaatgtacttaagagaataccaggttggtgtgctccagttctcctcttgaatgtcagcagtgatacacagtctggtgcaatgcaacagaacccactccaatgacatgaggcaattatgatctttttgttttaattggatagaatcctgcctctgaaacttcacttcatttgtttccaaagtctgatatttttctccaataaatgtccttattcttcatccttgaaacattaatactgtccaatctgtcctttaacataggaaccctgtccttttatgactgccttttgcaaacatagccccatgtcaatattgtgtatatatctgggttttaaaatctatgaggacatggatgagtcttacactccctagtattgcccacatga

SEQ ID NO: 345126 - DNA, 477 bp, Homo sapiens
agtctgctcggtggctcattatcaacaacaaaccagaagagggcttaaaggaacttacaaaagctgcacacaggaatggaatgaagaatgctgaagacatcctaaccatggaggttttgaaatccaccatgaagcaagaactggaggcagcacagaaaaagcattctctttgtgaattgctccgcatacccaacatatgtaaaagaatctgtttcctgtcctttgtgaggtctgctggagtttgctggaggtccactccagatcctgtttgcttgggtatcaccagcggaggttgcagaacagcaaagattcctgcctgctccttcctctggaagcttcattttagaggagcacctgcctgatgccagccagagctctcctgtatgaagtgtctgttgacccctgctgggaagtgtctcccagtcaggaggcacaggtgttagtgacccacttaaggaggcagtctatcccttagca

SEQ ID NO: 345127 - DNA, 2719 bp, Homo sapiens
tcccactgggggaaaaaaaaaaaactcctgcagctagctcagtgtctccccaaacagccacctagttttgcacttgaaacccagggccctggtagcattggcacacaagggaatctcctggtctgcgtgttgcaaaaactatgggaaaagcataatttctgggctggatagcacagtccctatggcttccttgggtaggtgaggaagttccctcgccctttggacttcctgggtgaggtgatgccccaccctgcttcagcttaccctcccgtgggctgcacccacccactgtctaaccagtcccagtgagatgaaccgggtacctcagttggaaatgcagaaatcactcaccttccgcattgctctcgctgggagctgcagaccagagctcttcctattcggccatcttgccagctgtctctatcgactacctcttattccaaaaaataaaaccataatgaagttagacaccattaaatatacataatataaaaataggttttcttattctaatctagatttgctacacaagaccatctacagaatgaatgccatgaatatacaatctgtacccaataagttgtacattttagtaaacattcctgattgtaagggtggcaaatggaaattttggcttcttagatctttactgtgagtttgactgacatcagtacatttttatttttaattgtatattttcattactgtgaatttttttgcagtgatttttgatgccatgtggctacattggttttagaatactaataaaatccattgcttttaaaataaataaataaaccccatagcacatcctccatacaacatctgttgtccctcaagatacaattgttaccactatcatctaaccattattttatgataactttaaaatatcaacttgcaagaaaatattccacaaaacacactctgcctttttactttaaagagtccttggctacctgggccaatattattctcatttgtaggatttaggttccacagattataatatgtgcctttttctgtgttccctgcagatttgcaagtaccatccctttttggggccttactcttgcaccttcagcactctgggaaacaatgttttcctgttgcagactctctttggtgcagtcaccctcctggccaattgtgttgcaccttgggcactgaatcacatgagccgtcgactaagccagatgcttctcatgttcctactggcaacctgccttctggccatcatatttgtgcctcaagaaatgcagaccctgcgtgtggttttggcaaccctgggtgtgggagctgcttctcttggcattacctgttctactgcccaagaaaatgaactaattccttccataatcaggtacaaaagtttatgtgtgctctgtcattctcaaaatggacctgtctcaaccaattgacacttaacaagggaaaaaaatccaagacaagttagttaaaaaacaatcaaatgtaatagtcataaaaacaacaaattacagcccaagtttatatcaagctgactttgttccagacgctgcattaagtcttttaatgcagtatcccatgtaccttctgaaccacctgaaaggttgatgttaaggaaaatagcattttgtaaatgataaaaatgtgtctaattcacttgtgaatctaaaataaattgctagcaaataagagaaaatttcaaaagcaagagtatgttatcacctccatgtgtttaagtgctcatccataatcacagcaaaatgataaatcacaaattatatgtatgatttttaacaacttttcctctgttgctgtttttactccaaggggaagagctactggaatcactggaaactttgctaatattgggggagccctggcttccctcatgatgatcctaagcatatattctcgacccctgccctggatcatctatggagtctttgccatcctctctggccttgttgtcctcctccttcctgaaaccaggaaccagcctcttcttgacagcatccaggatgtggaaaatgagggagtaaatagcctagctgcccctcagaggagctctgtgctataggtctgtgctgaggaaagcaaaacaccatttagggctaccatcccccaaaaaggcttagatctgggctattcccatgtagtcagtgcctttgcctttggtgtatcctcatcccttccacagtgacctcatacatcccctgagcctcactagatcacacagaccatctctgcccagcctgtccaggaggttaatttgtggtgaaaagaccaaaattaggtgacctctgcccttcctgccctggtatgacatgcatactcttgaaggtattctacaaacatgcagggatccaaacaccatcttctcatccctggggagccctcagcccagtgagtgtacctgttagctgtctgggattgccagtgcttacaggcctgactcccaggacactgaagaatttgtgagagactgtatagaaaataagagcccctcccacagatgagaagtccttttgtatcacatgtgagattcagtctatctaattttcacgggggaaaaaaagcgttggaaaaggggaaaagaagtgataagtaaaggaattgtttaagtaatgaagaatgagaaaaggttctaaaacttttctgtgcttctcttgccttttccaaaatccctttggtcaatgccatggtgtccaagtgtgagagttgaagctattca

SEQ ID NO: 345128 - DNA, 2267 bp, Homo sapiens
tcccactgggggaaaaaaaaaaaactcctgcagctagctcagtgtctccccaaacagccacctagttttgcacttgaaacccagggccctggtagcattggcacacaagggaatctcctggtctgcgtgttgcaaaaactatgggaaaagcataatttctgggctggatagcacagtccctatggcttccttgggtaggtgaggaagttccctcgccctttggacttcctgggtgaggtgatgccccaccctgcttcagcttaccctcccgtgggctgcacccacccactgtctaaccagtcccagtgagatgaaccgggtacctcagttggaaatgcagaaatcactcaccttccgcattgctctcgctgggagctgcagaccagagctcttcctattcggccatcttgccagctgtctctatcgactacctcttattccaaaaaataaaaccataatgaagttagacaccattaaatatacataatataaaaataggttttcttattctaatctagatttgctacacaagaccatctacagaatgaatgccatgaatatacaatctgtacccaataagttgtacattttagtaaacattcctgattgtaagggtggcaaatggaaattttggcttcttagatctttactgtgagtttgactgacatcagtacatttttatttttaattgtatattttcattactgtgaatttttttgcagtgatttttgatgccatgtggctacattggttttagaatactaataaaatccattgcttttaaaataaataaataaaccccatagcacatcctccatacaacatctgttgtccctcaagatacaattgttaccactatcatctaaccattattttatgataactttaaaatatcaacttgcaagaaaatattccacaaaacacactctgcctttttactttaaagagtccttggctacctgggccaatattattctcatttgtaggatttaggttccacagattataatatgtgcctttttctgtgttccctgcagatttgcaagtaccatccctttttggggccttactcttgcaccttcagcactctgggaaacaatgttttcctgttgcagactctctttggtgcagtcaccctcctggccaattgtgttgcaccttgggcactgaatcacatgagccgtcgactaagccagatgcttctcatgttcctactggcaacctgccttctggccatcatatttgtgcctcaagaaatgcagaccctgcgtgtggttttggcaaccctgggtgtgggagctgcttctcttggcattacctgttctactgcccaagaaaatgaactaattccttccataatcaggggaagagctactggaatcactggaaactttgctaatattgggggagccctggcttccctcatgatgatcctaagcatatattctcgacccctgccctggatcatctatggagtctttgccatcctctctggccttgttgtcctcctccttcctgaaaccaggaaccagcctcttcttgacagcatccaggatgtggaaaatgagggagtaaatagcctagctgcccctcagaggagctctgtgctataggtctgtgctgaggaaagcaaaacaccatttagggctaccatcccccaaaaaggcttagatctgggctattcccatgtagtcagtgcctttgcctttggtgtatcctcatcccttccacagtgacctcatacatcccctgagcctcactagatcacacagaccatctctgcccagcctgtccaggaggttaatttgtggtgaaaagaccaaaattaggtgacctctgcccttcctgccctggtatgacatgcatactcttgaaggtattctacaaacatgcagggatccaaacaccatcttctcatccctggggagccctcagcccagtgagtgtacctgttagctgtctgggattgccagtgcttacaggcctgactcccaggacactgaagaatttgtgagagactgtatagaaaataagagcccctcccacagatgagaagtccttttgtatcacatgtgagattcagtctatctaattttcacgggggaaaaaaagcgttggaaaaggggaaaagaagtgataagtaaaggaattgtttaagtaatgaagaatgagaaaaggttctaaaacttttctgtgcttctcttgccttttccaaaatccctttggtcaatgccatggtgtccaagtgtgagagttgaagctattca

SEQ ID NO: 345129 - DNA, 1911 bp, Homo sapiens
agtctgctcggtggctcattatcaacaacaaaccagaagagggcttaaaggaacttacaaaagctgcacacaggaatggaatgaagaatgctgaagacatcctaaccatggaggttttgaaatccaccatgaagcaagaactggaggcagcacagaaaaagcattctctttgtgaattgctccgcatacccaacatatgtaaaagaatctgtttcctgtcctttgtgagatttgcaagtaccatccctttttggggccttactcttgcaccttcagcactctgggaaacaatgttttcctgttgcagactctctttggtgcagtcaccctcctggccaattgtgttgcaccttgggcactgaatcacatgagccgtcgactaagccagatgcttctcatgttcctactggcaacctgccttctggccatcatatttgtgcctcaagaaatgcagaccctgcgtgtggttttggcaaccctgggtgtgggagctgcttctcttggcattacctgttctactgcccaagaaaatgaactaattccttccataatcaggtacaaaagtttatgtgtgctctgtcattctcaaaatggacctgtctcaaccaattgacacttaacaagggaaaaaaatccaagacaagttagttaaaaaacaatcaaatgtaatagtcataaaaacaacaaattacagcccaagtttatatcaagctgactttgttccagacgctgcattaagtcttttaatgcagtatcccatgtaccttctgaaccacctgaaaggttgatgttaaggaaaatagcattttgtaaatgataaaaatgtgtctaattcacttgtgaatctaaaataaattgctagcaaataagagaaaatttcaaaagcaagagtatgttatcacctccatgtgtttaagtgctcatccataatcacagcaaaatgataaatcacaaattatatgtatgatttttaacaacttttcctctgttgctgtttttactccaaggggaagagctactggaatcactggaaactttgctaatattgggggagccctggcttccctcatgatgatcctaagcatatattctcgacccctgccctggatcatctatggagtctttgccatcctctctggccttgttgtcctcctccttcctgaaaccaggaaccagcctcttcttgacagcatccaggatgtggaaaatgagggagtaaatagcctagctgcccctcagaggagctctgtgctataggtctgtgctgaggaaagcaaaacaccatttagggctaccatcccccaaaaaggcttagatctgggctattcccatgtagtcagtgcctttgcctttggtgtatcctcatcccttccacagtgacctcatacatcccctgagcctcactagatcacacagaccatctctgcccagcctgtccaggaggttaatttgtggtgaaaagaccaaaattaggtgacctctgcccttcctgccctggtatgacatgcatactcttgaaggtattctacaaacatgcagggatccaaacaccatcttctcatccctggggagccctcagcccagtgagtgtacctgttagctgtctgggattgccagtgcttacaggcctgactcccaggacactgaagaatttgtgagagactgtatagaaaataagagcccctcccacagatgagaagtccttttgtatcacatgtgagattcagtctatctaattttcacgggggaaaaaaagcgttggaaaaggggaaaagaagtgataagtaaaggaattgtttaagtaatgaagaatgagaaaaggttctaaaacttttctgtgcttctcttgccttttccaaaatccctttggtcaatgccatggtgtccaagtgtgagagttgaagctattca

SEQ ID NO: 345130 - DNA, 1772 bp, Homo sapiens
ataagtgagacaaaaaaaaaactctttagctctaatgttcccttttctgctatggcatacccctgatatatagtgagaattgaagcatcaactcagatccttttattcactatttaagtcacaatatgtaggccaatcacatttctcagctattagccactgcacattctttgcctctatgcagttttcctacagtacattttacccctggaaacacctccaaagcagtccttttcacttctaccttgggagatgctgattccttcagctcagatttcctgaggccctgtggtcttcctttctccagaaatgcagaccctgcgtgtggttttggcaaccctgggtgtgggagctgcttctcttggcattacctgttctactgcccaagaaaatgaactaattccttccataatcaggtacaaaagtttatgtgtgctctgtcattctcaaaatggacctgtctcaaccaattgacacttaacaagggaaaaaaatccaagacaagttagttaaaaaacaatcaaatgtaatagtcataaaaacaacaaattacagcccaagtttatatcaagctgactttgttccagacgctgcattaagtcttttaatgcagtatcccatgtaccttctgaaccacctgaaaggttgatgttaaggaaaatagcattttgtaaatgataaaaatgtgtctaattcacttgtgaatctaaaataaattgctagcaaataagagaaaatttcaaaagcaagagtatgttatcacctccatgtgtttaagtgctcatccataatcacagcaaaatgataaatcacaaattatatgtatgatttttaacaacttttcctctgttgctgtttttactccaaggggaagagctactggaatcactggaaactttgctaatattgggggagccctggcttccctcatgatgatcctaagcatatattctcgacccctgccctggatcatctatggagtctttgccatcctctctggccttgttgtcctcctccttcctgaaaccaggaaccagcctcttcttgacagcatccaggatgtggaaaatgagggagtaaatagcctagctgcccctcagaggagctctgtgctataggtctgtgctgaggaaagcaaaacaccatttagggctaccatcccccaaaaaggcttagatctgggctattcccatgtagtcagtgcctttgcctttggtgtatcctcatcccttccacagtgacctcatacatcccctgagcctcactagatcacacagaccatctctgcccagcctgtccaggaggttaatttgtggtgaaaagaccaaaattaggtgacctctgcccttcctgccctggtatgacatgcatactcttgaaggtattctacaaacatgcagggatccaaacaccatcttctcatccctggggagccctcagcccagtgagtgtacctgttagctgtctgggattgccagtgcttacaggcctgactcccaggacactgaagaatttgtgagagactgtatagaaaataagagcccctcccacagatgagaagtccttttgtatcacatgtgagattcagtctatctaattttcacgggggaaaaaaagcgttggaaaaggggaaaagaagtgataagtaaaggaattgtttaagtaatgaagaatgagaaaaggttctaaaacttttctgtgcttctcttgccttttccaaaatccctttggtcaatgccatggtgtccaagtgtgagagttgaagctattca

SEQ ID NO: 345131 - DNA, 1666 bp, Homo sapiens
tcccactgggggaaaaaaaaaaaactcctgcagctagctcagtgtctccccaaacagccacctagttttgcacttgaaacccagggccctggtagcattggcacacaagggaatctcctggtctgcgtgttgcaaaaactatgggaaaagcataatttctgggctggatagcacagtccctatggcttccttgggtaggtgaggaagttccctcgccctttggacttcctgggtgaggtgatgccccaccctgcttcagcttaccctcccgtgggctgcacccacccactgtctaaccagtcccagtgagatgaaccgggtacctcagttggaaatgcagaaatcactcaccttccgcattgctctcgctgggagctgcagaccagagctcttcctattcggccatcttgccagctgtctctatcgactacctcttattccaaaaaataaaaccataatgaagttagacaccattaaatatacataatataaaaataggttttcttattctaatctagatttgctacacaagaccatctacagaatgaatgccatgaatatacaatctgtacccaataagttgtacattttagtaaacattcctgattgtaagggtggcaaatggaaattttggcttcttagatctttactgtgagtttgactgacatcagtacatttttatttttaattgtatattttcattactgtgaatttttttgcagtgatttttgatgccatgtggctacattggttttagaatactaataaaatccattgcttttaaaataaataaataaaccccatagcacatcctccatacaacatctgttgtccctcaagatacaattgttaccactatcatctaaccattattttatgataactttaaaatatcaacttgcaagaaaatattccacaaaacacactctgcctttttactttaaagagtccttggctacctgggccaatattattctcatttgtaggatttaggttccacagattataatatgtgcctttttctgtgttccctgcagatttgcaagtaccatccctttttggggccttactcttgcaccttcagcactctgggaaacaatgttttcctgttgcagactctctttggtgcagtcaccctcctggccaattgtgttgcaccttgggcactgaatcacatgagccgtcgactaagccagatgcttctcatgttcctactggcaacctgccttctggccatcatatttgtgcctcaaggtgagaaaagttcacaggtggaagaaagcagaaggaaagggagaattgagttctcaggattccctgatagaaatctggggctttaggacagattttgccacacggaagttgctgggaaatgagtcaaagatgagtaagattggctcggatatatggttgtcttcagcacatttgagaagtagtaagaagttggtgccatttattcctgatagtttctctaggacagcaattgatcacttgccctttggccaatcaaactcttagtaagtattgaggtgctgggcctttgtatcccaatatgagaacacaatactgctatttcctctgtctgggctctttcttaccactacagcttctgtgacaaagtactccctaatcactacatatccactgtgtgccttgtattaggtca

SEQ ID NO: 345132 - DNA, 816 bp, Homo sapiens
gttcctactggcaacctgccttctggccatcatatttgtgcctcaaggtgagaaaagttcacaggtggaagaaagaaaatgtctttccctcttttctcagggattgccctggtcacacctatctgaagccagaaggaaagggagaattgagttctcaggattccctgatagaaatctggggctttaggacagattttgccacacggaagttgctgggaaatgagtcaaagatgagtaagattggctcggatatatggttgtcttcagcacatttgagaagtagtaagaagttggtgccatttattcctgatagtttctctaggacagcaattgatcacttgccctttggccaatcaaactcttagtaagtattgaggtgctgggcctttgtatcccaatatgagaacacaatactgctatttcctctgtctgggctctttcttaccactacagcttctgtgacaaagtactccctaatcactacatatccactgtgtgccttgtattaggtcaccataactgcaatcctggtttaggggagtcatcttgacttcaaagaaacaaaagtcccgtatctttatgtacagaaatgtccagtaggaaggagacaattgtcaattaagaccttctcttagaatcttagaattcataaattaaatgatcacaagcaataaataagggaacccaagttgtcatcaggcttcacctcactcccggtctagtaatgtacttaagagaataccaggttggtgtgctccagttctcctcttgaatgtcagcagtgatacacagtctggtgcaatgcaacagaaccca

SEQ ID NO: 345133 - DNA, 196 bp, Homo sapiens
ccaatgagaagaccacaccatccccagcagagcctacagaaaatggagacaggactcctttggccaatgagaagaccacgccatctctagcagagcctacagaaaatggacaaaggaccccatttgccaatgagaagaccacatcatcctcagcagagcctacagaacacgaagaaaggactccactggccaatga

SEQ ID NO: 345134 - DNA, 817 bp, Homo sapiens
tgttgtttacaaacttactcagtataaggtattttgctgtagcagcccaaatgtgcaaagacagaacccaatgggaagagagaacaggagttgaatacagagcaggctgagtgaagtaagacatgagtgtggggctggatcattcctagactgaacctgagcacactgaattctggtcatggcatccagggtatgtgtgggcatccatggatagttttgtctttcagaaacttggaccacctttcccaacttaatatatacaactaaaacatttctaatcagatctcattgcagtttttatttttaacttagcaacttgataataaagtttaactggaaggataaaattagccaaaataaaaatttgaaatataagcatataatattatgtatataatactagctatcaaatgtattataaagcaacaaccatgaaaacagcatggtacatgtataggaataggcaattagaccaggggaatatgtacaacagggagtctagaaaaaaatctgtgtatatatgataattaaatatatgacaaaaatagcatttcacatcagtgagaaaaggatggtttattacataaacagggaaaggttgtgaatttcagagaaaattcaaatttggttcctgtgcccgttttctggttccatacctgaaataaatccgaaatggattaaaggcttaaaaataaaaattaaaacaataaaagtgctagaaaaaaaataggtcctttttgagcatgacacaaaaaccagaagacagcaggaaaagacaacagtcctaactacgaaacaacacgcaacaataacaact

SEQ ID NO: 345135 - DNA, 563 bp, Homo sapiens
tttgagagccagtttcactcttgtcgccctcccaaagtgctgagattacagatgtgagccaccgcgcctggcctcacattgtatttctattggacgctgctgctctaggttactgagtttttcactctatttaaatgctacttccttacagaggccttcccagaccactcttcccttctgtctcattaccgtgctgtaatttctttgcactctttaacatctgaatttatttacctatttattgatttacttgctgttcacctgttttctccacaagaatgtaaactccatgagaccaaggataagatatatctttcttattcactgctatgttcccagtgcttagcatataaatatatttgtcagttatatatttttatctgtcaataatctcatcttgcttgttcactttacagccaacaaaataggcctagaaaagagcagggactttcaagatcacacagtgccagatcctacctcctaatacctaatccagtgctccttgctttggttacagttgatatgataaactgaggcacactaagacaggaataaggtgtgca

SEQ ID NO: 345136 - DNA, 770 bp, Homo sapiens
gtacaagaatctcttgctaataagcccagcctttttccttttagagtggctgatgcttgaagaactatggaacgttggggtgtattcctttgctctcagatacttgaggagatcaccacataaattcttagagttctgggtttagctgtagtgtttagtctagtgtcgaagcagaggttgggcaaatatacactactgtaaatactttcttgtgctatagctgttaagcatgttctagtttaaacagttgtcagtgattagcgattttgatgttccgttttaagattttgtaatggtctagacgaacatgaacaaaaccaaaagaccgtttcaagttcagcagatagtaggagctaatcttttctgtggtttggtttggtcgcctgccttaggttggtttactagtctgtgactttctgagttgctttatcttgtgctaacttctatcagatacaatctccatattgattcctgtttattcttgcctggatgatctattccatttagatagctagaacattcagtagctctcttgagggaatcccacctgtgggttgcagaagggtaacctacagatgcccgattgtcctttttccctggattaaaaagaaaccatttgccatttttctggcttcttagaaaaataaatgatatatgaaatgtttgcagcagcagaactttttcctgcccaaaggtttaagattccatggacacatctcctggtctagcatgctattgctctttctcatcaactttccatctctcctcac

SEQ ID NO: 345137 - DNA, 262 bp, Homo sapiens
ttgatatgggtggcagtatatttaccttaattcctgccattgttccacaagctctccctcggaatcaacaaactactcagttgacagatatggataatacccgtcacatttcccatgtcccagcacacaacggtcacctttggacctttagccaagaaacattcccttcctaggagacactacattcactaatttcataaggaaaaatctcccgtgtaaacagaatttccagatcaaacactctcctgatggtctcttcctt

SEQ ID NO: 345138 - DNA, 1165 bp, Homo sapiens
ggcacgagccacgattcagtcccctggactgtagataaagaccctttcttgccaggtgctgagacaaccacactatgagaggcactccaggagacgctgatggtggaggaagggccgtctatcaatcaatgtgtaaacctattactgggactattaatgatttgaatcagcaagtgtggacccttcagggtcagaaccttgtggcagttccacgaagtgacagtgtgaccccagtcactgttgctgttatcacatgcaagtatccagaggctcttgagcaaggcagaggggatcccatttatttgggaatccagaatccagaaatgtgtttgtattgtgagaaggttggagaacagcccacattgcagctaaaagagcagaagatcatggatctgtatggccaacccgagcccgtgaaacccttccttttctaccgtgccaagactggtaggacctccacccttgagtctgtggccttcccggactggttcattgcctcctccaagagagaccagcccatcattctgacttcagaacttgggaagtcatacaacactgcctttgaattaaatataaatgactgaactcagcctagaggtggcagcttggtctttgtcttaaagtttctggttcccaatgtgttttcgtctacattttcttagtgtcattttcacgctggtgctgagacaggagcaaggctgctgttatcatctcattttataatgaagaagaagcaattacttcatagcaactgaagaacaggatgtggcctcagaagcaggagagctgggtggtataaggctgtcctctcaagctggtgctgtgtaggccacaaggcatctgcatgagtgactttaagactcaaagaccaaacactgagctttcttctaggggtgggtatgaagatgcttcagagctcatgcgcgttacccacgatggcatgactagcacagagctgatctctgtttctgttttgctttattccctcttgggatgatatcatccagtctttatatgttgccaatatacctcattgtgtgtaatagaaccttcttagcattaagaccttgtaaacaaaaataattcttgtgttaagttaaatcatttttgtcctaattgtaatgtgtaatcttaaagttaaataaactttgtgtatttatataat

SEQ ID NO: 345139 - DNA, 436 bp, Homo sapiens
tcgatctagcggatccttaacgcgagaggacactacacactatctggatctccaggtggaggaaaattctacctgttctccctttgctgatgcttccttcaagtttcgtcccagatgtggctcagaacttctgcccagagcttcgtgtcaggccaggtttcccagcttcctgtctagaatgagggcctgtggagctagtgtcctggaaggtcttggaaacatctcttgtggttcatctgttctatgtctgctttcacaggtgctgagacaaccacactatgagaggcactccaggagacgctgatggtggaggaagggccgtctatcaatcaagtgaatcaaatgctgttgggatggggctctggaggcttaggccctctgcactcacgctatctcctgtggaagccccagccttctctgctcctctctgcgttac

SEQ ID NO: 345140 - DNA, 1208 bp, Homo sapiens
ggcacgagccacgattcagtcccctggactgtagataaagaccctttcttgccaggtgctgagacaaccacactatgagaggcactccaggagacgctgatggtggaggaagggccgtctatcaatcaatgtgtaaacctattactgggactattaatgatttgaatcagcaagtgtggacccttcagggtcagaaccttgtggcagttccacgaagtgacagtgtgaccccagtcactgttgctgttatcacatgcaagtatccagaggctcttgagcaaggcagaggggatcccatttatttgggaatccagaatccagaaatgtgtttgtattgtgagaaggttggagaacagcccacattgcagctaaaagagcagaagatcatggatctgtatggccaacccgagcccgtgaaacccttccttttctaccgtgccaagactggtaggacctccacccttgagtctgtggccttcccggactggttcattgcctcctccaagagagaccagcccatcattctgacttcagaacttgggaagtcatacaacactgcctttgaattaaatataaatgactgaactcagcctagaggtggcagcttggtctttgtcttaaagtttctggttcccaatgtgttttcgtctacattttcttagtgtcattttcacgctggtgctgagacaggagcaaggctgctgttatcatctcattttataatgaagaagaagcaattacttcatagcaactgaagaacaggatgtggcctcagaagcaggagagctgggtggtataaggctgtcctctcaagctggtgctgtgtaggccacaaggcatctgcatgagtgactttaagactcaaagaccaaacactgagctttcttctaggggtgggtatgaagatgcttcagagctcatgcgcgttacccacgatggcatgactagcacagagctgatctctgtttctgttttgctttattccctcttgggatgatatcatccagtctttatatgttgccaatatacctcattgtgtgtaatagaaccttcttagcattaagaccttgtaaacaaaaataattcttgtgttaagttaaatcatttttgtcctaattgtaatgtgtaatcttaaagttaaataaactttgtgtatttatataataataaagctaaaactgatataaaataaagaaagagtaaactga

SEQ ID NO: 345141 - DNA, 581 bp, Homo sapiens
tttaaaccttcttttatctctctttttctcaatcacctcagctttattaacatataataaatagtgtatgtatgtataatgtacaacatgatgttttgatacatgaatacatgatgaaattgttaaatcgatctagttaacatatccataacatcacttactgatatggtttcgctctgtgtccccatgcagatctcaccttgaactgggttcctataatccccaagtgtcatgggagggacgcagtgggaggtaatttaataatggggctggttatcctcatgttgttcctgtgatagtggatgagttctcacaagatctgatggttttataagggactttccccccttttgctcagcacttctccttcctgctgctatgtgaagaagagtgtattttcttccccttctgccatgattgtaagttttctaaggcctcctcagctatgtcgaactgtaagtcaattaaacctctttcctttataaattacccagtcttggacagttatttatagtagtgtgagaacagactaacacaataaattggtaccaggtagtgtggtgctgctgtaaagatacttg

SEQ ID NO: 345142 - DNA, 329 bp, Homo sapiens
agggaaaagcaagtttaagagagcatctccaagggactaatatgcaagaggactccagcccagtaatgccccattccccacttaggggtgggcatgtgttgacttcactgcagctccaaggaatctctggccaatccaatcactgggcacatgtctggaccacttagtcacatggcttcacttcctccatttatgtttccaccatccacactccagccaatggcttcccacccttcacagtcgctgcatattgtttaactgcttctgactgaaaaatattcttcctctcacctttaaaaaaatacagctctccatctctccttaaaaaa

SEQ ID NO: 345143 - DNA, 939 bp, Homo sapiens
ccgcctcatcctcccaaaatgctgggattacaggtgttagccaccgtgccaagcctctttatcttccattaagtagttcatttctgctatcttgttttgcatgtccaacagctctttctgtaccccgtttcttttgatggcatcctgttgtttcagggacacaatatcttacacctctgaggctaatagtttattttttccttttggaattttctccctgaagtgtttcctcccaattgctttttgcttgtgaaggtctttgtttgtttgagacagtctcgctctgccgcccaggctggagtgcaatggcgccatctcagctctcactgcagcctccacctcccaggttcaatcgattctcctgcctcagcctccagagtagctgggattacaggtgtgtgccaccacgccctctaagcttgtgtaggtttctatcttccaggctgaaggtttttctcagatgtcaggtcacccttgagtatctgctcatattaggagtggggcagggctggagccatgaggcagatcggaagctctgagcacaagggtggtacttccttggaggagatcagggtgggtgggctcttgcttttatggaatgccccgaggtcagttttagatccctttccagtccttcctgggaagcctgtctgtggagcatctgtatgcacactgggttttctggtttcagtacatttcttgtctgtgtgtggtgacctctcagaacccctcagacttcggctgcagtgggagaggaccagttgctgagtggcagggatcttggcagtcacctggaagactggaaggggacatgaagggggcttctgggtggggacaacgtcctgggtgctacccacacagacttgttcacaccatgaatgtatcaagccatactctacctctgcagaaataaattgaggctggagcctagctcctgga

SEQ ID NO: 345144 - DNA, 191 bp, Homo sapiens
actccatctcaaaaaaataaataaataaaataaaaataaatacatacaaatttaatttcagataacaaaccgtacaccatatttgaaattatgggtgttcctttgctcagaagaaacactttgtcgcctttttctgcctctaattacatctcaccccacctcccatatttctcttaatcatttttactatg

SEQ ID NO: 345145 - DNA, 607 bp, Homo sapiens
ataggaccaacgaagaaaccctttatcctccaggacagtgtgaagggaaagactcaccttagttgatccaatggggagaggaggagcaggacataaagcctctgtgctggtttgagccaagttggaaagtttctaactaaagaaagtcccagagatcataggtcttgaatagaaaagggaatagattttagaatgctaaaattgtgaatgattaatttgggctcattccccaaattctctggatttcataaagcctcagttcttctcaacctgagggtgctgcttactgtctctggagagacagaaatgcagcttcagaggccaggatggtggctcacacctgtaatcccagcactttgggaggcagaggtgggaggatcaactgaggttgggcattcgagaccagcctgaccaacatggagagaaaccctgtttctactaaaaatataaaattagccaggcacggtggcacatacctgtaaccccagctccttggggggctgaggcaggagaatcacttgaacccgggagacagaggttgcggtgagccgagattgcaccactgcactcaggcctggcaacaagagcaaagctcagtctcaaaaaa

SEQ ID NO: 345146 - DNA, 687 bp, Homo sapiens
ctgcctcagcctcccaaagtgctgggattacaggcttgagccaccgttcccagcctagtaattaattttagattgtcattttgctgagcacattctaaagactcatccatgttgcaagtattgttggaagtatctgcagttcattcctgttcattactgagtggtatctcactgtatgaatttgccacaatgtgtttatcaatgtattgttgggcattggttatttccagtttttggctattatgagtaaagttgatatgaacattcaagaacaagctgcaggacaattctccaggtcaccttagactcgcccagttcttccctctttctcacgtgtgttctcaacaataactgtagaatgtgctgggaatgcaacatcctgcgataaagagggactgacaagaacagctcacaggctctctctgttcctgtctgcctctgagaaacaagatgtccatcaacacttttgcccagcgtgtcatgtggtccccagggtattaaatccagtgtgggatgctttctagtgtccctcagctgcagtgcaagtgggacacatgccccacttgtgagaatccatccaccctcggtagctttcttgagccttgggagattggctcacaatgaattccgggcttctgttgtgcctcagggccaatctgtaagtaataaacccacttcatgtaactt

SEQ ID NO: 345147 - DNA, 115 bp, Homo sapiens
aatgagtccattactaaaagaaagctgcatatctttaaaatcttttaaatggtcttatttattattaacagacaagtcatggcattaatttctttacaaagtacacatttcctgt

SEQ ID NO: 345148 - DNA, 110 bp, Homo sapiens
tcaattggggcttcaacattgtgagatcaaaaggagatgaaccatgtagttgcggcatctttcattcccctcattttacctatgccttggaagtgccctgggggctccac

SEQ ID NO: 345149 - DNA, 364 bp, Homo sapiens
atacttgcatatatactatctcatgggatccaagcccacatatacaaacccagctcctgccagcctgttagtaggccctgaagctccttcagagtatcatccctgtatttcttttaacaggctcagtactcccctgtctgggttatgctgaagcttaatcctagttatttgtctgatatctagaagaagtgggttctcagagggtttgttgtcttgcaatatcatagcctctgcattatcttcaaagaagaaatgagcacaggtttttaacaagtaaggatgagattcttctggaggcctagagtgcttaggggatcctggggattcaatatttttgagtgggtcaacccagatgtccccacac

SEQ ID NO: 345150 - DNA, 421 bp, Homo sapiens
acagaaaacatatgttgatcccaaacatgcaatgacatccatataaaccttgcaaaatgatggctgtgatgacacccagtgatggtctttctcaactctctgtacctcatctcactcatcagagactttggagcctcagttgccttgcaatgctgtttcaggctgtacttattctttctgcaccacaaatgtcatgccttctcaagtgtttttatgccctggacccattgcatccagtgatgtcagaggaattctcagctcaatatcgtcacatgatggatcagagatacagaactagaattcatgagggatacatatctcaagtgaaaggtgcatatctacggattgtccacaagaaaccaatcagttatgcaaaatcttttccaaaggaaatgggaaattaaggaaaaaagtgaataaa

SEQ ID NO: 345151 - DNA, 347 bp, Homo sapiens
tccagcctgggcaacagcgagactccatctcaggaaaaaaaaaaaaaaagatcaccaagtctttgcagtgttcaacactcattgacaacttactagcaactagcccttagtccttggtcccgaagggcccatgggctggcatgttgcctacacagaggtccaaggagagggcttgttttctcaggccagttcttagcccctaaggaggccctccaaggcctgccagtcttgcagtccaggggtgggtaggaaggctgggtctccagtcagaactggttgattgaggggagtcagcctcctgggctgccacagaagtctgaccagcctggcagtaggtggcctcagga

SEQ ID NO: 345152 - DNA, 665 bp, Homo sapiens
gtatgatctagacgatccgcgggcttgtttcctgcacttcagcttagaagaaatccacagaaacttctcttcacactaaccatatgacatgctgttaacccctctttactggagctggtgccaatcttggctcaagccaaaggggatacgaattcttaacctgagagtttcaggcactcatctcctgccagttcagcaagaccctagttcaagaaagaaactacagccctcagaatcatgccaggtatgaacctcagaggctggagagagaaagaagcctcagcatgaaccaaaacatgaagaagaaccaaagatagctctatggcattattgttgcaagatagatgtccttcctatattccctgcactccactgccagtcttgctaaagtaaaccccatacatgaaaagcagaaatggaaggtgagcttatattattctatttctggagcttgctacctggtgttcactttataattaatcactataaatatctgttttgtggacctttctgtgtttcatattacagtttttaaatttaaaataataaatcacaggtaacgtcgtgctctgagttgcccacgtatggctgagtagagtcagggacttggaagctgaagaaatggcactgcaataggtaccctatgacatcaacagattatttag

SEQ ID NO: 345153 - DNA, 412 bp, Homo sapiens
acaatcagtatgttctactgacctgtggctaagtttgccaaagcattagagagtagtggaaggggttcctaaagccatattccacctggcatggcatgtacactaaatgaacattttctcacacaaaatgtactaccggttttcaaatatacatatgtatgactagtcaagcactaatttatgtagaagtgccactgaattcaaaagtctgcaagaggagcagatgagaaaaataatgtaagaaaagcacctggcatagaataatccttcaataaagagtatcactatgagaatataaataataatgcttcccaatcagcatttggttccatatgagggttaacaaagtgtattggtaacaaaggtaacacagccaccttactccaaggactagggccgctgtatctaggcc

SEQ ID NO: 345154 - DNA, 551 bp, Homo sapiens
ccagacttttatcagctagatgccattgcagggagtgtttgcccaccttctacttcccaatatctttattgcccttcactgttacattggattcccattttccttcttgaatgaaatctcaaagagttgataattatgcactattttgctatttccaagtggctggggcatgcccaaagcctctaatccaccattgttttattaggaattctgggttttttttgttttttctctttcagaagtttttgtttttgttttttcttagtcagatggtgccatcacagtttccggaatgaagcaatagacaaatgaaaagccttccaatttgagccaggtgtctgttgtttaagcacttgctagttcttggtagctcatgctagttttcctgttttctctggagggaagaccagaaggtgatgctgggaatcagtccccagtgctctccttatgtggactattgtgaggcacatacataccctcactgcctctgctcttagaggggcagacttcaaaacaaaagggatgagtgtgggggacatgtgcgtgggggt

SEQ ID NO: 345155 - DNA, 486 bp, Homo sapiens
ctgaaacggagaggggaaataatgtgcagtctcattctagagtctggaagggcccagaacagtttttaaaaattattcaactaatgtgtaaataagataaccccaccctctctctaattcccaactcttatgtagaggttagaactggggcaattggtagggatggggacagaataaagttgtccatttgagcagtatttgctaacctgaacagcttcaaatgaatgatatccattagaaaatgatatccattagaaaatgataccatgagtggaatagcttcttatatttgatgaatcgtcatctggtagttgctgtagttcactcacttgtcattctttcattcatttatcaaatatttattttgattttgccatgtgctcagccacaagagaagaccaggattatagatattatagtaacatgtctttggtggcctccactgaaaacacaagtggacgcggccgcgaatttagtagtagtagt

SEQ ID NO: 345156 - DNA, 432 bp, Homo sapiens
ctgaaacggagaggggaaataatgtgcagtctcattctagagtctggaagggcccagaacagtttttaaaaattattcaactaatgtgtaaataagataaccccaccctctctctaattcccaactcttatgtagaggttagaactggggcaattggtagggatggggacagaataaagttgtccatttgagcagtatttgctaacctgaacagcttcaaatgaatgatatccattagaaaatgatatccattagaattgctgtagttcactcacttgtcattctttcattcatttatcaaatatttattttgattttgccatgtgctcagccacaagagaagaccaggattatagatattatagtaacatgtctttggtggcctccactgaaaacacaagtggacgcggccgcgaatttagtagtagtagt

SEQ ID NO: 345157 - DNA, 851 bp, Homo sapiens
aaataaataaataaataaataaataaataaataaataaatagaaaaggaaaaagaaagaaaaagcttctctgtttcagagtagggcatcctcatacagcaagtggaggaacgtactgtctttaagtttttcttatgtagggatcttttctatgtaaagaataaactacctgtgcctatgtgcatgtgggctgacagcatcacaaaatttattactctgttgatttaaagaaaactatcctttacattttagcacccaagtgcattaaaacataactataattatcttgaaagcacatattgttataggtattgggacatcaggacattctattgttgtgggagtgtaaggatacttgcaggcatcttcaggctgttttcttcatgggaaacattttgtgatcatgggttgtgactgacaaggagtgtttcttgttagtgtcaagatggagctgaacttaaattggtgttactctggctcccctaggcacctgcttccctaacacttgtataggcaaaaggcaaataaatgtaacaggattatgttttccatagaaggctgatgtatgagatacaacaattttttttttttttggagacagtatcttgctctgtgacccagcctagagcagtggtgcgatgatggcttactgcagccttgacctccccagctcaagcacctccgcctctcaagtagctaagactacaattgcccaccagcacacctgtcgaaggacggtgttctggccaaagacatcagctaagaaaggaaactgggtcctacggcttggactttccagccctaagagacccgcaagacaaaacacctggttcttgccagcctctagagaat

SEQ ID NO: 345158 - DNA, 318 bp, Homo sapiens
attaactctgactcctgacagtaactctacagaggttctgctgttacccagttttacatagaaacatggccagcggacgcagttagaaaatggcaaagtggggattagaaactaggcagtttgactccagagtctgtgcccctgtccacttggctccactgctggggaagaggcctctgaagcagcaggaccatctgctgtgccgtgtgtagtggtactctatcttcctggtgtgatgttgtgttctactttgcattttcatgtctttccttatacaggtctcaaaatcatttacttttttttttttttttttgagac

SEQ ID NO: 345159 - DNA, 687 bp, Homo sapiens
aaccctgaagtcatgcatcctctgttgtatgggagtaagtggattgttatgaaaatattcagtgcaataaactgaatgtttatgtctcaccaaagttcttatgttgaaatcctaacccccattgtaatgttattagggggtcaggcctttggaaggtgattagttcttgaggatggaaacctcataaatgtaattagtgcccttataaaagaaccccaaaaagctccctccctcatcccaccatgtgaaaacacagcaagaaggtgacatctgcaacccaaaagagggccttcagcagaacctgaccaagctgaaccgtgatcttggacttccagcctccggaactgtaagaaataagtgcttgttgtacaagccactgtggtattctgttaaagcagcacaaattgaccaagacgctcaacctacaccaatgatcctggaggctggcaaatgaatagcactgaatgacagtataatagtgccgacagtaataaaagaacaaaagatgtatgttattatgaaattatgaagaatattattgacttcagtattgctacctccccttggatataatgaggtcacacataacagaacacagatatagataagccagtaaaaatactctgacaaagttccaggaaatggctttttcgaaacatgggacagctgccaaacaaaaaagaaatt

SEQ ID NO: 345160 - DNA, 177 bp, Homo sapiens
tcaggaaaaacaatgcctgtctttgtctgactcaaaaagcatgctgaatggacttttcatcctgtggctgtgatcagttcctaaagcagaggaatctgcagcctaatgacacatcaggaattgatggaaccccagcggacagcttctatgaggtgtgtgggtggcggatgtgaaatc

SEQ ID NO: 345161 - DNA, 754 bp, Homo sapiens
tcaggaaaaacaatgcctgtctttgtctgactcaaaaagcatgctgaatggacttttcatcctgtggctgtgatcagttcctaaagcagaggaatctgcagcctaatgacacatcaggaattgatggaaccccagcggacagcttctatgaggagattaggactctcagaagagacccagaggcgtggccacacagagaaaaagatcatgtggggacacagtgaaaaggcagccatcataagccacagagagaggactcagaagaaaccaactctgctgacaccttcatcttgaacttctagcctctagaactgtgaaaaaacaaatttctgttgttaagacacccggtctgtggtattttgttaagacagccctagcaaactaacacaattttgtacactaaataaagtccaattcaattttaattttatagaaactgaaacaaataatttaaagatttacttagtaaattacttcagattgggatcaaatgtgtacatgaattatgaaaatgtaagaaatggatatttaaataagtataccagaacataaaaattccagtgcctggttttttttttttttttgaaagccacttatcccaacaataaaactgatgctcaaaataaaaaactggcctcgttggcctcaaggggggagcttttggggccgcttccttttgggggggggtaatttattgatccttggttattggaattgttgggctccgggcgtttgggtttggggaagcgggttt

SEQ ID NO: 345162 - DNA, 625 bp, Homo sapiens
tcaggaaaaacaatgcctgtctttgtctgactcaaaaagcatgctgaatggacttttcatcctgtggctgtgatcagttcctaaagcagaggaatctgcagcctaatgacacatcaggaattgatggaaccccagcggacagcttctatgaggagattaggactctcagaagagacccagaggcgtggccacacagagaaaaagatcatgtggggacacagtgaaaaggcagccatcataagccacagagagaggactcagaagaaaccaactctgctgacaccttcatcttgaacttctagcctctagaactgtgaaaaaacaaatttctgttgttaagacacccggtctgtggtattttgttaagacagccctagcaaactaacacaattttgtacactaaataaagtccaattcaattttaattttatagaaactgaaacaaataatttaaagatttacttagtaaattacttcagattgggatcaaatgtgtacatgaattatgaaaatgtaagaaatggatatttaaataagtataccagaacataaaaattccagtgcctggttttttttttttttttgaaagccacttatcccaacaataaaactgatgctcaaaata

SEQ ID NO: 345163 - DNA, 928 bp, Homo sapiens
tcaggaaaaacaatgcctgtctttgtctgactcaaaaagcatgctgaatggacttttcatcctgtggctgtgatcagttcctaaagcagaggaatctgcagcctaatgacacatcaggaattgatggaaccccagcggacagcttctatgaggagattaggactctcagaagagacccagaggcgtggccacacagagaaaaagatcatgtggggacacagtgaaaaggcagccatcataagccacagagagaggactcagaagaaaccaactctgctgacaccttcatcttgaacttctagcctctagaactgtgaaaaaacaaatttctgttgttaagacacccggtctgtggtattttgttaagacagccctagcaaactaacacaattttgtacactaaataaagtccaattcaattttaattttatagaaactgaaacaaataatttaaagatttacttagtaaattacttcagattgggatcaaatgtgtacatgaattatgaaaatgtaagaaatggatatttaaataagtataccagaacataaaaattccagtgcctggttttttttttttttttgaaagccacttatcccaacaataaaactgatgctcaaaatattttgggacctatctttatactctgttaattatgcactcaagaaaataagtgtgactatattacagccactccatttttgtttgtttgtttatgttattcagcttagtcatttaaacaattttcactgcaatcgctacaagttttgttgtttcttagtattgaatccactctcaagggatgatgactttccaccatgaactttgaaaacagttccaaagaaaacttcaaaaaggttttgagtgcttaggatcaatgtcaatccagtgggtaccttgattttttacctcctacagtcgaagctt

SEQ ID NO: 345164 - DNA, 406 bp, Homo sapiens
tctcttgcttggatccttttctaagggggactggtgaatatctctggacccaggaccaggtgatgtggctctgcagcctgggttctgcccacatattaaattgtgacatatacttaaagaagcacctatatgatatgactgtcttcttctgcctgagccctgcctactggtgacattggaccatatctctgagcccctgacctaagtgatgggactctcttctgtctgggcctttacaatgggaagattgtgacatgttgatgagcccagcacttcggtattgtgactctcgtcttgttgctgaacaatgcccgtgaacaggacttttgccgtatttcagagcccagcacccagttgatgttactcttctgcataaacaggtcatgcataaagagggaattatggt

SEQ ID NO: 345165 - DNA, 1259 bp, Homo sapiens
ccgctgtccacccagccaacccagatcacctctggcctttcctgtgccttccgggcttgctgctggggggaaacctccagagtcccactttggtaataagaggtctctgccctttctccctgggcagcaggatgttgtaatggaaaatgagtggacctaggcttcagagactctggtcccctggctttgaatccccttctgccactatcccagtcaaggactgattcagaacctaattttcttcatttggaaaataatgttctgatagaggtgacttttgtggtacttgagaccatatgattcctatcattaccaaccaatattttccgattgtttttgccccatgtgacttctctgtgattcctcctggcaaggaagttttacaggaaagcagggccacttttgggatcctgtgctgggctggatcattttcctggactggacctagtccacaagctgctggcatctgtttctcctcatggatctctctctgcccttgtatacacctgcattcaaaaatgatcacgggctgcctgtgctctggtcatcaataacgcagggagaggaattgctgaaagccgtttcccgtgtttggagggttcacacctgtccctttcaaatgctggcgctttcacacactccttctctcctgccagcaccttctggtctcaggagcattgcaggatgttgtgtgagtgagtgatgggagacactttagtatggcttttttcagcttagcctcctgttatcagagagcagtctctttcagtgtcaaggtttgagtactagatggtggagaaagcctgtgtgaattatttttaatgaataagtgtgatgatgggtggcatacagtcactgccttaagattttcaaagagaagcagccttttggaggtggtgggcctgggcaggtctttcaaggagtgggatgtgatgggcagtagaaaggtattccagggaggggtagcaacatgagaaggtctttcaaggattgggatgtgatgggcagtagaaaggtattccagggaggggtagcagcatgagaaggtctttgagtctgggatgagcaagagtgtctagtcccaccagggagacagatgtgtaggcaagtaatgacagcatggagggatggctgctggggtgatccttggctcccagcacggcgaggtggacatctatgggaggggccctgagaggtctcttgagctgtttctgccagttgcacatctgctcagttgcctgttaagactcttaagacag

SEQ ID NO: 345166 - DNA, 505 bp, Homo sapiens
tgagtgaccatgagtgaaatcagctgaagtgctcagaaaaatactcacttctggtttcctaacaggactcattcaatcatttagtcattcaacaaacacttctggagcacctattgaacatcaggatttgtgccggctgctgtcagtccacagttctcaaaaggtgctctcagaagtttgggggcggggagagtgggtggtggtgatacctgggatgacatggagttctttttttgtttaatttaaccacttagaaaaaagttctgcttaaaaaaacaaaggattgcaatcactatagtagaaggatatagaaatgaaaacggtcgatttcccatgcccaagagtttataacttggttctagtcatggccaccatttatttagcatgtactatgggcaaggcaccacagaggctatttttattttattttattttattttattttattttattttatttattttattttattttactttgagatagagtctcgcattgtcgccca

SEQ ID NO: 345167 - DNA, 654 bp, Homo sapiens
agtcgggcccatccacccataattttagtgatgaggggcagtaaccatgctgcatattgtgtttaggtcatgactttgtgaaaactacaaagagtgctagaagaatatagaagcatgctgcatattgtgtttaggtcatgactttgtgaaaactacaaagagtgctagaagaatatagaaacctggccaggtacacagcaaaaaatgaaaaccaaggttacaggctaacccatgcataaaaatgagagcctgttgctacctaattacaattccttctccttttcctttgtaaatgcccacaatttgaaggcagagagagacacccacaagagcacagccccaccatcgggaacaaaaacttgctaacaagtaataacatttagatttctgaactaaaagcatagtttttaccatatggaaggaaaaaaatgtagtaggaaacactgaccacaatacttagtacaagagccaggcaactacaaagctcaagatctgattgttttcagcgtccaaatataccagtggattttaatgtatttataaacttactttgttagtataatgaagaatccctgcatacctacattattttttaaagtggattggggaaagtgatcattctgtaagcaggatatagtgactccttctggaaga

SEQ ID NO: 345168 - DNA, 2722 bp, Homo sapiens
ggaaagcggaagtgtgggagggtctgcggggcgggctcaggaggtccgcgggaggatggagcagtgagcgggtctgggcggctgctggcagcgccatggagacggtacagctgaggaacccgccgcgccggcagctgaaaaagttggatgaagatagtttaaccaaacaaccagaagaagtatttgatgtcttagagaaacttggagaagggtcctatggcagcgtatacaaagctattcataaagagaccggccagattgttgctattaagcaagttcctgtggaatcagacctccaggagataatcaaagaaatctctataatgcagcaatgtgacagccctcatgtagtcaaatattatggcagttattttaagaacacagacttatggatcgttatggagtactgtggggctggttctgtatctgatatcattcgattacgaaataaaacgttaacagaagatgaaatagctacaatattacaatcaactcttaagggacttgaataccttcattttatgagaaaaatacaccgagatatcaaggcaggaaatattttgctaaatacagaaggacatgcaaaacttgcagattttggggtagcaggtcaacttacagataccatggccaagcggaatacagtgataggaacaccattttggatggctccagaagtgattcaggaaattggatacaactgtgtagcagacatctggtccctgggaataactgccatagaaatggctgaaggaaagcccccttatgctgatatccatccaatgagggcaatcttcatgattcctacaaatcctcctcccacattccgaaaaccagagctatggtcagataactttacagattttgtgaaacagtgtcttgtaaagagccctgagcagagggccacagccactcagctcctgcagcacccatttgtcaggagtgccaaaggagtgtcaatactgcgagacttaattaatgaagccatggatgtgaaactgaaacgccaggaatcccagcagcgggaagtggaccaggacgatgaagaaaactcagaagaggatgaaatggattctggcacgatggttcgagcagtgggtgatgagatgggcactgtccgagtagccagcaccatgactgatggagccaatactatgattgagcacgatgacacgttgccatcacaactgggcaccatggtgatcaatgcagaggatgaggaagaggaaggaactatgaaaagaagggatgagaccatgcagcctgcgaaaccatcctttcttgaatattttgaacaaaaagaaaaggaaaaccagatcaacagctttggcaagagtgtacctggtccactgaaaaattcttcagattggaaaataccacaggatggagactacgagtttcttaagagttggacagtggaggaccttcagaagaggctcttggccctggaccccatgatggagcaggagattgaagagatccggcagaagtaccagtccaagcggcagcccatcctggatgccatagaggctaagaagagacggcaacaaaacttctgagcaaggccaggctgtgagggccccagctccacccaggctttgggtgaattctggatggcttgcctcatgtttgttagccagcacttctgctctgtcgtctctccacagcacctttgtgaactcaggaatgtgcgccagtgggaagggctctcttgacagtcagcgtgccatcttgatgtgtgtatgtacattggtcaggtatattatctcaaaggatttatattggcgcttttaactcagagttttaaaccccaggaacagagactcctagttgagtgatagctgggaaagttttacattgtctgtttttcttctcccaatagctttcaattgttctttctggaagacttttaaaaaaatataaatatgcatatatatatataaattataaatagattccccacgcagtgtggtggcatctctgtacaggtacagttttaaacggtttgcctcttttctgtaagattatggtactgtggaacatgagggcagaggacaccgggaggctgttagggggtcactgaatcccaggagccaacctccccctttgcagggctgcatttaaaaattaggtttgggacagttcttgtaccgtggtttcagccttgtgtggtcatcactggcttctggagctattggtgatgtccaagggaaagctttgagagtttatgtttactctttgagtcccaggagaagcctggcaccctctttgcaaattggcctttgctctttcaatgcctttcatccatctccactctctcaactgcctaaagtcacagcacagatactgcccagtgccttaagaggagacatgatctctaccagggactctcagcaaacacgggactgtgttcagtccacaaaggaaaagcgtttttgaagctctcattgttcatgtaaaaatcatacacgtggcatgttgctccacattccttacacacaggggtagaggggattgcttttgtgacccacgttcaaatatgtgactgttttcttttctcttttactgctaagcagcctggaaaggataaatgaatattagactaagatttgttttccaggaggctcaatctgaacacacagaatgtcagagctggaagggactatagagatcatctgatctgatcctcttgtacggatgatcgcaaaactgaggtgtagag

SEQ ID NO: 345169 - DNA, 2695 bp, Homo sapiens
ggaaagcggaagtgtgggagggtctgcggggcgggctcaggaggtccgcgggaggatggagcagtgagcgggtctgggcggctgctggcagcgccatggagacggtacagctgaggaacccgccgcgccggcagctgaaaaagttggatgaagatagtttaaccaaacaaccagaagaagtatttgatgtcttagagaaacttggagaagggtcctatggcagcgtatacaaagctattcataaagagaccggccagattgttgctattaagcaagttcctgtggaatcagacctccaggagataatcaaagaaatctctataatgcagcaatgtgacagccctcatgtagtcaaatattatggcagttattttaagaacacagacttatggatcgttatggagtactgtggggctggttctgtatctgatatcattcgattacgaaataaaacgttaacagaagatgaaatagctacaatattacaatcaactcttaagggacttgaataccttcattttatgagaaaaatacaccgagatatcaaggcaggaaatattttgctaaatacagaaggacatgcaaaacttgcagattttggggtagcaggtcaacttacagataccatggccaagcggaatacagtgataggaacaccattttggatggctccagaagtgattcaggaaattggatacaactgtgtagcagacatctggtccctgggaataactgccatagaaatggctgaaggaaagcccccttatgctgatatccatccaatgagggcaatcttcatgattcctacaaatcctcctcccacattccgaaaaccagagctatggtcagataactttacagattttgtgaaacagtgtcttgtaaagagccctgagcagagggccacagccactcagctcctgcagcacccatttgtcaggagtgccaaaggagtgtcaatactgcgagacttaattaatgaagccatggatgtgaaactgaaacgccaggaatcccagcagcgggaagtggaccaggacgatgaagaaaactcagaagaggatgaaatggattctggcacgatggttcgagcagtgggtgatgagatgggcactgtccgagtagccagcaccatgactgatggagccaatactatgattgagcacgatgacacgttgccatcacaactgggcaccatggtgatcaatgcagaggatgaggaagaggaaggaactatgaaaagaagggatgagaccatgcagcctgcgaaaccatcctttcttgaatattttgaacaaaaagaaaaggaaaaccagggtccactgaaaaattcttcagattggaaaataccacaggatggagactacgagtttcttaagagttggacagtggaggaccttcagaagaggctcttggccctggaccccatgatggagcaggagattgaagagatccggcagaagtaccagtccaagcggcagcccatcctggatgccatagaggctaagaagagacggcaacaaaacttctgagcaaggccaggctgtgagggccccagctccacccaggctttgggtgaattctggatggcttgcctcatgtttgttagccagcacttctgctctgtcgtctctccacagcacctttgtgaactcaggaatgtgcgccagtgggaagggctctcttgacagtcagcgtgccatcttgatgtgtgtatgtacattggtcaggtatattatctcaaaggatttatattggcgcttttaactcagagttttaaaccccaggaacagagactcctagttgagtgatagctgggaaagttttacattgtctgtttttcttctcccaatagctttcaattgttctttctggaagacttttaaaaaaatataaatatgcatatatatatataaattataaatagattccccacgcagtgtggtggcatctctgtacaggtacagttttaaacggtttgcctcttttctgtaagattatggtactgtggaacatgagggcagaggacaccgggaggctgttagggggtcactgaatcccaggagccaacctccccctttgcagggctgcatttaaaaattaggtttgggacagttcttgtaccgtggtttcagccttgtgtggtcatcactggcttctggagctattggtgatgtccaagggaaagctttgagagtttatgtttactctttgagtcccaggagaagcctggcaccctctttgcaaattggcctttgctctttcaatgcctttcatccatctccactctctcaactgcctaaagtcacagcacagatactgcccagtgccttaagaggagacatgatctctaccagggactctcagcaaacacgggactgtgttcagtccacaaaggaaaagcgtttttgaagctctcattgttcatgtaaaaatcatacacgtggcatgttgctccacattccttacacacaggggtagaggggattgcttttgtgacccacgttcaaatatgtgactgttttcttttctcttttactgctaagcagcctggaaaggataaatgaatattagactaagatttgttttccaggaggctcaatctgaacacacagaatgtcagagctggaagggactatagagatcatctgatctgatcctcttgtacggatgatcgcaaaactgaggtgtagag

SEQ ID NO: 345170 - DNA, 2765 bp, Homo sapiens
ggaaagcggaagtgtgggagggtctgcggggcgggctcaggaggtccgcgggaggatggagcagtgagcgggtctgggcggctgctggcagcgccatggagacggtacagctgaggaacccgccgcgccggtcttcacatcctcctcagctcttcagaacctgacattgggaggcagctgaaaaagttggatgaagatagtttaaccaaacaaccagaagaagtatttgatgtcttagagaaacttggagaagggtcctatggcagcgtatacaaagctattcataaagagaccggccagattgttgctattaagcaagttcctgtggaatcagacctccaggagataatcaaagaaatctctataatgcagcaatgtgacagccctcatgtagtcaaatattatggcagttattttaagaacacagacttatggatcgttatggagtactgtggggctggttctgtatctgatatcattcgattacgaaataaaacgttaacagaagatgaaatagctacaatattacaatcaactcttaagggacttgaataccttcattttatgagaaaaatacaccgagatatcaaggcaggaaatattttgctaaatacagaaggacatgcaaaacttgcagattttggggtagcaggtcaacttacagataccatggccaagcggaatacagtgataggaacaccattttggatggctccagaagtgattcaggaaattggatacaactgtgtagcagacatctggtccctgggaataactgccatagaaatggctgaaggaaagcccccttatgctgatatccatccaatgagggcaatcttcatgattcctacaaatcctcctcccacattccgaaaaccagagctatggtcagataactttacagattttgtgaaacagtgtcttgtaaagagccctgagcagagggccacagccactcagctcctgcagcacccatttgtcaggagtgccaaaggagtgtcaatactgcgagacttaattaatgaagccatggatgtgaaactgaaacgccaggaatcccagcagcgggaagtggaccaggacgatgaagaaaactcagaagaggatgaaatggattctggcacgatggttcgagcagtgggtgatgagatgggcactgtccgagtagccagcaccatgactgatggagccaatactatgattgagcacgatgacacgttgccatcacaactgggcaccatggtgatcaatgcagaggatgaggaagaggaaggaactatgaaaagaagggatgagaccatgcagcctgcgaaaccatcctttcttgaatattttgaacaaaaagaaaaggaaaaccagatcaacagctttggcaagagtgtacctggtccactgaaaaattcttcagattggaaaataccacaggatggagactacgagtttcttaagagttggacagtggaggaccttcagaagaggctcttggccctggaccccatgatggagcaggagattgaagagatccggcagaagtaccagtccaagcggcagcccatcctggatgccatagaggctaagaagagacggcaacaaaacttctgagcaaggccaggctgtgagggccccagctccacccaggctttgggtgaattctggatggcttgcctcatgtttgttagccagcacttctgctctgtcgtctctccacagcacctttgtgaactcaggaatgtgcgccagtgggaagggctctcttgacagtcagcgtgccatcttgatgtgtgtatgtacattggtcaggtatattatctcaaaggatttatattggcgcttttaactcagagttttaaaccccaggaacagagactcctagttgagtgatagctgggaaagttttacattgtctgtttttcttctcccaatagctttcaattgttctttctggaagacttttaaaaaaatataaatatgcatatatatatataaattataaatagattccccacgcagtgtggtggcatctctgtacaggtacagttttaaacggtttgcctcttttctgtaagattatggtactgtggaacatgagggcagaggacaccgggaggctgttagggggtcactgaatcccaggagccaacctccccctttgcagggctgcatttaaaaattaggtttgggacagttcttgtaccgtggtttcagccttgtgtggtcatcactggcttctggagctattggtgatgtccaagggaaagctttgagagtttatgtttactctttgagtcccaggagaagcctggcaccctctttgcaaattggcctttgctctttcaatgcctttcatccatctccactctctcaactgcctaaagtcacagcacagatactgcccagtgccttaagaggagacatgatctctaccagggactctcagcaaacacgggactgtgttcagtccacaaaggaaaagcgtttttgaagctctcattgttcatgtaaaaatcatacacgtggcatgttgctccacattccttacacacaggggtagaggggattgcttttgtgacccacgttcaaatatgtgactgttttcttttctcttttactgctaagcagcctggaaaggataaatgaatattagactaagatttgttttccaggaggctcaatctgaacacacagaatgtcagagctggaagggactatagagatcatctgatctgatcctcttgtacggatgatcgcaaaactgaggtgtagag

SEQ ID NO: 345171 - DNA, 1717 bp, Homo sapiens
ggaaagcggaagtgtgggagggtctgcggggcgggctcaggaggtccgcgggaggatggagcagtgagcgggtctgggcggctgctggcagcgccatggagacggtacagctgaggaacccgccgcgccggcagctgaaaaagttggatgaagatagtttaaccaaacaaccagaagaagtatttgatgtcttagagaaacttggagaagggtcctatggcagcgtatacaaagctattcataaagagaccggccagattgttgctattaagcaagttcctgtggaatcagacctccaggagataatcaaagaaatctctataatgcagcaatgtgacagccctcatgtagtcaaatattatggcagttattttaagaacacagacttatggatcgttatggagtactgtggggctggttctgtatctgatatcattcgattacgaaataaaacgttaacagaagatgaaatagctacaatattacaatcaactcttaagggacttgaataccttcattttatgagaaaaatacaccgagatatcaaggcaggaaatattttgctaaatacagaaggacatgcaaaacttgcagattttggggtagcaggtcaacttacagataccatggccaagcggaatacagtgataggaacaccattttggatggctccagaagtgattcaggaaattggatacaactgtgtagcagacatctggtccctgggaataactgccatagaaatggctgaaggaaagcccccttatgctgatatccatccaatgagggcaatcttcatgattcctacaaatcctcctcccacattccgaaaaccagagctatggtcagataactttacagattttgtgaaacagtgtcttgtaaagagccctgagcagagggccacagccactcagctcctgcagcacccatttgtcaggagtgccaaaggagtgtcaatactgcgagacttaattaatgaagccatggatgtgaaactgaaacgccaggaatcccagcagcgggaagtggaccaggacgatgaagaaaactcagaagaggatgaaatggattctggcacgatggttcgagcagtgggtgatgagatgggcactgtccgagtagccagcaccatgactgatggagccaatactatgattgagcacgatgacacgttgccatcacaactgggcaccatggtgatcaatgcagaggatgaggaagaggaaggaactatgaaaagtaaggctctgagtaaattcactgacttcttagaccaagcatacatatttcagagaagacagattctcatggttcatgcaggcttagccttgggttctttcttttgtcacaaccaaaggagtagaaaacttggaagtttgcgatggggacaggaggtttggtgagggggaaagctggcctgtggagtcaaagtcaagaaagcatcaacagtgagaaagaattttgcttttgaaccagagcagccattttctcattgaatgttgttattattttccttccttaccttgatctttggaggcaagcacatgcattgtttgatgcataattcctgtgaaggtgtaatgacattctgagttatttactgtacatacatcttcagtttattttcatgacagtttgggtctaacccaagtttaccaatactgtcagtcaatgaaagatgactgtacaagttgaaaagttctatccagtttct

SEQ ID NO: 345172 - DNA, 1963 bp, Homo sapiens
tcggccagatcccctttcatccaatgagggcaatcttcatgattcctacaaatcctcctcccacattccgaaaaccagagctatggtcagataactttacagattttgtgaaacagtgtcttgtaaagagccctgagcagagggccacagccactcagctcctgcagcacccatttgtcaggagtgccaaaggagtgtcaatactgcgagacttaattaatgaagccatggatgtgaaactgaaacgccaggaatcccagcagcgggaagtggaccaggacgatgaagaaaactcagaagaggatgaaatggattctggcacgatggttcgagcagtgggtgatgagatgggcactgtccgagtagccagcaccatgactgatggagccaatactatgattgagcacgatgacacgttgccatcacaactgggcaccatggtgatcaatgcagaggatgaggaagaggaaggaactatgaaaagaagggatgagaccatgcagcctgcgaaaccatcctttcttgaatattttgaacaaaaagaaaaggaaaaccagatcaacagctttggcaagagtgtacctggtccactgaaaaattcttcagattggaaaataccacaggatggagactacgagtttcttaagagttggacagtggaggaccttcagaagaggctcttggccctggaccccatgatggagcaggagattgaagagatccggcagaagtaccagtccaagcggcagcccatcctggatgccatagaggctaagaagagacggcaacaaaacttctgagcaaggccaggctgtgagggccccagctccacccaggctttgggtgaattctggatggcttgcctcatgtttgttagccagcacttctgctctgtcgtctctccacagcacctttgtgaactcaggaatgtgcgccagtgggaagggctctcttgacagtcagcgtgccatcttgatgtgtgtatgtacattggtcaggtatattatctcaaaggatttatattggcgcttttaactcagagttttaaaccccaggaacagagactcctagttgagtgatagctgggaaagttttacattgtctgtttttcttctcccaatagctttcaattgttctttctggaagacttttaaaaaaatataaatatgcatatatatatataaattataaatagattccccacgcagtgtggtggcatctctgtacaggtacagttttaaacggtttgcctcttttctgtaagattatggtactgtggaacatgagggcagaggacaccgggaggctgttagggggtcactgaatcccaggagccaacctccccctttgcagggctgcatttaaaaattaggtttgggacagttcttgtaccgtggtttcagccttgtgtggtcatcactggcttctggagctattggtgatgtccaagggaaagctttgagagtttatgtttactctttgagtcccaggagaagcctggcaccctctttgcaaattggcctttgctctttcaatgcctttcatccatctccactctctcaactgcctaaagtcacagcacagatactgcccagtgccttaagaggagacatgatctctaccagggactctcagcaaacacgggactgtgttcagtccacaaaggaaaagcgtttttgaagctctcattgttcatgtaaaaatcatacacgtggcatgttgctccacattccttacacacaggggtagaggggattgcttttgtgacccacgttcaaatatgtgactgttttcttttctcttttactgctaagcagcctggaaaggataaatgaatattagactaagatttgttttccaggaggctcaatctgaacacacagaatgtcagagctggaagggactatagagatcatctgatctgatcctcttgtacggatgatcgcaaaactgaggtgtagag

SEQ ID NO: 345173 - DNA, 1009 bp, Homo sapiens
ggaaagcggaagtgtgggagggtctgcggggcgggctcaggaggtccgcgggaggatggagcagtgagcgggtctgggcggctgctggcagcgccatggagacggtacagctgaggaacccgccgcgccggcagctgaaaaagttggatgaagatagtttaaccaaacaaccagaagaagtatttgatgtcttagagaaacttggagaagggtgagtgtaaagaaactataggtaggtcattgggtcccagtctttttcctgccccagaagaagcagaaggatatgaacctttcagcattgttctaggtggggtggaaggtaaatttacagcttgtgatgtccttcttcgctttactccaatccctattatagacagatttagtgattcctggtctttttaacacgaagaatatctattgttttctcttttgtaggatctgtatgattttatctacttaacagatagcactaattagattaaaattctataagaaactttttaatttgctgttcataatttctgattggtatgcaataactgtttcaatgaaaatcaatgtaatttagtattttaatatttgcacctttgtgaaatatagtaaataaattaagcactatcaccaccttcacagctacttaggagatccacaatcctgggttgggagccagtggatttcctgaaacacagatttgttaatgcgtttataaaatactgatgaaatgatattagtaatgtgcagtgaccatcattgactttcatgatacaattaagtttacataatttttatacttttatatatcattttaattcaatcctgtgtatttattccttcttctgtaatgaccaggaaattaaaatgttaatgacaccatttcttaagtttttcttgttaatttttgaataggcgatacaatcatatgattcaaaatttaaaaaaatattaagacgcatacaataaaaaaaaaaaaactgcctcctacctctctctgtctcttagccacccagaa

SEQ ID NO: 345174 - DNA, 1879 bp, Homo sapiens
ggaaagcggaagtgtgggagggtctgcggggcgggctcaggaggtccgcgggaggatggagcagtgagcgggtctgggcggctgctggcagcgccatggagacggtacagctgaggaacccgccgcgccggcagctgaaaaagttggatgaagatagtttaaccaaacaaccagaagaagtatttgatgtcttagagaaacttggagaagggtcctatggcagcgtatacaaagctattcataaagagaccggccagattgttgctattaagcaagttcctgtggaatcagacctccaggagataatcaaagaaatctctataatgcagcaatgtgacagccctcatgtagtcaaatattatggcagttattttaagaacacagacttatggatcgttatggagtactgtggggctggttctgtatctgatatcattcgattacgaaataaaacgttaacagaagatgaaatagctacaatattacaatcaactcttaagggacttgaataccttcattttatgagaaaaatacaccgagatatcaaggcaggaaatattttgctaaatacagaaggacatgcaaaacttgcagattttggggtagcaggtcaacttacagataccatggccaagcggaatacagtgataggaacaccattttggatggctccagaagtgattcaggaaattggatacaactgtgtagcagacatctggtccctgggaataactgccatagaaatggctgaaggaaagcccccttatgctgatatccatccaatgagggcaatcttcatgattcctacaaatcctcctcccacattccgaaaaccagagctatggtcagataactttacagattttgtgaaacagtgtcttgtaaagagccctgagcagagggccacagccactcagctcctgcagcacccatttgtcaggagtgccaaaggagtgtcaatactgcgagacttaattaatgaagccatggatgtgaaactgaaacgccaggaatcccagcagcgggaagtggaccaggacgatgaagaaaactcagaagaggatgaaatggattctggcacgatggttcgagcagtgggtgatgagatgggcactgtccgagtagccagcaccatgactgatggagccaatactatgattgagcacgatgacacgttgccatcacaactgggcaccatggtgatcaatgcagaggatgaggaagaggaaggaactatgaaaagaagggatgagaccatgcagcctgcgaaaccatcctttcttgaatattttgaacaaaaagaaaaggaaaaccagatcaacagctttggcaagagtgtacctggtccactgaaaaattcttcagattggaaaataccacaggatggagactacgagtttcttaagagttggacagtggaggaccttcagaagaggctcttggccctggaccccatgatggagcaggagattgaagagatccggcagaagtaccagtccaagcggcagcccatcctggatgccatagaggctaagaagagacggcaacaaaacttctgagcaaggccaggctgtgagggccccagctccacccaggctttgggtgaattctggatggcttgcctcatgtttgttagccagcacttctgctctgtcgtctctccacagcacctttgtgaactcaggaatgtgcgccagtgggaagggctctcttgacagtcagcgtgccatcttgatgtgtgtatgtacattggtcaggtatattatctcaaaggatttatatttttttaaaagtcttccagaaagaacaattgaaagctattgggagaagaaaaacagacaatgtaaaactttcccagctatcactcaactaggagtct

SEQ ID NO: 345175 - DNA, 1343 bp, Homo sapiens
ggaaagcggaagtgtgggagggtctgcggggcgggctcaggaggtccgcgggaggatggagcagtgagcgggtctgggcggctgctggcagcgccatggagacggtacagctgaggaacccgccgcgccggcagctgaaaaagttggatgaagatagtttaaccaaacaaccagaagaagtatttgatgtcttagagaaacttggagaagggtcctatggcagcgtatacaaagctattcataaagagaccggccagattgttgctattaagcaagttcctgtggaatcagacctccaggagataatcaaagaaatctctataatgcagcaatgtgacagccctcatgtagtcaaatattatggcagttattttaagaacacagacttatggatcgttatggagtactgtggggctggttctgtatctgatatcattcgattacgaaataaaacgttaacagaagatgaaatagctacaatattacaatcaactcttaagggacttgaataccttcattttatgagaaaaatacaccgagatatcaaggcaggaaatattttgctaaatacagaaggacatgcaaaacttgcagattttggggtagcaggtcaacttacagataccatggccaagcggaatacagtgataggaacaccattttggatggctccagaagtgattcaggaaattggatacaactgtgtagcagacatctggtccctgggaataactgccatagaaatggctgaaggaaagcccccttatgctgatatccatccaatgagggcaatcttcatgattcctacaaatcctcctcccacattccgaaaaccagagctatggtcagataactttacagattttgtgaaacagtgtcttgtaaagagccctgagcagagggccacagccactcagctcctgcagcacccatttgtcaggagtgccaaaggagtgtcaatactgcgagacttaattaatgaagccatggatgtgaaactgaaacgccaggaatcccagcagcgggaagtggaccaggacgatgaagaaaactcagaagaggatgaaatggattctggcacgatggttcgagcagtgggtgatgagatgggcactgtccgagtagccagcaccatgactgatggagccaatactatgattgagcacgatgacacgttgccatcacaactgggcaccatggtgatcaatgcagaggatgaggaagaggaaggaactatgaaaagaagggaggagaccagagcagcctccgaaaccatacattagggaataccaggaacaagaaagacaaagagcaaaccagagcaacaccagaggcaagagtcg

SEQ ID NO: 345176 - DNA, 1092 bp, Homo sapiens
ggaaagcggaagtgtgggagggtctgcggggcgggctcaggaggtccgcgggaggatggagcagtgagcgggtctgggcggctgctggcagcgccatggagacggtacagctgaggaacccgccgcgccggcagctgaaaaagttggatgaagatagtttaaccaaacaaccagaagaagtatttgatgtcttagagaaacttggagaagggtcctatggcagcgtatacaaagctattcataaagagaccggccagattgttgctattaagcaagttcctgtggaatcagacctccaggagataatcaaagaaatctctataatgcagcaatgtgacagccctcatgtagtcaaatattatggcagttattttaagaacacagacttatggatcgttatggagtactgtggggctggttctgtatctgatatcattcgattacgaaataaaacgttaacagaagatgaaatagctacaatattacaatcaactcttaagggacttgaataccttcattttatgagaaaaatacaccgagatatcaaggcaggaaatattttgctaaatacagaaggacatgcaaaacttgcagattttggggtagcaggtcaacttacagtaagtaaaaatattacttgtattgataattttcatttctgtcctgagaagcagttccttttatttacctatttttaaaatataatacttgacttaattgtattagtaaaaaatcacagaatctgccaataggttacaaaagagctagttagtgggttattttagatcttttcctggggttcaggtcacatagcttaactttgttcaacttttataaagatgaaaagtaaagcaagaaatgatagattactctagtgcactacatcaacatatttataaaaggaagaaaaattaagaggaagaaaaattaagtccaaactgctttccttgactaagacataacatcatctcattcaacttccaggtagtacttggcagttactgtactgaaaacactctgttcgtttgagtccaggatacagtctcttgattcttctcctgcctaactagtgcatggaagtgaaaaaaaaaa

SEQ ID NO: 345177 - DNA, 359 bp, Homo sapiens
ggttccacttcattatctccataatcaaacctggggctgcataagaagagcacaaccactctccaagtgatttaacaggatgctttaatgatgtattgagaatgaacattgatcccagatgagcaaagcaaggcttaaagagctaaggagactgtgggaatgaaggtttcgaagtggtctgaatggagaaagaagcggtgggagagctgagtcatcatgcagcacacggcaaggtagcagaaaaccctggagaacaacagcagcctgccccagagtcagccgtgagcgctgatttagtttcaggaaaacaataacactttgtcccattaaattaatgttgttaatttgaagtttattgg

SEQ ID NO: 345178 - DNA, 434 bp, Homo sapiens
tgatttaacaggatgctttaatgatgtattgagaatgaacattgatcccaggtaagaggtgctaaactgatactttaaaagcacaccacccatttcgctctgatggactctcctccttaaatcaccgtgttgtcatttttacgatgcagatctagctattgaggctacaggactgtgaaatgtcatataaaaaagccaataagaaaaaaataaaattaagttgcggagagcgtgtattagcatttcaaaaatgttctgttgcattatgctattattctctctctgtcaaggggcactgggatcctttcctccccataaagagactgtgccacagaatgtattagcgctccgttcctgaaacggcgtggcagctgaagggcatagttacaataatggcaaaatacattccggactaaatttgataggacgtgggg

SEQ ID NO: 345179 - DNA, 412 bp, Homo sapiens
aagaatgtgtctcttcaatgcacgttgtaactttctctttgaatttattgaagaaccacaaattaagtctgtgtctttattgaagcaattcaggtgatgggaagaggctcttgaatcaagaaagaaaggaagaaccaggagtggtgatattaggtaaggggagatttaggatcactcttccgcaatacaaaatgaacttcctgtgctaagaaaacttacagccctgaataaggagttgatggcatgtctatgcaacgtacaattttattcctgggacgtcgttggaaaaccattatattagatgatcttcaatcttttgtagttctgaaaatttatgaacgcttatacatgttgcttataaatcctaaatgaaaaaagggctccctgtcttaaatttatgttctatctaata

SEQ ID NO: 345180 - DNA, 818 bp, Homo sapiens
gccagcttcaaattctccagagagtctgattaggccacttgtggttgagtaaaccatgactggaggggtagtcttctgggcggcacaaggaagtagttttccagggcctctgctgctcaatctggagcctttgtacaaattaggaaaaagtgcccctcagggccaaagtataaaaaggcacccctctgggtagacaacctgctttactggtaggcttggcacttttagagggtgtgtagcggttgcttcttccctggactttagctcttatctgccctctggcaagtaataccatgttgtgtattttcttttctgtcttactgcattagctacatctttcaaaaacatgttgaaaagcagtgataagagggtcatccttgccttattattgatcttagcaggaaaacttcaagttttttgccattaaatatgagttaggcttggtggcttatgcctttaatctccgcacttagaggggctgaggtgagcagatcacttcagaccagactggccaacatggtgaaaatccgtccctactgaaaatagaaacattagccaggtacagtggcgcatgcctatagtcccagctactcaggaggctgaggtgggagaatcacttgagcctgggaggcagaggttgcagtgagctaagatcgtgccactacactacagccagggcaacagataccctgtcttagggaaaacaaaaacaacaatgaataaactctcaaaacctttttaaaaagcataaattagtgtagattttttatagatgttatcaatgagaaagatccctctattctagttgctgagagttt

SEQ ID NO: 345181 - DNA, 367 bp, Homo sapiens
gctgtctcccaaaaacacatctgatctttatgaaatctcagcttcagagctccccaggatgttactgttactgaaggggagtgaaaaggaggaagaagagagagaaggagggctccaaacccatcccaagttgattccttcatgatgtttccaagaatttaaagaataagtggtgaggctgggcgcagtgactcacgcctgtaatcccagcactttgggaggccaaagcaggcagatcacttgaggtcaggagttcgagaccagcctggtcaacgtggtgaaaccccatccttactaaaaatacaaaaattagccgggtgtggtggtgcatgccggtggtctcagctacttgggaggctgaggcagg

SEQ ID NO: 345182 - DNA, 761 bp, Homo sapiens
cagaaatgtcaattcaggaagagcagctgtgagtcccagcaggacttggctggcgggccaagagcccacttacagggtgctccagagcatcccttggtgcctaccactgcctaggcactaagcgggggcaggtgggagacagaagaatcaaaaacccagcccctctcctggaataatgttttccctgggggacacatcatataactgatgcaaggtggcccaagttcaattctgcaatcaagtgtgacctgaagagtaaaactgtgtgtatgtgtgggaggggagtgcagctagagagcaatccaggaggacttcctgtaggagacaagttttaagtcaggaactaagtgaggtgaaaagaatggattggttgaggaacaatttaggtcagacaggggggtgtccacaggtgcagaggtggggaattggcggtcagtaggggagcagatccaggaggggaaggaatgaggtagaaaggtagtgggtgacttgtggaggtgaggggtgtgcacaggtgtgggtatgtgtatgcatcacaggggagagagccatgagagctgaaagcttccagcagcttttgtgctgtcaagttgttcagtaagagggactggctggttgacagtggagaagtatgagacccagagatggggagaggcctgcccaaactctcccagctgctcatcagccaggccaggcctggaacccagatctctcaggctgatctgggagtaaggtcagagggaggaggctatcaacacatc

SEQ ID NO: 345183 - DNA, 881 bp, Homo sapiens
  misc_feature (1)..(1): n is a, c, g, or t
  misc_feature (5)..(5): n is a, c, g, or t
nctangcgtgaacgactctcttaatttccaccgctacaggtgtatggtggctgatgaaatgggtctaggaaagacaatccaggcaattggaattacttacttctataaagaggaatggcctctgttaatagtggtcccttcgtctctgaggtacccttggacagaagaaattgaaaaatggatcccagagctaagtccagaagaaatcaatgttattcagaataaaactgatgttaggagaatgttgaccagtaaagtgacagttctgggttatggtctcttaaccgcagatgcaaagactttgatagatgcactgaataatcagaacttcaaagtagttatagtggatgaatcacactacatgaaatccagaaatgcaactcgcagcaggattttattgccaatagtacagaaagccagacgagccattcttcttacaggaacaccagctttaggaaggcctgaagagctttttatgcagattgaagctctctttccacaaaaatttggaagatggaccgactatgcaaaaagatactgtaatgcacacatcagagtctcactcccatcgcccaggctggactgcagtggcaccatcatggctcactacaatctctgcctcctgggttcaatcgattcttctgccttagcctcctgagtagctgggattacaggcatgcgccaccatgcccggctaatttttttgtatttttaatagagatggggtttcaccatgttggtcaggctggtcttgaactcctgacctcaggttattaatcattctttattccagtgttttacaaatttgtggtagctatgaaataattggtggactattatacatataggtggatgacctatatgtaaaataaataaaagta

SEQ ID NO: 345184 - DNA, 1076 bp, Homo sapiens
cgctggggtttcgagtagccctggggcttcgagtagcggagtttcgtgagtttttactgactcgaggatcatcatgcctagggttcataacataaaaaagtctcttacacctcacatttcttgtgtgacaaatgaatctgataatctgctggattttttgcctgacagactaagagcaaagctacttccattccagaaagatggcatcatttttgccctcaaaagaaatggcaggtgtatggtggcttatgaaatgggtctaggaaagacaatccaggcaattggaattacttacttctataaagaggaatggcctctgttaatagtggtcccttcgtctctgaggtacccttggacagaagaaattgaaaaatggatcccagagctaagtccagaagaaatcaatgttattcagaataaaactgatgttaggagaatgttgaccagtaaagtgacagttctgggttatggtctcttaaccgcagatgcaaagactttgatagatgcactgaataatcagaacttcaaagtagttatagtggatgaatcacactacatgaaatccagaaatgcaactcgcagcaggattttattgccaatagtacagaaagccagacgagccattcttcttacaggaacaccagctttaggaaggcctgaagagctttttatgcagattgaagctctctttccacaaaaatttggaagatggaccgactatgcaaaaagatactgtaatgcacacatcagagtctcactcccatcgcccaggctggactgcagtggcaccatcatggctcactacaatctctgcctcctgggttcaatcgattcttctgccttagcctcctgagtagctgggattacaggcatgcgccaccatgcccggctaatttttttgtatttttaatagagatggggtttcaccatgttggtcaggctggtcttgaactcctgacctcaggttattaatcattctttattccagtgttttacaaatttgtggtagctatgaaataattggtggactattatacatataggtggatgacctatatgtaaaataaataaaagta

SEQ ID NO: 345185 - DNA, 1127 bp, Homo sapiens
aagccaaccaatggtaaaactaggaggacagccattttgcccacttgtaaaagagctaccttttcccacgagttggagcctgaggtgcggagtttcgtgagtttttactgactcgaggatcatcatgcctagggttcataacataaaaaagtctcttacacctcacatttcttgtgtgacaaatgaatctgataatctgctggattttttgcctgacagactaagagcaaagctacttccattccagaaagatggcatcatttttgccctcaaaagaaatggcaggtgtatggtggcttatgaaatgggtctaggaaagacaatccaggcaattggaattacttacttctataaagaggaatggcctctgttaatagtggtcccttcgtctctgaggtacccttggacagaagaaattgaaaaatggatcccagagctaagtccagaagaaatcaatgttattcagaataaaactgatgttaggagaatgttgaccagtaaagtgacagttctgggttatggtctcttaaccgcagatgcaaagactttgatagatgcactgaataatcagaacttcaaagtagttatagtggatgaatcacactacatgaaatccagaaatgcaactcgcagcaggattttattgccaatagtacagaaagccagacgagccattcttcttacaggaacaccagctttaggaaggcctgaagagctttttatgcagattgaagctctctttccacaaaaatttggaagatggaccgactatgcaaaaagatactgtaatgcacacatcagagtctcactcccatcgcccaggctggactgcagtggcaccatcatggctcactacaatctctgcctcctgggttcaatcgattcttctgccttagcctcctgagtagctgggattacaggcatgcgccaccatgcccggctaatttttttgtatttttaatagagatggggtttcaccatgttggtcaggctggtcttgaactcctgacctcaggttattaatcattctttattccagtgttttacaaatttgtggtagctatgaaataattggtggactattatacatataggtggatgacctatatgtaaaataaataaaagta

SEQ ID NO: 345186 - DNA, 924 bp, Homo sapiens
cgctggggtttcgagtagccctggggcttcgagtagcggagtttcgtgagtttttactgactcgagatgggtctaggaaagacaatccaggcaattggaattacttacttctataaagaggaatggcctctgttaatagtggtcccttcgtctctgaggtacccttggacagaagaaattgaaaaatggatcccagagctaagtccagaagaaatcaatgttattcagaataaaactgatgttagagacatgtcgaccagctaacagctgacagattctgcggcttactggctctacttagaccgcagcatgcacacagcactctctgactcagcactgcaactgcaactaactcagcaacccttcacacagctacgcttactacgctggatgaatcacactacatgaaatccagaaatgcaactcgcagcaggattttattgccaatagtacagaaagccagacgagccattcttcttacaggaacaccagctttaggaaggcctgaagagctttttatgcagattgaagctctctttccacaaaaatttggaagatggaccgactatgcaaaaagatactgtaatgcacacatcagagtctcactcccatcgcccaggctggactgcagtggcaccatcatggctcactacaatctctgcctcctgggttcaatcgattcttctgccttagcctcctgagtagctgggattacaggcatgcgccaccatgcccggctaatttttttgtatttttaatagagatggggtttcaccatgttggtcaggctggtcttgaactcctgacctcaggttattaatcattctttattccagtgttttacaaatttgtggtagctatgaaataattggtggactattatacatataggtggatgacctatatgtaaaataaataaaagta

SEQ ID NO: 345187 - DNA, 2116 bp, Homo sapiens
aaggtatttaatctaaaattttaccaactttgatttgtctggttaggatattttgttttagtggatatgctttaattcggatcaattactgcagtaaatctcatccctaagcatgaaatgttgtcaacaaatacccagttccatttagttatcaattagcccaaataagagatacaaagtataacagtgaccaaccttgtactgttgagttaatttgaacttctaatgacattgaggctaatgtctttagctcaaggttgatcttgttggccatatagatgtgaactagggaaggggaatcaacttacagcatatcacaattgatccttattaagtataaactcttgtaggtcttttcccagaaagaagcttgactagcaggaattctaaaactgaaatatatcaaacagcataaataggaatagacataaagtgctcttctattaaagcctttggtgatctatttactatgatttatattgtacagttcctcgatttacagaaaatcatcaaaattattaatctacatatcttatgtatataaatattgcctaatccatagaaaaaaggatataaagtattaaatatgtgatatatagctatatctatctatctatgtatctaatagggaagttcaagtcacttcaattgaagaaacatatctctgagcataggagcagcctcaggtcctatggtgggatgcagtggacaggagagggggaaattagaaaagagaactatataattgaaaaagggatataaagcattaaatatatgatatatagctatatctatgtatgtatctaacagagaagttcaagtcacttcaattaaagaaacatttttgagcatgggaccagcctcaggtcttatgctgggatgcagtagacaggagatggggaaattagaaaagagaactgtgtaattgaaatgacgtgggctgcacccttaaggaacttataattaatgatgatctgaataaacataccaggataaagatgtcaaatgagtgtgactcccttaaagtagattaaagtgtgcattctttgtttcctaaaatatgattttactgcttgaaattacatttgagttgaagtttagaaactaacatagcattaatatgaataatcatggaaaattattatcctttgaaaactgattgataaatatattccccctcctttagaaacagtcaaaagccacttcaaacaagtttcaaaataaaggaaggtagcaagttaggcgatggattatattttcttgcttgttgtataccagttgtcaaggacattataaggactcccaaaagcattttgaaggatggcaatatcaaataagtgtatgtcctctcaaatgaggcatttttaattgttaaaatctatttggacgctcaggttatgatatgtttatgaaaaataagcttcattatttttatagctacatcctattattcccttttagaaacaagaataacaataagttttaatagttgccatacttagcatttatcaggtctaatgaaaccaatattgaatctctgataaatattttctgatgttactagctatgggaaattagaactggcacaaccctgacattactaagtggaaatgttaggatttttcggcatcgcatgttagaatctctaaaatttaaacattcctgttaaatgactaaggtttgcttttatcaatatgaattctgaaggccaatatcataccattaactatgaaagcttttaattcctaaaaatagttttagagatattcaagcaatgctctcctaatatccatacgcaagtgtgtttatgacacaaattcactagtctgtttaaaaatgaattctttatattgactggtgttccacatatttcagtaatttctgttatgagaggacttgaaatagcaaattgccacacagttaactggatagaccacgtacgtggtgatcataaccacttggtactacacccagaaactcaaaattgtctttctcctgatgagatatgggtgtccttttgtacgtctaggcctaggtaaccagtggagtgattatattagcaaatgtgtttgtatccagagtcttcctgtcattgtaataaaaaatttatttaaaa

SEQ ID NO: 345188 - DNA, 365 bp, Homo sapiens
tgacaggatttaacagcatggaattggaacatgaatttgggagtaatcaacatattgtagtccaattcctgggaatctagtgtgagaacagaagaggacccaggggtgtaaacttgaaaataccaatatccaaggggaaggaggaagagagaaagtgagggaatgaagcagagaaaaagtgatatgagatgaaaaagaatcagaaaagcagagccatggaaactctgggagggaagacttccacagagtactagtaagataaacatatatttgtgctaaaggatatggcaatcagataggtcatcagtgaaactaagggaagcaatttcagcattgaagctgtgttgactattgctcaaatccca

SEQ ID NO: 345189 - DNA, 1319 bp, Homo sapiens
tctaagagaggatgaactgtaaaacgcacccaagctgactaaatgaggacttgcctcctaaaatcattctcacaaatctctcctgtaactggcctaaacaaactctcctggtaggccaagacaaccagcgagttcctcagggccaacctagctcctgaagaagaacttaggatatgaaggaggggtgcaagaaagtaagatgaaacaaacagtaagaataaaataaccttactaaaagcttacatttattgagcacttttaatgtgatgggctctttgctaagcattttatgggcactatattatttaatcttcatgacccaatgaagatgaccattatctacatttttaaaatgagaaaattacaagtccaatcataagtgcttcttcactggcctaaactgggaacaaaaattttcaggactaaagtaaaagctgaactcatacctagctcttgccaggcacagaggtaacagttaagcatacacaagtgacaaaatgactcatcagaattaaatccaaagtataaaatcaagactatctctacaatcctgccttagccggatgcttctgaaacattctctccttcaagatcagtgatcacattttccccaaactacagggactcagtaatgagaactgaaatacttttcagtatgatatccagtccagaacatgttgaaataccaaacaagaagacccataaccaaacatattaacaataaaatgctaaattatgtagcatgaatggctaccacatatctatgtcctccatcatttatttcaaaaagaaaagccttgtccctcacttcataatcagggctcaaatatattcagtatataggagctttttttaaaaaatgtctctccccctagacttgctttatcaattaaagattccattgattacagaaaagggtcataagacaaatgtgagtaatgtgttccagcattgtgctgaattactgatcacaaaataaaaatacaatccagcctggacattggatgactaagttttgttactcaggctttatactgataaccctaaagttccaaaacaagttgtgaatggcagctttgcaaaggtatacatgtgaactcaacgcttagtcaagctgaagtgcaggagggagttactcagctgtgacacacccagtgtaaccaagccacaaagttactttcacctgtacacaaaatactcttagaggaatttttttttaagtttctttgttcaagtgacaccatatcaagaaagccaagttcttcaaggaagcaaagttctaaggttaccaagaagcagctaaaaactaaaggatctta

SEQ ID NO: 345190 - DNA, 1375 bp, Homo sapiens
tctaagagaggatgaactgtaaaacgcacccaagctgactaaatgaggacttgcctcctaaaatcattctcacaaatctctcctgtaactggcctaaacaaactctcctggtaggccaagacaaccagcgagttcctcagggccaacctagctcctgaagaagaacttaggatatgaaggaggggtgcaagaaagtaagatgaaacaaacagtaagaataaaataaccttactaaaagcttacatttattgagcacttttaatgtgatgggctctttgctaagcattttatgggcactatattatttaatcttcatgacccaatgaagatgaccattatctacatttttaaaatgagaaaattacaagtccaatcataagtgcttcttcactggcctaaactgggaacaaaaattttcaggactaaagtaaaagctgaactcatacctagctcttgccaggcacagaggtaacagttaagcatacacaagtgacaaaatgactcatcagaattaaatccaaagtataaaatcaagactatctctacaatcctgccttagccggatgcttctgaaacattctctccttcaagatcagtgatcacattttccccaaactacagggactcagtaatgagaactgaaatacttttcagtatgatatccagtccagaacatgttgaaataccaaacaagaagacccataaccaaacatattaacaataaaatgctaaattatgtagcatgaatggctaccacatatctatgtcctccatcatttatttcaaaaagaaaagccttgtccctcacttcataatcagggctcaaatatattcagtatataggagctttttttaaaaaatgtctctccccctagacttgctttatcaattaaagattccattgattacagaaaagggtcataagacaaatgtgagtaatgtgttccagcattgtgctgaattactgatcacaaaataaaaatacaatccagcctggacattggatgactaagttttgttactcaggctttatactgataaccctaaagttccaaaacaagttgtgaatggcagctttgcaaaggtatacatgtgaactcaacgcttagtcaagctgaagtgcaggagggagttactcagctgtgacacacccagtgtaaccaagccacaaagttactttcacctgtacacaaaatactcttagaggaatttttttttaagtttctttgcacgcagattttgcactcagatttgtgcccacgtttctaattggagtggaaagaaatgcagtcaccaaatccacacccgcatgctctgtgtccaagggtttagtaatctgctctaccagtatatccagacacacaattgctgggga

SEQ ID NO: 345191 - DNA, 562 bp, Homo sapiens
attcttattagtgtcttatagtgaatgtatgtacattttttgttgtatagacctaaaagtagaattcctaagttagaagctttagcagctactaccaaacaattttccaaatggttatacaaatttacacctccaccaacggtcctgagaattcccattgctccacattcttgccactatttaataatgttaggttttaaattttaacaattcttggggtgtgtagtggtactctttgtaggaaaatgcaaattagtgatgttgagtacttttcactcatcagccgtttgggtatctggtaattcatgagataaagtacccactgcaatctggtgtccatttaaaaaaatgatgtatagttcttatttctggatatacagacctttataggatatatattgtttcaaatagctttcacactctgtgacttgcctttgggactctctcggtgatttttttaaatgaacggaagttctgagttttaatgaattcctatttatcagtatttttctttgtagttggtactgttcattttctgttaggaatttttgcctatctcaga

SEQ ID NO: 345192 - DNA, 425 bp, Homo sapiens
cactgcatgttctcactcataggtgggaattgaacaatgagaacacttggacacagggtggggaacatcacacatgggggcctgtcgtgtggtggggggaggggagagggatagcattagaagatatacctaatgtaaatgacgagttaatgggtgcagcacaccaacatggcacatgtatacatatgtaacaaacctgcacattgtgcacatgtaccctagaacttaaagtataataaaataaataaattttaaaaaaaagaatagacttttcaacaaatggtattgagacgtgcgtagccacattagaaaagaataaaatgaactccttcctaatgatatatccaaaaagtaattcaaagtgattcaaaaatcccaatgtaaggggtaaaaagctataaaatcttagaggaatacatctttgg

SEQ ID NO: 345193 - DNA, 1117 bp, Homo sapiens
ctttcatggtgaaagtttttagttcaggtttaaatgaaacttttctcttttcctctctagcccggatatgggtaaataaacgactagctgagcctatcgggcccagcatggcttgagaggcagcgggcgagctcgagcaactattatccacttcgctcgcattactcccgcgcactcgcaaaacgcggactggactcgtccccgggccgccgccgcccgccccggcgcagcctcgcgggacccagccgggctggggctaaggctggggccggggccggggccggggcggctcggcggccgctcggagcgcggcggcgtggggcggccggaacctgcactttccccccgggccgctgtctccttgccaaccgggcgttcgcatgtttgttttcacgtctaaaaggaacgatacaaaggtggaaaacgagtctgacgagcagacaaaagagggagaagggctgggaaacaaagttgtctattggcctcagaggttacaaggagccgacggagaaagaaaatatttaggcaatctgcaaaagcacggtctctcccaggagttatgtaattttcagaacgttcgcctctgccttgatttcgggccatcggcgtaattcccacaacttcttccaactgcaaaattaggaaagatttgaaatgaaggttagccccggtcagagagccctatggcctgtacccagtaggtactcaataaatgcttatgactgactgcacccgccccaaagagaatgtttacataactctttttgaaggcaccttaaacacgtatgtaggtttgtcagtgtatttccaaaggaatatgtccacgtattcccaaaggagcatttttcttacatgcacttggatgtcctctgtggagtatgtacagtggtgttttctgcgccaactttcacatgaacatttaactcttggtgccagaacagcgacagctatgggttagctcgtatcttcataaatctatatgacacctttcatcatgtttcagagcttcgtgtgcacagttaaccctctcgatatacattcatttcaaagagatgtggaacgaaactaaaatattatagacattatatttaataaatataacttcaataataaataa

SEQ ID NO: 345194 - DNA, 1068 bp, Homo sapiens
ctttcatggtgaaagtttttagttcaggtttaaatgaaacttttctcttttcctctctagcccggatatgggtaaataaacgactagctgagcctatcgggcccagcatggcttgagaggcagcgggcgagctcgagcaactattatccacttcgctcgcattactcccgcgcactcgcaaaacgcggactggactcgtccccgggccgccgccgcccgccccggcgcagcctcgcgggacccagccgggctggggctaaggctggggccggggccggggccggggcggctcggcggccgctcggagcgcggcggcgtggggcggccggaacctgcactttccccccgggccgctgtctccttgccaaccgggcgttcgcatgtttgttttcacgtctaaaaggaacgatacaaaggtggaaaacgagtctgacgagcagacaaaagagggagaagggctgggaaacaaagttgtctattggcctcagagcacggtctctcccaggagttatgtaattttcagaacgttcgcctctgccttgatttcgggccatcggcgtaattcccacaacttcttccaactgcaaaattaggaaagatttgaaatgaaggttagccccggtcagagagccctatggcctgtacccagtaggtactcaataaatgcttatgactgactgcacccgccccaaagagaatgtttacataactctttttgaaggcaccttaaacacgtatgtaggtttgtcagtgtatttccaaaggaatatgtccacgtattcccaaaggagcatttttcttacatgcacttggatgtcctctgtggagtatgtacagtggtgttttctgcgccaactttcacatgaacatttaactcttggtgccagaacagcgacagctatgggttagctcgtatcttcataaatctatatgacacctttcatcatgtttcagagcttcgtgtgcacagttaaccctctcgatatacattcatttcaaagagatgtggaacgaaactaaaatattatagacattatatttaataaatataacttcaataataaataa

SEQ ID NO: 345195 - DNA, 88 bp, Homo sapiens
gtatggtggcatccaggagttcacatgatgtcatcaggaatctgcctccctccatcacttagctctcttctcctctgtgctggcctca

SEQ ID NO: 345196 - DNA, 176 bp, Homo sapiens
tgaatgaatctaagtgaattttttgggcatctcatgccttaaagggggctggggctgcggcaaggaagtaggcgtcgttggtcactgcaagaggccccaggctccttggcccctttatctcctacatttgaatcccccccccaccccttttttgttgttgttgttttgatatggag

SEQ ID NO: 345197 - DNA, 309 bp, Homo sapiens
atcaaataagcctagttagtttcacatatcaaataagcctagttagtttcacatttatttgctcaatgcttcccatgcaaagatgcttaattagtttaatgtctgtgtttttttttttttttttaaagaaatagaacaagattttctaggggccgttgaaaaatcccagagttagtctaaggtcagaaaagacttcattcagaatttgatttttgagacgtttataaaaagaatacccaaaagattcaagattcaaagcacttgattaaataggattacaggtatttagttatccatttaaccaaagtg

SEQ ID NO: 345198 - DNA, 240 bp, Homo sapiens
gggcgatgtggcctgaggtcagctgcctactttgaaatgcatcgggaacaacggatagatgtttagatgggtggacagatggatgatgaatggatggatgatgggtagatggacagatttttggatcagtggatggatgatggctgggtggacagatgtttagatgggtggacagatggatgatggatggatgggtgaatgggtaggtggatggatgatgggcaggtggacagatgtttg

SEQ ID NO: 345199 - DNA, 547 bp, Homo sapiens
cctcacgtggtcgtccctctgtgtgtgtctgtgtcctcatctcctcttcttaggactccagtcctgttggaatagggcccattctagtgaccacattttaccgtaatcacctgtttacatgacctgtctccaaatacagtggatattggaaggacacagttcagcccatagcatactgttggctggtttattatgagaccatgatatttactattcattcatcccaagacaatgagaccttttacccatgtcccaggatacacatatcttaacatctgctgttgtctgaatacgtcctttccaaattcatatattgagacagtaacccccaaagctatggaattaaaaggtggagctttgggggaagtgattagatcgtgagggtgaagccgctgaacaggaccagtgccctcggtgaaggggcctgagggagcccgtttccccttggtccatgggaggacagcgagaagggcccttccctcaggaatgggcccttaccacgcagttcatcagcaggcgccccgaccacgacttccagcctccagaa

SEQ ID NO: 345200 - DNA, 219 bp, Homo sapiens
tattctttcaccagagaatttgttttccaggatcaatgagaatttcatatacacttgttgatttctctttttaaacatattacttttctttagtgagtccctttttttgtgggtcgcatttattaaaacagttgctaatttcagaacatttcttgctttcattgttttgccttcaaatattataatgcttgagggtaaggcaatacacacacacacaca

SEQ ID NO: 345201 - DNA, 390 bp, Homo sapiens
ctgctgctgatcagagctcaggagcagaagggggtggagggagagagtgttggaggccataagcatggggtggaggtctcaggacaaggcctcacctggggaacaggagaagccccaattttcagaagagaggggagttgattgagaagtgtaagattgttacttgagaataatcttgagggtatgaaggtagggtaagggagaatggtgataaactctctggggaatcagaaattgagatggagtagctgggtggggtggcatgtgcctgtagctactcaggaggctgaggtgggaggactgcttgagcccaggagttcaaggccgcagtgagctatgatcacaccactgcactccagcctgggtgacacagcgagaccttgtctctgg

SEQ ID NO: 345202 - DNA, 189 bp, Homo sapiens
ctgctgctgatcagagctcaggagcagaagggggtggagggagagagtgttggaggccataagcatggggtggaggtctcaggacaaggcctcacctggggaacaggagaagccccaattttcagaagagaggggagggggggtgctccgggctttgcgggcccggtttcagagaagatatcaccaccc

SEQ ID NO: 345203 - DNA, 524 bp, Homo sapiens
agagctggagctgctacaggaaaagttttgtaatcttgaaatatgttcagcttttttgtaggtatgttcaggtttgatgagtctgggtcctatagtaaatctatttttagacagatcctgggagctaagattttgttgttgttgttttttgagacggagttttgctcttgttgcctaggctggagtgcaatggcataatctcagttcactgtaacctccacctcctagctactcaggaagctgaggcgggagaattgcttgaacccaggaggcagaggttgcagtgagctgagatcgtgccattccactccagcccgggcaacagagcgagactccatctcaaaaaaaaaaaaaaaaaaaaaaaaggaatgcagatgtctttaaaggtacaaaggtacagactaactacaaatctacttctttaccttagagacatgacctataaatgttggagtgcttattattccaagacatcttggaatacttatatacattctctgtgcatgtttgtgctggaatctatt

SEQ ID NO: 345204 - DNA, 975 bp, Homo sapiens
tggccctgacttctgaaaccagtgttctggggagaggcatttgagagtgacccaggcctgggaaccggggcttttctcggtggtcttaggcctgttctgcaaccaaggcaaggccaggatttccggaaatatgaggaaggctttgacccctactctatgttcaccccagagcagatcatggggaaggatgtccggctcctacgcatcaagaaggagggatccttagacctggccctggaaggcggtgtggactcccccattgggaaggtggtcgtttctgctgtgtatgagcggggagctgctgagcggcatggtggcattgtgaaaggggacgagatcatggcaatcaacggcaagattgtgacagactacaccctggctgaggctgacgctgccctgcagaaggcctggaatcagggcggggactggatcgaccttgtggttgccgtctgccccccaaaggagtatgacgatgagctgaccttcttctgaagtccaaaaggggaaaccaaattcaccgttaggaaacagtgagctccggccccacctcgtgaacacaaagcctcggaccagccttgagagaggccacactacacacaccagatggcatccttgggacctgaatctatcacccaggaatctcaaactccctttggccctgaaccagggccagataaggaacagctcgggccactcttctgaaggccaatgtggaggaaagggagcagccagccgtttgggagaagatctcaaggatccagactctcattcctttcctctggcccagtgaatttggtctctcccagctctgggggactccttccttgaaccctaataagaccccactggagtctctctctctccatccctctcctctgccctctgctctaattgctgccaggattgtcactccaaaccttactctgagctcattaataaaataaacagatttattttccagctaaaaaaaaaaaa

SEQ ID NO: 345205 - DNA, 1578 bp, Homo sapiens
cacaaagtcatgcattccttgggaacccagctcccatctgctgcccatggatgctctggctgagctgaactgtgtctcatcattttgttatctgtgtcttatagcttttggatggttttatcgttacgatggcaaattcccaaccatccggaaggtaggacagggttgggtgctgtgctggtgtgctgcttagtttgctgtgggttttggcttttcccaaacattccttgtcctatcaacactaaatggtgtgacttggcctgttcacttggaaggctaactccatctccatctttgtgtcaggctgacatcaaatggcagggtgctgttgcaaaggcaacattgggagagggatccatggtgtgagacctatccaagtaccatctggcagtgtgtgcatcagcactggccctgatgggaacaggaaaggggcaggaagcttctcctgtgtttctctgtcaagtagaactagagaccaaggccagaagcttggggtcagacagagcaaattatcggagtgggtgtacctagtgcatgttatgagaccagctgtgccagacgcagcctggctgacgaggtggggatttgctgcctcaggttgggacagagacccactccaagcacagccctctcctaggaatatctctgcatgtgcccaggataatgcatttttccaatctctaggacctttaattttctctctaaatcttattacaatatctccaggccttgtaaaactctcttgtccttatctttctaaatcacattgacatttgattgtgaaaacattgctgttaatatctataattggacattcgagatgacttggtatttggaggtcaggcagcagcataaatctgggtgagctaaattggatgttatcacttgaccagcgctttctggcaagacgtcagtcccccagaaaccagagcactggcagctgagtgaccttgatgatatataattctccctgcctgtaaaatgggaatattaactgtgccaggaaaatctacccccttcctccagcacattgctattaaaataacaaacagtaatatttttcctgacagaggttaatgcctttatctaggaacatatatcaagatttgtatagcattgaataaacttggaacagagttcctctgggaattccttcacacactgtcctggtctcagaaaggccttggtctcataagactatctgtttcccttgacaggctgactttggtggcttaggatgcctcattgggttagatttctaattcttctctatattctgcctctactagaactcagctagagaggacaaaacacacacacacacacacaagcacacacacacatgcacacataggattttacttgaaaaaaataataaaggagacagatatgtcaaatctttttcaggcactaataacatgtaaatgtaaaagaactagaatcttctccacataccacctcccatcagaaatcatgtccttgaaagtgctgttgataaagaaatagggttgcctttcccctattccttaatctaattattccagaaacagctgtcattttggttttcattttcacttc

SEQ ID NO: 345206 - DNA, 654 bp, Homo sapiens
ggctgatcctaggccatggggcccagaaatggggatggagtgccggggcagatgcaccatccaactgagtgtgccccagagtcacacggcttctccccacaggactggatcgaccttgtggttgccgtctgccccccaaaggagtatgacgatgagctgaccttcttctgaagtccaaaaggggaaaccaaattcaccgttaggaaacagtgagctccggccccacctcgtgaacacaaagcctcggaccagccttgagagaggccacactacacacaccagatggcatccttgggacctgaatctatcacccaggaatctcaaactccctttggccctgaaccagggccagataaggaacagctcgggccactcttctgaaggccaatgtggaggaaagggagcagccagccgtttgggagaagatctcaaggatccagactctcattcctttcctctggcccagtgaatttggtctctcccagctctgggggactccttccttgaaccctaataagaccccactggagtctctctctctccatccctctcctctgccctctgctctaattgctgccaggattgtcactccaaaccttactctgagctcattaataaaataaacagatttattttccagctaaaaaaaaaaaa

SEQ ID NO: 345207 - DNA, 2245 bp, Homo sapiens
gacagagtgaaggtcccctggcactgatgttacagaagaattcggtggtaaggggcttctggagagtggcatgtgctatctaagcgagtggcccaaatccttcctgaaagcatttatccggcactacagccaccatcaggtggattttctgattgaaaatgatgcagagaaggactatctctatgatgtgctgcgaatgtaccaccagaccatggacgtggccgtgctcgtgggagacctgaagctggtcatcaatgaacccagccgtctgcctctgtttgatgccattcggccgctgatcccactgaagcaccaggtggaatatgatcagctgaccccccggcgctccaggaagctgaaggaggtgcgtctggaccgtctgcaccccgaaggcctcggcctgagtgtgcgtggtggcctggagtttggctgtgggctcttcatctcccacctcatcaaaggcggtcaggcagacagcgtcgggctccaggtaggggacgagatcgtccggatcaatggatattccatctcctcctgtacccatgaggaggtcatcaacctcattcgaaccaagaaaactgtgtccatcaaagtgagacacatcggcctgatccccgtgaaaagctctcctgatgagcccctcacttggcagtatgtggatcagtttgtgtcggaatctgggggcgtgcgaggcagcctgggctcccctggaaatcgggaaaacaaggagaagaaggtcttcatcagcctggtaggctcccgaggccttggctgcagcatttccagcggccccatccagaagcctggcatctttatcagccatgtgaaacctggctccctgtctgctgaggtgggattggagataggggaccagattgtcgaagtcaatggcgtcgacttctctaacctggatcacaaggaggctgtaaatgtgctgaagagtagccgcagcctgaccatctccattgtagctgcagctggccgggagctgttcatgacagaccgggagcggctggcagaggcgcggcagcgtgagctgcagcggcaggagcttctcatgcagaagcggctggcgatggagtccaacaagatcctccaggagcagcaggagatggagcggcaaaggagaaaagaaattgcccagaaggcagcagaggaaaatgagagataccggaaggagatggaacagattgtagaggaggaagagaagtttaagaagcaatgggaagaagactggggctcaaaggaacagctactcttgcctaaaaccatcactgctgaggtacacccagtaccccttcgcaagccaaagtatgatcagggagtggaacctgagctcgagcccgcagatgacctggatggaggcacggaggagcagggagagcaggatttccggaaatatgaggaaggctttgacccctactctatgttcaccccagagcagatcatggggaaggatgtccggctcctacgcatcaagaaggagggatccttagacctggccctggaaggcggtgtggactcccccattgggaaggtggtcgtttctgctgtgtatgagcggggagctgctgagcggcatggtggcattgtgaaaggggacgagatcatggcaatcaacggcaagattgtgacagactacaccctggctgaggctgacgctgccctgcagaaggcctggaatcagggcggggactggatcgaccttgtggttgccgtctgccccccaaaggagtatgacgatgagctgaccttcttctgaagtccaaaaggggaaaccaaattcaccgttaggaaacagtgagctccggccccacctcgtgaacacaaagcctcggaccagccttgagagaggccacactacacacaccagatggcatccttgggacctgaatctatcacccaggaatctcaaactccctttggccctgaaccagggccagataaggaacagctcgggccactcttctgaaggccaatgtggaggaaagggagcagccagccgtttgggagaagatctcaaggatccagactctcattcctttcctctggcccagtgaatttggtctctcccagctctgggggactccttccttgaaccctaataagaccccactggagtctctctctctccatccctctcctctgccctctgctctaattgctgccaggattgtcactccaaaccttactctgagctcattaataaaataaacagatttattttccagctaaaaaaaaaaaa

SEQ ID NO: 345208 - DNA, 2171 bp, Homo sapiens
tttacgagctatcgtcgacccagcgctcgctgaaagcattgatccggcactacagccaccatcaggtggattttctgattgaaaatgatgcagagaaggactatctctatgatgtgctgcgaatgtaccaccagaccatggacgtggccgtgctcgtgggagacctgaagctggtcatcaatgaacccagccgtctgcctctgtttgatgccattcggccgctgatcccactgaagcaccaggtggaatatgatcagctgaccccccggcgctccaggaagctgaaggaggtgcgtctggaccgtctgcaccccgaaggcctcggcctgagtgtgcgtggtggcctggagtttggctgtgggctcttcatctcccacctcatcaaaggcggtcaggcagacagcgtcgggctccaggtaggggacgagatcgtccggatcaatggatattccatctcctcctgtacccatgaggaggtcatcaacctcattcgaaccaagaaaactgtgtccatcaaagtgagacacatcggcctgatccccgtgaaaagctctcctgatgagcccctcacttggcagtatgtggatcagtttgtgtcggaatctgggggcgtgcgaggcagcctgggctcccctggaaatcgggaaaacaaggagaagaaggtcttcatcagcctggtaggctcccgaggccttggctgcagcatttccagcggccccatccagaagcctggcatctttatcagccatgtgaaacctggctccctgtctgctgaggtgggattggagataggggaccagattgtcgaagtcaatggcgtcgacttctctaacctggatcacaaggaggctgtaaatgtgctgaagagtagccgcagcctgaccatctccattgtagctgcagctggccgggagctgttcatgacagaccgggagcggctggcagaggcgcggcagcgtgagctgcagcggcaggagcttctcatgcagaagcggctggcgatggagtccaacaagatcctccaggagcagcaggagatggagcggcaaaggagaaaagaaattgcccagaaggcagcagaggaaaatgagagataccggaaggagatggaacagattgtagaggaggaagagaagtttaagaagcaatgggaagaagactggggctcaaaggaacagctactcttgcctaaaaccatcactgctgaggtacacccagtaccccttcgcaagccaaagtatgatcagggagtggaacctgagctcgagcccgcagatgacctggatggaggcacggaggagcagggagagcaggatttccggaaatatgaggaaggctttgacccctactctatgttcaccccagagcagatcatggggaaggatgtccggctcctacgcatcaagaaggagggatccttagacctggccctggaaggcggtgtggactcccccattgggaaggtggtcgtttctgctgtgtatgagcggggagctgctgagcggcatggtggcattgtgaaaggggacgagatcatggcaatcaacggcaagattgtgacagactacaccctggctgaggctgacgctgccctgcagaaggcctggaatcagggcggggactggatcgaccttgtggttgccgtctgccccccaaaggagtatgacgatgagctgaccttcttctgaagtccaaaaggggaaaccaaattcaccgttaggaaacagtgagctccggccccacctcgtgaacacaaagcctcggaccagccttgagagaggccacactacacacaccagatggcatccttgggacctgaatctatcacccaggaatctcaaactccctttggccctgaaccagggccagataaggaacagctcgggccactcttctgaaggccaatgtggaggaaagggagcagccagccgtttgggagaagatctcaaggatccagactctcattcctttcctctggcccagtgaatttggtctctcccagctctgggggactccttccttgaaccctaataagaccccactggagtctctctctctccatccctctcctctgccctctgctctaattgctgccaggattgtcactccaaaccttactctgagctcattaataaaataaacagatttattttccagctaaaaaaaaaaaa

SEQ ID NO: 345209 - DNA, 1626 bp, Homo sapiens
agctccgagggcgcctggcccggtcgcggtcgcggctctttccagctcctggcagccgggcacccgaaggaacgggtcgtgcaacgacgcagctggacctggcccagccatggaccgaaaagtggcccgagaattccggcataaggtggattttctgattgaaaatgatgcagagaaggactatctctatgatgtgctgcgaatgtaccaccagaccatggacgtggccgtgctcgtgggagacctgaagctggtcatcaatgaacccagccgtctgcctctgtttgatgccattcggccgctgatcccactgaagcaccaggtggaatatgatcagctgaccccccggcgctccaggaagctgaaggaggtgcgtctggaccgtctgcaccccgaaggcctcggcctgagtgtgcgtggtggcctggagtttggctgtgggctcttcatctcccacctcatcaaaggcggtcaggcagacagcgtcgggctccaggtaggggacgagatcgtccggatcaatggatattccatctcctcctgtacccatgaggaggtcatcaacctcattcgaaccaagaaaactgtgtccatcaaagtgagacacatcggcctgatccccgtgaaaagctctcctgatgagcccctcacttggcagtatgtggatcagtttgtgtcggaatctgggggcgtgcgaggcagcctgggctcccctggaaatcgggaaaacaaggagaagaaggtcttcatcagcctggtaggctcccgaggccttggctgcagcatttccagcggccccatccagaagcctggcatctttatcagccatgtgaaacctggctccctgtctgctgaggtgggattggagataggggaccagattgtcgaagtcaatggcgtcgacttctctaacctggatcacaaggaggctgtaaatgtgctgaagagtagccgcagcctgaccatctccattgtagctgcagctggccgggagctgttcatgacagaccgggagcggctggcagaggcgcggcagcgtgagctgcagcggcaggagcttctcatgcagaagcggctggcgatggagtccaacaagatcctccaggagcagcaggagatggagcggcaaaggagaaaagaaattgcccagaaggcagcagaggaaaatgagagataccggaaggagatggaacagattgtagaggaggaagagaagtttaagaagcaatgggaagaagactggggctcaaaggaacagctactcttgcctaaaaccatcactgctgaggtacacccagtaccccttcgcaagccaaagtatgatcagggagtggaacctgagctcgagcccgcagatgacctggatggaggcacggaggagcagggagagcagcttttggatggttttatcgttacgatggcaaattcccaaccatccggaagagccgtgagagactctttgtctcccagcagctggaacgccaagtctccaggaaatgcaagtgggtatccatggccatgatatctgtgcataaattccccttatttaaaaatataaagattcagctcatgtctataatgccagcactgtgggaggccaagacaggcgaatcacgtgaggttggg

SEQ ID NO: 345210 - DNA, 2251 bp, Homo sapiens
agctccgagggcgcctggcccggtcgcggtcgcggctctttccagctcctggcagccgggcacccgaaggaacgggtcgtgcaacgacgcagctggacctggcccagccatggaccgaaaagtggcccgagaattccggcataaggtggattttctgattgaaaatgatgcagagaaggactatctctatgatgtgctgcgaatgtaccaccagaccatggacgtggccgtgctcgtgggagacctgaagctggtcatcaatgaacccagccgtctgcctctgtttgatgccattcggccgctgatcccactgaagcaccaggtggaatatgatcagctgaccccccggcgctccaggaagctgaaggaggtgcgtctggaccgtctgcaccccgaaggcctcggcctgagtgtgcgtggtggcctggagtttggctgtgggctcttcatctcccacctcatcaaaggcggtcaggcagacagcgtcgggctccaggtaggggacgagatcgtccggatcaatggatattccatctcctcctgtacccatgaggaggtcatcaacctcattcgaaccaagaaaactgtgtccatcaaagtgagacacatcggcctgatccccgtgaaaagctctcctgatgagcccctcacttggcagtatgtggatcagtttgtgtcggaatctgggggcgtgcgaggcagcctgggctcccctggaaatcgggaaaacaaggagaagaaggtcttcatcagcctggtaggctcccgaggccttggctgcagcatttccagcggccccatccagaagcctggcatctttatcagccatgtgaaacctggctccctgtctgctgaggtgggattggagataggggaccagattgtcgaagtcaatggcgtcgacttctctaacctggatcacaaggaggctgtaaatgtgctgaagagtagccgcagcctgaccatctccattgtagctgcagctggccgggagctgttcatgacagaccgggagcggctggcagaggcgcggcagcgtgagctgcagcggcaggagcttctcatgcagaagcggctggcgatggagtccaacaagatcctccaggagcagcaggagatggagcggcaaaggagaaaagaaattgcccagaaggcagcagaggaaaatgagagataccggaaggagatggaacagattgtagaggaggaagagaagtttaagaagcaatgggaagaagactggggctcaaaggaacagctactcttgcctaaaaccatcactgctgaggtacacccagtaccccttcgcaagccaaagtatgatcagggagtggaacctgagctcgagcccgcagatgacctggatggaggcacggaggagcagggagagcaggatttccggaaatatgaggaaggctttgacccctactctatgttcaccccagagcagatcatggggaaggatgtccggctcctacgcatcaagaaggagggatccttagacctggccctggaaggcggtgtggactcccccattgggaaggtggtcgtttctgctgtgtatgagcggggagctgctgagcggcatggtggcattgtgaaaggggacgagatcatggcaatcaacggcaagattgtgacagactacaccctggctgaggctgacgctgccctgcagaaggcctggaatcagggcggggactggatcgaccttgtggttgccgtctgccccccaaaggagtatgacgatgagctgaccttcttctgaagtccaaaaggggaaaccaaattcaccgttaggaaacagtgagctccggccccacctcgtgaacacaaagcctcggaccagccttgagagaggccacactacacacaccagatggcatccttgggacctgaatctatcacccaggaatctcaaactccctttggccctgaaccagggccagataaggaacagctcgggccactcttctgaaggccaatgtggaggaaagggagcagccagccgtttgggagaagatctcaaggatccagactctcattcctttcctctggcccagtgaatttggtctctcccagctctgggggactccttccttgaaccctaataagaccccactggagtctctctctctccatccctctcctctgccctctgctctaattgctgccaggattgtcactccaaaccttactctgagctcattaataaaataaacagatttattttccagctaaaaaaaaaaaa

SEQ ID NO: 345211 - DNA, 2177 bp, Homo sapiens
agctccgagggcgcctggcccggtcgcggtcgcggctctttccagctcctggcagccgggcacccgaaggaacgggtcgtgcaacgacgcagctggacctggcccagccatggaccgaaaagtggcccgagaattccggcataaggtggattttctgattgaaaatgatgcagagaaggactatctctatgatgtgctgcgaatgtaccaccagaccatggacgtggccgtgctcgtgggagacctgaagctggtcatcaatgaacccagccgtctgcctctgtttgatgccattcggccgctgatcccactgaagcaccaggtggaatatgatcagctgaccccccggcgctccaggaagctgaaggaggtgcgtctggaccgtctgcaccccgaaggcctcggcctgagtgtgcgtggtggcctggagtttggctgtgggctcttcatctcccacctcatcaaaggcggtcaggcagacagcgtcgggctccaggtaggggacgagatcgtccggatcaatggatattccatctcctcctgtacccatgaggaggtcatcaacctcattcgaaccaagaaaactgtgtccatcaaagtgagacacatcggcctgatccccgtgaaaagctctcctgatgagcccctcacttggcagtatgtggatcagtttgtgtcggaatctgggggcgtgcgaggcagcctgggctcccctggaaatcgggaaaacaaggagaagaaggtcttcatcagcctggtaggctcccgaggccttggctgcagcatttccagcggccccatccagaagcctggcatctttatcagccatgtgaaacctggctccctgtctgctgaggtgggattggagataggggaccagattgtcgaagtcaatggcgtcgacttctctaacctggatcacaaggaggctgtaaatgtgctgaagagtagccgcagcctgaccatctccattgtagctgcagctggccgggagctgttcatgacagaccgggagcggctggcagaggcgcggcagcgtgagctgcagcggcaggagcttctcatgcagaagcggctggcgatggagtccaacaagatcctccaggagcagcaggagatggagcggcaaaggagaaaagaaattgcccagaaggcagcagaggaaaatgagagataccggaaggagatggaacagattgtagaggaggaagagaagtttaagaagcaatgggaagaagactggggctcaaaggaacagctactcttgcctaaaaccatcactgctgaggtacacccagtaccccttcgcaagccaaagtgatttccggaaatatgaggaaggctttgacccctactctatgttcaccccagagcagatcatggggaaggatgtccggctcctacgcatcaagaaggagggatccttagacctggccctggaaggcggtgtggactcccccattgggaaggtggtcgtttctgctgtgtatgagcggggagctgctgagcggcatggtggcattgtgaaaggggacgagatcatggcaatcaacggcaagattgtgacagactacaccctggctgaggctgacgctgccctgcagaaggcctggaatcagggcggggactggatcgaccttgtggttgccgtctgccccccaaaggagtatgacgatgagctgaccttcttctgaagtccaaaaggggaaaccaaattcaccgttaggaaacagtgagctccggccccacctcgtgaacacaaagcctcggaccagccttgagagaggccacactacacacaccagatggcatccttgggacctgaatctatcacccaggaatctcaaactccctttggccctgaaccagggccagataaggaacagctcgggccactcttctgaaggccaatgtggaggaaagggagcagccagccgtttgggagaagatctcaaggatccagactctcattcctttcctctggcccagtgaatttggtctctcccagctctgggggactccttccttgaaccctaataagaccccactggagtctctctctctccatccctctcctctgccctctgctctaattgctgccaggattgtcactccaaaccttactctgagctcattaataaaataaacagatttattttccagctaaaaaaaaaaaa

SEQ ID NO: 345212 - DNA, 2294 bp, Homo sapiens
gtggtctgcataggtctgatgcattggggtcagaggggcagcctggcctgtggctcctcttctctcctcacaactccagccctgaaaagctgctggggaggcccttggggatgacctctcctccctgaggtctgctatgggggcgggtgctgagcctggagctgtgattctgctattggattttccaggtggattttctgattgaaaatgatgcagagaaggactatctctatgatgtgctgcgaatgtaccaccagaccatggacgtggccgtgctcgtgggagacctgaagctggtcatcaatgaacccagccgtctgcctctgtttgatgccattcggccgctgatcccactgaagcaccaggtggaatatgatcagctgaccccccggcgctccaggaagctgaaggaggtgcgtctggaccgtctgcaccccgaaggcctcggcctgagtgtgcgtggtggcctggagtttggctgtgggctcttcatctcccacctcatcaaaggcggtcaggcagacagcgtcgggctccaggtaggggacgagatcgtccggatcaatggatattccatctcctcctgtacccatgaggaggtcatcaacctcattcgaaccaagaaaactgtgtccatcaaagtgagacacatcggcctgatccccgtgaaaagctctcctgatgagcccctcacttggcagtatgtggatcagtttgtgtcggaatctgggggcgtgcgaggcagcctgggctcccctggaaatcgggaaaacaaggagaagaaggtcttcatcagcctggtaggctcccgaggccttggctgcagcatttccagcggccccatccagaagcctggcatctttatcagccatgtgaaacctggctccctgtctgctgaggtgggattggagataggggaccagattgtcgaagtcaatggcgtcgacttctctaacctggatcacaaggaggctgtaaatgtgctgaagagtagccgcagcctgaccatctccattgtagctgcagctggccgggagctgttcatgacagaccgggagcggctggcagaggcgcggcagcgtgagctgcagcggcaggagcttctcatgcagaagcggctggcgatggagtccaacaagatcctccaggagcagcaggagatggagcggcaaaggagaaaagaaattgcccagaaggcagcagaggaaaatgagagataccggaaggagatggaacagattgtagaggaggaagagaagtttaagaagcaatgggaagaagactggggctcaaaggaacagctactcttgcctaaaaccatcactgctgaggtacacccagtaccccttcgcaagccaaagtatgatcagggagtggaacctgagctcgagcccgcagatgacctggatggaggcacggaggagcagggagagcaggatttccggaaatatgaggaaggctttgacccctactctatgttcaccccagagcagatcatggggaaggatgtccggctcctacgcatcaagaaggagggatccttagacctggccctggaaggcggtgtggactcccccattgggaaggtggtcgtttctgctgtgtatgagcggggagctgctgagcggcatggtggcattgtgaaaggggacgagatcatggcaatcaacggcaagattgtgacagactacaccctggctgaggctgacgctgccctgcagaaggcctggaatcagggcggggactggatcgaccttgtggttgccgtctgccccccaaaggagtatgacgatgagctgaccttcttctgaagtccaaaaggggaaaccaaattcaccgttaggaaacagtgagctccggccccacctcgtgaacacaaagcctcggaccagccttgagagaggccacactacacacaccagatggcatccttgggacctgaatctatcacccaggaatctcaaactccctttggccctgaaccagggccagataaggaacagctcgggccactcttctgaaggccaatgtggaggaaagggagcagccagccgtttgggagaagatctcaaggatccagactctcattcctttcctctggcccagtgaatttggtctctcccagctctgggggactccttccttgaaccctaataagaccccactggagtctctctctctccatccctctcctctgccctctgctctaattgctgccaggattgtcactccaaaccttactctgagctcattaataaaataaacagatttattttccagctaaaaaaaaaaaa

SEQ ID NO: 345213 - DNA, 1839 bp, Homo sapiens
  misc_feature (2)..(3): n is a, c, g, or t
  misc_feature (29)..(29): n is a, c, g, or t
  misc_feature (36)..(36): n is a, c, g, or t
  misc_feature (49)..(50): n is a, c, g, or t
  misc_feature (70)..(70): n is a, c, g, or t
tnnctcgggccatttccggtccagaatgntcaaggnccagctgagtcgnngcacgacccgttccttcggntgcccggatgccaggtaggggacgagatcgtccggatcaatggatattccatctcctcctgtacccatgaggaggtcatcaacctcattcgaaccaagaaaactgtgtccatcaaagtgagacacatcggcctgatccccgtgaaaagctctcctgatgagcccctcacttggcagtatgtggatcagtttgtgtcggaatctgggggcgtgcgaggcagcctgggctcccctggaaatcgggaaaacaaggagaagaaggtcttcatcagcctggtaggctcccgaggccttggctgcagcatttccagcggccccatccagaagcctggcatctttatcagccatgtgaaacctggctccctgtctgctgaggtgggattggagataggggaccagattgtcgaagtcaatggcgtcgacttctctaacctggatcacaaggaggctgtaaatgtgctgaagagtagccgcagcctgaccatctccattgtagctgcagctggccgggagctgttcatgacagaccgggagcggctggcagaggcgcggcagcgtgagctgcagcggcaggagcttctcatgcagaagcggctggcgatggagtccaacaagatcctccaggagcagcaggagatggagcggcaaaggagaaaagaaattgcccagaaggcagcagaggaaaatgagagataccggaaggagatggaacagattgtagaggaggaagagaagtttaagaagcaatgggaagaagactggggctcaaaggaacagctactcttgcctaaaaccatcactgctgaggtacacccagtaccccttcgcaagccaaagtatgatcagggagtggaacctgagctcgagcccgcagatgacctggatggaggcacggaggagcagggagagcaggatttccggaaatatgaggaaggctttgacccctactctatgttcaccccagagcagatcatggggaaggatgtccggctcctacgcatcaagaaggagggatccttagacctggccctggaaggcggtgtggactcccccattgggaaggtggtcgtttctgctgtgtatgagcggggagctgctgagcggcatggtggcattgtgaaaggggacgagatcatggcaatcaacggcaagattgtgacagactacaccctggctgaggctgacgctgccctgcagaaggcctggaatcagggcggggactggatcgaccttgtggttgccgtctgccccccaaaggagtatgacgatgagctgaccttcttctgaagtccaaaaggggaaaccaaattcaccgttaggaaacagtgagctccggccccacctcgtgaacacaaagcctcggaccagccttgagagaggccacactacacacaccagatggcatccttgggacctgaatctatcacccaggaatctcaaactccctttggccctgaaccagggccagataaggaacagctcgggccactcttctgaaggccaatgtggaggaaagggagcagccagccgtttgggagaagatctcaaggatccagactctcattcctttcctctggcccagtgaatttggtctctcccagctctgggggactccttccttgaaccctaataagaccccactggagtctctctctctccatccctctcctctgccctctgctctaattgctgccaggattgtcactccaaaccttactctgagctcattaataaaataaacagatttattttccagctaaaaaaaaaaaa

SEQ ID NO: 345214 - DNA, 928 bp, Homo sapiens
cccctactcctcggctctgaccctcaagaccctctgctgtgttgccctaaagccctccctttgcttccaggatttccggaaatatgaggaaggctttgacccctactctatgttcaccccagagcagatcatggggaaggatgtccggctcctacgcatcaagaaggagggatccttagacctggccctggaaggcggtgtggactcccccattgggaaggtggtcgtttctgctgtgtatgagcggggagctgctgagcggcatggtggcattgtgaaaggggacgagatcatggcaatcaacggcaagattgtgacagactacaccctggctgaggctgacgctgccctgcagaaggcctggaatcagggcggggactggatcgaccttgtggttgccgtctgccccccaaaggagtatgacgatgagctgaccttcttctgaagtccaaaaggggaaaccaaattcaccgttaggaaacagtgagctccggccccacctcgtgaacacaaagcctcggaccagccttgagagaggccacactacacacaccagatggcatccttgggacctgaatctatcacccaggaatctcaaactccctttggccctgaaccagggccagataaggaacagctcgggccactcttctgaaggccaatgtggaggaaagggagcagccagccgtttgggagaagatctcaaggatccagactctcattcctttcctctggcccagtgaatttggtctctcccagctctgggggactccttccttgaaccctaataagaccccactggagtctctctctctccatccctctcctctgccctctgctctaattgctgccaggattgtcactccaaaccttactctgagctcattaataaaataaacagatttattttccagctaaaaaaaaaaaa

SEQ ID NO: 345215 - DNA, 490 bp, Homo sapiens
agacaaggtcatactatgttgcgcaggctggtctcgaactcctagccttgatcctcctgcttcagcttcccaaagtgctgggattacaagcatgagccactgtgcccagctgtatactggatatctgagacttggtaccaaaaaaaaaaataattaagaaagtaagttaatattttcatattgatttcatgttgaatattgggaatatattgagttaaaatgtattactaaaattaatttcacctgtttctatttactttttaatgtgtctattagaaacatttaaattacgtggatggttcacattacatttccattggaaaacatcataatttatgagaaactttgctgtttgaaattttatcaatgagaatgaaatatctcactcctacttgaaagatctgagccatatgggtcactttgacataggagagttgcctcaatttccaacccagagcttcagataaaaggtttttaaactgtaatttcc

SEQ ID NO: 345216 - DNA, 366 bp, Homo sapiens
aggcgccagccaccatgcccggataatttttttgtatttttagtagggacggggtttcaccgtgttagccaggatggtctcaatctcctgacctcgtgatccgcccgcctcggcctcccaaagtgctgggattacaggcgtgagccaccgtgcccagcctcatcattttcttataaagatacaagtcctattggattgctgtcccacccttatgaccttatttgtgtgtgtgtgtgtgtgtgtgtgtgtgtgtattttttgagacagggtctcgctctttccacgttggagtgcagtggtgcaatcctagctcagtgcaccctcaaactcctgggctcacaccttagcctgcaatcaagcctggaa

SEQ ID NO: 345217 - DNA, 244 bp, Homo sapiens
agtggggaaagaggaagtgacagatgatgttaagcattttctaacaacatacaaaagtagttaagagagggatggaagaaataggaagatgatgttggccaaagagtacaaagtttcaggtttattttttatttttattttgttaaattgagacagagtctcactctgtcgcccaggctggagtgcagtggtgtgatctcagctcactgcttctctgcctcaagggttcaagtgattctcctgc

SEQ ID NO: 345218 - DNA, 672 bp, Homo sapiens
tagagacggggtttcaccacgttggccaggctggtctcaaactcctgaacctcaagtgatccacctgcctcggcctcccaaagtgctgggattacagatgtgagccaccaccttcactacctttcccacatggatggagcaaatactctcagaagaagaatggagcccatgtgttcttccagagcccgtacatagcatcagctgacctccttcttttcttatactcactccatcctgctgtaactcagtctatgactgaacatgagatgtccaactctctaattgtagctgagaagagaaaacaaacaggtattaggcacagttataaaagggaggtaaccccactatatcagagaaaaattattgggatagagcagctcagattgagcatagtatcatgagaagaaatggcaacacaaagatggaaacatactctagctgcaataaacacaagtatgaacaaaaataaaaagtaacagtaatccagtctgggaggcaccatgacaatgacccagaacaaaagaaaattcctcacaagagctctgcgttatttagcaacttcataaaggtgacaatcacatggtgtctcagggaagagatgacagatagtaatgaggatgctgcagagtaaataagacaaattaaggatcagaccaacacatgacagaacca

SEQ ID NO: 345219 - DNA, 883 bp, Homo sapiens
tgtccttttggttgttaagaggctgcaatggcccatgaatgcccaggctcagaagagctgcacacaagcctcttaaaatctgaaacattcactgtctgctgcttgtctttacagcaatctttgttaaccatgttatttccagataggaatccaagctcaataaagtggcctgaagaataggcttttgcctctactgtggtttggctccaaatcgggttgccattggtcaaaacataacttccatttggtcccagcaggttcctggactcttccctgctgtggggggtgggtccctcgccactctccagaattcagagggggtcctctctccacaggtgacctgccgagccattgggattggggcctacttggtgaggctgggccagcgagtgatccaggtggagaattcccacatcatcctcacaggagcaagtgctctcaacaaggtgaccaaaaaggggcctgtgcagagtggatccttgggggccaggagtcattttaacattcccattggtctctggtgggggatttttctcaatatgaagccagtttcattcctactgatacaagagctctttttttccaatttgcagctatctgggtccttatgagaaaaaaaaaattagttttaggcaattctggtcgatctaactccctgtattactgacattttaaaacaaattattgaagtgccattacacattgcagaaaattagaaaaggaaccccccaaaaaagtaattttgcagcttctatcattctggtatagttccctctcatcttctgtctttatgtggttaatttatagtgaatatgcagttttgtattctacttttttcactgtattaaaacattttccttgttgaaaagtctctatacttaat

SEQ ID NO: 345220 - DNA, 9340 bp, Homo sapiens
atggtcttgcttctttgtctatcttgtctgattttctcctgtctgaccttttcctggttaaaaatctgggagaaaatgacggactccaagccgatcaccaagagtaaatcagaagcaaacctcatcccgagccaggagccctttccagcctctgataactcaggggagacaccgcagagaaatggggagggccacactctgcacaaagacacccagccaggccgagcccagcctcccacaaaggcccaaagatccggtcggcggagaaactccctaccaccctcccgccagaagcccccaagaaaccccctttcttccagtgacgcagcaccctccccagagcttcaagccaacgggactgggacacaaggtctggaggccacagataccaatggcctgtcctcctcagccaggccccagggcagcaagctggtcccctccaaagaagacaagaagcaggcaaacatcaagaggcagctgatgaccaacttcatcctgggctcttttgatgactactcctccgacgaggactctgttgctggctcatctcgtgagtctacccggaagggcagccgggccagcttgggggccctgtccctggaggcttatctgaccacaggtgaagctgagacccgcgtccccactatgaggccgagcatgtcgggactccacctggtgaagaggggacgggaacacaagaagctggacctgcacagagactttaccgtggcttctcccgctgagtttgtcacacgctttgggggggatcgggtcatcgagaaggtgcttattgccaacaacgggattgccgctgtgaagtgcatgcgctccatccgcaggtgggcctatgagatgttccgcaacgagcgggccatccggtttgttcgcatggtgacccccgaggaccttaaggccaacgcagagtacatcaagatggcggatcattacgggcccgccccaggagggcccaataacaacaactatgccaacgtggagctgattgtggacattgccaagagaatcccgttgcaggcggtgtgggctggctggggccatgctttagaaaaccctaaacttccggagctgctgtgcaagaatggagttgctttcttaggccctcccaggttgaggccaatggtgggtctaggagataagatcgcctccaccgttgtcgcccagacgctacaggtcccaaccctgcccaggagtggaagcgccctgacagtggagtggacagaagatgatctgcagcagggaaaaagaatcagtgtcccagaagatgtttatgacaagggttgcgtgaaagacgtagatgagggcttggaggcagcagaaagaattggttttccattgatgatcaaagcttctgaaggtggcggagggaagggaatccgggaaactgagagtgcggaggacttcccgatccttttcagacaagtacagagtgagatcccaggctcgcccatctttctcatgaagctggcccagcacgcccgtcacctggaagttcagatcctcgctgaccagtatgggaatgctgtgtctctgtttggtcgcgactgctccatccagcggcggcatcagaagatcgttgaggaagcaccggccaccatcgcgccgctggccatattcgagttcatggagcagtgtgccattcgcctggccaagaccgtgggctatgtgagtgcagggacagtggaatacctctatagtcaggatggtagcttccacttcttggagctgaatcctcgcttgcaggtggaacatccctgcacagaaatgattgctgacgttaatctgccggccgcccagctacagatcgccatgggtgccccactgcaccggctgaaagatatccggcttctgtatggagagtcaccctggggagactccccaatttcttttgaaaactcagctcatctcccctgcccccgaggccacgtcattgccaccagaatcaccagcgaaaacccagacgagggttttaagccgagctccgggactgtccaggaactgaatttccggagcagcaagaacgtctggggttacttcacggtggccgctactggaggcctgcacgagtttgcgatttcccagtttgggcactgcttctcctggggagagaaccggaaagaggccatttcgaacatggtggtggctttgaaggaactgtccatccgaggcgactttaggactaccgtggaatacctcattaacctcctggagaccgagagcttccagaacaacgacatcgacaccgggtggttggactacctcattgctgagaaagtgcaaaagaaaccgaatatcatgcttggggtggtatgcggggcccttgaacgtggagatgcgatgttcagaacgtgcatgacagatttcttacactccctggaaaggggccaggtcctcccagcggattcactactgaacctcgtagatgtggaattaatttacgagggtgtaaagtacattctaaaggtgacccggcagtctctgaccatgttcgttctcatcatgaatggctgccacatcgagattgatgcccaccggctgaatgatggggggctcctgctctcctacaatgggaacagctacaccacctacatgaaggaagaggttgacagttaccgaattaccatcggcaataagacgtgtgtttttgagaaggagaacgatcctacagtcctgagatccccctcggctgggaagctgacacagtatcacagtggaggatgggggccacgttgaggctgggagcacgctacgctgagatggaggtgatgaagatgatcatgaccctgaacgttcaggaaagaggccgggtgaagtacatcaagcgtccaggtgcggtgctggaagcaggctgcgtggtggccaggctggagctcgatgacccttctaaagtccacccggctgaaccgttcacaggagaactccctgcccagcagaacactgccgatcctcggaaagaaactgcaccagggtcttccacagcgtcctgggaagcctcaccaacgtcatgagtggcttttgtctgccagagccgttttttagcataaagctgaaggagtgggtgcagaagctcatgatgaccctccggcacccgtcactgctgctggacgtgcaggagatcatgaccagtcgtgcaggccgcatccccccccctgttgagaagtctgtccgcaaggtgatggcccagtatgccagcaacatcacctcggtgctgtgccagttccccagccagcagatagccaccatcctggactgccatgcagccaccctgcagcggaaggctgatcgagaggtcttcttcatcaacacccagagcatggtgcagttggtccagaggtaccgaagtggaatccgcggctcatatgaaaacagtggtgatcgatctcttgagaagatacttgcgtgttgagcaccattttcggcaaggcaagagatgctgatgccaactccagtgggatggtggggggcgtgaggagcctgagctttacctctgtgtgggtggttttgtctcccccagcccactacgacaagtgtgtgataaacctcagggaacagttcaagccagacatgtcccaggtgctggactgcatcttctcccacgcacaggtggccaagaagaaccagctggtgatcatgttgatcgatgagctgtgtggcccagacccttccctgtcggacgagctgatctccatcctcaacgagctcactcagctgagcaaaagcgagcactgcaaagtggccctcagagcccggcagatcctgatcgcctccacctcccctcctacgagctgcggcataaccaggtggagtccattttcctgtctgccattgacatgtacggccaccagttctgccccgagaacctccagaaattaatactttcggaaacaaccatcttcgacgtcctgaatactttcttctatcacgcaaacaaagtcgtgtgcatggcgtccttggaggtttacgtggggggggcttacatcgcctatgtgttaaacagcctgcagcaccggcagctcccggacggcacctgcgtggtagaattccagttcatgctgccgtcctcccacccaaaccggatgaccgtgcccatcagcatcaccaaccctgacctgctgaggcacagcacagagctcttcatggacagcggcttctccccactgtgccagcgcatgggagccatggtagccttcaggagattcgaggacttcaccagaaattttgatgaagtcatctcttgcttcgccaacgtgcccaaagacacccccctcttcagcgaggcccgcacctccctatactccgaggatgactgcaagagcctcagagaagagcccatccacattctgaatgtgtccatccagtgtgcagaccacctggaggatgaggcactggtgccgattttacggacattcgtacagtccaagaaaaatatccttgtggattatggactccgacgaatcacattcttgattgcccaagagaaagaatttcccaagtttttcacattcagagcaagagatgagtttgcagaagatcgcatttaccgtcacttggaacctgccctggccttccagctggaactcaaccggatgcgtaacttcgatctgaccgccgtgccctgtgccaaccacaagatgcacctttacctgggtgctgccaaggtgaaggaaggtgtggaagtgacggaccataggttcttcatccgcgccatcatcaggcactctgacctgatcacaaaggaagcctccttcgaatacctgcagaacgagggtgagcggctgctcctggaggccatggacgagctggaggtggcgttcaataacaccagcgtgcgcaccgactgcaaccacatcttcctcaacttcgtgcccactgtcatcatggaccccttcaagatcgaggagtccgtgcgctacatggttatgcgctacggcagccggctgtggaaactccgtgtgctacaggctgaggtcaagatcaacatccgccagaccaccaccggcagtgccgttcccatccgcctgttcatcaccaatgagtcgggctactacctggacatcagcctctacaaagaagtgactgactccagatctggaaatatcatgtttcactccttcggcaatcaagcaagggccccagcacgggatgctgatcaatactccctacgtcaccaaggatctgctccaggccaagcgattccaggcccagaccctgggaaccacctacatctatgacttcccggaaatgttcaggcaggctctctttaaactgtggggctccccagacaagtatcccaaagacatcctgacatacactgaattagtgttggactctcagggccagctggtggagatgaaccgacttcctggtggaaatgaggtgggcatggtggccttcaaaatgaggtttaagacccaggagtacccggaaggacgggatgtgatcgtcatcggcaatgacatcacctttcgcattggatcctttggccctggagaggaccttctgtacctgcgggcatccgagatggcccgggcagagggcattcccaaaatttacgtggcagccaacagtggcgcccgtattggcatggcagaggagatcaaacacatgttccacgtggcttgggtggacccagaagacccccacaaaggatttaaatacctgtacctgactccccaagactacaccagaatcagctccctgaactccgtccactgtaaacacatcgaggaaggaggagagtccagatacatgatcacggatatcatcgggaaggatgatggcttgggcgtggagaatctgaggggctcaggcatgattgctggggagtcctctctggcttacgaagagatcgtcaccattagcttggtgacctgccgagccattgggattggggcctacttggtgaggctgggccagcgagtgatccaggtggagaattcccacatcatcctcacaggagcaagtgctctcaacaaggtcctgggaagagaggtctacacatccaacaaccagctgggtggcgttcagatcatgcattacaatggtgtctcccacatcaccgtgccagatgactttgagggggtttataccatcctggagtggctgtcctatatgccaaaggataatcacagccctgtccctatcatcacacccactgaccccattgacagagaaattgaattcctcccatccagagctccctacgacccccggtggatgcttgcaggaaggcctcacccaactctgaagggaacgtggcagagcggattctttgaccacggcagtttcaaggaaatcatggcaccctgggcgcagaccgtggtgacaggacgagcaaggcttggggggattcccgtgggagtgattgctgtggagacacggactgtggaggtggcagtccctgcagaccctgccaacctggattctgaggccaagataattcagcaggcaggacaggtgtggttcccagactcagcctacaaaaccgcccaggccatcaaggacttcaaccgggagaagttgcccctgatgatctttgccaactggagggggttctccggtggcatgaaagacatgtatgaccaggtgctgaagtttggagcctacatcgtggacggccttagacaatacaaacagcccatcctgatctatatccgccctatgcggagctccggggaggctcctgggtggtcatagatgccaccatcaacccgctgtgcatagaaatgtatgcagacaaagagagcaggggtggtgttctggaaccagaggggacagtggagattaagttccgaaagaaagatctgataaagtccatgagaaggatcgatccagcttacaagaagctcatggaacagctaggggaacctgatctctccgacaaggaccgaaaggacctggagggccggctaaaggctcgcgaggacctgctgctccccatctaccaccaggtggcggtgcagttcgccgacttccatgacacacccggccggatgctggagaagggcgtcatatctgacatcctggagtggaagaccgcacgcaccttcctgtattggcgtctgcgccgcctcctcctggaggaccaggtcaagcaggagatcctgcaggccagcggggagctgagtcacgtgcatatccagtccatgctgcgtcgctggttcgtggagacggagggggctgtcaaggcctacttgtgggacaacaaccaggtggttgtgcagtggctggaacagcactggcaggcaggggatggcccgcgctccaccatccgtgagaacatcacgtacctgaagcacgactctgtcctcaagaccatccgaggcctggttgaagaaaaccccgaggtggccgtggactgtgtgatatacctgagccagcacatcagcccagctgagcgggcgcaggtcgttcacctgctgtctaccatggacagcccggcctccacctgaccgtggcccgcccagccactcccgggaccacggcaaaaggaaccacccagacccaccacccgtacaccctcagcagaccctgaagacttgcttttaaacaaagaaaatcctgggcacttctgcagggctgctggttccgagctgacacccgtcttaataaaaggcccaggagtgcctcttccaaacaaaaacagcctcctctccatagctgggaagtttattttgttttgtctctgaagacagcagttttattgcatcactaaatctaatcaagctaaaacatccctgtttccttttgcaaaacagtgcctggcatgtgggatccaggcgttctttaggatccttggataccacatcgtgaaatcttttatttttttactctgagaccagcaccagatgtaagtaagcatctcatatatttcagccaaataaatgggccaagggaaaaaaatatatatatatagacaggactagagaaaacctatttttgtaatgatgtttctttggatactgtctagtcacccagaaaaatgtatggatgaatttttttttttttttttgagacaaagtctcactgtgtcatgcaggctggagtgcagtggcatgatctcactgcaacctccatctcctgtctcagcctcctagataactgggattacaggtgcccaccaccatgcccggctaatttttgtatttttggtagagacagagtttcaccaggttggtcaggctggtctcaaactcttgacttcaggtaatccacccaccttggcctcccaaagtgctgggattacaggcatgagccaccatcttcagccagatgatttttttattgagagagtgaaatgctattttgttccccaaatggcgctagtgaatcactaggagggtcccactgataggccatgtttagcactggttgccagggattctctttttgagagagggaaagcaaaatgaatggaagtacccagctggaggtttcagggcttctggaggatgctctcgcatagctcgaggtcctctgcccacctcttctctccaaggaaaatgaggactgccccttccccctgcaggattggcccccagcctgcgcatgcaccctcctcttgcccaagtggggagcacagaggcggagaggaatcccttaccacacccacggcccagcttgctcacgagtgtcacctctgtgacggtcaccactgctcccttggagggccacttgagttactgttgcttcctcgcctgctggcttgatgagcaccgatggtgggatctgaccccgaggggcagagctgtcggtgactgaggactggactgtggtgaccatgccgatttgctcagggagaacgttgcaatgcacccagcagctcctggctctgcaggcggcacagcctggggccctgtgatcctctggtttcttccattggggcggagtcgggggtggagggagctggccacaacccactgctctgatgggtggtttgtccaaggatgctgaatgtaatgcctggtcaatgtggaagcccatgaggttgcccagggaagcctccaaaagctgggatgcttgagggtatccaagttgaaaaagacaaaatctgaccatcagccagtgacagtcctggcaaatgaaggtggggcggggcagtgaggggtgggagaaggtgaatgattcattattccaccccgaggtttgctggggtgaggggaagaatcgatgctgctttgggaactgaaggtttttctgttgggaaggccctcttggttttggagagaaagacaagttatgagtagctgctaccctggaacggtgggcagagagcctactaggaaatgtgcagaataaactattttttgaaggaaaactttggcct

SEQ ID NO: 345221 - DNA, 9036 bp, Homo sapiens
atggtcttgcttctttgtctatcttgtctgattttctcctgtctgaccttttcctggttaaaaatctgggagaaaatgacggactccaagccgatcaccaagagtaaatcagaagcaaacctcatcccgagccaggagccctttccagcctctgataactcaggggagacaccgcagagaaatggggagggccacactctgcacaaagacacccagccaggccgagcccagcctcccacaaaggcccaaagatccggtcggcggagaaactccctaccaccctcccgccagaagcccccaagaaaccccctttcttccagtgacgcagcaccctccccagagcttcaagccaacgggactgggacacaaggtctggaggccacagataccaatggcctgtcctcctcagccaggccccagggcagcaagctggtcccctccaaagaagacaagaagcaggcaaacatcaagaggcagctgatgaccaacttcatcctgggctcttttgatgactactcctccgacgaggactctgttgctggctcatctcgtgagtctacccggaagggcagccgggccagcttgggggccctgtccctggaggcttatctgaccacaggtgaagctgagacccgcgtccccactatgaggccgagcatgtcgggactccacctggtgaagaggggacgggaacacaagaagctggacctgcacagagactttaccgtggcttctcccgctgagtttgtcacacgctttgggggggatcgggtcatcgagaaggtgcttattgccaacaacgggattgccgctgtgaagtgcatgcgctccatccgcaggtgggcctatgagatgttccgcaacgagcgggccatccggtttgttcgcatggtgacccccgaggaccttaaggccaacgcagagtacatcaagatggcggatcattacgggcccgccccaggagggcccaataacaacaactatgccaacgtggagctgattgtggacattgccaagagaatcccgttgcaggcggtgtgggctggctggggccatgctttagaaaaccctaaacttccggagctgctgtgcaagaatggagttgctttcttaggccctcccaggttgaggccaatggtgggtctaggagataagatcgcctccaccgttgtcgcccagacgctacaggtcccaaccctgcccaggagtggaagcgccctgacagtggagtggacagaagatgatctgcagcagggaaaaagaatcagtgtcccagaagatgtttatgacaagggttgcgtgaaagacgtagatgagggcttggaggcagcagaaagaattggttttccattgatgatcaaagcttctgaaggtggcggagggaagggaatccgggaaactgagagtgcggaggacttcccgatccttttcagacaagtacagagtgagatcccaggctcgcccatctttctcatgaagctggcccagcacgcccgtcacctggaagttcagatcctcgctgaccagtatgggaatgctgtgtctctgtttggtcgcgactgctccatccagcggcggcatcagaagatcgttgaggaagcaccggccaccatcgcgccgctggccatattcgagttcatggagcagtgtgccattcgcctggccaagaccgtgggctatgtgagtgcagggacagtggaatacctctatagtcaggatggtagcttccacttcttggagctgaatcctcgcttgcaggtggaacatccctgcacagaaatgattgctgacgttaatctgccggccgcccagctacagatcgccatgggtgccccactgcaccggctgaaagatatccggcttctgtatggagagtcaccctggggagactccccaatttcttttgaaaactcagctcatctcccctgcccccgaggccacgtcattgccaccagaatcaccagcgaaaacccagacgagggttttaagccgagctccgggactgtccaggaactgaatttccggagcagcaagaacgtctggggttacttcacggtggccgctactggaggcctgcacgagtttgcgatttcccagtttgggcactgcttctcctggggagagaaccggaaagaggccatttcgaacatggtggtggctttgaaggaactgtccatccgaggcgactttaggactaccgtggaatacctcattaacctcctggagaccgagagcttccagaacaacgacatcgacaccgggtggttggactacctcattgctgagaaagtgcaaaagaaaccgaatatcatgcttggggtggtatgcggggcccttgaacgtggagatgcgatgttcagaacgtgcatgacagatttcttacactccctggaaaggggccaggtcctcccagcggattcactactgaacctcgtagatgtggaattaatttacgagggtgtaaagtacattctaaaggtgacccggcagtctctgaccatgttcgttctcatcatgaatggctgccacatcgagattgatgcccaccggctgaatgatggggggctcctgctctcctacaatgggaacagctacaccacctacatgaaggaagaggttgacagttaccgaattaccatcggcaataagacgtgtgtttttgagaaggagaacgatcctacagtcctgagatccccctcggctgggaagctgacacagtatcacagtggaggatgggggccacgttgaggctgggagcacgctacgctgagatggaggtgatgaagatgatcatgaccctgaacgttcaggaaagaggccgggtgaagtacatcaagcgtccaggtgcggtgctggaagcaggctgcgtggtggccaggctggagctcgatgacccttctaaagtccacccggctgaaccgttcacaggagaactccctgcccagcagaacactgccgatcctcggaaagaaactgcaccagggtcttccacagcgtcctgggaagcctcaccaacgtcatgagtggcttttgtctgccagagccgttttttagcataaagctgaaggagtgggtgcagaagctcatgatgaccctccggcacccgtcactgctgctggacgtgcaggagatcatgaccagtcgtgcaggccgcatccccccccctgttgagaagtctgtccgcaaggtgatggcccagtatgccagcaacatcacctcggtgctgtgccagttccccagccagcagatagccaccatcctggactgccatgcagccaccctgcagcggaaggctgatcgagaggtcttcttcatcaacacccagagcatggtgcagttggtccagaggtaccgaagtggaatccgcggctcatatgaaaacagtggtgatcgatctcttgagaagatacttgcgtgttgagcaccattttcggcaaggcaagagatgctgatgccaactccagtgggatggtggggggcgtgaggagcctgagctttacctctgtgtgggtggttttgtctcccccagcccactacgacaagtgtgtgataaacctcagggaacagttcaagccagacatgtcccaggtgctggactgcatcttctcccacgcacaggtggccaagaagaaccagctggtgatcatgttgatcgatgagctgtgtggcccagacccttccctgtcggacgagctgatctccatcctcaacgagctcactcagctgagcaaaagcgagcactgcaaagtggccctcagagcccggcagatcctgatcgcctccacctcccctcctacgagctgcggcataaccaggtggagtccattttcctgtctgccattgacatgtacggccaccagttctgccccgagaacctccagaaattaatactttcggaaacaaccatcttcgacgtcctgaatactttcttctatcacgcaaacaaagtcgtgtgcatggcgtccttggaggtttacgtggggggggcttacatcgcctatgtgttaaacagcctgcagcaccggcagctcccggacggcacctgcgtggtagaattccagttcatgctgccgtcctcccacccaaaccggatgaccgtgcccatcagcatcaccaaccctgacctgctgaggcacagcacagagctcttcatggacagcggcttctccccactgtgccagcgcatgggagccatggtagccttcaggagattcgaggacttcaccagaaattttgatgaagtcatctcttgcttcgccaacgtgcccaaagacacccccctcttcagcgaggcccgcacctccctatactccgaggatgactgcaagagcctcagagaagagcccatccacattctgaatgtgtccatccagtgtgcagaccacctggaggatgaggcactggtgccgattttacggacattcgtacagtccaagaaaaatatccttgtggattatggactccgacgaatcacattcttgattgcccaagagaaagaatttcccaagtttttcacattcagagcaagagatgagtttgcagaagatcgcatttaccgtcacttggaacctgccctggccttccagctggaactcaaccggatgcgtaacttcgatctgaccgccgtgccctgtgccaaccacaagatgcacctttacctgggtgctgccaaggtgaaggaaggtgtggaagtgacggaccataggttcttcatccgcgccatcatcaggcactctgacctgatcacaaaggaagcctccttcgaatacctgcagaacgagggtgagcggctgctcctggaggccatggacgagctggaggtggcgttcaataacaccagcgtgcgcaccgactgcaaccacatcttcctcaacttcgtgcccactgtcatcatggaccccttcaagatcgaggagtccgtgcgctacatggttatgcgctacggcagccggctgtggaaactccgtgtgctacaggctgaggtcaagatcaacatccgccagaccaccaccggcagtgccgttcccatccgcctgttcatcaccaatgagtcgggctactacctggacatcagcctctacaaagaagtgactgactccagatctggaaatatcatgtttcactccttcggcaatcaagcaagggccccagcacgggatgctgatcaatactccctacgtcaccaaggatctgctccaggccaagcgattccaggcccagaccctgggaaccacctacatctatgacttcccggaaatgttcaggcaggctctctttaaactgtggggctccccagacaagtatcccaaagacatcctgacatacactgaattagtgttggactctcagggccagctggtggagatgaaccgacttcctggtggaaatgaggtgggcatggtggccttcaaaatgaggtttaagacccaggagtacccggaaggacgggatgtgatcgtcatcggcaatgacatcacctttcgcattggatcctttggccctggagaggaccttctgtacctgcgggcatccgagatggcccgggcagagggcattcccaaaatttacgtggcagccaacagtggcgcccgtattggcatggcagaggagatcaaacacatgttccacgtggcttgggtggacccagaagacccccacaaaggatttaaatacctgtacctgactccccaagactacaccagaatcagctccctgaactccgtccactgtaaacacatcgaggaaggaggagagtccagatacatgatcacggatatcatcgggaaggatgatggcttgggcgtggagaatctgaggggctcaggcatgattgctggggagtcctctctggcttacgaagagatcgtcaccattagcttggtgacctgccgagccattgggattggggcctacttggtgaggctgggccagcgagtgatccaggtggagaattcccacatcatcctcacaggagcaagtgctctcaacaaggtcctgggaagagaggtctacacatccaacaaccagctgggtggcgttcagatcatgcattacaatggtgtctcccacatcaccgtgccagatgactttgagggggtttataccatcctggagtggctgtcctatatgccaaaggataatcacagccctgtccctatcatcacacccactgaccccattgacagagaaattgaattcctcccatccagagctccctacgacccccggtggatgcttgcaggaaggcctcacccaactctgaagggaacgtggcagagcggattctttgaccacggcagtttcaaggaaatcatggcaccctgggcgcagaccgtggtgacaggacgagcaaggcttggggggattcccgtgggagtgattgctgtggagacacggactgtggaggtggcagtccctgcagaccctgccaacctggattctgaggccaagataattcagcaggcaggacaggtgtggttcccagactcagcctacaaaaccgcccaggccatcaaggacttcaaccgggagaagttgcccctgatgatctttgccaactggagggggttctccggtggcatgaaagacatgtatgaccaggtgctgaagtttggagcctacatcgtggacggccttagacaatacaaacagcccatcctgatctatatccgccctatgcggagctccggggaggctcctgggtggtcatagatgccaccatcaacccgctgtgcatagaaatgtatgcagacaaagagagcaggggtggtgttctggaaccagaggggacagtggagattaagttccgaaagaaagatctgataaagtccatgagaaggatcgatccagcttacaagaagctcatggaacagctaggggaacctgatctctccgacaaggaccgaaaggacctggagggccggctaaaggctcgcgaggacctgctgctccccatctaccaccaggtggcggtgcagttcgccgacttccatgacacacccggccggatgctggagaagggcgtcatatctgacatcctggagtggaagaccgcacgcaccttcctgtattggcgtctgcgccgcctcctcctggaggaccaggtcaagcaggagatcctgcaggccagcggggagctgagtcacgtgcatatccagtccatgctgcgtcgctggttcgtggagacggagggggctgtcaaggcctacttgtgggacaacaaccaggtggttgtgcagtggctggaacagcactggcaggcaggggatggcccgcgctccaccatccgtgagaacatcacgtacctgaagcacgactctgtcctcaagaccatccgaggcctggttgaagaaaaccccgaggtggccgtggactgtgtgatatacctgagccagcacatcagcccagctgagcgggcgcaggtcgttcacctgctgtctaccatggacagcccggcctccacctgaccgtggcccgcccagccactcccgggaccacggcaaaaggaaccacccagacccaccacccgtacaccctcagcagaccctgaagacttgcttttaaacaaagaaaatcctgggcacttctgcagggctgctggttccgagctgacacccgtcttaataaaaggcccaggagtgcctcttccaaacaaaaacagcctcctctccatagctgggaagtttattttgttttgtctctgaagacagcagttttattgcatcactaaatctaatcaagctaaaacatccctgtttccttttgcaaaacagtgcctggcatgtgggatccaggcgttctttaggatccttggataccacatcgtgaaatcttttatttttttactctgagaccagcaccagatgtaagtaagcatctcatatatttcagccaaataaatgggccaagggaaaaaaatatatatatatagacaggactagagaaaacctatttttgtaatgatgtttctttggatactgtctagtcacccagaaaaatgtatggatgaatttttttttttttttttgagacaaagtctcactgtgtcatgcaggctggagtgcagtggcatgatctcactgcaacctccatctcctgtctcagcctcctagataactgggattacaggtgcccaccaccatgcccggctaatttttgtatttttggtagagacagagtttcaccaggttggtcaggctggtctcaaactcttgacttcaggtaatccacccaccttggcctcccaaagtgctgggattacaggcatgagccaccatcttcagccagatgatttttttattgagagagtgaaatgctattttgttccccaaatggcgctagtgaatcactaggagggtcccactgataggccatgtttagcactggttgccagggattctctttttgagagagggaaagcaaaatgaatggaagtacccagctggaggtttcagggcttctggaggatgctctcgcatagctcgaggtcctctgcccacctcttctctccaaggaaaatgaggactgccccttccccctgcaggattggcccccagcctgcgcatgcaccctcctcttgcccaagtggggagcacagaggcggagaggaatcccttaccacacccacggcccagcttgctcacgagtgtcacctctgtgacggtcaccactgctcccttggagggccacttgagttactgttgcttcctcgcctgctggcttgatgagcaccgatggtgggatctgaccccgaggggcagagctgtcggtgactgaggactggactgtggtgaccatgccgatttgctcagtgaggggtgggagaaggtgaatgattcattattccaccccgaggtttgctggggtgaggggaagaatcgatgctgctttgggaactgaaggtttttctgttgggaaggccctcttggttttggagagaaagacaagttatgagtagctgctaccctggaacggtgggcagagagcctactaggaaatgtgcagaataaactattttttgaaggaaaactttggcct

SEQ ID NO: 345222 - DNA, 8488 bp, Homo sapiens
atggtcttgcttctttgtctatcttgtctgattttctcctgtctgaccttttcctggttaaaaatctgggagaaaatgacggactccaagccgatcaccaagagtaaatcagaagcaaacctcatcccgagccaggagccctttccagcctctgataactcaggggagacaccgcagagaaatggggagggccacactctgcacaaagacacccagccaggccgagcccagcctcccacaaaggcccaaagatccggtcggcggagaaactccctaccaccctcccgccagaagcccccaagaaaccccctttcttccagtgacgcagcaccctccccagagcttcaagccaacgggactgggacacaaggtctggaggccacagataccaatggcctgtcctcctcagccaggccccagggcagcaagctggtcccctccaaagaagacaagaagcaggcaaacatcaagaggcagctgatgaccaacttcatcctgggctcttttgatgactactcctccgacgaggactctgttgctggctcatctcgtgagtctacccggaagggcagccgggccagcttgggggccctgtccctggaggcttatctgaccacaggtgaagctgagacccgcgtccccactatgaggccgagcatgtcgggactccacctggtgaagaggggacgggaacacaagaagctggacctgcacagagactttaccgtggcttctcccgctgagtttgtcacacgctttgggggggatcgggtcatcgagaaggtgcttattgccaacaacgggattgccgctgtgaagtgcatgcgctccatccgcaggtgggcctatgagatgttccgcaacgagcgggccatccggtttgttcgcatggtgacccccgaggaccttaaggccaacgcagagtacatcaagatggcggatcattacgggcccgccccaggagggcccaataacaacaactatgccaacgtggagctgattgtggacattgccaagagaatcccgttgcaggcggtgtgggctggctggggccatgctttagaaaaccctaaacttccggagctgctgtgcaagaatggagttgctttcttaggccctcccaggttgaggccaatggtgggtctaggagataagatcgcctccaccgttgtcgcccagacgctacaggtcccaaccctgcccaggagtggaagcgccctgacagtggagtggacagaagatgatctgcagcagggaaaaagaatcagtgtcccagaagatgtttatgacaagggttgcgtgaaagacgtagatgagggcttggaggcagcagaaagaattggttttccattgatgatcaaagcttctgaaggtggcggagggaagggaatccgggaaactgagagtgcggaggacttcccgatccttttcagacaagtacagagtgagatcccaggctcgcccatctttctcatgaagctggcccagcacgcccgtcacctggaagttcagatcctcgctgaccagtatgggaatgctgtgtctctgtttggtcgcgactgctccatccagcggcggcatcagaagatcgttgaggaagcaccggccaccatcgcgccgctggccatattcgagttcatggagcagtgtgccattcgcctggccaagaccgtgggctatgtgagtgcagggacagtggaatacctctatagtcaggatggtagcttccacttcttggagctgaatcctcgcttgcaggtggaacatccctgcacagaaatgattgctgacgttaatctgccggccgcccagctacagatcgccatgggtgccccactgcaccggctgaaagatatccggcttctgtatggagagtcaccctggggagactccccaatttcttttgaaaactcagctcatctcccctgcccccgaggccacgtcattgccaccagaatcaccagcgaaaacccagacgagggttttaagccgagctccgggactgtccaggaactgaatttccggagcagcaagaacgtctggggttacttcacggtggccgctactggaggcctgcacgagtttgcgatttcccagtttgggcactgcttctcctggggagagaaccggaaagaggccatttcgaacatggtggtggctttgaaggaactgtccatccgaggcgactttaggactaccgtggaatacctcattaacctcctggagaccgagagcttccagaacaacgacatcgacaccgggtggttggactacctcattgctgagaaagtgcaaaagaaaccgaatatcatgcttggggtggtatgcggggcccttgaacgtggagatgcgatgttcagaacgtgcatgacagatttcttacactccctggaaaggggccaggtcctcccagcggattcactactgaacctcgtagatgtggaattaatttacgagggtgtaaagtacattctaaaggtgacccggcagtctctgaccatgttcgttctcatcatgaatggctgccacatcgagattgatgcccaccggctgaatgatggggggctcctgctctcctacaatgggaacagctacaccacctacatgaaggaagaggttgacagttaccgaattaccatcggcaataagacgtgtgtttttgagaaggagaacgatcctacagtcctgagatccccctcggctgggaagctgacacagtatcacagtggaggatgggggccacgttgaggctgggagcacgctacgctgagatggaggtgatgaagatgatcatgaccctgaacgttcaggaaagaggccgggtgaagtacatcaagcgtccaggtgcggtgctggaagcaggctgcgtggtggccaggctggagctcgatgacccttctaaagtccacccggctgaaccgttcacaggagaactccctgcccagcagaacactgccgatcctcggaaagaaactgcaccagggtcttccacagcgtcctgggaagcctcaccaacgtcatgagtggcttttgtctgccagagccgttttttagcataaagctgaaggagtgggtgcagaagctcatgatgaccctccggcacccgtcactgctgctggacgtgcaggagatcatgaccagtcgtgcaggccgcatccccccccctgttgagaagtctgtccgcaaggtgatggcccagtatgccagcaacatcacctcggtgctgtgccagttccccagccagcagatagccaccatcctggactgccatgcagccaccctgcagcggaaggctgatcgagaggtcttcttcatcaacacccagagcatggtgcagttggtccagaggtaccgaagtggaatccgcggctcatatgaaaacagtggtgatcgatctcttgagaagatacttgcgtgttgagcaccattttcggcaaggcaagagatgctgatgccaactccagtgggatggtggggggcgtgaggagcctgagctttacctctgtgtgggtggttttgtctcccccagcccactacgacaagtgtgtgataaacctcagggaacagttcaagccagacatgtcccaggtgctggactgcatcttctcccacgcacaggtggccaagaagaaccagctggtgatcatgttgatcgatgagctgtgtggcccagacccttccctgtcggacgagctgatctccatcctcaacgagctcactcagctgagcaaaagcgagcactgcaaagtggccctcagagcccggcagatcctgatcgcctccacctcccctcctacgagctgcggcataaccaggtggagtccattttcctgtctgccattgacatgtacggccaccagttctgccccgagaacctccagaaattaatactttcggaaacaaccatcttcgacgtcctgaatactttcttctatcacgcaaacaaagtcgtgtgcatggcgtccttggaggtttacgtggggggggcttacatcgcctatgtgttaaacagcctgcagcaccggcagctcccggacggcacctgcgtggtagaattccagttcatgctgccgtcctcccacccaaaccggatgaccgtgcccatcagcatcaccaaccctgacctgctgaggcacagcacagagctcttcatggacagcggcttctccccactgtgccagcgcatgggagccatggtagccttcaggagattcgaggacttcaccagaaattttgatgaagtcatctcttgcttcgccaacgtgcccaaagacacccccctcttcagcgaggcccgcacctccctatactccgaggatgactgcaagagcctcagagaagagcccatccacattctgaatgtgtccatccagtgtgcagaccacctggaggatgaggcactggtgccgattttacggacattcgtacagtccaagaaaaatatccttgtggattatggactccgacgaatcacattcttgattgcccaagagaaagaatttcccaagtttttcacattcagagcaagagatgagtttgcagaagatcgcatttaccgtcacttggaacctgccctggccttccagctggaactcaaccggatgcgtaacttcgatctgaccgccgtgccctgtgccaaccacaagatgcacctttacctgggtgctgccaaggtgaaggaaggtgtggaagtgacggaccataggttcttcatccgcgccatcatcaggcactctgacctgatcacaaaggaagcctccttcgaatacctgcagaacgagggtgagcggctgctcctggaggccatggacgagctggaggtggcgttcaataacaccagcgtgcgcaccgactgcaaccacatcttcctcaacttcgtgcccactgtcatcatggaccccttcaagatcgaggagtccgtgcgctacatggttatgcgctacggcagccggctgtggaaactccgtgtgctacaggctgaggtcaagatcaacatccgccagaccaccaccggcagtgccgttcccatccgcctgttcatcaccaatgagtcgggctactacctggacatcagcctctacaaagaagtgactgactccagatctggaaatatcatgtttcactccttcggcaatcaagcaagggccccagcacgggatgctgatcaatactccctacgtcaccaaggatctgctccaggccaagcgattccaggcccagaccctgggaaccacctacatctatgacttcccggaaatgttcaggcaggctctctttaaactgtggggctccccagacaagtatcccaaagacatcctgacatacactgaattagtgttggactctcagggccagctggtggagatgaaccgacttcctggtggaaatgaggtgggcatggtggccttcaaaatgaggtttaagacccaggagtacccggaaggacgggatgtgatcgtcatcggcaatgacatcacctttcgcattggatcctttggccctggagaggaccttctgtacctgcgggcatccgagatggcccgggcagagggcattcccaaaatttacgtggcagccaacagtggcgcccgtattggcatggcagaggagatcaaacacatgttccacgtggcttgggtggacccagaagacccccacaaaggatttaaatacctgtacctgactccccaagactacaccagaatcagctccctgaactccgtccactgtaaacacatcgaggaaggaggagagtccagatacatgatcacggatatcatcgggaaggatgatggcttgggcgtggagaatctgaggggctcaggcatgattgctggggagtcctctctggcttacgaagagatcgtcaccattagcttggtgacctgccgagccattgggattggggcctacttggtgaggctgggccagcgagtgatccaggtggagaattcccacatcatcctcacaggagcaagtgctctcaacaaggtcctgggaagagaggtctacacatccaacaaccagctgggtggcgttcagatcatgcattacaatggtgtctcccacatcaccgtgccagatgactttgagggggtttataccatcctggagtggctgtcctatatgccaaaggataatcacagccctgtccctatcatcacacccactgaccccattgacagagaaattgaattcctcccatccagagctccctacgacccccggtggatgcttgcaggaaggcctcacccaactctgaagggaacgtggcagagcggattctttgaccacggcagtttcaaggaaatcatggcaccctgggcgcagaccgtggtgacaggacgagcaaggcttggggggattcccgtgggagtgattgctgtggagacacggactgtggaggtggcagtccctgcagaccctgccaacctggattctgaggccaagataattcagcaggcaggacaggtgtggttcccagactcagcctacaaaaccgcccaggccatcaaggacttcaaccgggagaagttgcccctgatgatctttgccaactggagggggttctccggtggcatgaaagacatgtatgaccaggtgctgaagtttggagcctacatcgtggacggccttagacaatacaaacagcccatcctgatctatatccgccctatgcggagctccggggaggctcctgggtggtcatagatgccaccatcaacccgctgtgcatagaaatgtatgcagacaaagagagcaggggtggtgttctggaaccagaggggacagtggagattaagttccgaaagaaagatctgataaagtccatgagaaggatcgatccagcttacaagaagctcatggaacagctaggggaacctgatctctccgacaaggaccgaaaggacctggagggccggctaaaggctcgcgaggacctgctgctccccatctaccaccaggtggcggtgcagttcgccgacttccatgacacacccggccggatgctggagaagggcgtcatatctgacatcctggagtggaagaccgcacgcaccttcctgtattggcgtctgcgccgcctcctcctggaggaccaggtcaagcaggagatcctgcaggccagcggggagctgagtcacgtgcatatccagtccatgctgcgtcgctggttcgtggagacggagggggctgtcaaggcctacttgtgggacaacaaccaggtggttgtgcagtggctggaacagcactggcaggcaggggatggcccgcgctccaccatccgtgagaacatcacgtacctgaagcacgactctgtcctcaagaccatccgaggcctggttgaagaaaaccccgaggtggccgtggactgtgtgatatacctgagccagcacatcagcccagctgagcgggcgcaggtcgttcacctgctgtctaccatggacagcccggcctccacctgaccgtggcccgcccagccactcccgggaccacggcaaaaggaaccacccagacccaccacccgtacaccctcagcagaccctgaagacttgcttttaaacaaagaaaatcctgggcacttctgcagggctgctggttccgagctgacacccgtcttaataaaaggcccaggagtgcctcttccaaacaaaaacagcctcctctccatagctgggaagtttattttgttttgtctctgaagacagcagttttattgcatcactaaatctaatcaagctaaaacatccctgtttccttttgcaaaacagtgcctggcatgtgggatccaggcgttctttaggatccttggataccacatcgtgaaatcttttatttttttactctgagaccagcaccagatgtaagtaagcatctcatatatttcagccaaataaatgggccaagggaaaaaaatatatatatatagacaggactagagaaaacctatttttgtaatgatgtttctttggatactgtctagtcacccagaaaaatgtatggatgaatttttttttttttttttgagacaaagtctcactgtgtcatgcaggctggagtgcagtggcatgatctcactgcaacctccatctcctgtctcagcctcctagataactgggattacaggtgcccaccaccatgcccggctaatttttgtatttttggtagagacagagtttcaccaggttggtcaggctggtctcaaactcttgacttcaggtaatccacccaccttggcctcccaaagtgctgggattacaggcatgagccaccatcttcagccagatgatttttttattgagagagtgaaatgctattttgttccccaaatggctgctttgggaactgaaggtttttctgttgggaaggccctcttggttttggagagaaagacaagttatgagtagctgctaccctggaacggtgggcagagagcctactaggaaatgtgcagaataaactattttttgaaggaaaactttggcct

SEQ ID NO: 345223 - DNA, 5142 bp, Homo sapiens
agcggagacaatgccacccaagccattgggaagagtcatgagataaggcacatgtagcattttagacagtgcctggcacaaaggaagttgttgactgatgaccgtgcccatcagcatcaccaaccctgacctgctgaggcacagcacagagctcttcatggacagcggcttctccccactgtgccagcgcatgggagccatggtagccttcaggagattcgaggacttcaccagaaattttgatgaagtcatctcttgcttcgccaacgtgcccaaagacacccccctcttcagcgaggcccgcacctccctatactccgaggatgactgcaagagcctcagagaagagcccatccacattctgaatgtgtccatccagtgtgcagaccacctggaggatgaggcactggtgccgattttacggacattcgtacagtccaagaaaaatatccttgtggattatggactccgacgaatcacattcttgattgcccaagagaaagaatttcccaagtttttcacattcagagcaagagatgagtttgcagaagatcgcatttaccgtcacttggaacctgccctggccttccagctggaactcaaccggatgcgtaacttcgatctgaccgccgtgccctgtgccaaccacaagatgcacctttacctgggtgctgccaaggtgaaggaaggtgtggaagtgacggaccataggttcttcatccgcgccatcatcaggcactctgacctgatcacaaaggaagcctccttcgaatacctgcagaacgagggtgagcggctgctcctggaggccatggacgagctggaggtggcgttcaataacaccagcgtgcgcaccgactgcaaccacatcttcctcaacttcgtgcccactgtcatcatggaccccttcaagatcatgtttcactccttcggcaatcaagcaagggccccagcacgggatgctgatcaatactccctacgtcaccaaggatctgctccaggccaagcgattccaggcccagaccctgggaaccacctacatctatgacttcccggaaatgttcaggcaggctctctttaaactgtggggctccccagacaagtatcccaaagacatcctgacatacactgaattagtgttggactctcagggccagctggtggagatgaaccgacttcctggtggaaatgaggtgggcatggtggccttcaaaatgaggtttaagacccaggagtacccggaaggacgggatgtgatcgtcatcggcaatgacatcacctttcgcattggatcctttggccctggagaggaccttctgtacctgcgggcatccgagatggcccgggcagagggcattcccaaaatttacgtggcagccaacagtggcgcccgtattggcatggcagaggagatcaaacacatgttccacgtggcttgggtggacccagaagacccccacaaaggatttaaatacctgtacctgactccccaagactacaccagaatcagctccctgaactccgtccactgtaaacacatcgaggaaggaggagagtccagatacatgatcacggatatcatcgggaaggatgatggcttgggcgtggagaatctgaggggctcaggcatgattgctggggagtcctctctggcttacgaagagatcgtcaccattagcttggtgacctgccgagccattgggattggggcctacttggtgaggctgggccagcgagtgatccaggtggagaattcccacatcatcctcacaggagcaagtgctctcaacaaggtcctgggaagagaggtctacacatccaacaaccagctgggtggcgttcagatcatgcattacaatggtgtctcccacatcaccgtgccagatgactttgagggggtttataccatcctggagtggctgtcctatatgccaaaggataatcacagccctgtccctatcatcacacccactgaccccattgacagagaaattgaattcctcccatccagagctccctacgacccccggtggatgcttgcaggaaggcctcacccaactctgaagggaacgtggcagagcggattctttgaccacggcagtttcaaggaaatcatggcaccctgggcgcagaccgtggtgacaggacgagcaaggcttggggggattcccgtgggagtgattgctgtggagacacggactgtggaggtggcagtccctgcagaccctgccaacctggattctgaggccaagataattcagcaggcaggacaggtgtggttcccagactcagcctacaaaaccgcccaggccatcaaggacttcaaccgggagaagttgcccctgatgatctttgccaactggagggggttctccggtggcatgaaagacatgtatgaccaggtgctgaagtttggagcctacatcgtggacggccttagacaatacaaacagcccatcctgatctatatccgccctatgcggagctccggggaggctcctgggtggtcatagatgccaccatcaacccgctgtgcatagaaatgtatgcagacaaagagagcaggggtggtgttctggaaccagaggggacagtggagattaagttccgaaagaaagatctgataaagtccatgagaaggatcgatccagcttacaagaagctcatggaacagctaggggaacctgatctctccgacaaggaccgaaaggacctggagggccggctaaaggctcgcgaggacctgctgctccccatctaccaccaggtggcggtgcagttcgccgacttccatgacacacccggccggatgctggagaagggcgtcatatctgacatcctggagtggaagaccgcacgcaccttcctgtattggcgtctgcgccgcctcctcctggaggaccaggtcaagcaggagatcctgcaggccagcggggagctgagtcacgtgcatatccagtccatgctgcgtcgctggttcgtggagacggagggggctgtcaaggcctacttgtgggacaacaaccaggtggttgtgcagtggctggaacagcactggcaggcaggggatggcccgcgctccaccatccgtgagaacatcacgtacctgaagcacgactctgtcctcaagaccatccgaggcctggttgaagaaaaccccgaggtggccgtggactgtgtgatatacctgagccagcacatcagcccagctgagcgggcgcaggtcgttcacctgctgtctaccatggacagcccggcctccacctgaccgtggcccgcccagccactcccgggaccacggcaaaaggaaccacccagacccaccacccgtacaccctcagcagaccctgaagacttgcttttaaacaaagaaaatcctgggcacttctgcagggctgctggttccgagctgacacccgtcttaataaaaggcccaggagtgcctcttccaaacaaaaacagcctcctctccatagctgggaagtttattttgttttgtctctgaagacagcagttttattgcatcactaaatctaatcaagctaaaacatccctgtttccttttgcaaaacagtgcctggcatgtgggatccaggcgttctttaggatccttggataccacatcgtgaaatcttttatttttttactctgagaccagcaccagatgtaagtaagcatctcatatatttcagccaaataaatgggccaagggaaaaaaatatatatatatagacaggactagagaaaacctatttttgtaatgatgtttctttggatactgtctagtcacccagaaaaatgtatggatgaatttttttttttttttttgagacaaagtctcactgtgtcatgcaggctggagtgcagtggcatgatctcactgcaacctccatctcctgtctcagcctcctagataactgggattacaggtgcccaccaccatgcccggctaatttttgtatttttggtagagacagagtttcaccaggttggtcaggctggtctcaaactcttgacttcaggtaatccacccaccttggcctcccaaagtgctgggattacaggcatgagccaccatcttcagccagatgatttttttattgagagagtgaaatgctattttgttccccaaatggcgctagtgaatcactaggagggtcccactgataggccatgtttagcactggttgccagggattctctttttgagagagggaaagcaaaatgaatggaagtacccagctggaggtttcagggcttctggaggatgctctcgcatagctcgaggtcctctgcccacctcttctctccaaggaaaatgaggactgccccttccccctgcaggattggcccccagcctgcgcatgcaccctcctcttgcccaagtggggagcacagaggcggagaggaatcccttaccacacccacggcccagcttgctcacgagtgtcacctctgtgacggtcaccactgctcccttggagggccacttgagttactgttgcttcctcgcctgctggcttgatgagcaccgatggtgggatctgaccccgaggggcagagctgtcggtgactgaggactggactgtggtgaccatgccgatttgctcagggagaacgttgcaatgcacccagcagctcctggctctgcaggcggcacagcctggggccctgtgatcctctggtttcttccattggggcggagtcgggggtggagggagctggccacaacccactgctctgatgggtggtttgtccaaggatgctgaatgtaatgcctggtcaatgtggaagcccatgaggttgcccagggaagcctccaaaagctgggatgcttgagggtatccaagttgaaaaagacaaaatctgaccatcagccagtgacagtcctggcaaatgaaggtggggcggggcagtgaggggtgggagaaggtgaatgattcattattccaccccgaggtttgctggggtgaggggaagaatcgatgctgctttgggaactgaaggtttttctgttgggaaggccctcttggttttggagagaaagacaagttatgagtagctgctaccctggaacggtgggcagagagcctactaggaaatgtgcagaataaactattttttgaaggaaaactttggcct

SEQ ID NO: 345224 - DNA, 2629 bp, Homo sapiens
ttggacccccctgcgacagagtgtgcatagaaagtatgcagacaaagagagcgggtggtgttctggaaccagaggggacagtggagattaagttccgaaagaaagatctgataaagtccatgagaaggatcgatccagcttacaagaagctcatggaacagctaggggaacctgatctctccgacaaggaccgaaaggacctggagggccggctaaaggctcgcgaggacctgctgctccccatctaccaccaggtggcggtgcagttcgccgacttccatgacacacccggccggatgctggagaagggcgtcatatctgacatcctggagtggaagaccgcacgcaccttcctgtattggcgtctgcgccgcctcctcctggaggaccaggtcaagcaggagatcctgcaggccagcggggagctgagtcacgtgcatatccagtccatgctgcgtcgctggttcgtggagacggagggggctgtcaaggcctacttgtgggacaacaaccaggtggttgtgcagtggctggaacagcactggcaggcaggggatggcccgcgctccaccatccgtgagaacatcacgtacctgaagcacgactctgtcctcaagaccatccgaggcctggttgaagaaaaccccgaggtggccgtggactgtgtgatatacctgagccagcacatcagcccagctgagcgggcgcaggtcgttcacctgctgtctaccatggacagcccggcctccacctgaccgtggcccgcccagccactcccgggaccacggcaaaaggaaccacccagacccaccacccgtacaccctcagcagaccctgaagacttgcttttaaacaaagaaaatcctgggcacttctgcagggctgctggttccgagctgacacccgtcttaataaaaggcccaggagtgcctcttccaaacaaaaacagcctcctctccatagctgggaagtttattttgttttgtctctgaagacagcagttttattgcatcactaaatctaatcaagctaaaacatccctgtttccttttgcaaaacagtgcctggcatgtgggatccaggcgttctttaggatccttggataccacatcgtgaaatcttttatttttttactctgagaccagcaccagatgtaagtaagcatctcatatatttcagccaaataaatgggccaagggaaaaaaatatatatatatagacaggactagagaaaacctatttttgtaatgatgtttctttggatactgtctagtcacccagaaaaatgtatggatgaatttttttttttttttttgagacaaagtctcactgtgtcatgcaggctggagtgcagtggcatgatctcactgcaacctccatctcctgtctcagcctcctagataactgggattacaggtgcccaccaccatgcccggctaatttttgtatttttggtagagacagagtttcaccaggttggtcaggctggtctcaaactcttgacttcaggtaatccacccaccttggcctcccaaagtgctgggattacaggcatgagccaccatcttcagccagatgatttttttattgagagagtgaaatgctattttgttccccaaatggcgctagtgaatcactaggagggtcccactgataggccatgtttagcactggttgccagggattctctttttgagagagggaaagcaaaatgaatggaagtacccagctggaggtttcagggcttctggaggatgctctcgcatagctcgaggtcctctgcccacctcttctctccaaggaaaatgaggactgccccttccccctgcaggattggcccccagcctgcgcatgcaccctcctcttgcccaagtggggagcacagaggcggagaggaatcccttaccacacccacggcccagcttgctcacgagtgtcacctctgtgacggtcaccactgctcccttggagggccacttgagttactgttgcttcctcgcctgctggcttgatgagcaccgatggtgggatctgaccccgaggggcagagctgtcggtgactgaggactggactgtggtgaccatgccgatttgctcagggagaacgttgcaatgcacccagcagctcctggctctgcaggcggcacagcctggggccctgtgatcctctggtttcttccattggggcggagtcgggggtggagggagctggccacaacccactgctctgatgggtggtttgtccaaggatgctgaatgtaatgcctggtcaatgtggaagcccatgaggttgcccagggaagcctccaaaagctgggatgcttgagggtatccaagttgaaaaagacaaaatctgaccatcagccagtgacagtcctggcaaatgaaggtggggcggggcagtgaggggtgggagaaggtgaatgattcattattccaccccgaggtttgctggggtgaggggaagaatcgatgctgctttgggaactgaaggtttttctgttgggaaggccctcttggttttggagagaaagacaagttatgagtagctgctaccctggaacggtgggcagagagcctactaggaaatgtgcagaataaactattttttgaaggaaaactttggcct

SEQ ID NO: 345225 - DNA, 2434 bp, Homo sapiens
agcggagacaatgccacccaagccattgggaagagtcatgagataaggcacatgtagcattttagacagtgcctggcacaaaggaagttgttgactgatgaccgtgcccatcagcatcaccaaccctgacctgctgaggcacagcacagagctcttcatggacagcggcttctccccactgtgccagcgcatgggagccatggtagccttcaggagattcgaggacttcaccagaaattttgatgaagtcatctcttgcttcgccaacgtgcccaaagacacccccctcttcagcgaggcccgcacctccctatactccgaggatgactgcaagagcctcagagaagagcccatccacattctgaatgtgtccatccagtgtgcagaccacctggaggatgaggcactggtgccgattttacggacattcgtacagtccaagaaaaatatccttgtggattatggactccgacgaatcacattcttgattgcccaagagaaagaatttcccaagtttttcacattcagagcaagagatgagtttgcagaagatcgcatttaccgtcacttggaacctgccctggccttccagctggaactcaaccggatgcgtaacttcgatctgaccgccgtgccctgtgccaaccacaagatgcacctttacctgggtgctgccaaggtgaaggaaggtgtggaagtgacggaccataggttcttcatccgcgccatcatcaggcactctgacctgatcacaaaggaagcctccttcgaatacctgcagaacgagggtgagcggctgctcctggaggccatggacgagctggaggtggcgttcaataacaccagcgtgcgcaccgactgcaaccacatcttcctcaacttcgtgcccactgtcatcatggaccccttcaagatcgaggagtccgtgcgctacatggttatgcgctacggcagccggctgtggaaactccgtgtgctacaggctgaggtcaagatcaacatccgccagaccaccaccggcagtgccgttcccatccgcctgttcatcaccaatgagtcgggctactacctggacatcagcctctacaaagaagtgactgactccagatctggaaatatcatgtttcactccttcggcaatcaagcaagggccccagcacgggatgctgatcaatactccctacgtcaccaaggatctgctccaggccaagcgattccaggcccagaccctgggaaccacctacatctatgacttcccggaaatgttcaggcaggctctctttaaactgtggggctccccagacaagtatcccaaagacatcctgacatacactgaattagtgttggactctcagggccagctggtggagatgaaccgacttcctggtggaaatgaggtgggcatggtggccttcaaaatgaggtttaagacccaggagtacccggaaggacgggatgtgatcgtcatcggcaatgacatcacctttcgcattggatcctttggccctggagaggaccttctgtacctgcgggcatccgagatggcccgggcagagggcattcccaaaatttacgtggcagccaacagtggcgcccgtattggcatggcagaggagatcaaacacatgttccacgtggcttgggtggacccagaagacccccacaaaggatttaaatacctgtacctgactccccaagactacaccagaatcagctccctgaactccgtccactgtaaacacatcgaggaaggaggagagtccagatacatgatcacggatatcatcgggaaggatgatggcttgggcgtggagaatctgaggggctcaggcatgattgctggggagtcctctctggcttacgaagagatcgtcaccattagcttggtgacctgccgagccattgggattggggcctacttggtgaggctgggccagcgagtgatccaggtggagaattcccacatcatcctcacaggagcaagtgctctcaacaaggtgaccaaaaaggggcctgtgcagagtggatccttgggggccaggagtcattttaacattcccattggtctctggtgggggatttttctcaatatgaagccagtttcattcctactgatacaagagctctttttttccaatttgcagctatctgggtccttatgagaaaaaaaaaattagttttaggcaattctggtcgatctaactccctgtattactgacattttaaaacaaattattgaagtgccattacacattgcagaaaattagaaaaggaaccccccaaaaaagtaattttgcagcttctatcattctggtatagttccctctcatcttctgtctttatgtggttaatttatagtgaatatgcagttttgtattctacttttttcactgtattaaaacattttccttgttgaaaagtctctatacttaat

SEQ ID NO: 345226 - DNA, 1275 bp, Homo sapiens
ctttgacttcctgggctcaagtgatcctcccgtctcagcctcctgactagctgggactacaggcacgtgccaccacagccggctaatttttgtatttttggtagagacagagtttcaccaggttggtcaggctggtctcaaactcttgacttcaggtaatccacccaccttggcctcccaaagtgctgggattacaggcatgagccaccatcttcagccagatgatttttttattgagagagtgaaatgctattttgttccccaaatggcgctagtgaatcactaggagggtcccactgataggccatgtttagcactggttgccagggattctctttttgagagagggaaagcaaaatgaatggaagtacccagctggaggtttcagggcttctggaggatgctctcgcatagctcgaggtcctctgcccacctcttctctccaaggaaaatgaggactgccccttccccctgcaggattggcccccagcctgcgcatgcaccctcctcttgcccaagtggggagcacagaggcggagaggaatcccttaccacacccacggcccagcttgctcacgagtgtcacctctgtgacggtcaccactgctcccttggagggccacttgagttactgttgcttcctcgcctgctggcttgatgagcaccgatggtgggatctgaccccgaggggcagagctgtcggtgactgaggactggactgtggtgaccatgccgatttgctcagggagaacgttgcaatgcacccagcagctcctggctctgcaggcggcacagcctggggccctgtgatcctctggtttcttccattggggcggagtcgggggtggagggagctggccacaacccactgctctgatgggtggtttgtccaaggatgctgaatgtaatgcctggtcaatgtggaagcccatgaggttgcccagggaagcctccaaaagctgggatgcttgagggtatccaagttgaaaaagacaaaatctgaccatcagccagtgacagtcctggcaaatgaaggtggggcggggcagtgaggggtgggagaaggtgaatgattcattattccaccccgaggtttgctggggtgaggggaagaatcgatgctgctttgggaactgaaggtttttctgttgggaaggccctcttggttttggagagaaagacaagttatgagtagctgctaccctggaacggtgggcagagagcctactaggaaatgtgcagaataaactattttttgaaggaaaactttggcct

SEQ ID NO: 345227 - DNA, 2029 bp, Homo sapiens
agcggagacaatgccacccaagccattgggaagagtcatgagataaggcacatgtagcattttagacagtgcctggcacaaaggaagttgttgactgatgaccgtgcccatcagcatcaccaaccctgacctgctgaggcacagcacagagctcttcatggacagcggcttctccccactgtgccagcgcatgggagccatggtagccttcaggagattcgaggacttcaccagaaattttgatgaagtcatctcttgcttcgccaacgtgcccaaagacacccccctcttcagcgaggcccgcacctccctatactccgaggatgactgcaagagcctcagagaagagcccatccacattctgaatgtgtccatccagtgtgcagaccacctggaggatgaggcactggtgccgattttacggacattcgtacagtccaagaaaaatatccttgtggattatggactccgacgaatcacattcttgattgcccaagagaaagaatttcccaagtttttcacattcagagcaagagatgagtttgcagaagatcgcatttaccgtcacttggaacctgccctggccttccagctggaactcaaccggatgcgtaacttcgatctgaccgccgtgccctgtgccaaccacaagatgcacctttacctgggtgctgccaaggtgaaggaaggtgtggaagtgacggaccataggttcttcatccgcgccatcatcaggcactctgacctgatcacaaaggaagcctccttcgaatacctgcagaacgagggtgagcggctgctcctggaggccatggacgagctggaggtggcgttcaataacaccagcgtgcgcaccgactgcaaccacatcttcctcaacttcgtgcccactgtcatcatggaccccttcaagatcgaggagtccgtgcgctacatggttatgcgctacggcagccggctgtggaaactccgtgtgctacaggctgaggtcaagatcaacatccgccagaccaccaccggcagtgccgttcccatccgcctgttcatcaccaatgagtcgggctactacctggacatcagcctctacaaagaagtgactgactccagatctggaaatatcatgtttcactccttcggcaatcaagcaagggccccagcacgggatgctgatcaatactccctacgtcaccaaggatctgctccaggccaagcgattccaggcccagaccctgggaaccacctacatctatgacttcccggaaatgttcaggcaggctctctttaaactgtggggctccccagacaagtatcccaaagacatcctgacatacactgaattagtgttggactctcagggccagctggtggagatgaaccgacttcctggtggaaatgaggtgggcatggtggccttcaaaatgaggtttaagacccaggagtacccggaaggacgggatgtgatcgtcatcggcaatgacatcacctttcgcattggatcctttggccctggagaggaccttctgtacctgcgggcatccgagatggcccgggcagagggcattcccaaaatttacgtggcagccaacagtggcgcccgtattggcatggcagaggagatcaaacacatgttccacgtggcttgggtggacccagaagacccccacaaagtacgtcgtgaaactggcggggcagggtgattctgctcagctactactgtattttcagtgggagtgctagcacctgcaagaggtgaaaaaaatctcacttatgtataaagcacagatgtacatgtagtgtataaacaggcatacagtgtatcagtgatactaacatttcactgtggcgggggggatggtgatgagaaaaaaaagatctaaaaaggctccttaacggggataatgaaaaaagtctataaaccctgagctgatatacactgagcgctcctgaatgcagtgtgcactgagaatgcagaggtgattgtgtcaactccctggcctcatagcgttcttagaattatggctcacacctg

SEQ ID NO: 345228 - DNA, 371 bp, Homo sapiens
atcagaaacagtgcccctcctctaggagggcagaaattagcaaagttagagaggactgtggctggagagcaggagggttatgctgccatggaaaaagtcgtacactcttagacctgaaaggggccctccagagttcagaaagcattattttaaacagttggctcagtctttccatctgtgggtaaagatacagaggcccagagagggaaagtgacttgtctaagggcacacagcatgtgtgggggtaaaagagctgaggactgacacccagatcttctggctctcttccctccagctccccccacatccattagcccttgcttgctgggcaatgcctcatatacccccatccctgcctcttctcttttaag

SEQ ID NO: 345229 - DNA, 552 bp, Homo sapiens
acattaagaaaaaaaaaacagtggctttcagtgcagggaactggattcgtagcctcactaaagtattttttaagggatttaaatacctgtacctgactccccaagactacaccagaatcagctccctgaactccgtccactgtaaacacatcgaggaaggaggagagtccaggtaaataacttatcaggtagctccttaattttgctcatggttaatttcagctgtcttctttcctcggggcttgtggcgatattttccagtggggtggtggtgtttgtatgatgggaaccaatgcctgttgggggcactgatgccttaaacatttgttaaactctccaaggtgagtccatccttgtcattctaaaatgagtgactcctttcacaaaaaatagcacgtcatgtagggagaatgagattggattctcgtgaatctcctaggagccgcaggctcacattttgtgaccaaactgatgcagcggtgacttggcaaactgggaaggtatgggtggggcagagagaggtctgttcttcgagagcattcaaaggctact

SEQ ID NO: 345230 - DNA, 541 bp, Homo sapiens
gcccaggccatcaaggacttcaaccgggagaagttgcccctgatgatctttgccaactggagggggttctccggtggcatgaaaggtaagcccctccctgcctatgttaccccaaagccttggggtcagcacccaggacagcaccctctgggtggtgatgctaatgtcctagtctgtgcccatcatcatcttagctgtgtctcccaacaaccctgaggagaaaatattgttcaggtgccccactaccccgttttaaagatgaggaactgctgggcacagtggcagacacctgtaatcccggtgctttgggaggccaaggcagaaagatcatttgaggccaggagtttgagaccagcctggggcagtatagcaagaccctgtctctacaaaaaaacaaaataaatgtttaaaaaattagctgggcatggtggcacatgcctattgtcccagctatttgggaggctgaggtgggaggattgcttgagcccaggaggttgaggctgtactccagcctgggcaacggagtgagacccccatctca

SEQ ID NO: 345231 - DNA, 7367 bp, Homo sapiens
actcagtattaatggtagcatacatcaccagtctatgagtgtcttgtgtgccatcatttaaaactcaatctatgatgtggtatgcttgcatggctgcgacgcagatacccccctccccacctgatgcaaaattttgaagaacttaaatatccgcgtgcctagcctcatcgctaaggatactgatgcagtaagtctgggacaagggcctggtttgggaactacactgcttctcctggggagagaaccggaaagaggccatttcgaacatggtggtggctttgaaggaactgtccatccgaggcgactttaggactaccgtggaatacctcattaacctcctggagaccgagagcttccagaacaacgacatcgacaccgggtggttggactacctcattgctgagaaagtgcaaaagaaaccgaatatcatgcttggggtggtatgcggggcccttgaacgtggagatgcgatgttcagaacgtgcatgacagatttcttacactccctggaaaggggccaggtcctcccagcggattcactactgaacctcgtagatgtggaattaatttacgagggtgtaaagtacattctaaaggtgacccggcagtctctgaccatgttcgttctcatcatgaatggctgccacatcgagattgatgcccaccggctgaatgatggggggctcctgctctcctacaatgggaacagctacaccacctacatgaaggaagaggttgacagttaccgaattaccatcggcaataagacgtgtgtttttgagaaggagaacgatcctacagtcctgagatccccctcggctgggaagctgacacagtatcacagtggaggatgggggccacgttgaggctgggagcacgctacgctgagatggaggtgatgaagatgatcatgaccctgaacgttcaggaaagaggccgggtgaagtacatcaagcgtccaggtgcggtgctggaagcaggctgcgtggtggccaggctggagctcgatgacccttctaaagtccacccggctgaaccgttcacaggagaactccctgcccagcagaacactgccgatcctcggaaagaaactgcaccagggtcttccacagcgtcctgggaagcctcaccaacgtcatgagtggcttttgtctgccagagccgttttttagcataaagctgaaggagtgggtgcagaagctcatgatgaccctccggcacccgtcactgctgctggacgtgcaggagatcatgaccagtcgtgcaggccgcatccccccccctgttgagaagtctgtccgcaaggtgatggcccagtatgccagcaacatcacctcggtgctgtgccagttccccagccagcagatagccaccatcctggactgccatgcagccaccctgcagcggaaggctgatcgagaggtcttcttcatcaacacccagagcatggtgcagttggtccagaggtaccgaagtggaatccgcggctcatatgaaaacagtggtgatcgatctcttgagaagatacttgcgtgttgagcaccattttcggcaagcccactacgacaagtgtgtgataaacctcagggaacagttcaagccagacatgtcccaggtgctggactgcatcttctcccacgcacaggtggccaagaagaaccagctggtgatcatgttgatcgatgagctgtgtggcccagacccttccctgtcggacgagctgatctccatcctcaacgagctcactcagctgagcaaaagcgagcactgcaaagtggccctcagagcccggcagatcctgatcgcctccacctcccctcctacgagctgcggcataaccaggtggagtccattttcctgtctgccattgacatgtacggccaccagttctgccccgagaacctccagaaattaatactttcggaaacaaccatcttcgacgtcctgaatactttcttctatcacgcaaacaaagtcgtgtgcatggcgtccttggaggtttacgtggggggggcttacatcgcctatgtgttaaacagcctgcagcaccggcagctcccggacggcacctgcgtggtagaattccagttcatgctgccgtcctcccacccaaaccggatgaccgtgcccatcagcatcaccaaccctgacctgctgaggcacagcacagagctcttcatggacagcggcttctccccactgtgccagcgcatgggagccatggtagccttcaggagattcgaggacttcaccagaaattttgatgaagtcatctcttgcttcgccaacgtgcccaaagacacccccctcttcagcgaggcccgcacctccctatactccgaggatgactgcaagagcctcagagaagagcccatccacattctgaatgtgtccatccagtgtgcagaccacctggaggatgaggcactggtgccgattttacggacattcgtacagtccaagaaaaatatccttgtggattatggactccgacgaatcacattcttgattgcccaagagaaagaatttcccaagtttttcacattcagagcaagagatgagtttgcagaagatcgcatttaccgtcacttggaacctgccctggccttccagctggaactcaaccggatgcgtaacttcgatctgaccgccgtgccctgtgccaaccacaagatgcacctttacctgggtgctgccaaggtgaaggaaggtgtggaagtgacggaccataggttcttcatccgcgccatcatcaggcactctgacctgatcacaaaggaagcctccttcgaatacctgcagaacgagggtgagcggctgctcctggaggccatggacgagctggaggtggcgttcaataacaccagcgtgcgcaccgactgcaaccacatcttcctcaacttcgtgcccactgtcatcatggaccccttcaagatcgaggagtccgtgcgctacatggttatgcgctacggcagccggctgtggaaactccgtgtgctacaggctgaggtcaagatcaacatccgccagaccaccaccggcagtgccgttcccatccgcctgttcatcaccaatgagtcgggctactacctggacatcagcctctacaaagaagtgactgactccagatctggaaatatcatgtttcactccttcggcaatcaagcaagggccccagcacgggatgctgatcaatactccctacgtcaccaaggatctgctccaggccaagcgattccaggcccagaccctgggaaccacctacatctatgacttcccggaaatgttcaggcaggctctctttaaactgtggggctccccagacaagtatcccaaagacatcctgacatacactgaattagtgttggactctcagggccagctggtggagatgaaccgacttcctggtggaaatgaggtgggcatggtggccttcaaaatgaggtttaagacccaggagtacccggaaggacgggatgtgatcgtcatcggcaatgacatcacctttcgcattggatcctttggccctggagaggaccttctgtacctgcgggcatccgagatggcccgggcagagggcattcccaaaatttacgtggcagccaacagtggcgcccgtattggcatggcagaggagatcaaacacatgttccacgtggcttgggtggacccagaagacccccacaaaggatttaaatacctgtacctgactccccaagactacaccagaatcagctccctgaactccgtccactgtaaacacatcgaggaaggaggagagtccagatacatgatcacggatatcatcgggaaggatgatggcttgggcgtggagaatctgaggggctcaggcatgattgctggggagtcctctctggcttacgaagagatcgtcaccattagcttggtgacctgccgagccattgggattggggcctacttggtgaggctgggccagcgagtgatccaggtggagaattcccacatcatcctcacaggagcaagtgctctcaacaaggtcctgggaagagaggtctacacatccaacaaccagctgggtggcgttcagatcatgcattacaatggtgtctcccacatcaccgtgccagatgactttgagggggtttataccatcctggagtggctgtcctatatgccaaaggataatcacagccctgtccctatcatcacacccactgaccccattgacagagaaattgaattcctcccatccagagctccctacgacccccggtggatgcttgcaggaaggcctcacccaactctgaagggaacgtggcagagcggattctttgaccacggcagtttcaaggaaatcatggcaccctgggcgcagaccgtggtgacaggacgagcaaggcttggggggattcccgtgggagtgattgctgtggagacacggactgtggaggtggcagtccctgcagaccctgccaacctggattctgaggccaagataattcagcaggcaggacaggtgtggttcccagactcagcctacaaaaccgcccaggccatcaaggacttcaaccgggagaagttgcccctgatgatctttgccaactggagggggttctccggtggcatgaaagacatgtatgaccaggtgctgaagtttggagcctacatcgtggacggccttagacaatacaaacagcccatcctgatctatatccgccctatgcggagctccggggaggctcctgggtggtcatagatgccaccatcaacccgctgtgcatagaaatgtatgcagacaaagagagcaggggtggtgttctggaaccagaggggacagtggagattaagttccgaaagaaagatctgataaagtccatgagaaggatcgatccagcttacaagaagctcatggaacagctaggggaacctgatctctccgacaaggaccgaaaggacctggagggccggctaaaggctcgcgaggacctgctgctccccatctaccaccaggtggcggtgcagttcgccgacttccatgacacacccggccggatgctggagaagggcgtcatatctgacatcctggagtggaagaccgcacgcaccttcctgtattggcgtctgcgccgcctcctcctggaggaccaggtcaagcaggagatcctgcaggccagcggggagctgagtcacgtgcatatccagtccatgctgcgtcgctggttcgtggagacggagggggctgtcaaggcctacttgtgggacaacaaccaggtggttgtgcagtggctggaacagcactggcaggcaggggatggcccgcgctccaccatccgtgagaacatcacgtacctgaagcacgactctgtcctcaagaccatccgaggcctggttgaagaaaaccccgaggtggccgtggactgtgtgatatacctgagccagcacatcagcccagctgagcgggcgcaggtcgttcacctgctgtctaccatggacagcccggcctccacctgaccgtggcccgcccagccactcccgggaccacggcaaaaggaaccacccagacccaccacccgtacaccctcagcagaccctgaagacttgcttttaaacaaagaaaatcctgggcacttctgcagggctgctggttccgagctgacacccgtcttaataaaaggcccaggagtgcctcttccaaacaaaaacagcctcctctccatagctgggaagtttattttgttttgtctctgaagacagcagttttattgcatcactaaatctaatcaagctaaaacatccctgtttccttttgcaaaacagtgcctggcatgtgggatccaggcgttctttaggatccttggataccacatcgtgaaatcttttatttttttactctgagaccagcaccagatgtaagtaagcatctcatatatttcagccaaataaatgggccaagggaaaaaaatatatatatatagacaggactagagaaaacctatttttgtaatgatgtttctttggatactgtctagtcacccagaaaaatgtatggatgaatttttttttttttttttgagacaaagtctcactgtgtcatgcaggctggagtgcagtggcatgatctcactgcaacctccatctcctgtctcagcctcctagataactgggattacaggtgcccaccaccatgcccggctaatttttgtatttttggtagagacagagtttcaccaggttggtcaggctggtctcaaactcttgacttcaggtaatccacccaccttggcctcccaaagtgctgggattacaggcatgagccaccatcttcagccagatgatttttttattgagagagtgaaatgctattttgttccccaaatggcgctagtgaatcactaggagggtcccactgataggccatgtttagcactggttgccagggattctctttttgagagagggaaagcaaaatgaatggaagtacccagctggaggtttcagggcttctggaggatgctctcgcatagctcgaggtcctctgcccacctcttctctccaaggaaaatgaggactgccccttccccctgcaggattggcccccagcctgcgcatgcaccctcctcttgcccaagtggggagcacagaggcggagaggaatcccttaccacacccacggcccagcttgctcacgagtgtcacctctgtgacggtcaccactgctcccttggagggccacttgagttactgttgcttcctcgcctgctggcttgatgagcaccgatggtgggatctgaccccgaggggcagagctgtcggtgactgaggactggactgtggtgaccatgccgatttgctcagggagaacgttgcaatgcacccagcagctcctggctctgcaggcggcacagcctggggccctgtgatcctctggtttcttccattggggcggagtcgggggtggagggagctggccacaacccactgctctgatgggtggtttgtccaaggatgctgaatgtaatgcctggtcaatgtggaagcccatgaggttgcccagggaagcctccaaaagctgggatgcttgagggtatccaagttgaaaaagacaaaatctgaccatcagccagtgacagtcctggcaaatgaaggtggggcggggcagtgaggggtgggagaaggtgaatgattcattattccaccccgaggtttgctggggtgaggggaagaatcgatgctgctttgggaactgaaggtttttctgttgggaaggccctcttggttttggagagaaagacaagttatgagtagctgctaccctggaacggtgggcagagagcctactaggaaatgtgcagaataaactattttttgaaggaaaactttggcct

SEQ ID NO: 345232 - DNA, 7240 bp, Homo sapiens
tgctgggattacaggcgtgagccaccacacccggccactcctgtgcttttccagttctctgaatcacatcattgcagcaactctgttgatgtatgcatgaatttggaaaatgatccatgtgcctttcccttcaaggaacatggtggtggctttgaaggaactgtccatccgaggcgactttaggactaccgtggaatacctcattaacctcctggagaccgagagcttccagaacaacgacatcgacaccgggtggttggactacctcattgctgagaaagtgcaaaagaaaccgaatatcatgcttggggtggtatgcggggcccttgaacgtggagatgcgatgttcagaacgtgcatgacagatttcttacactccctggaaaggggccaggtcctcccagcggattcactactgaacctcgtagatgtggaattaatttacgagggtgtaaagtacattctaaaggtgacccggcagtctctgaccatgttcgttctcatcatgaatggctgccacatcgagattgatgcccaccggctgaatgatggggggctcctgctctcctacaatgggaacagctacaccacctacatgaaggaagaggttgacagttaccgaattaccatcggcaataagacgtgtgtttttgagaaggagaacgatcctacagtcctgagatccccctcggctgggaagctgacacagtatcacagtggaggatgggggccacgttgaggctgggagcacgctacgctgagatggaggtgatgaagatgatcatgaccctgaacgttcaggaaagaggccgggtgaagtacatcaagcgtccaggtgcggtgctggaagcaggctgcgtggtggccaggctggagctcgatgacccttctaaagtccacccggctgaaccgttcacaggagaactccctgcccagcagaacactgccgatcctcggaaagaaactgcaccagggtcttccacagcgtcctgggaagcctcaccaacgtcatgagtggcttttgtctgccagagccgttttttagcataaagctgaaggagtgggtgcagaagctcatgatgaccctccggcacccgtcactgctgctggacgtgcaggagatcatgaccagtcgtgcaggccgcatccccccccctgttgagaagtctgtccgcaaggtgatggcccagtatgccagcaacatcacctcggtgctgtgccagttccccagccagcagatagccaccatcctggactgccatgcagccaccctgcagcggaaggctgatcgagaggtcttcttcatcaacacccagagcatggtgcagttggtccagaggtaccgaagtggaatccgcggctcatatgaaaacagtggtgatcgatctcttgagaagatacttgcgtgttgagcaccattttcggcaagcccactacgacaagtgtgtgataaacctcagggaacagttcaagccagacatgtcccaggtgctggactgcatcttctcccacgcacaggtggccaagaagaaccagctggtgatcatgttgatcgatgagctgtgtggcccagacccttccctgtcggacgagctgatctccatcctcaacgagctcactcagctgagcaaaagcgagcactgcaaagtggccctcagagcccggcagatcctgatcgcctccacctcccctcctacgagctgcggcataaccaggtggagtccattttcctgtctgccattgacatgtacggccaccagttctgccccgagaacctccagaaattaatactttcggaaacaaccatcttcgacgtcctgaatactttcttctatcacgcaaacaaagtcgtgtgcatggcgtccttggaggtttacgtggggggggcttacatcgcctatgtgttaaacagcctgcagcaccggcagctcccggacggcacctgcgtggtagaattccagttcatgctgccgtcctcccacccaaaccggatgaccgtgcccatcagcatcaccaaccctgacctgctgaggcacagcacagagctcttcatggacagcggcttctccccactgtgccagcgcatgggagccatggtagccttcaggagattcgaggacttcaccagaaattttgatgaagtcatctcttgcttcgccaacgtgcccaaagacacccccctcttcagcgaggcccgcacctccctatactccgaggatgactgcaagagcctcagagaagagcccatccacattctgaatgtgtccatccagtgtgcagaccacctggaggatgaggcactggtgccgattttacggacattcgtacagtccaagaaaaatatccttgtggattatggactccgacgaatcacattcttgattgcccaagagaaagaatttcccaagtttttcacattcagagcaagagatgagtttgcagaagatcgcatttaccgtcacttggaacctgccctggccttccagctggaactcaaccggatgcgtaacttcgatctgaccgccgtgccctgtgccaaccacaagatgcacctttacctgggtgctgccaaggtgaaggaaggtgtggaagtgacggaccataggttcttcatccgcgccatcatcaggcactctgacctgatcacaaaggaagcctccttcgaatacctgcagaacgagggtgagcggctgctcctggaggccatggacgagctggaggtggcgttcaataacaccagcgtgcgcaccgactgcaaccacatcttcctcaacttcgtgcccactgtcatcatggaccccttcaagatcgaggagtccgtgcgctacatggttatgcgctacggcagccggctgtggaaactccgtgtgctacaggctgaggtcaagatcaacatccgccagaccaccaccggcagtgccgttcccatccgcctgttcatcaccaatgagtcgggctactacctggacatcagcctctacaaagaagtgactgactccagatctggaaatatcatgtttcactccttcggcaatcaagcaagggccccagcacgggatgctgatcaatactccctacgtcaccaaggatctgctccaggccaagcgattccaggcccagaccctgggaaccacctacatctatgacttcccggaaatgttcaggcaggctctctttaaactgtggggctccccagacaagtatcccaaagacatcctgacatacactgaattagtgttggactctcagggccagctggtggagatgaaccgacttcctggtggaaatgaggtgggcatggtggccttcaaaatgaggtttaagacccaggagtacccggaaggacgggatgtgatcgtcatcggcaatgacatcacctttcgcattggatcctttggccctggagaggaccttctgtacctgcgggcatccgagatggcccgggcagagggcattcccaaaatttacgtggcagccaacagtggcgcccgtattggcatggcagaggagatcaaacacatgttccacgtggcttgggtggacccagaagacccccacaaaggatttaaatacctgtacctgactccccaagactacaccagaatcagctccctgaactccgtccactgtaaacacatcgaggaaggaggagagtccagatacatgatcacggatatcatcgggaaggatgatggcttgggcgtggagaatctgaggggctcaggcatgattgctggggagtcctctctggcttacgaagagatcgtcaccattagcttggtgacctgccgagccattgggattggggcctacttggtgaggctgggccagcgagtgatccaggtggagaattcccacatcatcctcacaggagcaagtgctctcaacaaggtcctgggaagagaggtctacacatccaacaaccagctgggtggcgttcagatcatgcattacaatggtgtctcccacatcaccgtgccagatgactttgagggggtttataccatcctggagtggctgtcctatatgccaaaggataatcacagccctgtccctatcatcacacccactgaccccattgacagagaaattgaattcctcccatccagagctccctacgacccccggtggatgcttgcaggaaggcctcacccaactctgaagggaacgtggcagagcggattctttgaccacggcagtttcaaggaaatcatggcaccctgggcgcagaccgtggtgacaggacgagcaaggcttggggggattcccgtgggagtgattgctgtggagacacggactgtggaggtggcagtccctgcagaccctgccaacctggattctgaggccaagataattcagcaggcaggacaggtgtggttcccagactcagcctacaaaaccgcccaggccatcaaggacttcaaccgggagaagttgcccctgatgatctttgccaactggagggggttctccggtggcatgaaagacatgtatgaccaggtgctgaagtttggagcctacatcgtggacggccttagacaatacaaacagcccatcctgatctatatccgccctatgcggagctccggggaggctcctgggtggtcatagatgccaccatcaacccgctgtgcatagaaatgtatgcagacaaagagagcaggggtggtgttctggaaccagaggggacagtggagattaagttccgaaagaaagatctgataaagtccatgagaaggatcgatccagcttacaagaagctcatggaacagctaggggaacctgatctctccgacaaggaccgaaaggacctggagggccggctaaaggctcgcgaggacctgctgctccccatctaccaccaggtggcggtgcagttcgccgacttccatgacacacccggccggatgctggagaagggcgtcatatctgacatcctggagtggaagaccgcacgcaccttcctgtattggcgtctgcgccgcctcctcctggaggaccaggtcaagcaggagatcctgcaggccagcggggagctgagtcacgtgcatatccagtccatgctgcgtcgctggttcgtggagacggagggggctgtcaaggcctacttgtgggacaacaaccaggtggttgtgcagtggctggaacagcactggcaggcaggggatggcccgcgctccaccatccgtgagaacatcacgtacctgaagcacgactctgtcctcaagaccatccgaggcctggttgaagaaaaccccgaggtggccgtggactgtgtgatatacctgagccagcacatcagcccagctgagcgggcgcaggtcgttcacctgctgtctaccatggacagcccggcctccacctgaccgtggcccgcccagccactcccgggaccacggcaaaaggaaccacccagacccaccacccgtacaccctcagcagaccctgaagacttgcttttaaacaaagaaaatcctgggcacttctgcagggctgctggttccgagctgacacccgtcttaataaaaggcccaggagtgcctcttccaaacaaaaacagcctcctctccatagctgggaagtttattttgttttgtctctgaagacagcagttttattgcatcactaaatctaatcaagctaaaacatccctgtttccttttgcaaaacagtgcctggcatgtgggatccaggcgttctttaggatccttggataccacatcgtgaaatcttttatttttttactctgagaccagcaccagatgtaagtaagcatctcatatatttcagccaaataaatgggccaagggaaaaaaatatatatatatagacaggactagagaaaacctatttttgtaatgatgtttctttggatactgtctagtcacccagaaaaatgtatggatgaatttttttttttttttttgagacaaagtctcactgtgtcatgcaggctggagtgcagtggcatgatctcactgcaacctccatctcctgtctcagcctcctagataactgggattacaggtgcccaccaccatgcccggctaatttttgtatttttggtagagacagagtttcaccaggttggtcaggctggtctcaaactcttgacttcaggtaatccacccaccttggcctcccaaagtgctgggattacaggcatgagccaccatcttcagccagatgatttttttattgagagagtgaaatgctattttgttccccaaatggcgctagtgaatcactaggagggtcccactgataggccatgtttagcactggttgccagggattctctttttgagagagggaaagcaaaatgaatggaagtacccagctggaggtttcagggcttctggaggatgctctcgcatagctcgaggtcctctgcccacctcttctctccaaggaaaatgaggactgccccttccccctgcaggattggcccccagcctgcgcatgcaccctcctcttgcccaagtggggagcacagaggcggagaggaatcccttaccacacccacggcccagcttgctcacgagtgtcacctctgtgacggtcaccactgctcccttggagggccacttgagttactgttgcttcctcgcctgctggcttgatgagcaccgatggtgggatctgaccccgaggggcagagctgtcggtgactgaggactggactgtggtgaccatgccgatttgctcagggagaacgttgcaatgcacccagcagctcctggctctgcaggcggcacagcctggggccctgtgatcctctggtttcttccattggggcggagtcgggggtggagggagctggccacaacccactgctctgatgggtggtttgtccaaggatgctgaatgtaatgcctggtcaatgtggaagcccatgaggttgcccagggaagcctccaaaagctgggatgcttgagggtatccaagttgaaaaagacaaaatctgaccatcagccagtgacagtcctggcaaatgaaggtggggcggggcagtgaggggtgggagaaggtgaatgattcattattccaccccgaggtttgctggggtgaggggaagaatcgatgctgctttgggaactgaaggtttttctgttgggaaggccctcttggttttggagagaaagacaagttatgagtagctgctaccctggaacggtgggcagagagcctactaggaaatgtgcagaataaactattttttgaaggaaaactttggcct

SEQ ID NO: 345233 - DNA, 5346 bp, Homo sapiens
agcggagacaatgccacccaagccattgggaagagtcatgagataaggcacatgtagcattttagacagtgcctggcacaaaggaagttgttgactgatgaccgtgcccatcagcatcaccaaccctgacctgctgaggcacagcacagagctcttcatggacagcggcttctccccactgtgccagcgcatgggagccatggtagccttcaggagattcgaggacttcaccagaaattttgatgaagtcatctcttgcttcgccaacgtgcccaaagacacccccctcttcagcgaggcccgcacctccctatactccgaggatgactgcaagagcctcagagaagagcccatccacattctgaatgtgtccatccagtgtgcagaccacctggaggatgaggcactggtgccgattttacggacattcgtacagtccaagaaaaatatccttgtggattatggactccgacgaatcacattcttgattgcccaagagaaagaatttcccaagtttttcacattcagagcaagagatgagtttgcagaagatcgcatttaccgtcacttggaacctgccctggccttccagctggaactcaaccggatgcgtaacttcgatctgaccgccgtgccctgtgccaaccacaagatgcacctttacctgggtgctgccaaggtgaaggaaggtgtggaagtgacggaccataggttcttcatccgcgccatcatcaggcactctgacctgatcacaaaggaagcctccttcgaatacctgcagaacgagggtgagcggctgctcctggaggccatggacgagctggaggtggcgttcaataacaccagcgtgcgcaccgactgcaaccacatcttcctcaacttcgtgcccactgtcatcatggaccccttcaagatcgaggagtccgtgcgctacatggttatgcgctacggcagccggctgtggaaactccgtgtgctacaggctgaggtcaagatcaacatccgccagaccaccaccggcagtgccgttcccatccgcctgttcatcaccaatgagtcgggctactacctggacatcagcctctacaaagaagtgactgactccagatctggaaatatcatgtttcactccttcggcaatcaagcaagggccccagcacgggatgctgatcaatactccctacgtcaccaaggatctgctccaggccaagcgattccaggcccagaccctgggaaccacctacatctatgacttcccggaaatgttcaggcaggctctctttaaactgtggggctccccagacaagtatcccaaagacatcctgacatacactgaattagtgttggactctcagggccagctggtggagatgaaccgacttcctggtggaaatgaggtgggcatggtggccttcaaaatgaggtttaagacccaggagtacccggaaggacgggatgtgatcgtcatcggcaatgacatcacctttcgcattggatcctttggccctggagaggaccttctgtacctgcgggcatccgagatggcccgggcagagggcattcccaaaatttacgtggcagccaacagtggcgcccgtattggcatggcagaggagatcaaacacatgttccacgtggcttgggtggacccagaagacccccacaaaggatttaaatacctgtacctgactccccaagactacaccagaatcagctccctgaactccgtccactgtaaacacatcgaggaaggaggagagtccagatacatgatcacggatatcatcgggaaggatgatggcttgggcgtggagaatctgaggggctcaggcatgattgctggggagtcctctctggcttacgaagagatcgtcaccattagcttggtgacctgccgagccattgggattggggcctacttggtgaggctgggccagcgagtgatccaggtggagaattcccacatcatcctcacaggagcaagtgctctcaacaaggtcctgggaagagaggtctacacatccaacaaccagctgggtggcgttcagatcatgcattacaatggtgtctcccacatcaccgtgccagatgactttgagggggtttataccatcctggagtggctgtcctatatgccaaaggataatcacagccctgtccctatcatcacacccactgaccccattgacagagaaattgaattcctcccatccagagctccctacgacccccggtggatgcttgcaggaaggcctcacccaactctgaagggaacgtggcagagcggattctttgaccacggcagtttcaaggaaatcatggcaccctgggcgcagaccgtggtgacaggacgagcaaggcttggggggattcccgtgggagtgattgctgtggagacacggactgtggaggtggcagtccctgcagaccctgccaacctggattctgaggccaagataattcagcaggcaggacaggtgtggttcccagactcagcctacaaaaccgcccaggccatcaaggacttcaaccgggagaagttgcccctgatgatctttgccaactggagggggttctccggtggcatgaaagacatgtatgaccaggtgctgaagtttggagcctacatcgtggacggccttagacaatacaaacagcccatcctgatctatatccgccctatgcggagctccggggaggctcctgggtggtcatagatgccaccatcaacccgctgtgcatagaaatgtatgcagacaaagagagcaggggtggtgttctggaaccagaggggacagtggagattaagttccgaaagaaagatctgataaagtccatgagaaggatcgatccagcttacaagaagctcatggaacagctaggggaacctgatctctccgacaaggaccgaaaggacctggagggccggctaaaggctcgcgaggacctgctgctccccatctaccaccaggtggcggtgcagttcgccgacttccatgacacacccggccggatgctggagaagggcgtcatatctgacatcctggagtggaagaccgcacgcaccttcctgtattggcgtctgcgccgcctcctcctggaggaccaggtcaagcaggagatcctgcaggccagcggggagctgagtcacgtgcatatccagtccatgctgcgtcgctggttcgtggagacggagggggctgtcaaggcctacttgtgggacaacaaccaggtggttgtgcagtggctggaacagcactggcaggcaggggatggcccgcgctccaccatccgtgagaacatcacgtacctgaagcacgactctgtcctcaagaccatccgaggcctggttgaagaaaaccccgaggtggccgtggactgtgtgatatacctgagccagcacatcagcccagctgagcgggcgcaggtcgttcacctgctgtctaccatggacagcccggcctccacctgaccgtggcccgcccagccactcccgggaccacggcaaaaggaaccacccagacccaccacccgtacaccctcagcagaccctgaagacttgcttttaaacaaagaaaatcctgggcacttctgcagggctgctggttccgagctgacacccgtcttaataaaaggcccaggagtgcctcttccaaacaaaaacagcctcctctccatagctgggaagtttattttgttttgtctctgaagacagcagttttattgcatcactaaatctaatcaagctaaaacatccctgtttccttttgcaaaacagtgcctggcatgtgggatccaggcgttctttaggatccttggataccacatcgtgaaatcttttatttttttactctgagaccagcaccagatgtaagtaagcatctcatatatttcagccaaataaatgggccaagggaaaaaaatatatatatatagacaggactagagaaaacctatttttgtaatgatgtttctttggatactgtctagtcacccagaaaaatgtatggatgaatttttttttttttttttgagacaaagtctcactgtgtcatgcaggctggagtgcagtggcatgatctcactgcaacctccatctcctgtctcagcctcctagataactgggattacaggtgcccaccaccatgcccggctaatttttgtatttttggtagagacagagtttcaccaggttggtcaggctggtctcaaactcttgacttcaggtaatccacccaccttggcctcccaaagtgctgggattacaggcatgagccaccatcttcagccagatgatttttttattgagagagtgaaatgctattttgttccccaaatggcgctagtgaatcactaggagggtcccactgataggccatgtttagcactggttgccagggattctctttttgagagagggaaagcaaaatgaatggaagtacccagctggaggtttcagggcttctggaggatgctctcgcatagctcgaggtcctctgcccacctcttctctccaaggaaaatgaggactgccccttccccctgcaggattggcccccagcctgcgcatgcaccctcctcttgcccaagtggggagcacagaggcggagaggaatcccttaccacacccacggcccagcttgctcacgagtgtcacctctgtgacggtcaccactgctcccttggagggccacttgagttactgttgcttcctcgcctgctggcttgatgagcaccgatggtgggatctgaccccgaggggcagagctgtcggtgactgaggactggactgtggtgaccatgccgatttgctcagggagaacgttgcaatgcacccagcagctcctggctctgcaggcggcacagcctggggccctgtgatcctctggtttcttccattggggcggagtcgggggtggagggagctggccacaacccactgctctgatgggtggtttgtccaaggatgctgaatgtaatgcctggtcaatgtggaagcccatgaggttgcccagggaagcctccaaaagctgggatgcttgagggtatccaagttgaaaaagacaaaatctgaccatcagccagtgacagtcctggcaaatgaaggtggggcggggcagtgaggggtgggagaaggtgaatgattcattattccaccccgaggtttgctggggtgaggggaagaatcgatgctgctttgggaactgaaggtttttctgttgggaaggccctcttggttttggagagaaagacaagttatgagtagctgctaccctggaacggtgggcagagagcctactaggaaatgtgcagaataaactattttttgaaggaaaactttggcct

SEQ ID NO: 345234 - DNA, 1357 bp, Homo sapiens
agcggagacaatgccacccaagccattgggaagagtcatgagataaggcacatgtagcattttagacagtgcctggcacaaaggaagttgttgactgatgaccgtgcccatcagcatcaccaaccctgacctgctgaggcacagcacagagctcttcatggacagcggcttctccccactgtgccagcgcatgggagccatggtagccttcaggagattcgaggacttcaccagaaattttgatgaagtcatctcttgcttcgccaacgtgcccaaagacacccccctcttcagcgaggcccgcacctccctatactccgaggatgactgcaagagcctcagagaagagcccatccacattctgaatgtgtccatccagtgtgcagaccacctggaggatgaggcactggtgccgattttacggacattcgtacagtccaagaaaaatatccttgtggattatggactccgacgaatcacattcttgattgcccaagagaaagaatttcccaagtttttcacattcagagcaagagatgagtttgcagaagatcgcatttaccgtcacttggaacctgccctggccttccagctggaactcaaccggatgcgtaacttcgatctgaccgccgtgccctgtgccaaccacaagatgcacctttacctgggtgctgccaaggtgaaggaaggtgtggaagtgacggaccataggttcttcatccgcgccatcatcaggcactctgacctgatcacaaaggaagcctccttcgaatacctgcagaacgagggtgagcggctgctcctggaggccatggacgagctggaggtggcgttcaataacaccagcgtgcgcaccgactgcaaccacatcttcctcaacttcgtgcccactgtcatcatggaccccttcaagatcgaggagtccgtgcgctacatggttatgcgctacggcagccggctgtggaaactccgtgtgctacaggctgaggtcaagatcaacatccgccagaccaccaccggcagtgccgttcccatccgcctgttcatcaccaatgagtcgggctactacctggacatcagcctctacaaagaagtgactgactccagatctggaaatatcatgtttcactccttcggcaatcaagcaagggccccagcacgggatgctgatcaatactccctacgtcaccaaggatctgctccaggccaagcgattccaggcccagaccctgggaaccacctacatctatgacttcccggaaatgttcaggcaggcaagtccggcggctcagacgcggtaccccctgggtcctcccagcagactccaccagaaccaaagcccatccttaattctcct

SEQ ID NO: 345235 - DNA, 433 bp, Homo sapiens
aagccactgcagctttgaagaatgtggctcatgagaggactcatagttcattacgtaacattcagcagagcggaaaatataagcactgtctccatcacttgacttgctttccattttgatttagttatctggtaaagtctaggtatcctatagtggaagaatgaaagacaagcaggttccaatgaaggaccatgcttccaaaggcatcagccagtggatcgtttgtggggccaggcgggggttagatctattattgttggacaggggtattagagttttgaaagactacttgaaaaacataatcaaatgatacttggagtttgttccgaaagggtattctttcctctctcttcccacaacagtgtgcgcttcctattatagttgatatacctgtgctttaaaatagcacagctactagtagaggccattttat

SEQ ID NO: 345236 - DNA, 742 bp, Homo sapiens
ttaaattggaagtatgattttagagaaaaaaaagaatcatgtaaaatttctgactaaaggagagtacggtttgtatatttttaaatggatgatggtaggtttcaaatgatgatggtatttgtattccattgaatatatttaaaagaagaatgaaataatttcatgttaaaatgctagacttttaataaaattatatattaaaatatatacttaaacttacgatgatatatataaacttatgatatatattatatatatttaaacttatgataaacatttagatgccgactgtaaaatggaggtacacagggttgacattatttcatttaggttgcatataagcaaaaatgtttgaagaccacaagtataatccacctttatttcctgacttctgaaattatcaccctatcactaccataattaacctctaccttcttagatccaaaggacattcagacatcaccttaattgacctctcttcagcatttgatacttcttccttttttaaacaagcttaacttgacttaacaccgcctatcctactttcctctttctactacactttcaccgtcatgcatgcttgctacaggaatacattctcagaaatgcatcattaggcgatttcatcattctgtggacatgatagagcgtaattcacaaacctaggttgggtagcccactacacacctaagctgtatggtgtaacttattgcttgtaggctacaaacctgtacagtacatt

SEQ ID NO: 345237 - DNA, 503 bp, Homo sapiens
aaattgttacaaagttcagctggaagtttccttccctgtgtggtttcttcccggttcctctggcagccctccccaaggacttctgtaagacaaagtcggaagttacttccttggggaccgagagcccacaggggtcttcctactgcttcttctacccctgtatttcactcagctctctaaatttgtctcagctccaggaaggcagggatttcaacctgggcaacaagtccacagaacatgagatttctgaaggtgtgtgggatacatcatggttacataaaaatcctttcactatagttcctgcttccctatcttcaaaatgattccctgaagacttccgccatgacggtctaaagcctaacctctgaactgtggatggaaaattgaactccttgatgtgatctctgcacatcatgcaaccctaaacctaaatatattctctgtgtgggagccccattatttttagtctaatacattttaagtcatcttaaaaaattatattt

SEQ ID NO: 345238 - DNA, 1027 bp, Homo sapiens
agcggagtagctattctcttctccctgaagggaggcaacactgtccgttcgcctgactggcagtgttttaaggacccatcgcgcttgacgggaaagtcaggtacaagctgatgctgttatcaccacaggaaccaggggctgagcggtgaaatccagctcctcccagctggaagacactagggtgaacggagataaaagcagttctctttacccgaagtttatttctttttcatgccacttcaaatttggattaaaaatcaagaaatataaaccagatgtagcagtttcttgacatggagaaccaagcccataatacgatgggaacttctccttgtgaggctgagcttcaggaattaatggaacaaattgacatcatggtaagcaacaagaaaatggattgggaaagaaagatgcgggctttggagacacgattagatcttcgggatcaagaattggcaaatgcacaaacttgtttggatcagaaaggtcaagaggtagggttacttcgacagaaattggacagtctggaaaaatgtaatttagcaatgactcagaattatgaaggacaactacaaagcctaaaggctcaagtaagaaaacttattataatttaatatcacacattttgatatatttttttttacctgtagagttgtgttaactttaaactgttttcagtataaacaaatgtcttgtattttaattataagcttggtcatgtctttccctgttttatatgcattgattttgtctcttactagattgttgtcttgctatattttctgtgcctctgttagcacagtagtagacaaatggctttctatttctcaagagacttgttgatgaattaaataataattagctcacaaaaaataattctgtgagcaacaacaaaaaacaattattttttgtggttattactatctaataaagatgttctcaattctgtgataatttaaaatgtggaagtttgctgttatgaaatagataattgaaataataaaactggtctttattaccttgttac

SEQ ID NO: 345239 - DNA, 526 bp, Homo sapiens
agcggagtagctattctcttctccctgaagggaggcaacactgtccgttcgcctgactggcagtgttttaaggacccatcgcgcttgacgggaaagtcaggtacaagctgatgctgttatcaccacaggaaccaggggctgagcggtgaaatccagctcctcccagctggaagacactagggtgaacggagataaaagcagttctctttacccgaagtttatttctttttcatgccacttcaaatttggattaaaaatcaagaaatataaaccagatgtagcagtttcttgacatggagaaccaagcccataatacgatggggctgaagtgtaagacctcaataactacctgcttatccagtctgagtgactggacttacaccagctcccgggagaatgcttcagcttctttgaaaaagaactctgtagtgagagcacttaccaatctgtcttaacaacagttgctatagtcctagctgttatactaagcattttgtttgaaactcaataaaccctcctggaccca

SEQ ID NO: 345240 - DNA, 838 bp, Homo sapiens
agcggagtagctattctcttctccctgaagggaggcaacactgtccgttcgcctgactggcagtgttttaaggacccatcgcgcttgacgggaaagtcaggtacaagctgatgctgttatcaccacaggaaccaggggctgagcggtgaaatccagctcctcccagctggaagacactagggtgaacggagataaaagcagttctctttacccgaagtttatttctttttcatgccacttcaaatttggattaaaaatcaagaaatataaaccagatgtagcagtttcttgacatggagaaccaagcccataatacgatgggaacttctccttgtgaggctgagcttcaggaattaatggaacaaattgacatcatggtaagcaacaagaaaatggattgggaaagaaagatgcgggctttggagacacgattagatcttcgggatcaagaattggcaaatgcacaaacttgtttggatcagaaaggtcaagaggtagggttacttcgacagaaattggacagtctggaaaaatgtaatttagcaatgactcagaattatgaaggacaactacaaagcctaaaggctcaattttccaaactaacaaataactttgaaaaactgagattacatcagatgaaacaaaacaaagttccacgaaaagaattaccacaccttaaagaagaaataccctttgaactgagcaatttgaaccagaaattagaggaatttagagcaaagtcaagagaatgggacaagcaagagatattatatcagactcatctgatttctttagatgctcaacaaaaattattatctgagaagtgtaatcagtttca

SEQ ID NO: 345241 - DNA, 130 bp, Homo sapiens
aaaaaaagaaaaaaagtaaatctagatatagaccttacacctttgacaaaaattatcttgaaatgcatcataaatgcaaaatgcaaaactataaactgtctaaaaggtaacataggagaaaacctagatg

SEQ ID NO: 345242 - DNA, 237 bp, Homo sapiens
actcacaaacatatatatgcacaaacatacatacacatacatgctatgaaataatctatagctaagtgaaacatgagacatctcagcatgtgaaactgtaataatctcattcagttaccttttgctaaagtagactttattcttttgcatttctattatttctttcttattacttttctttgtttattctaactttcttgttgtctgccttgctttaatcattttgtttcttctctt

SEQ ID NO: 345243 - DNA, 545 bp, Homo sapiens
atgagtgagcctgtgctgtcgtgagggcagcttgaggatggtaggatggtaggatggtagtgtgctggtaaacagtgggcactccagggaggaaaaggcctgaactgtaacatttaccagtttccatggtaaaattctctcttcatggccaatttcaagctaccagtgtgactactactgagtgcggagttgggaaaacatgggcagtctcaccattgtatagtatttctaccatacatcagcaatagactttaataacttcaaatgcatagatagaggaaaataagtaggctgggcacagtggctcacgactgtaatcccactactcgggaggctgaggcaggagaaacgcttgaacccgggaggcggaggttgcagtgagaagtaggaagagataaatgatgagcatttattgcttttgttttaatgtaatttctttgttgtcaatgatttggtttttaataatggccatgtttgacaactggctcacaaaattcctgaaagttctatcagctctcgcaagctggactaagcctgttctggca

SEQ ID NO: 345244 - DNA, 669 bp, Homo sapiens
tgcggttctcagtttggagtttggtcaaacaaccaatggggacagagtcttggggtcaggtccagcaggaactgccacccctcccagggacagcctgtctctcccactcaccatcgctggtgcccacgggctgctgaccacctgccaagtcctcctgtccctggaccagcctctcaggcagcaggtcttacctttgcctccagggcactgatcgatggcagctttgtctcactgtaaggcaacccagacagagctgagggcctgtgctgggccgggagctgtcctcctccttccctagcagtcctagggaaggaccagccgtgtctctccccaccccacccctggtcttagcccaggagacacacagggaaggtaggaagagggtctccctgtgggctgacgcctgtgaagggacaggacctgggagaagaggggtgtgtgggtggggcagggaccactagggccctgtagagcatgggcttgggctacacaacagggctgcccctcctgggctagaggcagtgccctctgcaggagctgagaatgtccagtcctgagaaaggacgtgtatggcccagggtgggtgactgggcccccccagtgcactgagggtgcacctggggcctgtcccacctgatgtccccaagtgccccgcaaggtctgatctct

SEQ ID NO: 345245 - DNA, 723 bp, Homo sapiens
tgcggttctcagtttggagtttggtcaaacaaccaatggggacagagtcttggggtcaggtccagcaggaactgccacccctcccagggacagcctgtctctcccactcaccatcgctggtgcccacgggctgctgaccacctgccaagtcctcctgtccctggaccagcctctcaggcagcaggtcttacctttgcctccagggcactgatcgatggcagctttgtctcactgtaaggcaacccagacagagctgagggcctgtgctgggccgggagctgtcctcctccttccctagcagtcctagggaaggaccagccgtgtctctccccaccccacccctggtcttagcccaggagacacacagggaaggtaggaagagggtctccctgtgggctgacgcctgtgaagggacaggacctgggagaagaggggtgtgtgggtggggcagggaccactagggccctgtagagcatgggcttgggctacacaacagggctgcccctcctgggctagaggcagtgccctctgcaggagctgagaatgtccagtcctgagaaaggacgtgtatggcccagggtgggtgactgggccccaaaagcagtcctcgagggagtgaccacattaccaggccaggatcctgagacctgcccagtgcactgagggtgcacctggggcctgtcccacctgatgtccccaagtgccccgcaaggtctgatctct

SEQ ID NO: 345246 - DNA, 703 bp, Homo sapiens
tatacttagcaaagtaatacaggaacagaaaaccaaatacatgttctcagttataggtgggagctaaatgatgaggatgcatggacatatggacataaagaagagaacagcaaatactggggctacttgaggttggagggtgggaggagggagagaagcaaaaaaacaataataacttttgggtattagacttagtacctgggtgacaaaataatctgtgcaacaaattcccatgacaggagtttacttatgtaacaaatctgcacatgtaccccgatcctaaaataaattttttttaaactgtctttatcgcattctccctgaaaggtattttaatgaatatagaattataatgtgatagtggttttctctcagcacattccaactagtattctattatcttctcacttccattaattttgttgggatgaaagctatcagaccaactgtacctcttttaaaattaatctttgcttctggctgttatttttaccagcttctcttttaattttatattttgcagtttcactggaaatttttatcctattttacatttgttgagattttcgtatttgtgttttcatcacttctggaaaacttttagctattaattattgggatttaaaaattctctctttttactacttctagatctctgatttaatatttgttaaatcacctccctctcttttctatatttcct

SEQ ID NO: 345247 - DNA, 385 bp, Homo sapiens
ccagatcagaggctacatatttctgtatttaggaaaggagatgggaattttggacgatatgcatagggtgacctcctattggtgttgctatgctgagtattttgtttcctttcagaggcacctggatagaccacttgtaaccaggcaataaacacagactccagtaaaatatggattcaagcagagccttaaaaggacaagaggggctgtgacggaatacctcaaatttcttaaaatctaggcctggaaaagatattaagtattttactgcctatcttctccaagggaaggatttcttaggtacattgaactctcacatctgtcacaattttagttaggccttgtcaacgttaaaattagtgtaattttctcctgataaacaagc

SEQ ID NO: 345248 - DNA, 446 bp, Homo sapiens
ttctctttttttcctctgccacatccagttgccaactctcaagttatgaggaaaatctaattgggccacagggtcacggctagctctcactcccttttcatcctctttgctttctcttttacttttactctaattcctgtacacatgaagtggcagccagtatgagactggtgcccagaaaataccatcctgaaggacagctgagggagggcacaagtgaagagaggcttacggaagcttagaaggaggaggaaaaagcagaagcctgagaagagaggagcagtcactaagttctccctcaacccaagacaacctgttggatcatttttctactaccaatatcaagggcaggttactagcactgcttgctgttcgtttctttgtcaaattgtggttcaggaagatgctttattaggtaaagaaatccagatcaaatacaagttgat

SEQ ID NO: 345249 - DNA, 1121 bp, Homo sapiens
tttcctgcatcttaccatccaagcaaacactggaaattgctatctttctctctgcttaataatttttaaagaccaaaaaagtgacatttacactttttagaaacacaatgactgcacggttggtgtgggtttactgcttaataacaatcattgagtcaaacagttgagagacaatggaattcaggacttggttagcctctgagagagagagagagagaatgtgtattatgtgcttgatagaaatacactgaacaacagtcattctttaaggcaaagtgctgactctaataaggccccctcttttggggcaagggagggtgagcagtcgctcaagttagtgagccctgtacattctaatcccagtttacatttaaaacacttcaaatggagccactaggactcaaagttgctaaatacacccatgccctcttatcgccttccactgggggtggttcttcggtgttttaagtcttggaagttaatttttgaggaaaaaaaagtaatagacatgtgacaaaaacaggaagaagggacacagttcagctgggttgtagctctaatctcactttatcagctgcttgaaagagggaaatgaaggacagagcggtaggaagtctgcacacaccaacctcatggagaccagctcagcccccaatgcagtcaagctacctaacctcctggaaacataaagatcggcgtgttacttggagattggagtgtatcagcttgaacacacccaccagaagctagcatgacaaccagttcagtggaaaggcagccccagcatggctcaatacctagggagtttcctgacagtacaagatcttcacccatcaccacattcagacacagctcctatggcagtttccaagataacaaagaaagtttgccttcaaattggagatactccttcatttaataaattttgttgagcaaaatttattatacgccacaagttgtccagaagctaactgcgagtgagcaagatcaggcttactctctagtggggggaaaagaggagtgagcacgcatttggaatcaactgggaaatgtgctaaaatagaggaggtgtggggtgtgttcagagcacagggagatgaagcctggaccccggccacctg

SEQ ID NO: 345250 - DNA, 424 bp, Homo sapiens
gataaactagattccctatgatctcttatttatttatcattgttttgagacagagtctcactcttgcccaggctggagtgtagtggcgcaatcttggctcaccacagcctctgcctcctgcattcaagcgattctcctggctcagcctcccgagtagctgggattacaggcgcccatcaccacacctggctaatttttgtatctttagtagagacaggctttcaccacgttggccaggctggtctcgaactcctgacctctggtgatccacccgcctaggcctccgaaaatgctgggattacaggcatgagccaccatgcccagcctgatctaaaaggaagtttttactaattgagattatgaaattttatgaaaaataaaaatgaaagaggggcacaatatctagctctgtatttaaaaatat

SEQ ID NO: 345251 - DNA, 441 bp, Homo sapiens
aaaaatattgtgaatttgcacactttccagtgttttgttgttgtcacgatgggggtgatagttcccacctttgtgtgtcctgtttggaagatgggaatctgaattcctttttatgttgggctcttaaaagaaggaactcaggttcaggatggactgttgttccctgtcacatacactcagcattttcaggagcttcatcagggaccctccagaaacttttgatccctgggaggttatgtagctggataaactgatccatgcttttacagcataaggcccacagactgcaggccttcaggactggctcttctctgacatagttggctctgctgtcccggccaccatggtcccttggattctcctaagagatgatgcaaaacttcgttcatacactgggtgttgtctttgaaggctgttgacagtgctttgctagcatggtat

SEQ ID NO: 345252 - DNA, 729 bp, Homo sapiens
catagcggggcctgagagaaggggtttggtggttgaatgagtgtggaaagcctgtattgtggcctctcctccagcccccactcaggagggactcacatggccacgctctgaggagcctgcagaaggaggcctgtctgacccagccttcctcccatgcactgatcactgttcctgtacttctgtcttaccgccccattacccatccatagatctgactctggaaacaccgatgaagtttggctgaagtcatgccagtggatggatttagtggagaggccgacccagctcaagatggaaagacagccagagatgcgctcgggcggtgggggttccttggagaaggctgaggtcagggggatgatggggtcacagcagctcagaggggaggcaagccctgaaggacagtggctacaagcgggccctgcagagatgcaaaatgagatttaagaagaggccttggatttggcatcagggtttcaagggggagcttttagggagcagtgtgtaggaggggaggggctgcagtcagtcagcagtgcactgaagggcaagtaccaggtggggaggtggaggcacccagcagcgcagcctttgtgctgactcacagtcagtgcgtcccaaaccctaggatggaggcaagcacacagggagctcttcctaggaaaaaatggggacatctcaggacatctgattatttcctttaaagagattattatgaaattactgtac

SEQ ID NO: 345253 - DNA, 642 bp, Homo sapiens
ttgcactggcgagatagaggacttgcattgcctctactcaatgcaacctattggaaggcagctaatagctaaggagggaaacactctacttttgtttgctataaattccaggagacagcatatggtggaatttttattgaagaaccaggcaaatatacatgccgttgacaatttcaaaagaacagccctcatacttgcagtacagcataacttgtcaagtatcgtcaccctcctgcttcaacaaaatatacatatctcttctcaagacatgtttggccaaactgccgaggattatgctttttgttgtgatttgagaagcatccaacaacaaattttggaacataaaaataagatgcttaaaaatcatcttcgaaatgacaatcaacgaaacagcagctatgaagcctgacacactcgacccaacccgaaccacccaagaacacaatggacaaccacaagacaccgccggtgcacaagcagaacacaacttaaaagtggcttcagaggaaaaggaccaagatggcggccgcaaactgacacctcagggacaaagagatctggacagaatcgccggacaggtggcagctgccaacaagaagcattagaacaaaccatgctgggttaataaattgcctcattcgt

SEQ ID NO: 345254 - DNA, 603 bp, Homo sapiens
gcagaaagactgctttcccaccatgcaaatattgaagcactaaacaaggagggaaacactctacttttgtttgctataaattccaggagacagcatatggtggaatttttattgaagaaccaggcaaatatacatgccgttgacaatttcaaaagaacagccctcatacttgcagtacagcataacttgtcaagtatcgtcaccctcctgcttcaacaaaatatacatatctcttctcaagacatgtttggccaaactgccgaggattatgctttttgttgtgatttgagaagcatccaacaacaaattttggaacataaaaataagatgcttaaaaatcatcttcgaaatgacaatcaaaaacagcagctatgaagcctgaaaatttgaaaaaaagaaaaaaaagaaaaaaattgaaaaaaagaaaagaaggtgcaaaagaacacaacttaaaagtggcttcagaggaaaaggaccaagatggcggccgcaaactgacacctcagggacaaagagatctggacagaatcgccggacaggtggcagctgccaacaagaagcattagaacaaaccatgctgggttaataaattgcctcattcgt

SEQ ID NO: 345255 - DNA, 434 bp, Homo sapiens
agaagcagcagccatgaagaatgaaagttttaaaacacaaggagcaagttcaaaagtctcgctctatcaccagtctggagtccagtggcatgatctcagattactgcagccttcacctcccaggttcaagcaattctcctgcctcagcctcccgaggagctgggacaacaggcacatgcgaccatgcccagaaacagcagctatgaagcctgaaaatttgaaaaaaagaaaaaaaagaaaaaaattgaaaaaaagaaaagaaggtgcaaaagaacacaacttaaaagtggcttcagaggaaaaggaccaagatggcggccgcaaactgacacctcagggacaaagagatctggacagaatcgccggacaggtggcagctgccaacaagaagcattagaacaaaccatgctgggttaataaattgcctcattcgt

SEQ ID NO: 345256 - DNA, 1210 bp, Homo sapiens
atgggaagtgctgaacgtactggggctttcaaacatgttgcctcttctgtccttcataaaaatcctatgtggtgggtagtgttagccatgtttaacaggtaaggaaactagtcagaaaggttgagtcatctttagaaggttccatgcctaataggtggcggagccaggatttgagacaaatagactgattcgaaaggcttttccatggaactgtaaggtcttctgtgaattgttaaccataaagattctctcattttgaaatttcagaagacatgaagtagaaacaatccaggaaggctttgggaagctatttgtgtgcgaggatcaaagtggtaagcaagccggccctattttagaaactggttttcctggggggttttcctcttagttttttctgttgctcgtaaatagaccttttctccaaatttcacccactggtcttttaagagctccaaggtttttccaccatgactgaagtggcagaagttctgccgtgatgagtcaggtggagatgagccgtggaaaggaggggcgtagacggtggtggcagcagtgcgtgtttatgtgtaagatgcactgcttctgtaagtcggaggccctgattactcataatgaaaacctgcatggaaatttggagtgatgtgccagcaaacttatcggtctagatctgaaaaatacactgaggagaaagtacacccggcaacaaagctcgccttatctgacagcagaagagcagagaaatcaaaagtttttgaggattcggtctacacagccaccagccacaaacagtcttgctggattatctcgtgatcgtcagcagttgtgattttccccctttttacttacattcttgatggatggagcattttatatttttaggtaattgttaaactcaaatatactgtcattaaaacacaaaaattcaatatgttaattgtctgtctgcagccagactaggaaagggtacattgttttcaaaacttaataattgaattaaaatgtaaaaaaaacaagggccttaatgtgaaggtgagggatctgcatctcctagctacccctgtctcctatctagacatctagagtctctagatcctggggtactggggagaatggacaatgttgctttcctgtgcaagatcctcagatgacatattttagcccccagggcgctcatgcctccatcttcctccagcctcatgggcatttcctc

SEQ ID NO: 345257 - DNA, 283 bp, Homo sapiens
ttagggcccttttttgtttacaaggacactgatctgcaaactgaaactaattgcccagcaagcaggcactttttctcccacaaacccagcaaaacattcactgattggttggctgggtaggactttttttttttttttgaaaaaaaatttcccctgtttctccccagtctgaagtcaggggccccagtgtttaaggttatttgaaccctttccttccaagtttaagggaattccctggcttatttttccaaaggaggtggaataaagggctggtcccattacc

SEQ ID NO: 345258 - DNA, 990 bp, Homo sapiens
  misc_feature (17)..(17): n is a, c, g, or t
  misc_feature (89)..(90): n is a, c, g, or t
  misc_feature (125)..(125): n is a, c, g, or t
  misc_feature (132)..(132): n is a, c, g, or t
  misc_feature (135)..(135): n is a, c, g, or t
  misc_feature (146)..(147): n is a, c, g, or t
agtgtaataaagggganagaaagaaggagaaatgggatgaagtgaagtggaaagatattggataaatgaaaaatatgaataaagggttnnagagattataatgaataggaataaagtgtagctgnccttccngtncgctggcctcnncccctcggacggtatcaactcagaggtcctggaagccatacgggtgacccgtcacaagaacgccatggcagagcgctgggaatcccgcatctacgccagtgaggaggatgactgagcctcgggatggggcgcccaccccctgccctgccctgaccctcgtgggaactgccaagaccatcgccaagcccccaccctaggaaatgggtcctaggtccaggatccaagaaccacagctcatctgccaacaatcccaccatgggcacatttgggactgttgggtttttcgtttccgtttctatcttcctttagaaatgtttctgcctttggggtctaaagcttttggggatgaaatgggacccctgctgattctttctgcttctaagactttgccaaatgccctgggtctaagaaagaaagagacccgctcctccactttcaggtgtaatttgcttccgctagtctgagggcagagggaccggtcaaagagggtggcacagatcgcagcaccttgaggggctgcgggtctgagggaggagacactcagctcctccctctgagaagtcccaagctgagaggggagacctgcccctttccaaccctgggaaaccatccagtctgagggaggaggccaaactcccagtgctgggggtccctgtgcagccctcaaacccttcaccttggtgcacccagccacacctggtggacacaaagctctcacatcgataggatcccatgaggatggtccccttcacctgggagaaaagtgacccagtttaggagctggaggggggtctttgtcccccacccccaaactgccctgaaataaacctggagtgagctgcc

SEQ ID NO: 345259 - DNA, 1046 bp, Homo sapiens
cacctctgaccgagttcccacctctgaccgagttccaggagctcctcccaggcatccggcatcacgggcagttactcggtgtctgagtctcccttcttcagccccatccacctacactcaaacgtggcgtggacagtggaagatccagtggacagtgctcctcccgggcagagaaagaaggagcaatggtacgctggcatcaacccctcggacggtatcaactcagaggtcctggaagccatacgggtgacccgtcacaagaacgccatggcagagcgctgggaatcccgcatctacgccagtgaggaggatgactgagcctcgggatggggcgcccaccccctgccctgccctgaccctcgtgggaactgccaagaccatcgccaagcccccaccctaggaaatgggtcctaggtccaggatccaagaaccacagctcatctgccaacaatcccaccatgggcacatttgggactgttgggtttttcgtttccgtttctatcttcctttagaaatgtttctgcctttggggtctaaagcttttggggatgaaatgggacccctgctgattctttctgcttctaagactttgccaaatgccctgggtctaagaaagaaagagacccgctcctccactttcaggtgtaatttgcttccgctagtctgagggcagagggaccggtcaaagagggtggcacagatcgcagcaccttgaggggctgcgggtctgagggaggagacactcagctcctccctctgagaagtcccaagctgagaggggagacctgcccctttccaaccctgggaaaccatccagtctgagggaggaggccaaactcccagtgctgggggtccctgtgcagccctcaaacccttcaccttggtgcacccagccacacctggtggacacaaagctctcacatcgataggatcccatgaggatggtccccttcacctgggagaaaagtgacccagtttaggagctggaggggggtctttgtcccccacccccaaactgccctgaaataaacctggagtgagctgcc

SEQ ID NO: 345260 - DNA, 1225 bp, Homo sapiens
tatctgactgcctcagctctccaatgtactgggattacagagcgtgagccagtgtgcgccagcccttctattatttatttactacgataaaatgtaatgtattatataaattatacaaagtgctgggattacaggcgcgagccatctgagctcggtcaaggcaacaaagtgagactccatctcaaaaacaaacaaaaaagccaaatacagacatttttcctgccctggagctcagcatgagttagcatattctttgatcatattactaggagtagagggtctgaaacagaggaggggatcctactttacccccgttctaggcctctctaatgaattggcagttggaggagacatcttgggggtgtggtaggacctggatcgggggaattcatgcctcctttttgcaggtcctggaagccatacgggtgacccgtcacaagaacgccatggcagagcgctgggaatcccgcatctacgccagtgaggaggatgactgagcctcgggatggggcgcccaccccctgccctgccctgaccctcgtgggaactgccaagaccatcgccaagcccccaccctaggaaatgggtcctaggtccaggatccaagaaccacagctcatctgccaacaatcccaccatgggcacatttgggactgttgggtttttcgtttccgtttctatcttcctttagaaatgtttctgcctttggggtctaaagcttttggggatgaaatgggacccctgctgattctttctgcttctaagactttgccaaatgccctgggtctaagaaagaaagagacccgctcctccactttcaggtgtaatttgcttccgctagtctgagggcagagggaccggtcaaagagggtggcacagatcgcagcaccttgaggggctgcgggtctgagggaggagacactcagctcctccctctgagaagtcccaagctgagaggggagacctgcccctttccaaccctgggaaaccatccagtctgagggaggaggccaaactcccagtgctgggggtccctgtgcagccctcaaacccttcaccttggtgcacccagccacacctggtggacacaaagctctcacatcgataggatcccatgaggatggtccccttcacctgggagaaaagtgacccagtttaggagctggaggggggtctttgtcccccacccccaaactgccctgaaataaacctggagtgagctgcc

SEQ ID NO: 345261 - DNA, 2856 bp, Homo sapiens
gtcagactgtggacgccgggagccggcagtaagcccagaggtctccaccccacgggaggaaggctgaggccaagaccccggaagagatggaccgcgtgaccagataccccatcctgggcatccctcaggcacaccgtggcaccggcctggtgctggatggagacaccagctacacataccatctggtgtgcatgggccccgaggccagcggctggggccaggatgagccgcagacatggcccactgaccacagggcccagcagggcgtgcagaggcagggggtgtcctacagcgtgcatgcctacactggccagccgtccccacgggggctccactcggagaacagggaggatgagggttggcaggtttaccgcctgggcgccagggatgcccaccagggacgtccaacatgggcactccgcccagaggacggggaggacaaggagatgaagacctaccgcctggatgctggggacgctgaccccaggaggctgtgtgacctggagcgggagcgctgggccgtcatccagggccaggcagtcaggaagagcagcaccgtggccacgctccagggcactcctgaccacggagaaccccaggacccccgggcccacctcggtccacgcccctggaggagaacgtggttgacagggagcagattgacttcctggcagcgagacagcagttcctgagtctggagcaggcgaacaagggggcccctcatagctccccggccagggggacccctgcaggcacaaccccaggggccagccaggcccccaaggccttcaacaagccccacctggccaacgggcacgtggttcccatcaagccccaggtgaagggggtggtcagggaagagaacaaggtgcgtgctgtgcccacctgggccagtgtccaagttgtggatgaccctggctccttggcctcagtggagtccccggggacccccaaggagacgcccatcgagcgggagatccgtctggctcaggagcgtgaggcagacctgcgagagcagagggggcttcggcaggcaaccgaccaccaggagctggtggaaatccccaccaggccgctgctgaccaagctgagcctgatcacagccccacggcgggagagagggcgcccgtccctctacgtgcagcgggacatagtacaggagacacagcgtgaggaagaccaccggcgggagggcctgcacgtgggccgggcgtccacacccgactgggtctcggagggtccccagcccggactccggagagccctcagctcagattccatcctcagcccggccccagatgcccgtgcggccgacccagctccagaagtgaggaaggtgaaccgcatcccacctgatgcctaccagccgtacctgagccccgggaccccccagctagaattctcagccttcggagcattcggcaagcccagcagtctctccacagcggaggccaaggctgcgacttcaccaaaggccacgatgtccccgaggcatctctcagaatcctctggaaaacccctgagcacaaagcaagaggcatcgaagccccctcggggatgcccgcaagccaacaggggtgtcgtgcggtgggagtacttccgcctgcgtcctctgcggttcagggccccagacgagccccagcaggcccaagtcccccatgtctggggctgggaggtggctggggcccctgcactgaggctgcagaagtcccagtcatctgatctgctggaaagggagagggagagtgtcctgcgccgggagcaagaggtggcagaggagcggagaaatgctctcttcccagaggtcttctccccaacgccagatgagaactctgaccagaactccaggagctcctcccaggcatccggcatcacgggcagttactcggtgtctgagtctcccttcttcagccccatccacctacactcaaacgtggcgtggacagtggaagatccagtggacagtgctcctcccgggcagagaaagaaggagcaatggtacgctggcatcaacccctcggacggtatcaactcagaggtcctggaagccatacgggtgacccgtcacaagaacgccatggcagagcgctgggaatcccgcatctacgccagtgaggaggatgactgagcctcgggatggggcgcccaccccctgccctgccctgaccctcgtgggaactgccaagaccatcgccaagcccccaccctaggaaatgggtcctaggtccaggatccaagaaccacagctcatctgccaacaatcccaccatgggcacatttgggactgttgggtttttcgtttccgtttctatcttcctttagaaatgtttctgcctttggggtctaaagcttttggggatgaaatgggacccctgctgattctttctgcttctaagactttgccaaatgccctgggtctaagaaagaaagagacccgctcctccactttcaggtgtaatttgcttccgctagtctgagggcagagggaccggtcaaagagggtggcacagatcgcagcaccttgaggggctgcgggtctgagggaggagacactcagctcctccctctgagaagtcccaagctgagaggggagacctgcccctttccaaccctgggaaaccatccagtctgagggaggaggccaaactcccagtgctgggggtccctgtgcagccctcaaacccttcaccttggtgcacccagccacacctggtggacacaaagctctcacatcgataggatcccatgaggatggtccccttcacctgggagaaaagtgacccagtttaggagctggaggggggtctttgtcccccacccccaaactgccctgaaataaacctggagtgagctgcc

SEQ ID NO: 345262 - DNA, 346 bp, Homo sapiens
cccatcagatggacgatggccttccaagaccaaggagcccgggcaagagggatggctggtgtcgatggtgcaaaaaggaaacttaggaattcagatgctttgaaaatgaacttttgctggtactgaaaaggaaagagcattctcttcctttagagaatagaggtttgagtgctccggctctgcaaacagtccctacggttggcacgttggtgtgtgcgaggggttcggaggccccagtacatctgatcacctcgcctttttgtgagtttaggtgttcagttttaatcttgttatgcaaaggaacatgtgactctttggaagtagatatagaagagtgcacttttac

SEQ ID NO: 345263 - DNA, 690 bp, Homo sapiens
ttttttttttttttttttttggaaagcaaggatcacacttccccctccctgttccttaatcccttttctaaaaaggggggacctaaatcctgattataggcttttcatttctccgcaaagcctttattttggcagttaagccaaatgtgttttccagaaagttagttattttctcctctttctttcctttctttcctccctttttcccgtctgaccccaaacgttattgtccaaacatgactggacagcagcttttgtttcttgaccctgtaatatgacagtctgctaatattgacagaaggtgcagtttttgggttatagtcgtgattttcgctaatcaatcatattagcaggaaaaaaaatgacttgtttctgttgtacttgagtcttaagaaaaagtgcccatagtttagtgacaatttccaaaggctttagtaccacctgtatttcaaaatgggggacccaaactcccggaagaaacaagctctgaacagactacgtgctcagcttagaaagaaaaaagaatctctagctgaccagtttgacttcaagatgtatattgcctttgtattcaaggagaagaagagccgccctttttgaagtgctgaggtttacaggcatgacccctgctttaccgaagattggtccactccatgccccccattaagcttttagaagatgttggtttct

SEQ ID NO: 345264 - DNA, 722 bp, Homo sapiens
  misc_feature (627)..(627): n is a, c, g, or t
ttttttttttttttttttttggaaagcaaggatcacacttccccctccctgttccttaatcccttttctaaaaaggggggaaaatccggatggattttagggattggtctggtgtcagctgtgttttattgcacacctaaatcctgattatagggttttccagaaagttagttattttctcctctttctttcctttctttcctccctttttcccgtctgaccccaaacgttattgtccaaacatgactggacagcagcttttgtttcttgaccctgtaatatgacagtctgctaatattgacagaaggtgcagtttttgggttatagtcgtgattttcgctaatcaatcatattagcaggaaaaaaaatgacttgtttctgttgtacttgagtcttaagaaaaagtgcccatagtttagtgacaatttccaaaggctttagtaccacctgtatttcaaaatgggggacccaaactcccggaagaaacaagctctgaacagactacgtgctcagcttagaaagaaaaaagaatctctagctgaccagtttgacttcaagatgtatattgcctttgtattcaaggagaagaagaaaaacagcactttttgagtgtctgaggtatccagncatgcccattatgagtatcttgagggtgcaggatcagctattcttggaagttcctaagtttacagaagagtggacttcatgcctcgtatagcttt

SEQ ID NO: 345265 - DNA, 395 bp, Homo sapiens
gcggccgcctactactactaaattcgcggccgcgttgtcctcttcagcagtataataagccccttaaggctgaagtaaccttattcctattgtttagtagctaatagcatgcttttgatatgcttatgatcatactaataatttaatatttgaattgtatggaagtacaattcagtatcattttacatatggtatattgtgatgctgtatcatattttatgttacggtttataagaaaagctcctaggtataaaatgctacatagcaggaacttggtttttcaatgttattatttcctactgtttttgacgtaacggcaataaaatttgtttgaaccaaaatggactaacaattatttgtacaactcagtattgtctaaatatcatattgttaaa

SEQ ID NO: 345266 - DNA, 3819 bp, Homo sapiens
ttttttttttttttttttttggaaagcaaggatcacacttccccctccctgttccttaatcccttttctaaaaaggggggaaaatccggatggattttagggattggtctggtgtcagctgtgttttattgcacacctaaatcctgattataggcttttcatttctccgcaaagcctttattttggcagttaagccaaatgtgttttccagaaagttagttattttctcctctttctttcctttctttcctccctttttcccgtctgaccccaaacgttattgtccaaacatgactggacagcagcttttgtttcttgaccctgtaatatgacagtctgctaatattgacagaaggtgcagtttttgggttatagtcgtgattttcgctaatcaatcatattagcaggaaaaaaaatgacttgtttctgttgtacttgagtcttaagaaaaagtgcccatagtttagtgacaatttccaaaggctttagtaccacctgtatttcaaaatgggggacccaaactcccggaagaaacaagctctgaacagactacgtgctcagcttagaaagaaaaaagaatctctagctgaccagtttgacttcaagatgtatattgcctttgtattcaaggagaagaagaaaaagtcagcactttttgaagtgtctgaggttataccagtcatgacaaataattatgaagaaaatatcctgaaaggtgtgcgagattccagctattccttggaaagttccctagagcttttacagaaggatgtggtacagctccatgctcctcgatatcagtctatgagaagggatgtaattggctgtactcaggagatggatttcattctttggcctcggaatgatattgaaaaaatcgtctgtctcctgttttctaggtggaaagaatctgatgagccttttaggcctgttcaggccaaatttgagtttcatcatggtgactatgaaaaacagtttctgcatgtactgagccgcaaggacaagactggaatcgttgtcaacaatcctaaccagtcagtgtttctcttcattgacagacagcacttgcagactccaaaaaacaaagctacaatcttcaagttatgcagcatctgcctctacctgccacaggaacagctcacccactgggcagttggcaccatagaggatcacctccgtccttatatgccagagtagagtactgaccagcaaaatggagaagatcagagaatgcagcagcagttttttttcttgttttcttaccactttattctttcagagtttaaagaaaatggactcatgcacagaacactatgcattttgaaacttgttcatcctggatttttttaaatcatttttatctcagaacttaaacaaaaattagatgtcgtgcacggactgtgtgaaagaagatgctttgcatatttgctgcactgcatcagtatcttactaaaaatgtgaaatgaaaggactattgtacactgaaatgcttaaatgtatctgaaagcacaaggtgatactcatttttatggtcttcccatttgtgctggtttttgcctctttgacatctgtcatcagtatttagagggtgagaagtgaatgtaacaggtataaataacatttttaaaaacaataactttgctataatcacagttgttccagagcactgtcagatacattctaatgaccagaactggtttaaaaaaagaaaatacaaccatgggaaagaaatcttaaatgaaaaacgcatctcattgtaggcatttttgcctcatattttactgggccatgtttgtttcctggtactcatgtattttttttttccagatctctttccccaagttgctattgtaagagtattctgctgcgtgtggatgcagttatacacattaaagcagatctggagtctgaagtagctataaagcagctataaaacagaaatacatgcatagctgcagaaaccatgataggtagaggacttttcttttggttttgttttgttttgttttgttttgtttttggttttacagagaagagatttttattacaaagaaaaaaattccagtgaattgtgcagaaatgctggtttttacaccatcctaaagaaaaactttacaagggtgttttggagtagaaaaaaggttataaagttggaatcttaaattgtaaaattaaccattgagtgtcaaagttctaaaagcagaactcattttgtgcaatgaacataaggaaagactactgtataggtttttttttttttctccttttaaatgaagaaaagctttgcttaagggttgcatacttttattggagtaaatctgaatgatcctactcctttggagtaaaactagtgcttaccagtttccaattgtatttagcttctggttggaatttgaaaaaaaaagaaaaaaagaaaaagaaaacctaaataaaataggtgaaagttccctgactattcaggtgaatacacaaagtttgaagtgttaactttttctttccatttcactgatgttactggtcaccttagagaattatttcatagtctgtggctaaatagtaaattcagaagaaaaatacctggcaattgagtgtgtaacttcaacaagaacaggaatcaagaacatactgtcagctttcaacagttagcaacctggccttatgccttgcttcatgggaaagggccattcttaaatttcaaaatgctttcatgtgtcctcttatttaaaaattagaatctatttgaaataacattttgaatgtttattataaccaggtactcttctaagctcttgtcttaacctctcaacctttggtggaaatagatgcagaggttaagtaacttgctcaagctcagatcataagtagtggaggatttaaaaccaggctggctggctcttaaggcctatgctcttaatttaccatgttgaattaatttaccatattgaattacacttatgttcaccaagttaggcattttggcagccattgtttacgtttttattttggaataatttagaaaagttaccagagtaatatgaaagctgttgtgtaatctttaccctcatttttattattttgccacatttttttcattttctctgtacacttatacctgtgagctatttgagtttgttgcacactttgtgcttccttaccccttccttagtacttcggcatatgttccaagtacaagaatatttcatataactagagtaaaattaccaaactcagggaatgttgatactctttatcatccatattcgttttgttgtcccagtatccttggtagcttgttttagatccccccctctagagtacaggatcattgaatttagttgttctcagttgtctttaatgtggaacagttccttagcctttatgtgttccatgacctctatgttttttggagtacagggcaatttttcttgtaaattgttactcattttgcatttgaattgtttattcatgcttaacgcccttctcaagtatactctccatctgctcttcattgatgttacttttgagcgcctggtcaaggtgtcctggttttgccctatgtgtggtacttactactagcaatctctgggaagcaatgtgcaaataccctgttcctttatcaggagctcccttggcgattctttccagactaaaacccaaaccagtctttaactatgatggttacaaaatagtgattttccaaatctaatgctttgtccatttacagcatttgttgtaagagagtgttctatctctggcatttattatctacctaaacactatggcctcatattttttccctccaaatcataatttgcatgc

SEQ ID NO: 345267 - DNA, 3765 bp, Homo sapiens
ttttttttttttttttttttggaaagcaaggatcacacttccccctccctgttccttaatcccttttctaaaaaggggggaaaatccggatggattttagggattggtctggtgtcagctgtgttttattgcacacctaaatcctgattataggcttttcatttctccgcaaagcctttattttggcagttaagccaaatgtgttttccagaaagttagttattttctcctctttctttcctttctttcctccctttttcccgtctgaccccaaacgttattgtccaaacatgactggacagcagcttttgtttcttgaccctgtaatatgacagtctgctaatattgacagaaggtgcagtttttgggttatagtcgtgattttcgctaatcaatcatattagcaggaaaaaaaatgacttgtttctgttgtacttgagtcttaagaaaaagtgcccatagtttagtgacaatttccaaaggctttagtaccacctgtatttcaaaatgggggacccaaactcccggaagaaacaagctctgaacagactacgtgctcagcttagaaagaaaaaagaatctctagctgaccagtttgacttcaagatgtatattgcctttgtattcaaggagaagaagaaaaagtcagcactttttgaagtgtctgaggttataccagtcatgacaaataattatgaagaaaatatcctgaaaggtgtgcgagattccagctattccttggaaagttccctagagcttttacagaaggatgtggtacagctccatgctcctcgatatcagtctatgagaagggatgtaattggctgtactcaggagatggatttcattctttggcctcggaatgatattgaaaaaatcgtctgtctcctgttttctaggtggaaagaatctgatgagccttttaggcctgttcaggccaaatttgagtttcatcatggtgactatgaaaaacagtttctgcatgtactgagccgcaaggacaagactggaatcgttgtcaacaatcctaaccagtcagtgtttctcttcattgacagacagcacttgcagactccaaaaaacaaagctacaatcttcaagttatgcagcatctgcctctacctgccacaggaacagctcacccactgggcagttggcaccatagaggatcacctccgtccttatatgccagagtagagtactgaccagcaaaatggagaagatcagagaatgcagcagcagttttttttcttgttttcttaccactttattctttcagagtttaaagaaaatggactcatgcacagaacactatgcattttgaaacttgttcatcctggatttttttaaatcatttttatctcagaacttaaacaaaaattagatgtcgtgcacggactgtgtgaaagaagatgctttgcatatttgctgcactgcatcagtatcttactaaaaatgtgaaatgaaaggactattgtacactgaaatgcttaaatgtatctgaaagcacaaggtgatactcatttttatggtcttcccatttgtgctggtttttgcctctttgacatctgtcatcagtatttagagggtgagaagtgaatgtaacaggtataaataacatttttaaaaacaataactttgctataatcacagttgttccagagcactgtcagatacattctaatgaccagaactggtttaaaaaaagaaaatacaaccatgggaaagaaatcttaaatgaaaaacgcatctcattgtaggcatttttgcctcatattttactgggccatgtttgtttcctggtactcatgtattttttttttccagatctctttccccaagttgctattgtaagagtattctgctgcgtgtggatgcagttatacacattaaagcagatctggagtctgaagtagctataaagcagctataaaacagaaatacatgcatagctgcagaaaccatgataggtagaggacttttcttttggttttgttttgttttgttttgttttgtttttggttttacagagaagagatttttattacaaagaaaaaaattccagtgaattgtgcagaaatgctggtttttacaccatcctaaagaaaaactttacaagggtgttttggagtagaaaaaaggttataaagttggaatcttaaattgtaaaattaaccattgagtgtcaaagttctaaaagcagaactcattttgtgcaatgaacataaggaaagactactgtataggtttttttttttttctccttttaaatgaagaaaagctttgcttaagggttgcatacttttattggagtaaatctgaatgatcctactcctttggagtaaaactagtgcttaccagtttccaattgtatttagcttctggttggaatttgaaaaaaaaagaaaaaaagaaaaagaaaacctaaataaaataggtgaaagttccctgactattcaggtgaatacacaaagtttgaagtgttaactttttctttccatttcactgatgttactggtcaccttagagaattatttcatagtctgtggctaaatagtaaattcagaagaaaaatacctggcaattgagtgtgtaacttcaacaagaacaggaatcaagaacatactgtcagctttcaacagttagcaacctggccttatgccttgcttcatgggaaagggccattcttaaatttcaaaatgctttcatgtgtcctcttatttaaaaattagaatctatttgaaataacattttgaatgtttattataaccaggtactcttctaagctcttgtcttaacctctcaacctttggtggaaatagatgcagaggttaagtaacttgctcaagctcagatcataagtagtggaggatttaaaaccaggctggctggctcttaaggcctatgctcttaatttaccatgttgaattaatttaccatattgaattacacttatgttcaccaagttaggcattttggcagccattgtttacgtttttattttggaataatttagaaaagttaccagagtaatatgaaagctgttgtgtaatctttaccctcatttttattattttgccacatttttttcattttctctgtacacttatacctgtgagctatttgagtttgttgcacactttgtgcttccttaccccttccttagtacttcggcatatgttccaagtacaagaatatttcatataactagagtttgtcccagtatccttggtagcttgttttagatccccccctctagagtacaggatcattgaatttagttgttctcagttgtctttaatgtggaacagttccttagcctttatgtgttccatgacctctatgttttttggagtacagggcaatttttcttgtaaattgttactcattttgcatttgaattgtttattcatgcttaacgcccttctcaagtatactctccatctgctcttcattgatgttacttttgagcgcctggtcaaggtgtcctggttttgccctatgtgtggtacttactactagcaatctctgggaagcaatgtgcaaataccctgttcctttatcaggagctcccttggcgattctttccagactaaaacccaaaccagtctttaactatgatggttacaaaatagtgattttccaaatctaatgctttgtccatttacagcatttgttgtaagagagtgttctatctctggcatttattatctacctaaacactatggcctcatattttttccctccaaatcataatttgcatgc

SEQ ID NO: 345268 - DNA, 3765 bp, Homo sapiens
ttttttttttttttttttttggaaagcaaggatcacacttccccctccctgttccttaatcccttttctaaaaaggggggacctaaatcctgattataggcttttcatttctccgcaaagcctttattttggcagttaagccaaatgtgttttccagaaagttagttattttctcctctttctttcctttctttcctccctttttcccgtctgaccccaaacgttattgtccaaacatgactggacagcagcttttgtttcttgaccctgtaatatgacagtctgctaatattgacagaaggtgcagtttttgggttatagtcgtgattttcgctaatcaatcatattagcaggaaaaaaaatgacttgtttctgttgtacttgagtcttaagaaaaagtgcccatagtttagtgacaatttccaaaggctttagtaccacctgtatttcaaaatgggggacccaaactcccggaagaaacaagctctgaacagactacgtgctcagcttagaaagaaaaaagaatctctagctgaccagtttgacttcaagatgtatattgcctttgtattcaaggagaagaagaaaaagtcagcactttttgaagtgtctgaggttataccagtcatgacaaataattatgaagaaaatatcctgaaaggtgtgcgagattccagctattccttggaaagttccctagagcttttacagaaggatgtggtacagctccatgctcctcgatatcagtctatgagaagggatgtaattggctgtactcaggagatggatttcattctttggcctcggaatgatattgaaaaaatcgtctgtctcctgttttctaggtggaaagaatctgatgagccttttaggcctgttcaggccaaatttgagtttcatcatggtgactatgaaaaacagtttctgcatgtactgagccgcaaggacaagactggaatcgttgtcaacaatcctaaccagtcagtgtttctcttcattgacagacagcacttgcagactccaaaaaacaaagctacaatcttcaagttatgcagcatctgcctctacctgccacaggaacagctcacccactgggcagttggcaccatagaggatcacctccgtccttatatgccagagtagagtactgaccagcaaaatggagaagatcagagaatgcagcagcagttttttttcttgttttcttaccactttattctttcagagtttaaagaaaatggactcatgcacagaacactatgcattttgaaacttgttcatcctggatttttttaaatcatttttatctcagaacttaaacaaaaattagatgtcgtgcacggactgtgtgaaagaagatgctttgcatatttgctgcactgcatcagtatcttactaaaaatgtgaaatgaaaggactattgtacactgaaatgcttaaatgtatctgaaagcacaaggtgatactcatttttatggtcttcccatttgtgctggtttttgcctctttgacatctgtcatcagtatttagagggtgagaagtgaatgtaacaggtataaataacatttttaaaaacaataactttgctataatcacagttgttccagagcactgtcagatacattctaatgaccagaactggtttaaaaaaagaaaatacaaccatgggaaagaaatcttaaatgaaaaacgcatctcattgtaggcatttttgcctcatattttactgggccatgtttgtttcctggtactcatgtattttttttttccagatctctttccccaagttgctattgtaagagtattctgctgcgtgtggatgcagttatacacattaaagcagatctggagtctgaagtagctataaagcagctataaaacagaaatacatgcatagctgcagaaaccatgataggtagaggacttttcttttggttttgttttgttttgttttgttttgtttttggttttacagagaagagatttttattacaaagaaaaaaattccagtgaattgtgcagaaatgctggtttttacaccatcctaaagaaaaactttacaagggtgttttggagtagaaaaaaggttataaagttggaatcttaaattgtaaaattaaccattgagtgtcaaagttctaaaagcagaactcattttgtgcaatgaacataaggaaagactactgtataggtttttttttttttctccttttaaatgaagaaaagctttgcttaagggttgcatacttttattggagtaaatctgaatgatcctactcctttggagtaaaactagtgcttaccagtttccaattgtatttagcttctggttggaatttgaaaaaaaaagaaaaaaagaaaaagaaaacctaaataaaataggtgaaagttccctgactattcaggtgaatacacaaagtttgaagtgttaactttttctttccatttcactgatgttactggtcaccttagagaattatttcatagtctgtggctaaatagtaaattcagaagaaaaatacctggcaattgagtgtgtaacttcaacaagaacaggaatcaagaacatactgtcagctttcaacagttagcaacctggccttatgccttgcttcatgggaaagggccattcttaaatttcaaaatgctttcatgtgtcctcttatttaaaaattagaatctatttgaaataacattttgaatgtttattataaccaggtactcttctaagctcttgtcttaacctctcaacctttggtggaaatagatgcagaggttaagtaacttgctcaagctcagatcataagtagtggaggatttaaaaccaggctggctggctcttaaggcctatgctcttaatttaccatgttgaattaatttaccatattgaattacacttatgttcaccaagttaggcattttggcagccattgtttacgtttttattttggaataatttagaaaagttaccagagtaatatgaaagctgttgtgtaatctttaccctcatttttattattttgccacatttttttcattttctctgtacacttatacctgtgagctatttgagtttgttgcacactttgtgcttccttaccccttccttagtacttcggcatatgttccaagtacaagaatatttcatataactagagtaaaattaccaaactcagggaatgttgatactctttatcatccatattcgttttgttgtcccagtatccttggtagcttgttttagatccccccctctagagtacaggatcattgaatttagttgttctcagttgtctttaatgtggaacagttccttagcctttatgtgttccatgacctctatgttttttggagtacagggcaatttttcttgtaaattgttactcattttgcatttgaattgtttattcatgcttaacgcccttctcaagtatactctccatctgctcttcattgatgttacttttgagcgcctggtcaaggtgtcctggttttgccctatgtgtggtacttactactagcaatctctgggaagcaatgtgcaaataccctgttcctttatcaggagctcccttggcgattctttccagactaaaacccaaaccagtctttaactatgatggttacaaaatagtgattttccaaatctaatgctttgtccatttacagcatttgttgtaagagagtgttctatctctggcatttattatctacctaaacactatggcctcatattttttccctccaaatcataatttgcatgc

SEQ ID NO: 345269 - DNA, 3666 bp, Homo sapiens
gactacatacttccgcagtacttccggactacatactcccgccaaatgtgttttccagaaagttagttattttctcctctttctttcctttctttcctccctttttcccgtctgaccccaaacgttattgtccaaacatgactggacagcagcttttgtttcttgaccctgtaatatgacagtctgctaatattgacagaaggtgcagtttttgggttatagtcgtgattttcgctaatcaatcatattagcaggaaaaaaaatgacttgtttctgttgtacttgagtcttaagaaaaagtgcccatagtttagtgacaatttccaaaggctttagtaccacctgtatttcaaaatgggggacccaaactcccggaagaaacaagctctgaacagactacgtgctcagcttagaaagaaaaaagaatctctagctgaccagtttgacttcaagatgtatattgcctttgtattcaaggagaagaagaaaaagtcagcactttttgaagtgtctgaggttataccagtcatgacaaataattatgaagaaaatatcctgaaaggtgtgcgagattccagctattccttggaaagttccctagagcttttacagaaggatgtggtacagctccatgctcctcgatatcagtctatgagaagggatgtaattggctgtactcaggagatggatttcattctttggcctcggaatgatattgaaaaaatcgtctgtctcctgttttctaggtggaaagaatctgatgagccttttaggcctgttcaggccaaatttgagtttcatcatggtgactatgaaaaacagtttctgcatgtactgagccgcaaggacaagactggaatcgttgtcaacaatcctaaccagtcagtgtttctcttcattgacagacagcacttgcagactccaaaaaacaaagctacaatcttcaagttatgcagcatctgcctctacctgccacaggaacagctcacccactgggcagttggcaccatagaggatcacctccgtccttatatgccagagtagagtactgaccagcaaaatggagaagatcagagaatgcagcagcagttttttttcttgttttcttaccactttattctttcagagtttaaagaaaatggactcatgcacagaacactatgcattttgaaacttgttcatcctggatttttttaaatcatttttatctcagaacttaaacaaaaattagatgtcgtgcacggactgtgtgaaagaagatgctttgcatatttgctgcactgcatcagtatcttactaaaaatgtgaaatgaaaggactattgtacactgaaatgcttaaatgtatctgaaagcacaaggtgatactcatttttatggtcttcccatttgtgctggtttttgcctctttgacatctgtcatcagtatttagagggtgagaagtgaatgtaacaggtataaataacatttttaaaaacaataactttgctataatcacagttgttccagagcactgtcagatacattctaatgaccagaactggtttaaaaaaagaaaatacaaccatgggaaagaaatcttaaatgaaaaacgcatctcattgtaggcatttttgcctcatattttactgggccatgtttgtttcctggtactcatgtattttttttttccagatctctttccccaagttgctattgtaagagtattctgctgcgtgtggatgcagttatacacattaaagcagatctggagtctgaagtagctataaagcagctataaaacagaaatacatgcatagctgcagaaaccatgataggtagaggacttttcttttggttttgttttgttttgttttgttttgtttttggttttacagagaagagatttttattacaaagaaaaaaattccagtgaattgtgcagaaatgctggtttttacaccatcctaaagaaaaactttacaagggtgttttggagtagaaaaaaggttataaagttggaatcttaaattgtaaaattaaccattgagtgtcaaagttctaaaagcagaactcattttgtgcaatgaacataaggaaagactactgtataggtttttttttttttctccttttaaatgaagaaaagctttgcttaagggttgcatacttttattggagtaaatctgaatgatcctactcctttggagtaaaactagtgcttaccagtttccaattgtatttagcttctggttggaatttgaaaaaaaaagaaaaaaagaaaaagaaaacctaaataaaataggtgaaagttccctgactattcaggtgaatacacaaagtttgaagtgttaactttttctttccatttcactgatgttactggtcaccttagagaattatttcatagtctgtggctaaatagtaaattcagaagaaaaatacctggcaattgagtgtgtaacttcaacaagaacaggaatcaagaacatactgtcagctttcaacagttagcaacctggccttatgccttgcttcatgggaaagggccattcttaaatttcaaaatgctttcatgtgtcctcttatttaaaaattagaatctatttgaaataacattttgaatgtttattataaccaggtactcttctaagctcttgtcttaacctctcaacctttggtggaaatagatgcagaggttaagtaacttgctcaagctcagatcataagtagtggaggatttaaaaccaggctggctggctcttaaggcctatgctcttaatttaccatgttgaattaatttaccatattgaattacacttatgttcaccaagttaggcattttggcagccattgtttacgtttttattttggaataatttagaaaagttaccagagtaatatgaaagctgttgtgtaatctttaccctcatttttattattttgccacatttttttcattttctctgtacacttatacctgtgagctatttgagtttgttgcacactttgtgcttccttaccccttccttagtacttcggcatatgttccaagtacaagaatatttcatataactagagtaaaattaccaaactcagggaatgttgatactctttatcatccatattcgttttgttgtcccagtatccttggtagcttgttttagatccccccctctagagtacaggatcattgaatttagttgttctcagttgtctttaatgtggaacagttccttagcctttatgtgttccatgacctctatgttttttggagtacagggcaatttttcttgtaaattgttactcattttgcatttgaattgtttattcatgcttaacgcccttctcaagtatactctccatctgctcttcattgatgttacttttgagcgcctggtcaaggtgtcctggttttgccctatgtgtggtacttactactagcaatctctgggaagcaatgtgcaaataccctgttcctttatcaggagctcccttggcgattctttccagactaaaacccaaaccagtctttaactatgatggttacaaaatagtgattttccaaatctaatgctttgtccatttacagcatttgttgtaagagagtgttctatctctggcatttattatctacctaaacactatggcctcatattttttccctccaaatcataatttgcatgc

SEQ ID NO: 345270 - DNA, 3406 bp, Homo sapiens
cagatttattttttttttttcttagaaacagcaattaacaatgtgactcctaatcaaaagaaaagagatgtccttggggcttaaagtactatggtgggagtcttggactgagtaggtttgaaaatacaattttatgatcgtggagtactaggatttagtcattttgatgcagagcatttcctgatcaactgctgttgtggagtgtactgtccaatagaattctctacaattaaggaaatgttctgtatctcaagagattgttcttaatggtggccagtagtcatgtgaccgttgagcatttgaaatgtggctagtgctactgaagaatggaattgtaaattgcttttaatctaaattttgcctgtgatattattggctgtgggtttgccaaaatttgtttttttaaagaggaaaagataacggactgttggctgctttattggacagcacagctagcatatagatgcagataggtagtataacttgtttgtagtttaatataaatgttgtattttgtaattaggccaaatttgagtttcatcatggtgactatgaaaaacagtttctgcatgtactgagccgcaaggacaagactggaatcgttgtcaacaatcctaaccagtcagtgtttctcttcattgacagacagcacttgcagactccaaaaaacaaagctacaatcttcaagttatgcagcatctgcctctacctgccacaggaacagctcacccactgggcagttggcaccatagaggatcacctccgtccttatatgccagagtagagtactgaccagcaaaatggagaagatcagagaatgcagcagcagttttttttcttgttttcttaccactttattctttcagagtttaaagaaaatggactcatgcacagaacactatgcattttgaaacttgttcatcctggatttttttaaatcatttttatctcagaacttaaacaaaaattagatgtcgtgcacggactgtgtgaaagaagatgctttgcatatttgctgcactgcatcagtatcttactaaaaatgtgaaatgaaaggactattgtacactgaaatgcttaaatgtatctgaaagcacaaggtgatactcatttttatggtcttcccatttgtgctggtttttgcctctttgacatctgtcatcagtatttagagggtgagaagtgaatgtaacaggtataaataacatttttaaaaacaataactttgctataatcacagttgttccagagcactgtcagatacattctaatgaccagaactggtttaaaaaaagaaaatacaaccatgggaaagaaatcttaaatgaaaaacgcatctcattgtaggcatttttgcctcatattttactgggccatgtttgtttcctggtactcatgtattttttttttccagatctctttccccaagttgctattgtaagagtattctgctgcgtgtggatgcagttatacacattaaagcagatctggagtctgaagtagctataaagcagctataaaacagaaatacatgcatagctgcagaaaccatgataggtagaggacttttcttttggttttgttttgttttgttttgttttgtttttggttttacagagaagagatttttattacaaagaaaaaaattccagtgaattgtgcagaaatgctggtttttacaccatcctaaagaaaaactttacaagggtgttttggagtagaaaaaaggttataaagttggaatcttaaattgtaaaattaaccattgagtgtcaaagttctaaaagcagaactcattttgtgcaatgaacataaggaaagactactgtataggtttttttttttttctccttttaaatgaagaaaagctttgcttaagggttgcatacttttattggagtaaatctgaatgatcctactcctttggagtaaaactagtgcttaccagtttccaattgtatttagcttctggttggaatttgaaaaaaaaagaaaaaaagaaaaagaaaacctaaataaaataggtgaaagttccctgactattcaggtgaatacacaaagtttgaagtgttaactttttctttccatttcactgatgttactggtcaccttagagaattatttcatagtctgtggctaaatagtaaattcagaagaaaaatacctggcaattgagtgtgtaacttcaacaagaacaggaatcaagaacatactgtcagctttcaacagttagcaacctggccttatgccttgcttcatgggaaagggccattcttaaatttcaaaatgctttcatgtgtcctcttatttaaaaattagaatctatttgaaataacattttgaatgtttattataaccaggtactcttctaagctcttgtcttaacctctcaacctttggtggaaatagatgcagaggttaagtaacttgctcaagctcagatcataagtagtggaggatttaaaaccaggctggctggctcttaaggcctatgctcttaatttaccatgttgaattaatttaccatattgaattacacttatgttcaccaagttaggcattttggcagccattgtttacgtttttattttggaataatttagaaaagttaccagagtaatatgaaagctgttgtgtaatctttaccctcatttttattattttgccacatttttttcattttctctgtacacttatacctgtgagctatttgagtttgttgcacactttgtgcttccttaccccttccttagtacttcggcatatgttccaagtacaagaatatttcatataactagagtaaaattaccaaactcagggaatgttgatactctttatcatccatattcgttttgttgtcccagtatccttggtagcttgttttagatccccccctctagagtacaggatcattgaatttagttgttctcagttgtctttaatgtggaacagttccttagcctttatgtgttccatgacctctatgttttttggagtacagggcaatttttcttgtaaattgttactcattttgcatttgaattgtttattcatgcttaacgcccttctcaagtatactctccatctgctcttcattgatgttacttttgagcgcctggtcaaggtgtcctggttttgccctatgtgtggtacttactactagcaatctctgggaagcaatgtgcaaataccctgttcctttatcaggagctcccttggcgattctttccagactaaaacccaaaccagtctttaactatgatggttacaaaatagtgattttccaaatctaatgctttgtccatttacagcatttgttgtaagagagtgttctatctctggcatttattatctacctaaacactatggcctcatattttttccctccaaatcataatttgcatgc

SEQ ID NO: 345271 - DNA, 2270 bp, Homo sapiens
  misc_feature (2248)..(2249): n is a, c, g, or t
  misc_feature (2252)..(2253): n is a, c, g, or t
ttttttttttttttttttttggaaagcaaggatcacacttccccctccctgttccttaatcccttttctaaaaaggggggaaaatccggatggattttagggattggtctggtgtcagctgtgttttattgcacacctaaatcctgattataggcttttcatttctccgcaaagcctttattttggcagttaagccaaatgtgttttccagaaagttagttattttctcctctttctttcctttctttcctccctttttcccgtctgaccccaaacgttattgtccaaacatgactggacagcagcttttgtttcttgaccctgtaatatgacagtctgctaatattgacagaaggtgcagtttttgggttatagtcgtgattttcgctaatcaatcatattagcaggaaaaaaaatgacttgtttctgttgtacttgagtcttaagaaaaagtgcccatagtttagtgacaatttccaaaggctttagtaccacctgtatttcaaaatgggggacccaaactcccggaagaaacaagctctgaacagactacgtgctcagcttagaaagaaaaaagaatctctagctgaccagtttgacttcaagatgtatattgcctttgtattcaaggagaagaagaaaaagtcagcactttttgaagtgtctgaggttataccagtcatgacaaataattatgaagaaaatatcctgaaaggtgtgcgagattccagctattccttggaaagttccctagagcttttacagaaggatgtggtacagctccatgctcctcgatatcagtctatgagaagggatgtaattggctgtactcaggagatggatttcattctttggcctcggaatgatattgaaaaaatcgtctgtctcctgttttctaggtggaaagaatctgatgagccttttaggcctgttcaggccaaatttgagtttcatcatggtgactatgaaaaacagtttctgcatgtactgagccgcaaggacaagactggaatcgttgtcaacaatcctaaccagtcagtgtttctcttcattgacagacagcacttgcagactccaaaaaacaaagctacaatcttcaagttatgcagcatctgcctctacctgccacaggaacagctcacccactgggcagttggcaccatagaggatcacctccgtccttatatgccagagtagagtactgaccagcaaaatggagaagatcagagaatgcagcagcagttttttttcttgttttcttaccactttattctttcagagtttaaagaaaatggactcatgcacagaacactatgcattttgaaacttgttcatcctggatttttttaaatcatttttatctcagaacttaaacaaaaattagatgtcgtgcacggactgtgtgaaagaagatgctttgcatatttgctgcactgcatcagtatcttactaaaaatgtgaaatgaaaggactattgtacactgaaatgcttaaatgtatctgaaagcacaaggtgatactcatttttatggtcttcccatttgtgctggtttttgcctctttgacatctgtcatcagtatttagagggtgagaagtgaatgtaacaggtataaataacatttttaaaaacaataactttgctataatcacagttgttccagagcactgtcagatacattctaatgaccagaactggtttaaaaaaagaaaatacaaccatgggaaagaaatcttaaatgaaaaacgcatctcattgtaggcatttttgcctcatattttactgggccatgtttgtttcctggtactcatgtattttttttttccagatctctttccccaagttgctattgtaagagtattctgctgcgtgtggatgcagttatacacattaaagcagatctggagtctgaagtagctataaagcagctataaaacagaaatacatgcatagctgcagaaaccatgataggtagaggacttttcttttggttttgttttgttttgttttgttttgtttttggttttacagagaagagatttttattacaaagaaaaaaattccagtgaattgtgcagaaatgctggtttttacaccatcctaaagaaaaactttacaagggtgttttggagtagaaaaaaggttataaagttggaatcttaaattgtaaaattaaccattgagtgtcaaagttctaaaagcagaactcattttgtgcaatgaacataaggaaagactactgtatatannaanncatatcgggtcgagctg

SEQ ID NO: 345272 - DNA, 3640 bp, Homo sapiens
aagtatattacatatgtataggtttatttacatttgtaggctacttcagacatcttcaaagtcagagtccttattttgccttttagaggtgctagatagtgaagaaaagatgaactttgtaattaagttggatgttcaaatggtaactactttttaaaaataagggttttgatttaactggtaatactttggcttttttctagtcccttaccccaggatatgcttaaatcttttatttattttttgagacaaggtctcaactctgtcaccacgctggagtacactggcatatggatcatggctcaccgcagccttgacctcctgggcgcaggttatccacctcagcttcccgagtggctggactacaggcgtgtgccaccacatccagctaatttttatattttttgtagagatgggttttcgtcatgttgcccagaatggtcttgaactcttgggctcaagcaatcctcctgactcagcctcccaaagtgctgggattacaggtctgagccaccacacccagccttaaatttttacctattccttcatcctctcactagcttctattcttaccacatctgctttatcttcctctatataaaaatgacttcaaacttctcaaaatctgtccccatgaaatgcctttagctttaatttcttctagcaagtagtctctggtttacttccctaactttttatcttctaattctgcataaatttttcctttatcttatatggcaagattttgtctgtctagaatatggatagggactacaatttgtcccttactctgtatgttaagatgtttaataaattgtgggaaatggacttcatgtgacagttacgctaaagtcttatttttaaaaaatattaaaatgttttccccttccagactccaaaaaacaaagctacaatcttcaagttatgcagcatctgcctctacctgccacaggaacagctcacccactgggcagttggcaccatagaggatcacctccgtccttatatgccagagtagagtactgaccagcaaaatggagaagatcagagaatgcagcagcagttttttttcttgttttcttaccactttattctttcagagtttaaagaaaatggactcatgcacagaacactatgcattttgaaacttgttcatcctggatttttttaaatcatttttatctcagaacttaaacaaaaattagatgtcgtgcacggactgtgtgaaagaagatgctttgcatatttgctgcactgcatcagtatcttactaaaaatgtgaaatgaaaggactattgtacactgaaatgcttaaatgtatctgaaagcacaaggtgatactcatttttatggtcttcccatttgtgctggtttttgcctctttgacatctgtcatcagtatttagagggtgagaagtgaatgtaacaggtataaataacatttttaaaaacaataactttgctataatcacagttgttccagagcactgtcagatacattctaatgaccagaactggtttaaaaaaagaaaatacaaccatgggaaagaaatcttaaatgaaaaacgcatctcattgtaggcatttttgcctcatattttactgggccatgtttgtttcctggtactcatgtattttttttttccagatctctttccccaagttgctattgtaagagtattctgctgcgtgtggatgcagttatacacattaaagcagatctggagtctgaagtagctataaagcagctataaaacagaaatacatgcatagctgcagaaaccatgataggtagaggacttttcttttggttttgttttgttttgttttgttttgtttttggttttacagagaagagatttttattacaaagaaaaaaattccagtgaattgtgcagaaatgctggtttttacaccatcctaaagaaaaactttacaagggtgttttggagtagaaaaaaggttataaagttggaatcttaaattgtaaaattaaccattgagtgtcaaagttctaaaagcagaactcattttgtgcaatgaacataaggaaagactactgtataggtttttttttttttctccttttaaatgaagaaaagctttgcttaagggttgcatacttttattggagtaaatctgaatgatcctactcctttggagtaaaactagtgcttaccagtttccaattgtatttagcttctggttggaatttgaaaaaaaaagaaaaaaagaaaaagaaaacctaaataaaataggtgaaagttccctgactattcaggtgaatacacaaagtttgaagtgttaactttttctttccatttcactgatgttactggtcaccttagagaattatttcatagtctgtggctaaatagtaaattcagaagaaaaatacctggcaattgagtgtgtaacttcaacaagaacaggaatcaagaacatactgtcagctttcaacagttagcaacctggccttatgccttgcttcatgggaaagggccattcttaaatttcaaaatgctttcatgtgtcctcttatttaaaaattagaatctatttgaaataacattttgaatgtttattataaccaggtactcttctaagctcttgtcttaacctctcaacctttggtggaaatagatgcagaggttaagtaacttgctcaagctcagatcataagtagtggaggatttaaaaccaggctggctggctcttaaggcctatgctcttaatttaccatgttgaattaatttaccatattgaattacacttatgttcaccaagttaggcattttggcagccattgtttacgtttttattttggaataatttagaaaagttaccagagtaatatgaaagctgttgtgtaatctttaccctcatttttattattttgccacatttttttcattttctctgtacacttatacctgtgagctatttgagtttgttgcacactttgtgcttccttaccccttccttagtacttcggcatatgttccaagtacaagaatatttcatataactagagtaaaattaccaaactcagggaatgttgatactctttatcatccatattcgttttgttgtcccagtatccttggtagcttgttttagatccccccctctagagtacaggatcattgaatttagttgttctcagttgtctttaatgtggaacagttccttagcctttatgtgttccatgacctctatgttttttggagtacagggcaatttttcttgtaaattgttactcattttgcatttgaattgtttattcatgcttaacgcccttctcaagtatactctccatctgctcttcattgatgttacttttgagcgcctggtcaaggtgtcctggttttgccctatgtgtggtacttactactagcaatctctgggaagcaatgtgcaaataccctgttcctttatcaggagctcccttggcgattctttccagactaaaacccaaaccagtctttaactatgatggttacaaaatagtgattttccaaatctaatgctttgtccatttacagcatttgttgtaagagagtgttctatctctggcatttattatctacctaaacactatggcctcatattttttccctccaaatcataatttgcatgc

SEQ ID NO: 345273 - DNA, 1337 bp, Homo sapiens
ttttttttttttttttttttggaaagcaaggatcacacttccccctccctgttccttaatcccttttctaaaaaggggggaaaatccggatggattttagggattggtctggtgtcagctgtgttttattgcacacctaaatcctgattataggcttttcatttctccgcaaagcctttattttggcagttaagccaaatgtgttttccagaaagttagttattttctcctctttctttcctttctttcctccctttttcccgtctgaccccaaacgttattgtccaaacatgactggacagcagcttttgtttcttgaccctgtaatatgacagtctgctaatattgacagaaggtgcagtttttgggttatagtcgtgattttcgctaatcaatcatattagcaggaaaaaaaatgacttgtttctgttgtacttgagtcttaagaaaaagtgcccatagtttagtgacaatttccaaaggctttagtaccacctgtatttcaaaatgggggacccaaactcccggaagaaacaagctctgaacagactacgtgctcagcttagaaagaaaaaagaatctctagctgaccagtttgacttcaagatgtatattgcctttgtattcaaggagaagaagaaaaagtcagcactttttgaagtgtctgaggttataccagtcatgacaaataattatgaagaaaatatcctgaaaggtgtgcgagattccagctattccttggaaagttccctagagcttttacagaaggatgtggtacagctccatgctcctcgatatcagtctatgagaagggatgtaattggctgtactcaggagatggatttcattctttggcctcggaatgatattgaaaaaatcgtctgtctcctgttttctaggtggaaagaatctgatgagccttttaggcctgttcaggccaaatttgagtttcatcatggtgactatgaaaaacagtttctgcatgtactgagccgcaaggacaagactggaatcgttgtcaacaatcctaaccagtcagtgtttctcttcattgacagacagcacttgcagactccaaaaaacaaagctacaatcttcaagttatgcagcatctgcctctacctgccacaggaacagctcacccactgggcagttggcaccatagaggatcacctccgtccttatatgccagagtagagtactgaccagcaaaatggagaagatcagagaatgcagcagcagttttttttcttgttttcttaccactttattctttcagagtttaaagaaaatggactcatgcacaactgtcgaattcggtaccgagctcgatcatc

SEQ ID NO: 345274 - DNA, 1776 bp, Homo sapiens
gcggccgcctactactactaaattcgcggccgcgaaatgctggtttttacaccatcctaaagaaaaactttacaagggtgttttggagtagaaaaaaggttataaagttggaatcttaaattgtaaaattaaccattgagtgtcaaagttctaaaagcagaactcattttgtgcaatgaacataaggaaagactactgtataggtttttttttttttctccttttaaatgaagaaaagctttgcttaagggttgcatacttttattggagtaaatctgaatgatcctactcctttggagtaaaactagtgcttaccagtttccaattgtatttagcttctggttggaatttgaaaaaaaaagaaaaaaagaaaaagaaaacctaaataaaataggtgaaagttccctgactattcaggtgaatacacaaagtttgaagtgttaactttttctttccatttcactgatgttactggtcaccttagagaattatttcatagtctgtggctaaatagtaaattcagaagaaaaatacctggcaattgagtgtgtaacttcaacaagaacaggaatcaagaacatactgtcagctttcaacagttagcaacctggccttatgccttgcttcatgggaaagggccattcttaaatttcaaaatgctttcatgtgtcctcttatttaaaaattagaatctatttgaaataacattttgaatgtttattataaccaggtactcttctaagctcttgtcttaacctctcaacctttggtggaaatagatgcagaggttaagtaacttgctcaagctcagatcataagtagtggaggatttaaaaccaggctggctggctcttaaggcctatgctcttaatttaccatgttgaattaatttaccatattgaattacacttatgttcaccaagttaggcattttggcagccattgtttacgtttttattttggaataatttagaaaagttaccagagtaatatgaaagctgttgtgtaatctttaccctcatttttattattttgccacatttttttcattttctctgtacacttatacctgtgagctatttgagtttgttgcacactttgtgcttccttaccccttccttagtacttcggcatatgttccaagtacaagaatatttcatataactagagtaaaattaccaaactcagggaatgttgatactctttatcatccatattcgttttgttgtcccagtatccttggtagcttgttttagatccccccctctagagtacaggatcattgaatttagttgttctcagttgtctttaatgtggaacagttccttagcctttatgtgttccatgacctctatgttttttggagtacagggcaatttttcttgtaaattgttactcattttgcatttgaattgtttattcatgcttaacgcccttctcaagtatactctccatctgctcttcattgatgttacttttgagcgcctggtcaaggtgtcctggttttgccctatgtgtggtacttactactagcaatctctgggaagcaatgtgcaaataccctgttcctttatcaggagctcccttggcgattctttccagactaaaacccaaaccagtctttaactatgatggttacaaaatagtgattttccaaatctaatgctttgtccatttacagcatttgttgtaagagagtgttctatctctggcatttattatctacctaaacactatggcctcatattttttccctccaaatcataatttgcatgc

SEQ ID NO: 345275 - DNA, 443 bp, Homo sapiens
agtcagcgtttatcagattacttaccattactactttgtcctggggaaatcctcttaatctttaaaggcgcaatccaaaatcataatgttcccgtgttacttactgttacttttttttttttctcctatagtggtttgatgataagaacccaatttgggccgggcgcggttgctcacgcctgtaatcccaacactttgggaggctaagccagatggatcacctgaggtcgggagtttgagaccatcctgaccaacataaagaagtcctatctctactaaaaacacaaaattagctgggcgtggtggtgcatgcctgtattccagctacttgggaggctgaggcagaagaatcgcttgaacccaggaggcggaggttgcagtgagccgagatcgcgccattgcactccagcctgggcaacaagagcgaaattccgtctcaagaa

SEQ ID NO: 345276 - DNA, 2736 bp, Homo sapiens
ttttttttttttttttttttggaaagcaaggatcacacttccccctccctgttccttaatcccttttctaaaaaggggggaaaatccggatggattttagggattggtctggtgtcagctgtgttttattgcacacctaaatcctgattataggcttttcatttctccgcaaagcctttattttggcagttaagccaaatgtgttttccagaaagttagttattttctcctctttctttcctttctttcctccctttttcccgtctgaccccaaacgttattgtccaaacatgactggacagcagcttttgtttcttgaccctgtaatatgacagtctgctaatattgacagaaggtgcagtttttgggttatagtcgtgattttcgctaatcaatcatattagcaggaaaaaaaatgacttgtttctgttgtacttgagtcttaagaaaaagtgcccatagtttagtgacaatttccaaaggctttagtaccacctgtatttcaaaatgggggacccaaactcccggaagaaacaagctctgaacagactacgtgctcagcttagaaagaaaaaagaatctctagctgaccagtttgacttcaagatgtatattgcctttgtattcaaggagaagaagaaaaagtcagcactttttgaagtgtctgaggttataccagtcatgacaaataattatgaagaaaatatcctgaaaggtgtgcgagattccagctattccttggaaagttccctagagcttttacagaaggatgtggtacagctccatgctcctcgatatcagtctatgagaagggatgtaattggctgtactcaggagatggatttcattctttggcctcggaatgatattgaaaaaatcgtctgtctcctgttttctaggtggaaagaatctgatgagccttttaggcctgttcaggccaaatttgagtttcatcatggtgactatgaaaaacagtttctgcatgtactgagccgcaaggacaagactggaatcgttgtcaacaatcctaaccagtcagtgtttctcttcattgacagacagcacttgcagactccaaaaaacaaagctacaatcttcaagttatgcagcatctgcctctacctgccacaggaacagctcacccactgggcagttggcaccatagaggatcacctccgtccttatatgccagagtagagtactgaccagcaaaatggagaagatcagagaatgcagcagcagttttttttcttgttttcttaccactttattctttcagagtttaaagaaaatggactcatgcacagaacactatgcattttgaaacttgttcatcctggatttttttaaatcatttttatctcagaacttaaacaaaaattagatgtcgtgcacggactgtgtgaaagaagatgctttgcatatttgctgcactgcatcagtatcttactaaaaatgtgaaatgaaaggactattgtacactgaaatgcttaaatgtatctgaaagcacaaggtgatactcatttttatggtcttcccatttgtgctggtttttgcctctttgacatctgtcatcagtatttagagggtgagaagtgaatgtaacaggtataaataacatttttaaaaacaataactttgctataatcacagttgttccagagcactgtcagatacattctaatgaccagaactggtttaaaaaaagaaaatacaaccatgggaaagaaatcttaaatgaaaaacgcatctcattgtaggcatttttgcctcatattttactgggccatgtttgtttcctggtactcatgtattttttttttccagatctctttccccaagttgctattgtaagagtattctgctgcgtgtggatgcagttatacacattaaagcagatctggagtctgaagtagctataaagcagctataaaacagaaatacatgcatagctgcagaaaccatgataggtagaggacttttcttttggttttgttttgttttgttttgttttgtttttggttttacagagaagagatttttattacaaagaaaaaaattccagtgaattgtgcagaaatgctggtttttacaccatcctaaagaaaaactttacaagggtgttttggagtagaaaaaaggttataaagttggaatcttaaattgtaaaattaaccattgagtgtcaaagttctaaaagcagaactcattttgtgcaatgaacataaggaaagactactgtataggtttttttttttttctccttttaaatgaagaaaagctttgcttaagggttgcatacttttattggagtaaatctgaatgatcctactcctttggagtaaaactagtgcttaccagtttccaattgtatttagcttctggttggaatttgaaaaaaaaagaaaaaaagaaaaagaaaacctaaataaaataggtgaaagttccctgactattcaggtgaatcaccaaaaaaaaaaaaaaaagcacaaacacaaacgaagaaccacacaaaagaaaaaaaaaactctccccaacgcgggagacgtccgcggcaaacaaagagcgcacgatcaccccaagagagggggcgccgcagaaaccaccaatttgtttgacccacctataaggagagcggaaaaaccacaaccgttgtgcgcgacaaaccacgggcacaaacagctgcccaccgggtgtcaaacactgtgtaccaccgcgcacaaatattcaccaaaa

SEQ ID NO: 345277 - DNA, 4178 bp, Homo sapiens
ttttttttttttttttttttggaaagcaaggatcacacttccccctccctgttccttaatcccttttctaaaaaggggggaaaatccggatggattttagggattggtctggtgtcagctgtgttttattgcacacctaaatcctgattataggcttttcatttctccgcaaagcctttattttggcagttaagccaaatgtgttttccagaaagttagttattttctcctctttctttcctttctttcctccctttttcccgtctgaccccaaacgttattgtccaaacatgactggacagcagcttttgtttcttgaccctgtaatatgacagtctgctaatattgacagaaggtgcagtttttgggttatagtcgtgattttcgctaatcaatcatattagcaggaaaaaaaatgacttgtttctgttgtacttgagtcttaagaaaaagtgcccatagtttagtgacaatttccaaaggctttagtaccacctgtatttcaaaatgggggacccaaactcccggaagaaacaagctctgaacagactacgtgctcagcttagaaagaaaaaagaatctctagctgaccagtttgacttcaagatgtatattgcctttgtattcaaggagaagaagaaaaagtcagcactttttgaagtgtctgaggttataccagtcatgacaaataattatgaagaaaatatcctgaaaggtgtgcgagattccagctattccttggaaagttccctagagcttttacagaaggatgtggtacagctccatgctcctcgatatcagtctatgagaagggatgtaattggctgtactcaggagatggatttcattctttggcctcggaatgatattgaaaaaatcgtctgtctcctgttttctaggtggaaagaatctgatgagccttttaggcctgttcaggtattttggtctaaagtgtgatgagtatttcaatatgtgaaaactactagaatataatagggtctaacttgagaaattctttgggaaaatggtttctgatagttttatttcacgagtctcccctatttagaatattgtgatgcaagagaagaaagcgtttggattatagaatctgcttgacagtgtggtggttccacctgcccagtgtggctttgaaattatgactagagaaaatcttttaaagtggacatttactgatttatagaggggcccacagatgagcttctgagatctgtaactcttgaagccttcaccacacatccttctaaaaccgtatatttaactgctgcttcccaaaggccaaatttgagtttcatcatggtgactatgaaaaacagtttctgcatgtactgagccgcaaggacaagactggaatcgttgtcaacaatcctaaccagtcagtgtttctcttcattgacagacagcacttgcagactccaaaaaacaaagctacaatcttcaagttatgcagcatctgcctctacctgccacaggaacagctcacccactgggcagttggcaccatagaggatcacctccgtccttatatgccagagtagagtactgaccagcaaaatggagaagatcagagaatgcagcagcagttttttttcttgttttcttaccactttattctttcagagtttaaagaaaatggactcatgcacagaacactatgcattttgaaacttgttcatcctggatttttttaaatcatttttatctcagaacttaaacaaaaattagatgtcgtgcacggactgtgtgaaagaagatgctttgcatatttgctgcactgcatcagtatcttactaaaaatgtgaaatgaaaggactattgtacactgaaatgcttaaatgtatctgaaagcacaaggtgatactcatttttatggtcttcccatttgtgctggtttttgcctctttgacatctgtcatcagtatttagagggtgagaagtgaatgtaacaggtataaataacatttttaaaaacaataactttgctataatcacagttgttccagagcactgtcagatacattctaatgaccagaactggtttaaaaaaagaaaatacaaccatgggaaagaaatcttaaatgaaaaacgcatctcattgtaggcatttttgcctcatattttactgggccatgtttgtttcctggtactcatgtattttttttttccagatctctttccccaagttgctattgtaagagtattctgctgcgtgtggatgcagttatacacattaaagcagatctggagtctgaagtagctataaagcagctataaaacagaaatacatgcatagctgcagaaaccatgataggtagaggacttttcttttggttttgttttgttttgttttgttttgtttttggttttacagagaagagatttttattacaaagaaaaaaattccagtgaattgtgcagaaatgctggtttttacaccatcctaaagaaaaactttacaagggtgttttggagtagaaaaaaggttataaagttggaatcttaaattgtaaaattaaccattgagtgtcaaagttctaaaagcagaactcattttgtgcaatgaacataaggaaagactactgtataggtttttttttttttctccttttaaatgaagaaaagctttgcttaagggttgcatacttttattggagtaaatctgaatgatcctactcctttggagtaaaactagtgcttaccagtttccaattgtatttagcttctggttggaatttgaaaaaaaaagaaaaaaagaaaaagaaaacctaaataaaataggtgaaagttccctgactattcaggtgaatacacaaagtttgaagtgttaactttttctttccatttcactgatgttactggtcaccttagagaattatttcatagtctgtggctaaatagtaaattcagaagaaaaatacctggcaattgagtgtgtaacttcaacaagaacaggaatcaagaacatactgtcagctttcaacagttagcaacctggccttatgccttgcttcatgggaaagggccattcttaaatttcaaaatgctttcatgtgtcctcttatttaaaaattagaatctatttgaaataacattttgaatgtttattataaccaggtactcttctaagctcttgtcttaacctctcaacctttggtggaaatagatgcagaggttaagtaacttgctcaagctcagatcataagtagtggaggatttaaaaccaggctggctggctcttaaggcctatgctcttaatttaccatgttgaattaatttaccatattgaattacacttatgttcaccaagttaggcattttggcagccattgtttacgtttttattttggaataatttagaaaagttaccagagtaatatgaaagctgttgtgtaatctttaccctcatttttattattttgccacatttttttcattttctctgtacacttatacctgtgagctatttgagtttgttgcacactttgtgcttccttaccccttccttagtacttcggcatatgttccaagtacaagaatatttcatataactagagtaaaattaccaaactcagggaatgttgatactctttatcatccatattcgttttgttgtcccagtatccttggtagcttgttttagatccccccctctagagtacaggatcattgaatttagttgttctcagttgtctttaatgtggaacagttccttagcctttatgtgttccatgacctctatgttttttggagtacagggcaatttttcttgtaaattgttactcattttgcatttgaattgtttattcatgcttaacgcccttctcaagtatactctccatctgctcttcattgatgttacttttgagcgcctggtcaaggtgtcctggttttgccctatgtgtggtacttactactagcaatctctgggaagcaatgtgcaaataccctgttcctttatcaggagctcccttggcgattctttccagactaaaacccaaaccagtctttaactatgatggttacaaaatagtgattttccaaatctaatgctttgtccatttacagcatttgttgtaagagagtgttctatctctggcatttattatctacctaaacactatggcctcatattttttccctccaaatcataatttgcatgc

SEQ ID NO: 345278 - DNA, 1682 bp, Homo sapiens
ttttttttttttttttttttggaaagcaaggatcacacttccccctccctgttccttaatcccttttctaaaaaggggggaaaatccggatggattttagggattggtctggtgtcagctgtgttttattgcacacctaaatcctgattataggcttttcatttctccgcaaagcctttattttggcagttaagccaaatgtgttttccagaaagttagttattttctcctctttctttcctttctttcctccctttttcccgtctgaccccaaacgttattgtccaaacatgactggacagcagcttttgtttcttgaccctgtaatatgacagtctgctaatattgacagaaggtgcagtttttgggttatagtcgtgattttcgctaatcaatcatattagcaggaaaaaaaatgacttgtttctgttgtacttgagtcttaagaaaaagtgcccatagtttagtgacaatttccaaaggctttagtaccacctgtatttcaaaatgggggacccaaactcccggaagaaacaagctctgaacagactacgtgctcagcttagaaagaaaaaagaatctctagctgaccagtttgacttcaagatgtatattgcctttgtattcaaggagaagaagaaaaagtcagcactttttgaagtgtctgaggttataccagtcatgacaaataattatgaagaaaatatcctgaaaggtgtgcgagattccagctattccttggaaagttccctagagcttttacagaaggatgtggtacagctccatgctcctcgatatcagtctatgagaagggatgtaattggctgtactcaggagatggatttcattctttggcctcggaatgatattgaaaaaatcgtctgtctcctgttttctaggtggaaagaatctgatgagccttttaggcctgttcaggccaaatttgagtttcatcatggtgactatgaaaaacagtttctgcatgtactgagccgcaaggacaagactggaatcgttgtcaacaatcctaaccagtcagtgtttctcttcattgacagacagcacttgcagactccaaaaaacaaagctacaatcttcaagttatgcagcatctgcctctacctgccacaggaacagctcacccactgggcagttggcaccatagaggatcacctccgtccttatatgccagagtagagtactgaccagcaaaatggagaagatcagagaatgcagcagcagttttttttcttgttttcttaccactttattctttcagagtttaaagaaaatggactcatgcacagaacactatgcattttgaaacttgttcatcctggatttttttaaatcatttttatctcagaacttaaacaaaaattagatgtcgtgcacggactgtgtgaaagaagatgctttgcatatttgctgcactgcatcagtatcttactaaaaatgtgaaatgaaaggactattgtacactgaaatgcttaaatgtatctgaaagcacaaggtgatactcatttttatggtcttcccatttgtgctggtttttgcctctttgacatctgtcatcagtatttagagggtgagataaaaatgatttaaaaaaatccaggatgaacaagtttcaaaatgcatagtgttctgtgcatgagtccattttctttaaactcgtcgac

SEQ ID NO: 345279 - DNA, 1634 bp, Homo sapiens
ttttttttttttttttttttggaaagcaaggatcacacttccccctccctgttccttaatcccttttctaaaaaggggggaaaatccggatggattttagggattggtctggtgtcagctgtgttttattgcacacctaaatcctgattataggcttttcatttctccgcaaagcctttattttggcagttaagccaaatgtgttttccagaaagttagttattttctcctctttctttcctttctttcctccctttttcccgtctgaccccaaacgttattgtccaaacatgactggacagcagcttttgtttcttgaccctgtaatatgacagtctgctaatattgacagaaggtgcagtttttgggttatagtcgtgattttcgctaatcaatcatattagcaggaaaaaaaatgacttgtttctgttgtacttgagtcttaagaaaaagtgcccatagtttagtgacaatttccaaaggctttagtaccacctgtatttcaaaatgggggacccaaactcccggaagaaacaagctctgaacagactacgtgctcagcttagaaagaaaaaagaatctctagctgaccagtttgacttcaagatgtatattgcctttgtattcaaggagaagaagaaaaagtcagcactttttgaagtgtctgaggttataccagtcatgacaaataattatgaagaaaatatcctgaaaggtgtgcgagattccagctattccttggaaagttccctagagcttttacagaaggatgtggtacagctccatgctcctcgatatcagtctatgagaagggatgtaattggctgtactcaggagatggatttcattctttggcctcggaatgatattgaaaaaatcgtctgtctcctgttttctaggtggaaagaatctgatgagccttttaggcctgttcagtggtttgatgataagaacccaatttgggccgggcgcggttgctcacgcctgtaatcccaacactttgggaggctaagccagatggatcacctgaggtcgggagtttgagaccatcctgaccaacataaagaagtcctatctctactaaaaacacaaaattagctgggcgtggtggtgcatgcctgtattccagctacttgggaggctgaggcagaagaatcgcttgaacccaggaggcggaggttgcagtgagccgagatcgcgccattgcactccagcctgggcaacaagagcgaaattccgtctcaagaaaaaaaaaaaaattggagttttacagataaccacatcttattctgggaaaggatttgaagcaagttgggttttatatttggctgtacttgtcctcttcagcagtataataagccccttaaggctgaagtaaccttattcctattgtttagtagctaatagcatgcttttgatatgcttatgatcatactaataatttaatatttgaattgtatggaagtacaattcagtatcattttacatatggtatattgtgatgctgtatcatattttatgttacggtttataagaaaagctcctaggtataaaatgctacatagcaggaacttggtttttcaatgttattatttcctactgtttttgacgtaacggcaataaaatttgtttga

SEQ ID NO: 345280 - DNA, 1695 bp, Homo sapiens
ttttttttttttttttttttggaaagcaaggatcacacttccccctccctgttccttaatcccttttctaaaaaggggggaaaatccggatggattttagggattggtctggtgtcagctgtgttttattgcacacctaaatcctgattataggcttttcatttctccgcaaagcctttattttggcagttaagccaaatgtgttttccagaaagttagttattttctcctctttctttcctttctttcctccctttttcccgtctgaccccaaacgttattgtccaaacatgactggacagcagcttttgtttcttgaccctgtaatatgacagtctgctaatattgacagaaggtgcagtttttgggttatagtcgtgattttcgctaatcaatcatattagcaggaaaaaaaatgacttgtttctgttgtacttgagtcttaagaaaaagtgcccatagtttagtgacaatttccaaaggctttagtaccacctgtatttcaaaatgggggacccaaactcccggaagaaacaagctctgaacagactacgtgctcagcttagaaagaaaaaagaatctctagctgaccagtttgacttcaagatgtatattgcctttgtattcaaggagaagaagaaaaagtcagcactttttgaagtgtctgaggttataccagtcatgacaaataattatgaagaaaatatcctgaaaggtgtgcgagattccagctattccttggaaagttccctagagcttttacagaaggatgtggtacagctccatgctcctcgatatcagtctatgagaagggatgtaattggctgtactcaggagatggatttcattctttggcctcggaatgatattgaaaaaatcgtctgtctcctgttttctaggtggaaagaatctgatgagccttttaggcctgttcagtggtttgatgataagaacccaatttgggccgggcgcggttgctcacgcctgtaatcccaacactttgggaggctaagccagatggatcacctgaggtcgggagtttgagaccatcctgaccaacataaagaagtcctatctctactaaaaacacaaaattagctgggcgtggtggtgcatgcctgtattccagctacttgggaggctgaggcagaagaatcgcttgaacccaggaggcggaggttgcagtgagccgagatcgcgccattgcactccagcctgggcaacaagagcgaaattccgtctcaagaaaaaaaaaaaaattggagttttacagataaccacatcttattctgggaaaggatttgaagcaagttgggttttatatttggctgtacttgtcctcttcagcagtataataagccccttaaggctgaagtaaccttattcctattgtttagtagctaatagcatgcttttgatatgcttatgatcatactaataatttaatatttgaattgtatggaagtacaattcagtatcattttacatatggtatattgtgatgctgtatcatattttatgttacggtttataagaaaagctcctaggtataaaatgctacatagcaggaacttggtttttcaatgttattatttcctactgtttttgacgtaacggcaataaaatttgtttgaaccaaaatggactaacaattatttgtacaactcagtattgtctaaatatcatattgttaaa

SEQ ID NO: 345281 - DNA, 457 bp, Homo sapiens
gttgtaattatgaacagggtgaccaggataggacttagtgttacaatatatgtaagtaaagaactgaagaaagagaaggaaggagttccttgttgctcaactcacaattactacataccacttaacataatgtctcacacaagctggcactaaataatattttttaatatatgaacaaggaaataaatagaggaaggtggattatttgtaaatgccttattaactacggcagaatcataatgagcatttcctatagaacaaagtcatctgcctgtgattttttcacttatttttgggtagctcaatagagccacaaagtgaagagagcaataattatgtggccaccagagctgctattagagtgtcacctgttgttctatccattgtctcaaagacagttttaaaaaagaccctatacgcttcattaagagcatttgttcactgtggggtggaggct

SEQ ID NO: 345282 - DNA, 602 bp, Homo sapiens
agacggtgtttcaccaagttggccaggatggtcttgatctcttgacctcgtgatccacctgccttggcctccctgaatgctaggattacaggcatgagccaccatgcccagccccataagggtcacttttaaaaagacgattgcctatggtttctctgtgaaaatagtccatttgaacttgtttgatgtaatttggacacatttggcagaaattacacactcatttttggctttgtttagttttaacttttttttttttagacggagttttgctcttattgcccaggcatgcaccaccatgcctggctaattttgtatttttagtagagagggggtttctccatgttagtcaggctggtctggaactcccaacctcagttgatcctcccgccttggcgtcccaaagtaccagattacagatgtgagccactgcacctggccatttttttttgaaggcagggtctctctgtcctagactggagtgcagtggcacgattatggctcactgcagccttgacttcagtctcatgtgatccttccacctcagcctcccaagtagcaggtactgtaggtactgtcacaagtattataggcatcaagcc

SEQ ID NO: 345283 - DNA, 749 bp, Homo sapiens
gttgttgctacccgatatggtttggctgcgtccccacccaaatttcatcttgaattgtagttcccataatccccatgtgtcgtgggagggacccggtaggaggtaatcgaatcatgggggcaggtttttcccatactgttctcgtgatagtgaatacatctcactaaatctgatggttttataaagggcagtttccctgcacgtgctctcttgcctgctgccatggaagacatacctttttgctccttgccttccaccatgattctgaggcctctccagccttgtggaactgtgagtacattaaacctctttttctttataaattacccagtttccagtatttcttcatagcagtatgaaaagtaactaatacactacccgagacatcttaggagatttgtaatagctgtaatgccaggtccaccatatttttagcataaagcaaatgtttacgcgtgatatgactgcacgggctttctttcagctggagccatagcaactcaagtagtaaccctatcttagtctgattaaaagtaaatattagtctgggcatggtgggacatgcctgtaatcccagtactttggaatgtccttgctcaacaggaagggtccattcagtcggatcgggtggcttccaattttatttttggtttacatctcaactatcacagcagccgggcgcggtggcttcacagctgtaatcccagcactttgggaggttgaggagggcagatcacaaggtcaggaga

SEQ ID NO: 345284 - DNA, 3388 bp, Homo sapiens
aacgtgggggcgaaacaacacggccgggaggcggccgctgcctgccgggccctctcttctgggaccctggattttcggacactgagcgccatggccctgcctctgctgccgggcaacagcttcaaccgcaacgttaaaggagatggaagtgatgtaccatcatgggtagcctttgataaacaggtattatcttttgatgcctatttggaagaggaagtacttgataaaagccaaaccaactacagaataagatactataaaatctacttctaccctgaagatgacacaattcaagtaaatgaaccagaggtgaaaaatagtggattacttcaagggacttctatccggcgtcatcggattactcttccgcctcctgatgaggatcagttttatactgtgtatcattttaatgtcggcacagaggttgtcttctatggccggacattcaagatttatgactgtgatgcattcacaagaaactttttgaggaaaataggggtcaaagtgaatcccccagtgcaatgtccagaagatccttacatgaagattcggagagaggttgtagaacacgtagagcccttacgtccctacgaatccctcgacaccctgaaacagttcctccagtatcatggcaagattttgtgtttcttctgcctgtgggatgactcagtctcaatgtttggagaccgtagagaactcatcctgcattacttcttgtgtgatgatactattgaaatcaaagaattgcttccacacagctcaggccgagatgctctaaaaatgttcctccggaggagtaagctacccaagaattgcccacctagagtctatcaaccaggccagataacagatcgagcagttctcaattcatatggtgactttataaagaaccaagcggatggctacctgttcgatagatataagctaggaaaagtagaccaagagttttacaaagatagtgacctgtccctaggagtcaccatcaatgtgtggggaagaaaagtgctcctttatgactgtgatgaatttacgaagtcttattataagtctaaatatggaattgagaactttacctcagtttcatgcaagcctccttctcctcctccaaaaatagaaaggaaatttccaccttacaacggttttggttctgaagaggattctctccgtaactgcatagacctcaagcccacacctcatcggaggaacttcaagaagtttatggaaaaagacagctatggctccaaaagcaatatactccgttttttttgcaaaactagtcacagacaaatgtgttgacttggacaggatgtttgttatttcatattatctcggtgatgacaccatttcagtgtttgaacctatagagaggaattcaggaattgctggtgggatgttcttgaaaagaagtcgcgttaagaagcctggacaagaagtctttaaaagtgaactatctgaatatatcaaggccgaggagctgtacattggagtcacggtgaatgtgaatggttacctatttcgtttgctcaatgctgatgagtataccttaaactacatggagcagaatacagataagtatcctttcagtaacctcaaacttgccctacaaaagctgaagcaagaagaaggaaaatccagagagctcaagcaggtatttaaagctgctgactctaagcacacaaatatggtggattataatacattcagagacatattgatgtctttgactgttggaaaccttgcagagcaagaatttgtaaccattgcacgtcactaccgtgtgcctgagggcacatgttcagatatggatttcttaatcgcactggcccacgaaaagttcaagaaaaatatgtttgagaatttcgacactttcatttattcctgtgtgtatgaagatcgagaaaaaaaaaatgtattacccaccaaagacattaaaaggctgtgcaaatcctccagattacctttgagtgatgatcttctagaatccttattgtcaaggtttgaagacagtgaaaaacaaatagattataagtcatttttctctgccctgaactggagaaagaatccagtgcctgaattgcaaccagcatcataccttaaagagagatgtgaagatgtttggcttggtatgccatcacctattcctgcgaaatacattgactactggacctttttgaaggacgcgtttggcttagaggaggaataaccatgccagttttggtcaattctctatgatttacttctctcattttgccacatttactttagtagatataatttcattaaaaacaaaaaagaaacaaggtttatattaaatggaaatccataaaccacaattaatcctattttgtcatgttagttttacagaacatcatgttacattgccgacgtactgttactatttaaaatgccatcttaaaacatgttgaatatttttattatatgtatggtttattaataccaaaaaatcttctgataatttttgatccaacataatttgattcattactatatgaacagaaaatgacttttgaaggttatacatgacaatacaaaatcaaattatatcacagcaataagttgtgattctattaaacatttttgaaacctttttgacacgtttattacttacataattaagttttgtagcaacccacctcatcaaaataattcttaaacctctctagagtaaatatatttatcttttgaacttagtaaagctatgggaagaaaaagaacctccaacacacacacacacacacacacacacgcacgtgcacacacactggaaacatatgcagtatttatatttgtaatgcccttttttctatctaaagtcagcttgttagcctaggaatatatgcatgtgtgtataattatagtttgaccaaaactttattatgtctaaaatatttacaaatgtgaaagctgaagattttgagatttttgttttttttttggtttgttttacacacacatcccacgcgccccaccctagaggtttaaatattcagaaactacaacatttttcccctgcatttttctagttctatttttatttttcttcagcagaactcttgtcatgtagtgtacatttgattaaaacccatagccatgtacctctgggaattcagtgtaagaagtctatcccagtctatgccattgttcagtgttggatgctatgtatcataaatccatttgcctggtgttctgggagacaatggaggtctcaaaaaggagctgcaccatttacctttcagggactaccctgagaaaaagaagagctgatgacatctcaagggacccttcggactcattattctttcactccacatttgcagcagtgtcttgctggcttcttggcactcaaatgtaccaatttattctccac

SEQ ID NO: 345285 - DNA, 2596 bp, Homo sapiens
tttgattttgtcttccagaattgcccacctagagtctatcaaccaggccagataacagatcgagcagttctcaattcatatggtgactttataaagaaccaagcggatggctacctgttcgatagatataagctaggaaaagtagaccaagagttttacaaagatagtgacctgtccctaggagtcaccatcaatgtgtggggaagaaaagtgctcctttatgactgtgatgaatttacgaagtcttattataagtctaaatatggaattgagaactttacctcagtttcatgcaagcctccttctcctcctccaaaaatagaaaggaaatttccaccttacaacggttttggttctgaagaggattctctccgtaactgcatagacctcaagcccacacctcatcggaggaacttcaagaagtttatggaaaaagacagctatggctccaaaagcaatatactccgttttttttgcaaaactagtcacagacaaatgtgttgacttggacaggatgtttgttatttcatattatctcggtgatgacaccatttcagtgtttgaacctatagagaggaattcaggaattgctggtgggatgttcttgaaaagaagtcgcgttaagaagcctggacaagaagtctttaaaagtgaactatctgaatatatcaaggccgaggagctgtacattggagtcacggtgaatgtgaatggttacctatttcgtttgctcaatgctgatgagtataccttaaactacatggagcagaatacagataagtatcctttcagtaacctcaaacttgccctacaaaagctgaagcaagaagaaggaaaatccagagagctcaagcaggtatttaaagctgctgactctaagcacacaaatatggtggattataatacattcagagacatattgatgtctttgactgttggaaaccttgcagagcaagaatttgtaaccattgcacgtcactaccgtgtgcctgagggcacatgttcagatatggatttcttaatcgcactggcccacgaaaagttcaagaaaaatatgtttgagaatttcgacactttcatttattcctgtgtgtatgaagatcgagaaaaaaaaaatgtattacccaccaaagacattaaaaggctgtgcaaatcctccagattacctttgagtgatgatcttctagaatccttattgtcaaggtttgaagacagtgaaaaacaaatagattataagtcatttttctctgccctgaactggagaaagaatccagtgcctgaattgcaaccagcatcataccttaaagagagatgtgaagatgtttggcttggtatgccatcacctattcctgcgaaatacattgactactggacctttttgaaggacgcgtttggcttagaggaggaataaccatgccagttttggtcaattctctatgatttacttctctcattttgccacatttactttagtagatataatttcattaaaaacaaaaaagaaacaaggtttatattaaatggaaatccataaaccacaattaatcctattttgtcatgttagttttacagaacatcatgttacattgccgacgtactgttactatttaaaatgccatcttaaaacatgttgaatatttttattatatgtatggtttattaataccaaaaaatcttctgataatttttgatccaacataatttgattcattactatatgaacagaaaatgacttttgaaggttatacatgacaatacaaaatcaaattatatcacagcaataagttgtgattctattaaacatttttgaaacctttttgacacgtttattacttacataattaagttttgtagcaacccacctcatcaaaataattcttaaacctctctagagtaaatatatttatcttttgaacttagtaaagctatgggaagaaaaagaacctccaacacacacacacacacacacacacacgcacgtgcacacacactggaaacatatgcagtatttatatttgtaatgcccttttttctatctaaagtcagcttgttagcctaggaatatatgcatgtgtgtataattatagtttgaccaaaactttattatgtctaaaatatttacaaatgtgaaagctgaagattttgagatttttgttttttttttggtttgttttacacacacatcccacgcgccccaccctagaggtttaaatattcagaaactacaacatttttcccctgcatttttctagttctatttttatttttcttcagcagaactcttgtcatgtagtgtacatttgattaaaacccatagccatgtacctctgggaattcagtgtaagaagtctatcccagtctatgccattgttcagtgttggatgctatgtatcataaatccatttgcctggtgttctgggagacaatggaggtctcaaaaaggagctgcaccatttacctttcagggactaccctgagaaaaagaagagctgatgacatctcaagggacccttcggactcattattctttcactccacatttgcagcagtgtcttgctggcttcttggcactcaaatgtaccaatttattctccac

SEQ ID NO: 345286 - DNA, 1526 bp, Homo sapiens
ggaaaaaaaaaaaaaaaaaaaaaaaaaaaaaaaaaaaaaaaaaatctcactcatttgttcatatattggtctctgaggtcccttctaggctctgacaactggaaactctgaaaatagacatattgatgtctttgactgttggaaaccttgcagagcaagaatttgtaaccattgcacgtcactaccgtgtgcctgagggcacatgttcagatatggatttcttaatcgcactggcccacgaaaagttcaagaaaaatatgtttgagaatttcgacactttcatttattcctgtgtgtatgaagatcgagaaaaaaaaaatgtattacccaccaaagacattaaaaggctgtgcaaatcctccagattacctttgagtgatgatcttctagaatccttattgtcaaggtttgaagacagtgaaaaacaaatagattataagtcatttttctctgccctgaactggagaaagaatccagtgcctgaattgcaaccagcatcataccttaaagagagatgtgaagatgtttggcttggtatgccatcacctattcctgcgaaatacattgactactggacctttttgaaggacgcgtttggcttagaggaggaataaccatgccagttttggtcaattctctatgatttacttctctcattttgccacatttactttagtagatataatttcattaaaaacaaaaaagaaacaaggtttatattaaatggaaatccataaaccacaattaatcctattttgtcatgttagttttacagaacatcatgttacattgccgacgtactgttactatttaaaatgccatcttaaaacatgttgaatatttttattatatgtatggtttattaataccaaaaaatcttctgataatttttgatccaacataatttgattcattactatatgaacagaaaatgacttttgaaggttatacatgacaatacaaaatcaaattatatcacagcaataagttgtgattctattaaacatttttgaaacctttttgacacgtttattacttacataattaagttttgtagcaacccacctcatcaaaataattcttaaacctctctagagtaaatatatttatcttttgaacttagtaaagctatgggaagaaaaagaacctccaacacacacacacacacacacacacacgcacgtgcacacacactggaaacatatgcagtatttatatttgtaatgcccttttttctatctaaagtcagcttgttagcctaggaatatatgcatgtgtgtataattatagtttgaccaaaactttattatgtctaaaatatttacaaatgtgaaagctgaagattttgagatttttgttttttttttggtttgttttacacacacatcccacgcgccccaccctagaggtttaaatattcagaaactacaacatttttcccctgcatttttctagttctatttttatttttcttcagcagaactcttgtcatgtagtgtacatttgattaaaacccatagccatgt

SEQ ID NO: 345287 - DNA, 3528 bp, Homo sapiens
aacgtgggggcgaaacaacacggccgggaggcggccgctgcctgccgggccctctcttctgggaccctggattttcggacactgagcgccatggccctgcctctgctgccgggcaacagcttcaaccgcaacgtgtgggaaaggagaagtttcacaaatcccaacattggggcttttgcaacaatgttatgatgttggtgagtgatgaaaagcctggaataggtggagaaccacttctggggcaaaagataaagcctaaatgtagcatatatcctaaaggagatggaagtgatgtaccatcatgggtagcctttgataaacaggtattatcttttgatgcctatttggaagaggaagtacttgataaaagccaaaccaactacagaataagatactataaaatctacttctaccctgaagatgacacaattcaagtaaatgaaccagaggtgaaaaatagtggattacttcaagggacttctatccggcgtcatcggattactcttccgcctcctgatgaggatcagttttatactgtgtatcattttaatgtcggcacagaggttgtcttctatggccggacattcaagatttatgactgtgatgcattcacaagaaactttttgaggaaaataggggtcaaagtgaatcccccagtgcaatgtccagaagatccttacatgaagattcggagagaggttgtagaacacgtagagcccttacgtccctacgaatccctcgacaccctgaaacagttcctccagtatcatggcaagattttgtgtttcttctgcctgtgggatgactcagtctcaatgtttggagaccgtagagaactcatcctgcattacttcttgtgtgatgatactattgaaatcaaagaattgcttccacacagctcaggccgagatgctctaaaaatgttcctccggaggagtaagctacccaagaattgcccacctagagtctatcaaccaggccagataacagatcgagcagttctcaattcatatggtgactttataaagaaccaagcggatggctacctgttcgatagatataagctaggaaaagtagaccaagagttttacaaagatagtgacctgtccctaggagtcaccatcaatgtgtggggaagaaaagtgctcctttatgactgtgatgaatttacgaagtcttattataagtctaaatatggaattgagaactttacctcagtttcatgcaagcctccttctcctcctccaaaaatagaaaggaaatttccaccttacaacggttttggttctgaagaggattctctccgtaactgcatagacctcaagcccacacctcatcggaggaacttcaagaagtttatggaaaaagacagctatggctccaaaagcaatatactccgttttttttgcaaaactagtcacagacaaatgtgttgacttggacaggatgtttgttatttcatattatctcggtgatgacaccatttcagtgtttgaacctatagagaggaattcaggaattgctggtgggatgttcttgaaaagaagtcgcgttaagaagcctggacaagaagtctttaaaagtgaactatctgaatatatcaaggccgaggagctgtacattggagtcacggtgaatgtgaatggttacctatttcgtttgctcaatgctgatgagtataccttaaactacatggagcagaatacagataagtatcctttcagtaacctcaaacttgccctacaaaagctgaagcaagaagaaggaaaatccagagagctcaagcaggtatttaaagctgctgactctaagcacacaaatatggtggattataatacattcagagacatattgatgtctttgactgttggaaaccttgcagagcaagaatttgtaaccattgcacgtcactaccgtgtgcctgagggcacatgttcagatatggatttcttaatcgcactggcccacgaaaagttcaagaaaaatatgtttgagaatttcgacactttcatttattcctgtgtgtatgaagatcgagaaaaaaaaaatgtattacccaccaaagacattaaaaggctgtgcaaatcctccagattacctttgagtgatgatcttctagaatccttattgtcaaggtttgaagacagtgaaaaacaaatagattataagtcatttttctctgccctgaactggagaaagaatccagtgcctgaattgcaaccagcatcataccttaaagagagatgtgaagatgtttggcttggtatgccatcacctattcctgcgaaatacattgactactggacctttttgaaggacgcgtttggcttagaggaggaataaccatgccagttttggtcaattctctatgatttacttctctcattttgccacatttactttagtagatataatttcattaaaaacaaaaaagaaacaaggtttatattaaatggaaatccataaaccacaattaatcctattttgtcatgttagttttacagaacatcatgttacattgccgacgtactgttactatttaaaatgccatcttaaaacatgttgaatatttttattatatgtatggtttattaataccaaaaaatcttctgataatttttgatccaacataatttgattcattactatatgaacagaaaatgacttttgaaggttatacatgacaatacaaaatcaaattatatcacagcaataagttgtgattctattaaacatttttgaaacctttttgacacgtttattacttacataattaagttttgtagcaacccacctcatcaaaataattcttaaacctctctagagtaaatatatttatcttttgaacttagtaaagctatgggaagaaaaagaacctccaacacacacacacacacacacacacacgcacgtgcacacacactggaaacatatgcagtatttatatttgtaatgcccttttttctatctaaagtcagcttgttagcctaggaatatatgcatgtgtgtataattatagtttgaccaaaactttattatgtctaaaatatttacaaatgtgaaagctgaagattttgagatttttgttttttttttggtttgttttacacacacatcccacgcgccccaccctagaggtttaaatattcagaaactacaacatttttcccctgcatttttctagttctatttttatttttcttcagcagaactcttgtcatgtagtgtacatttgattaaaacccatagccatgtacctctgggaattcagtgtaagaagtctatcccagtctatgccattgttcagtgttggatgctatgtatcataaatccatttgcctggtgttctgggagacaatggaggtctcaaaaaggagctgcaccatttacctttcagggactaccctgagaaaaagaagagctgatgacatctcaagggacccttcggactcattattctttcactccacatttgcagcagtgtcttgctggcttcttggcactcaaatgtaccaatttattctccac

SEQ ID NO: 345288 - DNA, 393 bp, Homo sapiens
caattcatattcccagcatcaatgactaagaaggctgggtcaaattagataggtgaaaggcaaatcctcttttcatttatcccttgatggtttgcattttctcttatgaagagaaatctcttgttggattatcagtttttagaagatcttttattttggtgaaattcactttctgcttgtcatatgtgatgcaatattttcttcttccttatctttggcataatttataactttttaacattacaaaattttgtatgtgatcaaacaagtcactcttttcattattggatctgggttttctgtgtggtctaaaaagtcctgctttgtcaaagttaggcaactaactattcaattagatttttttgtttgtttgtttgagacagagtctcactc

SEQ ID NO: 345289 - DNA, 81 bp, Homo sapiens
tttttttttttcttgcccagttgttctgactagaacctttagtactatcttgaatagggaagtggtgaaagtgggcgtcct

SEQ ID NO: 345290 - DNA, 403 bp, Homo sapiens
gttttgcattttcccttctgttttctgattagagtctctatggcttatgagtgcagagagaacctcaaaagatcatgtttgctgcggataagcaccaaactcgatgtttatcagcacttatctcctgcaaactcactctctggaggcttcaaaggctgagggagatctcttagccttgctctgaggagacaggcaggcactcctccccggggcttcagctgcaggtgtggcccaatagcacttgccccattcttaggaacgtggttctcttgctcttccccatgcaaaaaaaggaagcagcaggtttactgaaggtatggggatgagctgtggggtagagggagcaggagaagaaaacaagtattttaaaacaagcccggaaaggctgagaaagtaggtagag

SEQ ID NO: 345291 - DNA, 3663 bp, Homo sapiens
ataattgagggaaatagtgcttgtgggtttcctgtgtcgtgtgttttccccctttctttttggtgactcccttgtgttatttttttggctttgttgagttttcgtccagccgtacacaatatggagagtccccaatgccccttgttaagtgccggctaccctcttcgttaccttaacgtccgacagcctaccgtcagtttaattcataaagttactgtaactcttgacatcacctccgcagcccacccgaggactccttcccaggacaccttatgaggctgttttccgagggctgaattctgagacttaaaggaaggttacttgaggcatcctggtatatttccgggcttccaactccctcccctgcttggctggtaattttctgctgctcctcctcctcccccacttgacctcctccgaggtaccttcgcctcccctcccccgctcgtccccagtaaatctccagcgggtgggggaaatcaatcctttggcgctaaagctaaactcagagctgcccgttggacaggattgcagtggggtaaatggtgtccgtcctttcagaaagaatgatcaactacatggaggtaacttgctctgggtttcctgagatctcgggcggacccgtccgtgttttgccagattcagtgcaaatgtagatttcagctgaaccggtcaggacttgagagatagctgtttcactctccggactgcaaccacttccgcgagaatctgatacatttaatgaaagctttgccaaatgtacgggtcagcgcgtccttgggccaccaccacttgggtcagcacactgcactcactagcgccaacctgggctccacgcagcagaactcggttaaaaatcgtctgttcctggtcacttaggagttcagccactcgccaccggcggcagaaagtgagccccgcgcgcaacgcgggaggggacagaaggaagaggaagaggaggagagggaggccagagccagaacagcccggcagcccgagcttcgggggagaacggcctgagccccgagcaagttgcctcgggagccctaatcctctcccgctggctcgccgagcggtcagtggcgctcagcggcggcgaggctgaaatatgataatcagaacagctgcgccgcgcgccctgcagccaatgggcgcggcgctcgcctgacgtccccgcgcgctgcgtcagaccaatggcgatggagctgagttggagcagagaagtttgagtaagagataaggaagagaggtgcccgagccgcgccgagtctgccgccgccgcagcgcctccgctccgccaactccgccggcttaaattggactcctagatccgcgagggcgcggcgcagccgagcagcggctctttcagcattggcaaccccaggggccaatatttcccacttagccacagctccagcatcctctctgtgggctgttcaccaactgtacaaccaccatttcactgtggacattactccctcttacagatatgggagacatgggagatccaccaaaaaaaaaacgtctgatttccctatgtgttggttgcggcaatcagattcacgatcagtatattctgagggtttctccggatttggaatggcatgcggcatgtttgaaatgtgcggagtgtaatcagtatttggacgagagctgtacatgctttgttagggatgggaaaacctactgtaaaagagattatatcaggttgtacgggatcaaatgcgccaagtgcagcatcggcttcagcaagaacgacttcgtgatgcgtgcccgctccaaggtgtatcacatcgagtgtttccgctgtgtggcctgcagccgccagctcatccctggggacgaatttgcgcttcgggaggacggtctcttctgccgagcagaccacgatgtggtggagagggccagtctaggcgctggcgacccgctcagtcccctgcatccagcgcggccactgcaaatggcagcggagcccatctccgccaggcagccagccctgcggccccacgtccacaagcagccggagaagaccacccgcgtgcggactgtgctgaacgagaagcagctgcacaccttgcggacctgctacgccgcaaacccgcggccagatgcgctcatgaaggagcaactggtagagatgacgggcctcagtccccgtgtgatccgggtctggtttcaaaacaagcggtgcaaggacaagaagcgaagcatcatgatgaagcaactccagcagcagcagcccaatgacaaaactaatatccaggggatgacaggaactcccatggtggctgccagtccagagagacacgacggtggcttacaggctaacccagtggaagtacaaagttaccagccaccttggaaagtactgagcgacttcgccttgcagagtgacatagatcagcctgcttttcagcaactggtcaatttttcagaaggaggaccgggctctaattccactggcagtgaagtagcatcaatgtcctctcaacttccagatacacctaacagcatggtagccagtcctattgaggcatgaggaacattcattctgtattttttttccctgttggagaaagtgggaaattataatgtcgaactctgaaacaaaagtatttaacgacccagtcaatgaaaactgaatcaagaaatgaatgctccatgaaatgcacgaagtctgttttaatgacaaggtgatatggtagcaacactgtgaagacaatcatgggattttactagaattaaacaacaaacaaaacgcaaaacccagtatatgctattcaatgatcttagaagtactgaaaaaaaaagacgtttttaaaacgtagaggatttatattcaaggatctcaaagaaagcattttcatttcactgcacatctagagaaaaacaaaaatagaaaattttctagtccatcctaatctgaatggtgctgtttctatattggtcattgccttgccaaacaggagctccagcaaaagcgcaggaagagagactggcctccttggctgaaagagtcctttcaggaaggtggagctgcattggtttgatatgtttaaagttgactttaacaaggggttaattgaaatcctgggtctcttggcctgtcctgtagctggtttattttttactttgccccctccccactttttttgagatccatcctttatcaagaagtctgaagcgactataaaggtttttgaattcagatttaaaaaccaacttataaagcattgcaacaaggttacctctattttgccacaagcgtctcgggattgtgtttgacttgtgtctgtccaagaacttttcccccaaagatgtgtatagttattggttaaaatgactgttttctctctctatggaaataaaaaggaaaaaaaaaaaggaaactttttttgtttgctcttgcattgcaaaaattataaagtaatttattatttattgtcggaagacttgccacttttcatgtcatttgacattttttgtttgctgaagtgaaaaaaaaagataaaggttgtacggtggtctttgaattatatgtctaattctatgtgttttgtctttttcttaaatattatgtgaaatcaaagcgccatatgtagaattatatcttcaggactatttcactaataaacatttggcatagataaataaataaaaaca

SEQ ID NO: 345292 - DNA, 3756 bp, Homo sapiens
ataattgagggaaatagtgcttgtgggtttcctgtgtcgtgtgttttccccctttctttttggtgactcccttgtgttatttttttggctttgttgagttttcgtccagccgtacacaatatggagagtccccaatgccccttgttaagtgccggctaccctcttcgttaccttaacgtccgacagcctaccgtcagtttaattcataaagttactgtaactcttgacatcacctccgcagcccacccgaggactccttcccaggacaccttatgaggctgttttccgagggctgaattctgagacttaaaggaaggttacttgaggcatcctggtatatttccgggcttccaactccctcccctgcttggctggtaattttctgctgctcctcctcctcccccacttgacctcctccgaggtaccttcgcctcccctcccccgctcgtccccagtaaatctccagcgggtgggggaaatcaatcctttggcgctaaagctaaactcagagctgcccgttggacaggattgcagtggggtaaatggtgtccgtcctttcagaaagaatgatcaactacatggaggtaacttgctctgggtttcctgagatctcgggcggacccgtccgtgttttgccagattcagtgcaaatgtagatttcagctgaaccggtcaggacttgagagatagctgtttcactctccggactgcaaccacttccgcgagaatctgatacatttaatgaaagctttgccaaatgtacgggtcagcgcgtccttgggccaccaccacttgggtcagcacactgcactcactagcgccaacctgggctccacgcagcagaactcggttaaaaatcgtctgttcctggtcacttaggagttcagccactcgccaccggcggcagaaagtgagccccgcgcgcaacgcggccagccggactgcggggaccccaggagcgcagggcggaggagcagcgccacaggaggcgagggcgcaggcggcgcggccgggaaggaacgcgggaggggacagaaggaagaggaagaggaggagagggaggccagagccagaacagcccggcagcccgagcttcgggggagaacggcctgagccccgagcaagttgcctcgggagccctaatcctctcccgctggctcgccgagcggtcagtggcgctcagcggcggcgaggctgaaatatgataatcagaacagctgcgccgcgcgccctgcagccaatgggcgcggcgctcgcctgacgtccccgcgcgctgcgtcagaccaatggcgatggagctgagttggagcagagaagtttgagtaagagataaggaagagaggtgcccgagccgcgccgagtctgccgccgccgcagcgcctccgctccgccaactccgccggcttaaattggactcctagatccgcgagggcgcggcgcagccgagcagcggctctttcagcattggcaaccccaggggccaatatttcccacttagccacagctccagcatcctctctgtgggctgttcaccaactgtacaaccaccatttcactgtggacattactccctcttacagatatgggagacatgggagatccaccaaaaaaaaaacgtctgatttccctatgtgttggttgcggcaatcagattcacgatcagtatattctgagggtttctccggatttggaatggcatgcggcatgtttgaaatgtgcggagtgtaatcagtatttggacgagagctgtacatgctttgttagggatgggaaaacctactgtaaaagagattatatcaggttgtacgggatcaaatgcgccaagtgcagcatcggcttcagcaagaacgacttcgtgatgcgtgcccgctccaaggtgtatcacatcgagtgtttccgctgtgtggcctgcagccgccagctcatccctggggacgaatttgcgcttcgggaggacggtctcttctgccgagcagaccacgatgtggtggagagggccagtctaggcgctggcgacccgctcagtcccctgcatccagcgcggccactgcaaatggcagcggagcccatctccgccaggcagccagccctgcggccccacgtccacaagcagccggagaagaccacccgcgtgcggactgtgctgaacgagaagcagctgcacaccttgcggacctgctacgccgcaaacccgcggccagatgcgctcatgaaggagcaactggtagagatgacgggcctcagtccccgtgtgatccgggtctggtttcaaaacaagcggtgcaaggacaagaagcgaagcatcatgatgaagcaactccagcagcagcagcccaatgacaaaactaatatccaggggatgacaggaactcccatggtggctgccagtccagagagacacgacggtggcttacaggctaacccagtggaagtacaaagttaccagccaccttggaaagtactgagcgacttcgccttgcagagtgacatagatcagcctgcttttcagcaactggtcaatttttcagaaggaggaccgggctctaattccactggcagtgaagtagcatcaatgtcctctcaacttccagatacacctaacagcatggtagccagtcctattgaggcatgaggaacattcattctgtattttttttccctgttggagaaagtgggaaattataatgtcgaactctgaaacaaaagtatttaacgacccagtcaatgaaaactgaatcaagaaatgaatgctccatgaaatgcacgaagtctgttttaatgacaaggtgatatggtagcaacactgtgaagacaatcatgggattttactagaattaaacaacaaacaaaacgcaaaacccagtatatgctattcaatgatcttagaagtactgaaaaaaaaagacgtttttaaaacgtagaggatttatattcaaggatctcaaagaaagcattttcatttcactgcacatctagagaaaaacaaaaatagaaaattttctagtccatcctaatctgaatggtgctgtttctatattggtcattgccttgccaaacaggagctccagcaaaagcgcaggaagagagactggcctccttggctgaaagagtcctttcaggaaggtggagctgcattggtttgatatgtttaaagttgactttaacaaggggttaattgaaatcctgggtctcttggcctgtcctgtagctggtttattttttactttgccccctccccactttttttgagatccatcctttatcaagaagtctgaagcgactataaaggtttttgaattcagatttaaaaaccaacttataaagcattgcaacaaggttacctctattttgccacaagcgtctcgggattgtgtttgacttgtgtctgtccaagaacttttcccccaaagatgtgtatagttattggttaaaatgactgttttctctctctatggaaataaaaaggaaaaaaaaaaaggaaactttttttgtttgctcttgcattgcaaaaattataaagtaatttattatttattgtcggaagacttgccacttttcatgtcatttgacattttttgtttgctgaagtgaaaaaaaaagataaaggttgtacggtggtctttgaattatatgtctaattctatgtgttttgtctttttcttaaatattatgtgaaatcaaagcgccatatgtagaattatatcttcaggactatttcactaataaacatttggcatagataaataaataaaaaca

SEQ ID NO: 345293 - DNA, 219 bp, Homo sapiens
ggctgataccatctcgacaagtgtgcagagtgagatagacagcctgttttcagcaactggtcaatttttcagaaggaggaccgggctctaattccactggcagtgaagtagcatcaatgtcctctcaacttccagatacacggggcaaaaggtcagactggatttcaaacccaaataaactgccagtcccttctgggcaaagcagagccattctcccta

SEQ ID NO: 345294 - DNA, 2379 bp, Homo sapiens
ggtgtgtaaacgcaagattctagagaaggagagcccacttcaggagtatctttactgctatggaaatagtattttgctcaattgcacacaggcttgcatgtgcctaattctggatacacacatgtgtagaaggaactaatcatttttaccttctcttcactctctctcaactctgtgtgtgtgtgtgtgtgtgtgtgtgtgtgtgtgtgtaatcttgtagttgtaaaagcagaacagactggacagttagatttccacatctctccttggagaagcaggatgcctcctcctgttatgtggatcttttcctctctcttccattctttctgttcgtaggaatgccccagcttctgttattcctgaaagatggagaaggggccagggaagtgcagcctagatggaacctataaagattgtcccttggttgtacgggatcaaatgcgccaagtgcagcatcggcttcagcaagaacgacttcgtgatgcgtgcccgctccaaggtgtatcacatcgagtgtttccgctgtgtggcctgcagccgccagctcatccctggggacgaatttgcgcttcgggaggacggtctcttctgccgagcagaccacgatgtggtggagagggccagtctaggcgctggcgacccgctcagtcccctgcatccagcgcggccactgcaaatggcagcggagcccatctccgccaggcagccagccctgcggccccacgtccacaagcagccggagaagaccacccgcgtgcggactgtgctgaacgagaagcagctgcacaccttgcggacctgctacgccgcaaacccgcggccagatgcgctcatgaaggagcaactggtagagatgacgggcctcagtccccgtgtgatccgggtctggtttcaaaacaagcggtgcaaggacaagaagcgaagcatcatgatgaagcaactccagcagcagcagcccaatgacaaaactaatatccaggggatgacaggaactcccatggtggctgccagtccagagagacacgacggtggcttacaggctaacccagtggaagtacaaagttaccagccaccttggaaagtactgagcgacttcgccttgcagagtgacatagatcagcctgcttttcagcaactggtcaatttttcagaaggaggaccgggctctaattccactggcagtgaagtagcatcaatgtcctctcaacttccagatacacctaacagcatggtagccagtcctattgaggcatgaggaacattcattctgtattttttttccctgttggagaaagtgggaaattataatgtcgaactctgaaacaaaagtatttaacgacccagtcaatgaaaactgaatcaagaaatgaatgctccatgaaatgcacgaagtctgttttaatgacaaggtgatatggtagcaacactgtgaagacaatcatgggattttactagaattaaacaacaaacaaaacgcaaaacccagtatatgctattcaatgatcttagaagtactgaaaaaaaaagacgtttttaaaacgtagaggatttatattcaaggatctcaaagaaagcattttcatttcactgcacatctagagaaaaacaaaaatagaaaattttctagtccatcctaatctgaatggtgctgtttctatattggtcattgccttgccaaacaggagctccagcaaaagcgcaggaagagagactggcctccttggctgaaagagtcctttcaggaaggtggagctgcattggtttgatatgtttaaagttgactttaacaaggggttaattgaaatcctgggtctcttggcctgtcctgtagctggtttattttttactttgccccctccccactttttttgagatccatcctttatcaagaagtctgaagcgactataaaggtttttgaattcagatttaaaaaccaacttataaagcattgcaacaaggttacctctattttgccacaagcgtctcgggattgtgtttgacttgtgtctgtccaagaacttttcccccaaagatgtgtatagttattggttaaaatgactgttttctctctctatggaaataaaaaggaaaaaaaaaaaggaaactttttttgtttgctcttgcattgcaaaaattataaagtaatttattatttattgtcggaagacttgccacttttcatgtcatttgacattttttgtttgctgaagtgaaaaaaaaagataaaggttgtacggtggtctttgaattatatgtctaattctatgtgttttgtctttttcttaaatattatgtgaaatcaaagcgccatatgtagaattatatcttcaggactatttcactaataaacatttggcatagataaataaataaaaaca

SEQ ID NO: 345295 - DNA, 299 bp, Homo sapiens
ggatcagagacatgcaccaccaaacccagctattttttgtattttcagtagagatgaggtttcaccatactggccaggctgtgtcgaactcctgacctcaggtgatctgcccgcctcggcctcccagagtgctgggattacaggcgtgagccaccgtgcccggcctaccatcatcttttatgtgaactactctactctccaagctgggcctgctgcttccagtcttgcccccctacagtttattttctgccagcagccagaattgtcttctgaaacatctatcagctgctgcttcctag

SEQ ID NO: 345296 - DNA, 518 bp, Homo sapiens
  misc_feature (477)..(478): n is a, c, g, or t
  misc_feature (480)..(480): n is a, c, g, or t
  misc_feature (483)..(483): n is a, c, g, or t
  misc_feature (489)..(489): n is a, c, g, or t
  misc_feature (492)..(492): n is a, c, g, or t
  misc_feature (495)..(495): n is a, c, g, or t
  misc_feature (499)..(499): n is a, c, g, or t
cgccccgggtggcctccgcccggaagacggaagtgcaaagacttccggtcggcgtgagcgtgaggtgtgggtgttcgtttctcaggtaaaacatggctaaaagcttacggagtaagtggaaaagaaagatgcgtgctgaaaagagaaaaaagaatgccccaaaggaggccagcaggcttaaaagtattctcaaactagacggtgatgttttaatgaaagatgttcaagagatagcaactgtggtggtacccaaacccaaacattgccaagagaaaatgcaatgtgaggtaaaagatgaaaaagatgacatgaaaatggagactgatattaagagaaacaaaaagactcttctagaccagcatggacagtacccaatatggatgaaccaaaggcaaagaaaaaggctgaaggcaaagcgagagaaaagaaaaaaaaaaaaaaaaaaaattgtggggggggccggggccccggaaaagnntnttntaaganccnttncggngggggcgcgcgggggcccc

SEQ ID NO: 345297 - DNA, 1472 bp, Homo sapiens
ccacttggggcagtggaatccaaagaaacatggggaaaaaatttgaaaaccgcaatcaatcccatggggcatttccaaggttttaaaagtctacaggcaaacccttggccgcttcactgctttgcttggctttccccttttcttttctctcgctttgcatcagccttttcttttgccttgggttcatccaaaatgggtactgtcccatgcttggtctagaagagtcctttttgtttctcgttaaagacaagtctccattttcaagcatctgttttcatctttttacctcacagtgcattttctcttgggcaatgttggggtttgggataccaccacagttgctatctctttgaacatctttcattaaaacatcacccgtctagtttgagaatacttttaagcctgctggcctcctttggggcattcttttttctcttttcagcacgcatctttcttttccgcttactccgtaagcttttagccatgttttacctgagaaacgaacacccacacctcacgctcacgccgaccagcatggacagtacccaatatggatgaaccaaaggcaaagaaaaaggctgaaggcaaagcgagagaaaagaaaggggaaaagcaaagcaaaagcagtgaaagtggcaaagggtttggcctggtagactcttaaaaccttggaaaatgccacatgggatagatgacggattagaatgtatacacatgtatactttgatttcaactgccaccaaatgaaaaccatttgttttcctattttaacttggccttttttcttcaattcaaacccagcataactcctcaagtttgttttgggaacttgaataaaatattttctttgatacatccaagctctactgatactttaactggatgctacccaatatccagttataatcaggcctcaacgttctgtcaggtattaatatggttagaattgttcttacaactggtaattatagtcaatagagataaaacagatgatgtactgacaaatttttgtgaacttagattttaaagaaagttgttgtataatcatatcatttaaaaatactacattagggctgggcatggtggctcacacctgtaatcccagcactttgggaggccgaggcaggtggatcacgaggtcagttcgagactagcctggctaatacagtgaaaccccatctctactaaaaatacaaaattagccgggcatgggggcgcgcacctgtagttccagctactcgggaggctgaggcaggataattgcttgaacccaggagatggaggttgcagtgagccaagattgccccactgcactccaccctgggcaatggagtaggactctgtctcaaaaaaaaaaaaaataatggatcttataaagtacttgtgtggagctttgattccacagaataaaagatattggggtgttaaaaaaagagaaaaaagagaagagaagaatagaaaaagaaaaaaag

SEQ ID NO: 345298 - DNA, 1347 bp, Homo sapiens
cactgtgagccaccatgcccagcctcatcattcttattaactggtttaatcctttcaataatcctattaagtagaattattaggtaattagaattaggttaaaaagagctgaggtgtgggtgttcgtttctcaggtaaaacatggctaaaagcttacggagtaagtggaaaagaaagatgcgtgctgaaaagagaaaaaagaatgccccaaaggaggccagcaggcttaaaagtattctcaaactagacggtgatgttttaatgaaagatgttcaagagatagcaactgtggtggtacccaaacccaaacattgccaagagaaaatgcaatgtgaggtaaaagatgaaaaagatgacatgaaaatggagactgatattaagagaaacaaaaagactcttctagaccagcatggacagtacccaatatggatgaaccaaaggcaaagaaaaaggctgaaggcaaagcgagagaaaagaaaggggaaaagcaaagcaaaagcagtgaaagtggcaaagggtttggcctggtagactcttaaaaccttggaaaatgccacatgggatagatgacggattagaatgtatacacatgtatactttgatttcaactgccaccaaatgaaaaccatttgttttcctattttaacttggccttttttcttcaattcaaacccagcataactcctcaagtttgttttgggaacttgaataaaatattttctttgatacatccaagctctactgatactttaactggatgctacccaatatccagttataatcaggcctcaacgttctgtcaggtattaatatggttagaattgttcttacaactggtaattatagtcaatagagataaaacagatgatgtactgacaaatttttgtgaacttagattttaaagaaagttgttgtataatcatatcatttaaaaatactacattagggctgggcatggtggctcacacctgtaatcccagcactttgggaggccgaggcaggtggatcacgaggtcagttcgagactagcctggctaatacagtgaaaccccatctctactaaaaatacaaaattagccgggcatgggggcgcgcacctgtagttccagctactcgggaggctgaggcaggataattgcttgaacccaggagatggaggttgcagtgagccaagattgccccactgcactccaccctgggcaatggagtaggactctgtctcaaaaaaaaaaaaaataatggatcttataaagtacttgtgtggagctttgattccacagaataaaagatattggggtgttaaaaaaagagaaaaaagagaagagaagaatagaaaaagaaaaaaag

SEQ ID NO: 345299 - DNA, 1271 bp, Homo sapiens
cgccccgggtggcctccgcccggaagacggaagtgcaaagacttccggtcggcgtgagcgtgaggtgtgggtgttcgtttctcaggtaaaacatggctaaaagcttacggagtaagtggaaaagaaagatgcgtgctgaaaagagaaaaaagaatgccccaaaggaggccagcaggcttaaaagtattctcaaactagacggtgatgttttaatgaaagatgttcaagagatagcaactgtggtggtacccaaacccaaacattgccaagagaaaatgcaatgtgaggtaaaagatgaaaaagatgacatgaaaatggagactgatattaagagaaacaaaaagactcttctagaccagcatggacagtacccaatatggatgaaccaaaggcaaagaaaaaggctgaaggcaaagcgagagaaaagaaaggggaaaagcaaagcaaaagcagtgaaagtggcaaagggtttggcctggtagactcttaaaacctggattagaatgtatacacatgtatactttgatttcaactgccaccaaatgaaaaccatttgttttcctattttaacttggccttttttcttcaattcaaacccagcataactcctcaagtttgttttgggaacttgaataaaatattttctttgatacatccaagctctactgatactttaactggatgctacccaatatccagttataatcaggcctcaacgttctgtcaggtattaatatggttagaattgttcttacaactggtaattatagtcaatagagataaaacagatgatgtactgacaaatttttgtgaacttagattttaaagaaagttgttgtataatcatatcatttaaaaatactacattagggctgggcatggtggctcacacctgtaatcccagcactttgggaggccgaggcaggtggatcacgaggtcagttcgagactagcctggctaatacagtgaaaccccatctctactaaaaatacaaaattagccgggcatgggggcgcgcacctgtagttccagctactcgggaggctgaggcaggataattgcttgaacccaggagatggaggttgcagtgagccaagattgccccactgcactccaccctgggcaatggagtaggactctgtctcaaaaaaaaaaaaaataatggatcttataaagtacttgtgtggagctttgattccacagaataaaagatattggggtgttaaaaaaagagaaaaaagagaagagaagaatagaaaaagaaaaaaag

SEQ ID NO: 345300 - DNA, 714 bp, Homo sapiens
gacgtctacgaatccagctcgtaccccgttcttttattcccagcataactcctcaagtttgttttgggaacttgaataaaatattttctttgatacatccaagctctactgatactttaactggatgctacccaatatccagttataatcaggcctcaacgttctgtcaggtattaatatggttagaattgttcttacaactggtaattatagtcaatagagataaaacagatgatgtactgacaaatttttgtgaacttagattttaaagaaagttgttgtataatcatatcatttaaaaatactacattagggctgggcatggtggctcacacctgtaatcccagcactttgggaggccgaggcaggtggatcacgaggtcagttcgagactagcctggctaatacagtgaaaccccatctctactaaaaatacaaaattagccgggcatgggggcgcgcacctgtagttccagctactcgggaggctgaggcaggataattgcttgaacccaggagatggaggttgcagtgagccaagattgccccactgcactccaccctgggcaatggagtaggactctgtctcaaaaaaaaaaaaaataatggatcttataaagtacttgtgtggagctttgattccacagaataaaagatattggggtgttaaaaaaagagaaaaaagagaagagaagaatagaaaaagaaaaaaag

SEQ ID NO: 345301 - DNA, 1020 bp, Homo sapiens
cgccccgggtggcctccgcccggaagacggaagtgcaaagacttccggtcggcgtgagcgtgaggtgtgggtgttcgtttctcaggtaaaacatggctaaaagcttacggagtaagtggaaaagaaagatgcgtgctgaaaagagaaaaaagaatgccccaaaggaggccagcaggcttaaaagtattctcaaactagacggtgatgttttaatgaaagatgttcaagagatagcaactgtggtggtacccaaacccaaacattgccaagagaaaatgcaatgtgaggtaaaagatgaaaaagatgacatgaaaatggagactgatattaagagaaacaaaaagactcttctagaccagcatggacagtacccaatatggatgaaccaaaggcaaagaaaaaggctgaaggcaaagcgagagaaaagaaaggggaaaagcaaagcaaaagcagtgaaagtggcaaagggtttggcctggtagactcttaaaaccttggaaaatgccacatgggatagatgacggattagaatgtatacacatgtatactttgatttcaactgccaccaaatgaaaaccatttgttttcctattttaacttggccttttttcttcaattcaaacccagcataactcctcaagtttgttttgggaacttgaataaaatattttctttgatacatccaagctctactgatactttaactggatgctacccaatatccagttataatcaggcctcaacgttctgtcaggtattaatatggttagaattgttcttacaactggtaattatagtcaatagagataaaacagatgatgtactgacaaatttttgtgaacttagattttaaagaaagttgttgtataatcatatcatttaaaaatactacattagggctgggcatggtggctcacacctgtaatcccagcactttgggaggccgaggcaggtggatcacgaggtcagttcgagactagcctggctaatacagtgaaaccccatctctactaaaaatac

SEQ ID NO: 345302 - DNA, 1298 bp, Homo sapiens
cgccccgggtggcctccgcccggaagacggaagtgcaaagacttccggtcggcgtgagcgtgaggtgtgggtgttcgtttctcaggtaaaacatggctaaaagcttacggagtaagtggaaaagaaagatgcgtgctgaaaagagaaaaaagaatgccccaaaggaggccagcaggcttaaaagtattctcaaactagacggtgatgttttaatgaaagatgttcaagagatagcaactgtggtggtacccaaacccaaacattgccaagagaaaatgcaatgtgaggtaaaagatgaaaaagatgacatgaaaatggagactgatattaagagaaacaaaaagactcttctagaccagcatggacagtacccaatatggatgaaccaaaggcaaagaaaaaggctgaaggcaaagcgagagaaaagaaaggggaaaagcaaagcaaaagcagtgaaagtggcaaagggtttggcctggtagactcttaaaaccttggaaaatgccacatgggatagatgacggattagaatgtatacacatgtatactttgatttcaactgccaccaaatgaaaaccatttgttttcctattttaacttggccttttttcttcaattcaaacccagcataactcctcaagtttgttttgggaacttgaataaaatattttctttgatacatccaagctctactgatactttaactggatgctacccaatatccagttataatcaggcctcaacgttctgtcaggtattaatatggttagaattgttcttacaactggtaattatagtcaatagagataaaacagatgatgtactgacaaatttttgtgaacttagattttaaagaaagttgttgtataatcatatcatttaaaaatactacattagggctgggcatggtggctcacacctgtaatcccagcactttgggaggccgaggcaggtggatcacgaggtcagttcgagactagcctggctaatacagtgaaaccccatctctactaaaaatacaaaattagccgggcatgggggcgcgcacctgtagttccagctactcgggaggctgaggcaggataattgcttgaacccaggagatggaggttgcagtgagccaagattgccccactgcactccaccctgggcaatggagtaggactctgtctcaaaaaaaaaaaaaataatggatcttataaagtacttgtgtggagctttgattccacagaataaaagatattggggtgttaaaaaaagagaaaaaagagaagagaagaatagaaaaagaaaaaaag

SEQ ID NO: 345303 - DNA, 1354 bp, Homo sapiens
cgccccgggtggcctccgcccggaagacggaagtgcaaagacttccggtcggcgtgagcgtgaggtgtgggtgttcgtttctcaggtaaaacatggctaaaagcttacggagtaagtggaaaagaaagatgcgtgctgaaaagagaaaaaagaatgccccaaaggaggccagcaggcttaaaagtattctcaaactagacggtgatgttttaatgaaagatgttcaagagatagcaactgtggtggtacccaaacccaaacattgccaagagaaaatgcaatgtgaggtaaaagatgaaaaagatgacatgaaaatggagactgatattaagagaaacaaaaagactcttctagaccagcatggacagtaccccccccccccccaaaaaaaaaaatttttttaaaaattttttgggcggggggggaaaaaatatggatgaaccaaaggcaaagaaaaaggctgaaggcaaagcgagagaaaagaaaggggaaaagcaaagcaaaagcagtgaaagtggcaaagggtttggcctggtagactcttaaaaccttggaaaatgccacatgggatagatgacggattagaatgtatacacatgtatactttgatttcaactgccaccaaatgaaaaccatttgttttcctattttaacttggccttttttcttcaattcaaacccagcataactcctcaagtttgttttgggaacttgaataaaatattttctttgatacatccaagctctactgatactttaactggatgctacccaatatccagttataatcaggcctcaacgttctgtcaggtattaatatggttagaattgttcttacaactggtaattatagtcaatagagataaaacagatgatgtactgacaaatttttgtgaacttagattttaaagaaagttgttgtataatcatatcatttaaaaatactacattagggctgggcatggtggctcacacctgtaatcccagcactttgggaggccgaggcaggtggatcacgaggtcagttcgagactagcctggctaatacagtgaaaccccatctctactaaaaatacaaaattagccgggcatgggggcgcgcacctgtagttccagctactcgggaggctgaggcaggataattgcttgaacccaggagatggaggttgcagtgagccaagattgccccactgcactccaccctgggcaatggagtaggactctgtctcaaaaaaaaaaaaaataatggatcttataaagtacttgtgtggagctttgattccacagaataaaagatattggggtgttaaaaaaagagaaaaaagagaagagaagaatagaaaaagaaaaaaag

SEQ ID NO: 345304 - DNA, 391 bp, Homo sapiens
  misc_feature (350)..(351): n is a, c, g, or t
  misc_feature (353)..(353): n is a, c, g, or t
  misc_feature (356)..(356): n is a, c, g, or t
  misc_feature (362)..(362): n is a, c, g, or t
  misc_feature (365)..(365): n is a, c, g, or t
  misc_feature (368)..(368): n is a, c, g, or t
  misc_feature (372)..(372): n is a, c, g, or t
cgccccgggtggcctccgcccggaagacggaagtgcaaagacttccggtcggcgtgagcgtgaggtgtgggtgttcgtttctcaggtaaaacatggctaaaagcttacggagtaagtggaaaagaaagatgcgtgctgaaaagagaaaaaagaatgccccaaaggaggccagcaggcttaaaagtattctcaaactagacggtgatgttttaatgaaagatgttcaagagatagcaactgtggtggtacccaaacccaaacattgccaagagaaaatgcaatgtgaggtaaaagatgaaaaagaaaaaaaaaaaaaaaaattgtggggggggccggggccccggaaaagnntnttntaaganccnttncggngggggcgcgcgggggcccc

SEQ ID NO: 345305 - DNA, 738 bp, Homo sapiens
gctgaggcaggagaatcgcttgaacccgggaggtggaagttgcagtgagccgagattgcgccattgcgctccagcttgggcaacaagagcgaaactccgtctcaaaatacaaaaaaacaaaaaaaacccagcctcacggagcctacatggtggggcggggggataaacagaaaatctgcaaagcgtaaaccatgggagcaattgtatttatttttaggagattgcaacattatttaggtgatgaccagaaggaggccttagttttaaaggcctgaaggggcagcagggaacagcattgcaggcagagagaacagcagctgcaaagcccctgaggtcacctgccaaggtatcagaggaaggtcaggggaagtgagagatgagatggagatggacagggaagatggtacatggccagataaggattttgacttttgctcagagtgagcttagagtcggtgcagttctgagcagagggtaacaggatccagcttgttttaacagaatccctctggttgctggcttgaggacagacaagggtggagagacataaggaggttgtaataatccaggcgacgcctgtggcggcagtggggtggtgagtcacccactcttaggtgagttggctgaagccaacagaatgtgctgatataagctgtgagaaaatgaggagctgactttgacttcagaggttcaggctgaacttggggaaggacggaggtgctgtgggtggagacaggg

SEQ ID NO: 345306 - DNA, 1241 bp, Homo sapiens
aagatggctcccacattcttacagtgggagtcggtgcgaatatcttcatgtatggaaggctttcaggaattgtgactgagcaaaccaacagtaaggatggagtagctgtcatcactttaccactaggtggtagtatcaagcaaggagttaagtcaagatgggttcttcttagatctatagacttggtatcttctgttgatggtactccttcactgcctgtttctctctcttgggtaagagatgggatattggtggtaggaatggattgtgaaatgcatgtatatgcacagtggaagcatgctgtcaaatttggagacactgaagctgatagttctaatgcagaagaggcagcaatgcaagatcattcgacctttaaatctaatatgctggcaagaaaaagtgttgttgaaggaacagctatttctgatgacgttttttgttcaccaactgtaattcaagatggtggcttatttgaggctgcacatgtactttcccctactcttccacaatatcatccaactcagctgttagaattgatggatttagggaaagtgcgaagggctaaagccattctctctcatttagtaaaatgtattgcaggtgaagtagcaatagttagagatcctgatgctggagaaggaactaagcgacatctctctcgaactattagtgtaagtggcagtacagcaaaggaaacagtcaccgtaggaaaagatggtactcgagattatactgagatagattctatccctccactaccactatatgcattacttgctgcagatcaagatacatcctacagaatttcagaagaaagtacaaagataccacagagctatgaagatcagacagtaagtcaaccagaggatcagtattcagagctgtttcaaatccaggatataccaacggatgatattgatttagagcctgaaaagagagaaaacaaatcaaaagtaataaatctttctcaatatggaccagcttactttggccaagaacatgcaagggtactttcaagtcatcttatgcactcaagtctaccaggccttacccgtttggagcagatgttccttgtagctttggctgatacagtggctactactagtactgagcttgatgaaacagagataagagttgctcaggaagagatacattagatgagtgtggtttgagatacttgttagctatgcgcctacacacatgccttttgacatcgctgcctcctttataccgagtgcagc

SEQ ID NO: 345307 - DNA, 289 bp, Homo sapiens
tcgacaacttccagcttctccagaagtggcaaataactttccaactgggtatccacacagaaatatgtgagcatgcttacatggcatgtgctgccccacctccccctgtgaggagcttggttacagctacagcatttctacaacctctttaaaccaactttgtagtatccggcagcaaagtatcattccctgacattcgagtcattgagtctctgaagacttggaaaagggataataagccaaatcattcaggaaccagggggtcccagagaggtatgtaataaatttc

SEQ ID NO: 345308 - DNA, 351 bp, Homo sapiens
ccacatgttgtgggagggacctggtgggaagtaattgagtcatgggggcaggttgaaaagggtagtttctctgcagaagctctatctttgattgctgccatccatgtgagacatgacttgcttctccttgccttccaacgtgattcttaggcttcctcagctatgtggaagtgtaagtccattaaacctctttcttttgtaaattgctcagtctcagtcaggtatgtctttatcagcagtgtgaaaacagactaatacacctttgttccttttttctctcattatttatggttgcagtttggtggttttctttagtggtgatgtttgaatcctttcttctttgtgtgtctg

SEQ ID NO: 345309 - DNA, 324 bp, Homo sapiens
atacgtctcacaaggtctgatggttttgaaaagggtagtttctctgcagaagctctatctttgattgctgccatccatgtgagacatgacttgcttctccttgccttccaacgtgattcttaggcttcctcagctatgtggaagtgtaagtccattaaacctctttcttttgtaaattgctcagtctcagtcaggtatgtctttatcagcagtgtgaaaacagactaatacacctttgttccttttttctctcattatttatggttgcagtttggtggttttctttagtggtgatgtttgaatcctttcttctttgtgtgtctg

SEQ ID NO: 345310 - DNA, 596 bp, Homo sapiens
cgcctgttagatatttttttttctctttttcagagggtcatttcatatattgtgtgagccccacaaatgtctattttaaaaagagtatagtccctggccaggtgcagtagctcacacctgtaatcccagcactttgggaggcagaggcaggaggatcacttgagccccggagtttgagatcagcctggttaacatagcatgaccctacctctaccaaaaatttaaaaactagctgggtatggtggcgtgcacctttagtcccagctacacaggaggccgaggtgggaggattgcttgagcctggaaggtcaaggctgcagtgagccatcatcatgcaaatcaatttaaagaaaaacaataaaagtgttatgttgatatggcaaaaatgaaaagatgatcaagattgaagcttgtgaaatgctgcattaagtaacccttttatatcttctcttttctgcatgggatcggagaaatggaaggattttcattttacaggaaagggagctgagatctagacaagtgacttgcccagagctgtctgcattgtctctggctgtcgggactctaagtaggactcattgctcccaggcaggtgc

SEQ ID NO: 345311 - DNA, 242 bp, Homo sapiens
cgcctgccaccatgctcggctaatttttgtatttctagtagagatggggtttcaccatgttggccaggctagtctcaaactcctgacctcaggtgatctgcccacctcagcctcccaaagtgctgggattatataatcttaaattctagtcatcactttttaaaactcacaatatagaatcttccagtttttctactttctactttttttttttgagacggaatctcgctctttcacccagg

SEQ ID NO: 345312 - DNA, 471 bp, Homo sapiens
aagtcaacaggaaggtggatatccaaatctctctcttcgcaatgagtttccagttagatggaggagagagtaataaaacacagagctgagattcctgacttcacagatccctgaggagatgtttactaaagggaatcttctggtcactgttaccttcctccgtacttacctgcctcatggataacactgaagaatgcagtttacttacatctttttctgtttgacagaagacagttattagaacccgaaaggaagaagctatacgactggggacacatgtcttagaagcacactcattagataaagtgtcgcatactctttgataagtgactcagaacacccgtgtccttcccaacattggatgcaatgctaaagacatgatgttgctcctgctggaccacaccttgaaggaattgcctaccccacctcacctccaaaattaaagtctttcgttttgacaaaagttaaaaa

SEQ ID NO: 345313 - DNA, 412 bp, Homo sapiens
aagtcaacaggaaggtggatatccaaatctctctcttcgcaatgagtttccagttagatggaggagagagtaataaaacacagagctgagattcctgacttcacagatccctgaggagatgtttactaaagggaatcttctggtcactgttaccttcctccgtacttacctgcctcatggagaacccgaaaggaagaagctatacgactggggacacatgtcttagaagcacactcattagataaagtgtcgcatactctttgataagtgactcagaacacccgtgtccttcccaacattggatgcaatgctaaagacatgatgttgctcctgctggaccacaccttgaaggaattgcctaccccacctcacctccaaaattaaagtctttcgttttgacaaaagttaaaaa

SEQ ID NO: 345314 - DNA, 674 bp, Homo sapiens
gagtacaggcttggtccacagagacaacaatactttcaatactctttgttctgccccagaggagctcaacacagaatgcctagaacaagaaactggtgagagaagctgcagcctgttgagactccacaagactgaagatatgaaaagaggaaatatgcatgaatgcccgcacggagaaccacccccacctgctgctcccgctctaatgatcacgcccattatcaactgggggatggctctgtgccttgtccttgcattacatggaccaagaacacttcacaggactcagagaggaacccgaaaggaagaagctatacgactggggacacatgtcttagaagcacactcattagataaagtgtcgcatactctttgataaggatcttgctctgtcatgcaggttgaagtgtgtggtgcgaccgtgactcagtgcagcctccacctactgggatcaagtgatcttcccatcaggcctttcaagtagctgggactgcagtgcacaccactatgcccagctaattatttactgattttttttttttgtagagatagtctcactatgttgcccaggctggtcttgaactcctgggatcaagcgatcttcccaccttggcctcccaaagtgctgggattacaggtgtgagtcactgcaaccagtctgggtatgatattac

SEQ ID NO: 345315 - DNA, 389 bp, Homo sapiens
ctcttgccagtgttacagacagtttaaaatctcttagggcatcatgaactacacaaaaagtgcctgaggagtggccaaaagtgagaagatagctaccaattggtggggcaccatcaaggcaaggagaagagtgactagtggcactgagaaacctcgctgagaaagctgatcagagagaaggtcccaagaggctggaagatcctctcatctcaggctgacattgggactccccttggattatctttgtatcaggagggcctcagaaggtttctctgaatgtagatgcctttctaccttgcaaggctggcaggtggttacaaagggcacaggctttccaagtgctcaaagagaggacaaaaacttctggaaaagcacttggtgcagccgta

SEQ ID NO: 345316 - DNA, 1023 bp, Homo sapiens
ctcggaagtagcatcttctctccacaggccaggcacttagaagatgctggcaacgttttatcccttgaacagggtggcagttatatgattttctgtttctttaataattccttaagcttatttttatcttttatgcacagtttgtaagatgacggttcaaatctagtgtttgaagaactgtatgaaacaggtttggaagggaacagacggcccacgtcacagggagagataggcgggttcccagactagctgacagttagggccatgtgcctccctgagataccagagtggcccacgttgctggccgtgccaaatgctatcctacagcatcggcacctgctgggggaagcaggggggaaatgcctcaagtatttctattggttaaaacctcggtgtgagaacactgcttttggccactcaaggaagacagttcatcaaacaccagggagtgggacttctggagcaaagataaaagaattcatggctgcactacaccgattctgaaaaggaggaacaaacgccccgtttggaacagaatctggcccatcccatggagagggccactgtgcctgacagatttgttggggtgaatctgggtgcccagggatcaatatggcaactctacactcttgctggcgagggaactggaggccagcaccaaggagacccaaacaggcctcccagccaggcacagcccagggcaccctgggttagcctgatcccgccctggtgcctgggtccttcacgcggctctcctgtagactttctattaagaaatgcctgtggtagagtcaggcgggtgagaagtctacactccttggcagtaccttgaaaggaaaaatcgtcacagataaaaaaaataaacaggtgagaaatatcaacgcagcagcagcagtgttgaaagggacacagcttgaggggtggatctgggggtgaaattcaggttaagacggagtgcagggtgctagaagctgccacgcaggttgatgagccacgtgctatgaaagccaggagccactgacc

SEQ ID NO: 345317 - DNA, 864 bp, Homo sapiens
ctcaattcccctttcttttatgttggttttactgtgagactggttagggttggcaaagatgaccccagagcaggggttggcatgtttttctgtagagggccacatagtaaatatctgagggctttgcgggccatatggtgtctgtctggcacaacaatgtgactcagctctgctgttgtagtacaaaagcagcaggacatgatatgtaaatgaatgggtatggctgtgtgccataaaactttattcattgacactgagatttgaatttcttgtaatttttgtgtctcacaaaatagtcttctttcttttttttttaatgtaaaaaccagccgggtatggagactcatgcctgtaatctcaacactttgagaggcttaggcgggaggatcacttgaagccaggagttcaagacccacctggggaacatagcaaaaccccatctttatattttaaaaaaaagtaaaaactattagctcataggccatccaaaaacaggtggaagaggctgctggatttggcctgtgggcactgagcttactgagcttacatcttcccagctcagtaagcctggcagaaggtatctctttcccagtagttgggggaaaagtcccagggtggactctcattggacagacttgggtcacatgccccttcttgagccaatcagaggcagaggggcttggtgctttcaggggattggtcagtggtagacacagcctgatgagggtagggaagagggagaaaccaaaaggaaaagccacactgttgccgaagttggaggcagcaagcgccgggtgggtggaagtcacaaaaatccactgctgaggtggcagtagggatgggatgttagctgtgccataaaag

SEQ ID NO: 345318 - DNA, 375 bp, Homo sapiens
agcacaagcatgtagatgtgttgttgctttgcctctcagaggtaaacctatatgacgttttcaaaaagtggataattgaaaaagtgaatgaactgatgaagaatgaaagtaaagaaaagaaaggaggtaataatgctggaagtgaaattgaagtcaaagtaaatggagttatggaagaaacagctaaccgtgggaatgctaacactgccatggtgcaatagactccagatatgaagccagaggagtctagtgaagctgaattttttgacataaatgaggagagtggttgtgagaaaaagaatgaagatattccagagggagtgacactgtcaccttcctcttggagacatttcataatgttgggtgcgctttgtg

SEQ ID NO: 345319 - DNA, 212 bp, Homo sapiens
aattacggtttcttcaatcaaattcagacattagaattgaccttgaaaattggtctacttggtgggcaataattatcctatctctttctctctcacacacacacacacacacacacaatttgttaagtgaacagaacaaatgaacaaagaagtaggcagaaatagtagtatataaattgaggtaaatgaactacaatatcatctttcacaaa

SEQ ID NO: 345320 - DNA, 1013 bp, Homo sapiens
actgtattttcatcatcagttatccctagtgattcaaatttagcacaaacctgctgtgagtacatattaattaggtgaatacagtagaatgcaatcataacatgagtcttttaataactattctttgtttgatttttattttagaagtttgaagttattttgttgaaaatctagaaaatctttatgtgagcaactgaggttcgggtagcccacaacagtttaaatcaaacattaacttgcagtaaaacactactgaaagtgtctttgattttgaggtgcagagagctgtttcaagttaagttgctatattagtctgttctcatgctgctaataaagacatacctgcaaccgggcaatttattaaaaaaaaaaagaggtttaattgactgacagttccacatggctggggaggcctcaccgtcatggtgaaagagcaagggatgtcttacatggtggcaggcaagaagtttgtgcagaggaactcctgtttataaaaccaccagatctcatgagacttactcactaccaggagaacaggatgcgggaaaccacctcggtgattcagttatctgcacctggccccacccttgacacatgttgattattacaattcaaggtgagatttgggtaggtacacagccaaaccatatcagctgcccattctcctgtgcagtgacataaaggtctgataacctgatttaaagcttggactctaagatttttttttttctttttttgagtcaggttatctctgtcgctcaagctggagttcagtggcatgaacagggctcattgcagcctcaaccttccaggttcaagtgattctcttgcctcaacctcctgagtatctggggctacaggcatgtgccaccgtgccaggctaatatttttatttttatttttgtaaagatggggtctcacttctgggctcaagcaatctttcctcagcctcccaaagtgctgggattataggtgcgagccactgcaccctgctgtaaagaatttcatatccc

SEQ ID NO: 345321 - DNA, 434 bp, Homo sapiens
ggggagtttgaggggtagttactacttaaaattgccaattgtgataagcacctcatatgtattatttaaactgtgaaaattctgtgaaatggaggctataattaatggctgttttgcaagttaagaaactaaagcccagctgcaggttaaataattcacccaaggttacaaattaataaatagtggagccagatactcaacccaggcagtctgactctggaactgtgtgttcttttccatatctatattcaatcaagtctattctttcaacaaatatttatagcctattatgtgccaaactttcctttaagcattgggaatacaatggtaaattaaaccatcaagttgcttgatctcatgaaaaattacttgtgagacagttgcagtaagtttttctccaggatgaaaaaatagcctctttgtacagagtttgt

SEQ ID NO: 345322 - DNA, 564 bp, Homo sapiens
aagtcagaggttctctcccttagtgttttctgccaccactgctataatcctgactgctggacattggttgaaaatggcgcattgccactagagtgttctcgtgaagctgcttgagcctatatggagagaggtgggcataaaagcaggttgtagaggggtcaggtaaatacttaagataaaaatattttaaaagtttgaactggccgaaatcgcaccactgcactccagcccgggcgacggcgagactccgtctcaaaaaaaaaaaagtttgaactgctatctataccccataaaatgcaaatttttagtagcttgtgtttgtgcaaattgaatatttgtagctgtaagccattagcactacagtaattacttaaatactaatttttgttcaaaatgcaacagtaattgtagacattaattacagaatctgggtggtacgcaggtgtttgaggtaaaatttattcagttattctgtatgtttaaaaagttttataataaaatactggaagagatctaactgcctatgactttattcagaagtacaatataatttaatatagctgt

SEQ ID NO: 345323 - DNA, 435 bp, Homo sapiens
ctctcttttcgccacactcctttcacaagacctgatcataagacctgtggcatcctataccagcagaacgtttacagtatctaccataataatgataataataataataattgcttacatcagttgacccaattattttatatttggtgctgttctaagcactttatatggattactttcatttaatcctcttggtagtcccatttgcagatgaggaaactgaggcatagagaggttagataatttgctccaggcacatgagcactcagtagcagggcaaggcccctgacccagtctgactctagagccggtgcttgcaattaccataatgcctgggtttacctgactgcctgtcttgtactcccctatttgcatctgataattgtgaattcattccagaggaataccaagaaccctagttaatttgttagccaa

SEQ ID NO: 345324 - DNA, 385 bp, Homo sapiens
cataacagcagtgagcagggtgacttaaggtaaagagggataaaggtgacactattggtaaatacaagtttgttacaaagaaacatgactctagggacatactgaactatgaatagttgctccacctacttccccagaattcttctatgcagagccctgatccacaaattattttagtgattgcttacatctttgtctgtagtagggaacactgagtgagactaacctagcagaagggggcactgagatgaatgcacacacgtgtgaagctcctgctgatacacttccaaagacatgctatgttagcattcgatgcaattgcaaaaaattaaatccattaaagtggccagctgcttctcctctccatggaaggaggaaaacatct

SEQ ID NO: 345325 - DNA, 670 bp, Homo sapiens
tcttacactcctacaaagacaaagaaaatcctgggagggattttaagacacgtgctcatttcagcactctgtcctcctggtgacatctctctatgaagcatctgggacttcacctgacaagcacctgacaacctgactgagcactcggcccttactgtatgtgcctcagtttctacgtgcatcatgtgagaaaggcagattgtatccatggctatgagactgttgggctttgttggacaatgaagacgtcccccaaatatgtaaagactgacaaacgacggccaccctttatatttttcaaagtgaaggcattgaaggaaagatgcaatcgtagaccgccatggtcagtgaattattttatgagagatcacccttctagaaagtgcagccaggtgcagtggctcatgcctgtaatcccagcactttgggaggtcgaggctggtggatcacttgaggtcaggagatacagaccggcttggcaaacacggtaaaaccctgtctctactaaaaaatacaaaaattagccaggcttggtggcaggcacctgtaatcccagctactcgggaggctgaggcaggaggatcgcttgaacccaggaggcggaggttgcagtgagctgagatcgtgccattgtactccagcctgggcaacagagcgagactctgtctca

SEQ ID NO: 345326 - DNA, 593 bp, Homo sapiens
tttgtctttttagtagagacggggtttcaccatgttggccaggctggtctcaaactcctgacctcaggtgatccacttgcctcaacctcccaaaatgctgggattacaggcataagccacggcacccaggctggacatctattctttaaagaactctgtgttaccaaattcagttctgcaatctgtcccaagaacttccttttctgtgccctaagttacgatagaggaagaggcacatcaaacccaggcctgcctgcctttctttctttccttcttttctttcctccttttctttctttttctttccctctttctttctttctttttctttctttctttctttctctctctctctttctttctttctttctctctctctttctttctcttccttccttcctttctttctctctctctctctttctttcttttcttctttctttcttccttctttctttttgtcttgctctgtcacccaggctggagtgcagtggcacgatcttggctcattacaaccaccacctcctgggtttacgcaattctcctgcttcagcctcctgcatagctcagattgcaagggcacaccaccacac

SEQ ID NO: 345327 - DNA, 592 bp, Homo sapiens
ttgaggtttgtaagtttattcttatcactgactagggtacccaaattcttgcatttgtctccttatacacatctaacatatcaccaaagacaaataaagatacactctggcccaatctttgcttaaaaattccaaagcactaggagcactttaagtttggtctcgaaaggagttgtttataaaatcaaagggctaccgattccctgttcatcctgcactgaagcacatgatgacagtatcaaaccttcatttttgttcattaaaaagtgaatttcattacttaagtgtgtaattctatagtgattagcagtatttgttttcatcatttcacttgggtggccattaattttgaaacctttaccactcattgtagttggttgtagttttatggaaaatgtaatttatagctaaagtggcttttttatgcatagctgccttttttattgtttaacagtgtttctcagctatataatcagtttcaaactggttgtaaaagtatagctgtggccaatgaatgtatttatttgttgtttcactaaattgtaacaaaacactactattaaaaataaaagtgtttgtgcttttatttaga

SEQ ID NO: 345328 - DNA, 302 bp, Homo sapiens
aaagaacctaaaaaggaggacataccacatagaatcggtaaagcagctaagcagaggctttggaggccaaggaccaaagtatttctttcaagaaaccaaagcagcagccaatttaagtctaaatttaagtctaaatatcctaggtttttaactctaaatatcttcattttacagataagtaaacaggagctcagagagtttaaataagttgttcaagttcactcatctatttagtggcagagccaggaacttactcaagttttccatacacttccaatcccaacattcagagactcagaagt

SEQ ID NO: 345329 - DNA, 537 bp, Homo sapiens
taagaaggggtcttgcccaggctgctggagtggtgcagtggctattcacaggtgtgatcctcatgtactgcagccttgaactcctggcccccggtaatcttcccacctcagcttcacgatcagctgggactataggttcacaccaccatgccctactacagcaactattttagatgtctataaatagatttacagaaaagttgcaaagagaatagacagaatactcctatctataccttctacaacaggggaaactgtttctgctgttgttaatatcttacattagtatgatatatttgtcacagtcaatcaaccaatattgatatttttaaaaaactaatgtccatattctattcatatttccttagttttgacctagtgtcctttccttgttccaggatcccatttaggataccacattgcatttactcatcatgccttcttacgttcccctataccacgagttttctcagactttccttgtttttgaaaaccttgactgttttaaggaatcctgctcaggtattttgcaaaata

SEQ ID NO: 345330 - DNA, 397 bp, Homo sapiens
gtgcaacaatttgagataccatgctaaatcctatctgaaaggcttgaaccccttttgctgctgccacaaatgtctgagaatgcccttgtcaccaaaccaacatggcacttaatatttcactgttttaaatgttggagaatattgttgtccatttctggtggaaccatagtctggcgacagaatggcttgcctgacacagcttttgatcaccagccccaagtccttctccctccccttccccttatcctttggtgctgatccagcccagtttataggttctgttacatctaacttcccaactgtctctagtctggtcacttctccccatctgcccagcaaagatgaggtcgatttgacttgtaaaagattaccttttctaaacagtttaaaaaaaaaa

SEQ ID NO: 345331 - DNA, 626 bp, Homo sapiens
ggccgtatgagcagtgtggagctcttaccttgctatagaatttctctcattctggaaagtaagttttcaatttaactgcttttccctgaaatcttctgaaccaccccagtgatgatatgaatgtagctccctctggtgttgacaaggacttgctatatcagtaatacccttattaattcaagcccaatcacttttagagctggacctagctaggttcttggagaccatttagtccaattccccactttaatctctgacatgaaatctactaaggtaaagtgacttgccagaggtaccgctagttagtagcagaatctgaatcagaaaagaaagactcaaaactcacaaattgagcattattttctgctgcctcccgtaaagatgcccagtgtttaggtagagaccattagatatttgaagttgggcatatctgcctgatctgggataatggccaattaaagcttgtttcattaatggtggggcagtgagtgtgccaattagtctaacagaaatacttattgactatataccatctgccagactatgtgccttaaagatgaaacagtcattatgatacaatccctgccttctaggagcttccagtccgtgaggggtacagatagtta

SEQ ID NO: 345332 - DNA, 178 bp, Homo sapiens
atttaatttgtcaaaaaagttctgaaattttcaaagcaaaagcaattttaatttaattgctctaaaaaataagcagatttatcatttagcaattctttaagggagagtgtatcataaaactgaaatagtactgaatgtggcagaatcaaacaagttgaaaatctcatcacttcagagc

SEQ ID NO: 345333 - DNA, 373 bp, Homo sapiens
ttgcagtgagccgagactgcaccattgcactccagcctgggtgacagagcaagactcccgtctcaaaaaaaaaaaaagcattgtattatttttctgccctcatacatttgtgaaagggagggcaagctggtaaaagcctaatacatgttggtatttcggggtggggagagtacttcatttacaaagccagtatagtaaaatgagccccacaaaaggaaataaaatctatttggaaactatgaaaaaataacctgctaaatctcattctctgctcctctacaaattcactctaagtaatgttttcagagtttcacaggtcaaagatgttgggggtaaggtgagacctaaatcttgctccctttttaaaaaaaaa

SEQ ID NO: 345334 - DNA, 234 bp, Homo sapiens
actagtcagcaggttttgtgtttttttttcacctaccattttcagctctatgtgtgcaggtgaagagtcgaatttaaccaagattgtgatttagggtattttagctgggtgagaaggaaaataaaaacaccaagagctgagggacagtggaaatatgatagaatcaagagataatgaaaggtttgaagaatggaggaatcagagttgttggattgttgtgtagtagggggtgaa

SEQ ID NO: 345335 - DNA, 493 bp, Homo sapiens
gatgtaacattttaaaacctatgttactagtctcatttgccaaatgaaacttaattttatgaacttggattcttaaaatattactgaattggctagcagtttctattaaaagaatttttatgtttaagtctagcaggttcaaaatattagaggtttgatgttctgtgattttaggaggattcaacttataaaagcacttgtttatcaaacaatcagaacaagttcttttaatttaaaaggtatcgtaatccaatttattgacaccctctggaaataggaaagcattccacacacagcaagaggtgaaggcttttctggattataaacacatagacacacacagcttaatagctttagtttttcaacttcagccacagatcaagaataaatagaaacacaaaaaaatcaccagtccagatatcaaagagctgttctccttcccagtagaaacaaaattcttcattgatttgagctcaaaatagacgaacataca

SEQ ID NO: 345336 - DNA, 387 bp, Homo sapiens
gatcgcatgggcaagggaatctggaaatctctgttgtgccctgatggtacaggcagtggagtgggcaattctgcgaaccatgcaggaaaggtttctgatcctatattcattccaagcagggtctagcccaaaccaggaccccagaatcccttcccatttagatccttcactagagttaagcctaccaggtaaatcacatccttaggagtatccacagctatcatctttataatctgaggggctatcaccagcatagtcatcaattattggtagagctcttttggccctgggatgtagactctacattccctgagttagagacttaataacagtgacaggagcaatggcttgacccagaaagcaaatgcctgtgttttctcaggaccc

SEQ ID NO: 345337 - DNA, 4466 bp, Homo sapiens
gtctgcgtaaccgcacgggaaacccgccaccacctccacctccctgccatcctcgacaagatgcctgcccccggcgccctcatcctccttgcggccgtctccgcctccggctgcctggcgtccccggcccaccccgatggattcgccctgggccgggctcctctggctcctccctacgctgtggtcctcatttcctgctccggcctgctggccttcatcttcctcctcctcacctgtctgtgctgcaaacggggcgatgtcggcttcaaggaatttgagaaccctgaaggggaggactgctccggggagtacactccccctgcggaggagacctcctcctcacagtcgctgcctgatgtctacattctcccgctggctgaggtctccctgccaatgcctgccccgcagccttcacactcagacatgaccacccccctgggccttagccggcagcacctgagctacctgcaggagattgggagtggctggtttgggaaggtgatcctgggagagattttctccgactacacccccgcccaggtggtggtgaaggagctccgagccagcgcggggcccctggagcaacgcaagttcatctcggaagcacagccgtacaggagcctgcagcaccccaatgtcctccagtgcctgggtctgtgcgtggagacgctgccgtttctgctgattatggagttctgtcaactgggggacctgaagcgttacctccgagcccagcggccccccgagggcctgtcccctgagctaccccctcgagacctgcggacgctgcagaggatgggcctggagatcgcccgcgggctggcgcacctgcattcccacaactacgtgcacagcgacctggccctgcgcaactgcctgctgacctctgacctgaccgtgcgcatcggagactacgggctggcccacagcaactacaaggaggactactacctgaccccagagcgcctgtggatcccactgcgctgggcggcgcccgagctcctcggggagctccacgggaccttcatggtggtggaccagagccgcgagagcaacatctggtccctgggggtgaccctgtgggagctgtttgagtttggggcccagccctaccgccacctgtcagacgaggaggtcctcgccttcgtggtccgccagcagcatgtgaagctggcccggccgaggctcaagctgccttacgcggactactggtatgacattcttcagtcctgctggcggccacctgcccagcgcccttcagcctctgatctccaattgcagctcacctacttgctctccgagcggcctccccggcccccaccgccgccacccccaccccgagacggtcccttcccctggccctggccccctgcacacagtgcgccccgcccggggaccctctcctcaccgttccccctactggatggcttccctggagccgaccccgacgatgtgctcacggtcaccgagagtagccgcggcctcaacctcgagtgcctgtgggagaaggcccggcgtggggccggccggggtgggggggcacctgcctggcagccggcgtcggcccccccggccccccacgccaacccctccaaccctttctacgaggcgctgtccacgcccagcgtgctgcctgtcatcagcgcccgcagcccctccgtgagcagcgagtactacatccgcttggaggagcacggctcccctcctgagcccctcttccccaacgactgggaccccctggacccaggagtgcccgcccctcaggccccccaggccccctccgaggtcccccagctggtgtccgagacctgggcctcccccctcttccctgcgccccggcccttcccagcccagtcctcagcgtcaggcagcttcctgctgagcggctgggaccccgagggccggggcgccggggagaccctggcgggagaccctgccgaggtcttgggggagcgggggaccgccccgtgggtggaagaagaagaggaggaggaggagggcagctccccaggggaagacagcagcagccttggaggtggcccaagccgccggggtcccctaccctgtcccctgtgcagccgcgagggggcctgctcctgcctgccactggagcggggggacgccgtagcaggctggggaggccaccctgctcttggctgcccccacccccccgaggacgactcctcgctgcgggcagagcggggctccctggccgacttgcccatggcccccccgcctcggccccccccgagtttctggaccccctcatgggggcggcggcgccccagtaccccgggcgggggccacctcccgctcccccccccccgccgccacctcctcgggcccccgcggacccggccgcgtcccccgaccccccttcggccgtggccagtcccggttcaggcctctcgtcgccgggccccaagccgggggacagcggctacgagaccgagacccctttttccccagagggagccttcccaggtgggggggcggccgaggaggaaggggtccctcggccgcgggctccccccgagccacccgacccaggagcgccccggccacctccagacccgggtccgctcccactcccggggccccgggagaagccgaccttcgtggttcaagtgagcacggaacagctgctgatgtccctgcgggaggatgtgacaaggaacctcctgggggagaagggggcgacagcccgggagacaggacccaggaaggcggggagaggccccgggaacagagagaaagtcccgggcctgaacagggacccgacagtcctgggcaacgggaaacaagccccaagcctgagcctcccagtgaacggggtgacagtgctggagaacggggaccagagagccccaggcatcgaggagaaggcggcggagaatggggccctggggtcccccgagagagaagagaaagtgctggagaatggggagctgacacccccaaggagggaggagaaagcgctggagaatggggagctgaggtccccagaggccggggagaaggtgctggtgaatgggggcctgacacccccaaagagcgaggacaaggtgtcagagaatgggggcctgagattccccaggaacacggagaggccaccagagactgggccttggagagccccagggccctgggagaagacgcccgagagttggggtccagcccccacgatcggggagccagccccagagacctctctggagagagcccctgcacccagcgcagtggtctcctcccggaacggcggggagacagcccctggcccccttggcccagcccccaagaacgggacgctggaacccgggaccgagaggagagcccccgagactgggggggcgccgagagccccaggggctgggaggctggacctcgggagtgggggccgagccccagtgggcacggggacggcccccggcggcggccccggaagcggcgtggacgcaaaggccggatgggtagacaacacgaggccgcagccaccgccgccaccgctgccaccgccaccggaggcacagccgaggaggctggagccagcgcccccgagagccaggccggaggtggcccccgagggagagcccggggccccagacagcagggccggcggagacacggcactcagcggagacggggacccccccaagcccgagaggaagggccccgagatgccacgactattcttggacttgggaccccctcaggggaacagcgagcagatcaaaggtgaggaggctgcggggcacagtcagggccgaggtccggctgtttccgaggcgtgcggagggtgagtgtgggtaaacatgtcgggtcgggctggcagtgatgaatgcaggtcctgaagcctgcaccacctgggctcacatcgcggctcagccccctctctagctctttggccttgggcaaatgtccttgctgcacggtgcctcagtttacccatctgccaaaaacggatggcagggatagaacctacgtcatagggttgctgtgaaggttaaatgaattaggacatccaaggcacttaatcagagcaagggattcagtaagcacctgcttttattattgcaactcacttagaccaggggtctcaaactcatgcccacaggggccagacgacatagggaaacggatgaagcatgctagggaggcagagtggggcttcagaagaaaatgccctgtgtagaaggggcagccacttctcaggaatgtgcacctggtgttggcgaatctgctacttttcccttttaaactagagctctggtttttatttcttttgtttttatggttgcagccagttcaaaggaagcctgtctgtggatggctcaagggccccaggctgccagcgtgtgctgatttaaacttaataagctggctgggctctgtggctcatgcctgtgatcccagcactttgggaggctgaggcaggaggatcacttgaggtcaggagtttgagacca

SEQ ID NO: 345338 - DNA, 4417 bp, Homo sapiens
gtctgcgtaaccgcacgggaaacccgccaccacctccacctccctgccatcctcgacaagatgcctgcccccggcgccctcatcctccttgcggccgtctccgcctccggctgcctggcgtccccggcccaccccgatggattcgccctgggccgggctcctctggctcctccctacgctgtggtcctcatttcctgctccggcctgctggccttcatcttcctcctcctcacctgtctgtgctgcaaacggggcgatgtcggcttcaaggaatttgagaaccctgaaggggaggactgctccggggagtacactccccctgcggaggagacctcctcctcacagtcgctgcctgatgtctacattctcccgctggctgaggtctccctgccaatgcctgccccgcagccttcacactcagacatgaccacccccctgggccttagccggcagcacctgagctacctgcaggagattgggagtggctggtttgggaaggtgatcctgggagagattttctccgactacacccccgcccaggtggtggtgaaggagctccgagccagcgcggggcccctggagcaacgcaagttcatctcggaagcacagccgtacaggagcctgcagcaccccaatgtcctccagtgcctgggtctgtgcgtggagacgctgccgtttctgctgattatggagttctgtcaactgggggacctgaagcgttacctccgagcccagcggccccccgagggcctgtcccctgagctaccccctcgagacctgcggacgctgcagaggatgggcctggagatcgcccgcgggctggcgcacctgcattcccacaactacgtgcacagcgacctggccctgcgcaactgcctgctgacctctgacctgaccgtgcgcatcggagactacgggctggcccacagcaactacaaggaggactactacctgaccccagagcgcctgtggatcccactgcgctgggcggcgcccgagctcctcggggagctccacgggaccttcatggtggtggaccagagccgcgagagcaacatctggtccctgggggtgaccctgtgggagctgtttgagtttggggcccagccctaccgccacctgtcagacgaggaggtcctcgccttcgtggtccgccagcagcatgtgaagctggcccggccgaggctcaagctgccttacgcggactactggtatgacattcttcagtcctgctggcggccacctgcccagcgcccttcagcctctgatctccaattgcagctcacctacttgctctccgagcggcctccccggcccccaccgccgccacccccaccccgagacggtcccttcccctggccctggccccctgcacacagtgcgccccgcccggggaccctctcctcaccgttccccctactggatggcttccctggagccgaccccgacgatgtgctcacggtcaccgagagtagccgcggcctcaacctcgagtgcctgtgggagaaggcccggcgtggggccggccggggtgggggggcacctgcctggcagccggcgtcggcccccccggccccccacgccaacccctccaaccctttctacgaggcgctgtccacgcccagcgtgctgcctgtcatcagcgcccgcagcccctccgtgagcagcgagtactacatccgcttggaggagcacggctcccctcctgagcccctcttccccaacgactgggaccccctggacccaggagtgcccgcccctcaggccccccaggccccctccgaggtcccccagctggtgtccgagacctgggcctcccccctcttccctgcgccccggcccttcccagcccagtcctcagcgtcaggcagcttcctgctgagcggctgggaccccgagggccggggcgccggggagaccctggcgggagaccctgccgaggtcttgggggagcgggggaccgccccgtgggtggaagaagaagaggaggaggaggagggcagctccccaggggaagacagcagcagccttggaggtggcccaagccgccggggtcccctaccctgtcccctgtgcagccgcgagggggcctgctcctgcctgccactggagcggggggacgccgtagcaggctggggaggccaccctgctcttggctgcccccacccccccgaggacgactcctcgctgcgggcagagcggggctccctggccgacttgcccatggcccccccgcctcggccccccccgagtttctggaccccctcatgggggcggcggcgccccagtaccccgggcgggggccacctcccgctcccccccccccgccgccacctcctcgggcccccgcggacccggccgcgtcccccgaccccccttcggccgtggccagtcccggttcaggcctctcgtcgccgggccccaagccgggggacagcggctacgagaccgagacccctttttccccagagggagccttcccaggtgggggggcggccgaggaggaaggggtccctcggccgcgggctccccccgagccacccgacccaggagcgccccggccacctccagacccgggtccgctcccactcccggggccccgggagaagccgaccttcgtggttcaagtgagcacggaacagctgctgatgtccctgcgggaggatgtgacaaggaacctcctgggggagaagggggcgacagcccgggagacaggacccaggaaggcggggagaggccccgggaacagagagaaagtcccgggcctgaacagggacccgacagtcctgggcaacgggaaacaagccccaagcctgagcctcccagtgaacggggtgacagtgctggagaacggggaccagagagccccaggcatcgaggagaaggcggcggagaatggggccctggggtcccccgagagagaagagaaagtgctggagaatggggagctgacacccccaaggagggaggagaaagcgctggagaatggggagctgaggtccccagaggccggggagaaggtgctggtgaatgggggcctgacacccccaaagagcgaggacaaggtgtcagagaatgggggcctgagattccccaggaacacggagaggccaccagagactgggccttggagagccccagggccctgggagaagacgcccgagagttggggtccagcccccacgatcggggagccagccccagagacctctctggagagagcccctgcacccagcgcagtggtctcctcccggaacggcggggagacagcccctggcccccttggcccagcccccaagaacgggacgctggaacccgggaccgagaggagaccaaatgaggcaggaatccccccgcccctccatagagagccgcctttctcggaactgaactgaactcttttgggcctggagcccctcgacacagcggaggtccctcctcacccactcctggcccaagacaggggccgcaggcttcggggacccggaccccccatttcgcgtctcccctttccctccccagcccggcccctggaggggcctctggttcaaaccttcgcgtggcattttcacattatttaaaaaagacaaaaacaactttttggaggaaaaaaaaaaaaaaaaaaacaaaaaaaaaaaaaaaaaaaccaaaaaacaaaaaaaaaaaacgcggcgccccccaccaacacaacccccccgcccgggccccaaccacgcccagccccgcacgccaccacgcctctcttcgggcacacaacaagcgcgcgccccccacatacagagcgaggcccgtactcagagaggcagcacgccggcaccaccgaccacacacccaccgcccggctaacgcagcagacaaaaaccctgcccaccacgacgaccatcaaaacagacgagagaacccacctacactacagcgaagagcgaaaaaccacactcgcagcacacacacccaccacaccgaccaaccacacaacacgccgcaaccagacgggggcacctaacaccacgaccacgacccgcacgaggtccaatccacggcgcgggcaaacacacaagcccggcagactcacgtggactggacggcacacagaacgacactgtctcggccccaggcgcacgttactactacatgccagcacgatcactttccaccacacgcacgccctagacctcacataacaatccccctcacgcttgactacgacagatgcttttcggcgatcactcccagttcagactcaactaagtccgcatcacgtatcacgacgctgcctacctgacgctcgtcactcagcgcgcacgactccccatgcaccctgaccaccgccgcgtctactcccatagctcccacaatggctcaagccaaaagtagccaggtatcctccgcaccgtcgtcctattgagcagcaacactc

SEQ ID NO: 345339 - DNA, 363 bp, Homo sapiens
gctgggaccccagcccagccctgtgcccacagatggattcgccctgggccgggctcctctggctcctccctacgctgtggtcctcatttcctgctccggcctgctggccttcatcttcctcctcctcacctgtctgtgctgcaaacggggcgatgtcggcttcaaggtgaggtgcatgaggggattcaacttggggaggaagactccagcaaggcctttaccccctacacaggtggttggtggggagaagggggcagtaaatccgagagcaccttccagcttgaagctatggcaagatctggagccttgggatggggaaatgggggatggaaattgggctgggactgggagacagttacaaaa

SEQ ID NO: 345340 - DNA, 5752 bp, Homo sapiens
gtctgcgtaaccgcacgggaaacccgccaccacctccacctccctgccatcctcgacaagatgcctgcccccggcgccctcatcctccttgcggccgtctccgcctccggctgcctggcgtccccggcccaccccgatggattcgccctgggccgggctcctctggctcctccctacgctgtggtcctcatttcctgctccggcctgctggccttcatcttcctcctcctcacctgtctgtgctgcaaacggggcgatgtcggcttcaaggaatttgagaaccctgaaggggaggactgctccggggagtacactccccctgcggaggagacctcctcctcacagtcgctgcctgatgtctacattctcccgctggctgaggtctccctgccaatgcctgccccgcagccttcacactcagacatgaccacccccctgggccttagccggcagcacctgagctacctgcaggagattgggagtggctggtttgggaaggtgatcctgggagagattttctccgactacacccccgcccaggtggtggtgaaggagctccgagccagcgcggggcccctggagcaacgcaagttcatctcggaagcacagccgtacaggagcctgcagcaccccaatgtcctccagtgcctgggtctgtgcgtggagacgctgccgtttctgctgattatggagttctgtcaactgggggacctgaagcgttacctccgagcccagcggccccccgagggcctgtcccctgagctaccccctcgagacctgcggacgctgcagaggatgggcctggagatcgcccgcgggctggcgcacctgcattcccacaactacgtgcacagcgacctggccctgcgcaactgcctgctgacctctgacctgaccgtgcgcatcggagactacgggctggcccacagcaactacaaggaggactactacctgaccccagagcgcctgtggatcccactgcgctgggcggcgcccgagctcctcggggagctccacgggaccttcatggtggtggaccagagccgcgagagcaacatctggtccctgggggtgaccctgtgggagctgtttgagtttggggcccagccctaccgccacctgtcagacgaggaggtcctcgccttcgtggtccgccagcagcatgtgaagctggcccggccgaggctcaagctgccttacgcggactactggtatgacattcttcagtcctgctggcggccacctgcccagcgcccttcagcctctgatctccaattgcagctcacctacttgctctccgagcggcctccccggcccccaccgccgccacccccaccccgagacggtcccttcccctggccctggccccctgcacacagtgcgccccgcccggggaccctctcctcaccgttccccctactggatggcttccctggagccgaccccgacgatgtgctcacggtcaccgagagtagccgcggcctcaacctcgagtgcctgtgggagaaggcccggcgtggggccggccggggtgggggggcacctgcctggcagccggcgtcggcccccccggccccccacgccaacccctccaaccctttctacgaggcgctgtccacgcccagcgtgctgcctgtcatcagcgcccgcagcccctccgtgagcagcgagtactacatccgcttggaggagcacggctcccctcctgagcccctcttccccaacgactgggaccccctggacccaggagtgcccgcccctcaggccccccaggccccctccgaggtcccccagctggtgtccgagacctgggcctcccccctcttccctgcgccccggcccttcccagcccagtcctcagcgtcaggcagcttcctgctgagcggctgggaccccgagggccggggcgccggggagaccctggcgggagaccctgccgaggtcttgggggagcgggggaccgccccgtgggtggaagaagaagaggaggaggaggagggcagctccccaggggaagacagcagcagccttggaggtggcccaagccgccggggtcccctaccctgtcccctgtgcagccgcgagggggcctgctcctgcctgccactggagcggggggacgccgtagcaggctggggaggccaccctgctcttggctgcccccacccccccgaggacgactcctcgctgcgggcagagcggggctccctggccgacttgcccatggcccccccgcctcggccccccccgagtttctggaccccctcatgggggcggcggcgccccagtaccccgggcgggggccacctcccgctcccccccccccgccgccacctcctcgggcccccgcggacccggccgcgtcccccgaccccccttcggccgtggccagtcccggttcaggcctctcgtcgccgggccccaagccgggggacagcggctacgagaccgagacccctttttccccagagggagccttcccaggtgggggggcggccgaggaggaaggggtccctcggccgcgggctccccccgagccacccgacccaggagcgccccggccacctccagacccgggtccgctcccactcccggggccccgggagaagccgaccttcgtggttcaagtgagcacggaacagctgctgatgtccctgcgggaggatgtgacaaggaacctcctgggggagaagggggcgacagcccgggagacaggacccaggaaggcggggagaggccccgggaacagagagaaagtcccgggcctgaacagggacccgacagtcctgggcaacgggaaacaagccccaagcctgagcctcccagtgaacggggtgacagtgctggagaacggggaccagagagccccaggcatcgaggagaaggcggcggagaatggggccctggggtcccccgagagagaagagaaagtgctggagaatggggagctgacacccccaaggagggaggagaaagcgctggagaatggggagctgaggtccccagaggccggggagaaggtgctggtgaatgggggcctgacacccccaaagagcgaggacaaggtgtcagagaatgggggcctgagattccccaggaacacggagaggccaccagagactgggccttggagagccccagggccctgggagaagacgcccgagagttggggtccagcccccacgatcggggagccagccccagagacctctctggagagagcccctgcacccagcgcagtggtctcctcccggaacggcggggagacagcccctggcccccttggcccagcccccaagaacgggacgctggaacccgggaccgagaggagagcccccgagactgggggggcgccgagagccccaggggctgggaggctggacctcgggagtgggggccgagccccagtgggcacggggacggcccccggcggcggccccggaagcggcgtggacgcaaaggccggatgggtagacaacacgaggccgcagccaccgccgccaccgctgccaccgccaccggaggcacagccgaggaggctggagccagcgcccccgagagccaggccggaggtggcccccgagggagagcccggggccccagacagcagggccggcggagacacggcactcagcggagacggggacccccccaagcccgagaggaagggccccgagatgccacgactattcttggacttgggaccccctcaggggaacagcgagcagatcaaagccaggctctcccggctctcgctggcgctgccgccgctcacgctcacgccattcccggggccgggcccgcggcggcccccgtgggagggcgcggacgccggggcggctggcggggaggccggcggggcgggagcgccggggccggcggaggaggacggggaggacgaggacgaggacgaggaggaggacgaggaggcggcggcgccgggcgcggcggcggggccgcggggccccgggagggcgcgagcagccccggtgcccgtcgtggtgagcagcgccgacgcggacgcggcccgcccgctgcgggggctgctcaagtctccgcgcggggccgacgagccagaggacagcgagctggagaggaagcgcaagatggtctccttccacggggacgtgaccgtctacctcttcgaccaggagacgccaaccaacgagctgagcgtccaggccccccccgagggggacacggacccgtcaacgcctccagcgcccccgacacctccccaccccgccacccccggagatgggtttcccagcaacgacagcggctttggaggcagtttcgagtgggcggaggatttccccctcctcccccctccaggccccccgctgtgcttctcccgcttctccgtctcgcctgcgctggagaccccggggccacccgcccgggcccccgacgcccggcccgcaggccccgtggagaattgattccccgaagacccgaccccgctgcaccctcagaagaggggttgagaatggaatcctctgtggatgacggcgccactgccaccaccgcagacgccgcctctggggaggcccccgaggctgggccctccccctcccactcccctaccatgtgccaaacgggaggccccgggcccccgccccccagccccccagatggctcccctgacccccctgaccccctcggagccaaatgaggcaggaatccccccgcccctccatagagagccgcctttctcggaactgaactgaactcttttgggcctggagcccctcgacacagcggaggtccctcctcacccactcctggcccaagacaggggccgcaggcttcggggacccggaccccccatttcgcgtctcccctttccctccccagcccggcccctggaggggcctctggttcaaaccttcgcgtggcattttcacattatttaaaaaagacaaaaacaactttttggaggaaaaaaaaaaaaaaaaaaacaaaaaaaaaaaaaaaaaaaccaaaaaacaaaaaaaaaaaacgcggcgccccccaccaacacaacccccccgcccgggccccaaccacgcccagccccgcacgccaccacgcctctcttcgggcacacaacaagcgcgcgccccccacatacagagcgaggcccgtactcagagaggcagcacgccggcaccaccgaccacacacccaccgcccggctaacgcagcagacaaaaaccctgcccaccacgacgaccatcaaaacagacgagagaacccacctacactacagcgaagagcgaaaaaccacactcgcagcacacacacccaccacaccgaccaaccacacaacacgccgcaaccagacgggggcacctaacaccacgaccacgacccgcacgaggtccaatccacggcgcgggcaaacacacaagcccggcagactcacgtggactggacggcacacagaacgacactgtctcggccccaggcgcacgttactactacatgccagcacgatcactttccaccacacgcacgccctagacctcacataacaatccccctcacgcttgactacgacagatgcttttcggcgatcactcccagttcagactcaactaagtccgcatcacgtatcacgacgctgcctacctgacgctcgtcactcagcgcgcacgactccccatgcaccctgaccaccgccgcgtctactcccatagctcccacaatggctcaagccaaaagtagccaggtatcctccgcaccgtcgtcctattgagcagcaacactc

SEQ ID NO: 345341 - DNA, 548 bp, Homo sapiens
gtctgcgtaaccgcacgggaaacccgccaccacctccacctccctgccatcctcgacaagatgcctgcccccggcgccctcatcctccttgcggccgtctccgcctccggctgcctggcgtccccggcccaccccgatggattcgccctgggccgggctcctctggctcctccctacgctgtggtcctcatttcctgctccggcctgctggccttcatcttcctcctcctcacctgtctgtgctgcaaacggggcgatgtcggcttcaaggaatttgagaaccctgaaggggaggactgctccggggagtacactccccctgcggaggagacctcctcctcacagtcgctgcctgatgtctacattctcccgctggctgaggtctccctgccaatgcctgccccgcagccttcacactcagacatgaccacccccctgggccttagccggcagcacctgagctacctgcaggagattgggagtggctggtttgggaagtcagcgcctccctcctcactccattgaccactccgccgcgccacccggct

SEQ ID NO: 345342 - DNA, 4562 bp, Homo sapiens
gccaaaataaaagactccatgcctttgctggagaagaatgagccgaagatgagcgaagccaaaaattatctaagcagtatccttaaccatgggaggctctcgccacagtacatgtgtgaggccatgctgatcctgggcaaactgcattacgtggagggctcataccgagatgccatcagcatgtacgcacgggccgggattgatgacatgtccatggagaacaagcccctgtatcagatgcggctgctgtcggaggcttttgtcatcaaaggcctctctctggaacgcctacccaactccatcgcctcccgcttccgcctgacagagagggaggaagaagtgatcacctgttttgagagggcctcctggatcgctcaggtgttcctgcaggaattggagaagaccacaaataacagcacgtcgaggcatctgaaaggctgtcacccgcttgactatgagctcacctacttcctggaagctgccctccagagcgcctatgtgaaaaacctgaagaaggggaacatcgtgaagggcatgagagagctccgggaggtgctgcggactgtggagaccaaagcaactcagaacttcaaagtgatggcggccaagcacctggcgggggtcctgctgcactccctgagtgaggagtgctactggagccccctgtcccaccctctgcctgagttcatgggcaaggaggagagttctttcgccactcaggccctgcggaaacctcacctctatgaaggagacaacctctactgccccaaggacaacatcgaggaagccctcctgctcctcctcatcagcgaatccatggcaactcgagatgtggtgctgagccgggtgccggagcaggaggaggaccggacagtgagcttgcagaatgccgcagccatctatgacctcctgagcatcacgttgggcagaaggggacagtacgtcatgctctcggagtgcctggagcgagccatgaagtttgcgtttggagaatttcacctttggtaccaggtggccctctccatggtggcttgtgggaagtcagcctacgctgtgtccctgctgcgggagtgtgtgaagttgcggccctcggaccccaccgtgcccctgatggccgcgaaggtctgcatcgggtcccttcgctggctagaggaagcagagcactttgccatgatggtgatcagcctcggagaggaagccggggagttcctccccaagggctacctggctctgggtctcacctatagcctgcaggccaccgacgccaccctgaagtccaagcaagatgaattgcaccggaaggcactgcagacgctggagagggctcagcagctggcgcccagtgacccccaggtcatcctctatgtctcgctgcagctggccctcgtccgacagatctccagtgccatggagcagctgcaggaggccctgaaggtacgcaaggatgatgcccacgccctccacctgctggcactgctcttctctgcccagaagcaccaccagcatgccctggatgttgtcaacatggccatcaccgagcaccctgagaacttcaacctgatgttcaccaaggtgaagctggagcaggtgctgaaaggcccagaggaagccctcgtgacctgcagacaagtgctgaggctgtggcagaccctgtacagcttctcccagctgggaggcctagaaaaggatggcagcttcggtgagggcctcaccatgaagaagcagagtggcatgcacctgactttgcctgatgcccatgatgcagactctggctcccggcgggcttcgtccatcgccgcctcccggctggaggaggccatgtcagagctgactatgccctcttcggtcctgaagcagggccccatgcagctgtggaccacgctggaacagatctggctgcaggctgctgagctgttcatggagcagcagcacctcaaggaagcaggtttctgcatccaggaggcggcgggcctcttccccacttctcactcagtactctatatgcggggccggctggctgaggtgaagggcaacctggaggaggccaagcagctgtacaaggaggcgctcacggtgaacccagatggcgtgcgcatcatgcatagcctgggtctgatgctgagtcggctgggccacaagagcttggcccagaaggtgcttcgtgatgccgtggagaggcagagtacgtgccacgaggcgtggcagggcctgggcgaggtgctgcaggcccagggccagaacgaggctgccgttgactgcttcctcaccgcccttgagctggaggccagcagccctgtactgcccttctccatcatccccagagagctctgacgacgctgcagccgcagggagggaggggctggccagagggagaggcagcagggaacgtgggtcagggtggggcaacagtggcatcaggtgcggggcctcagggaaatacatctttagtgaacgcctctgcagctgcagccctcgttctcttggctgggccaagagggccttcctggatttctttgttggtgccttgggaaacagtctgacttgaaccctaagtgcctttggagagttttgtggtgaccagacttgctccccaagagctgggcagcggggagcctcacagctgtccttcaccctcacccatgcctctggcttggggtctgggtggggggttctcactccccactctcagcacagtacagacttctggatctctctcaggtcttgcccagggcggtcacaatgtgaagaaactgcgggcaagtgggaagactatgagatttctgggttcccttctcagacttggagttagtagatgattcctgcattgcccctgcttgccctctgagaccagctgggccccaccttgctctttccccctgctaccaagtgcctttggggcctctggggtctgaccaggggtactgagcaccggccctaacacttccatctccacccaccccatctccctggcgatgtgctccagcccaagcagcctccgtaggctttagatcctgtggttgccagatccagtcctttctaataccctgagtcaacacattactcctgcaggtcttaggctacaatgcaggtcccttgagggccaccaacatggaggtaggcagtttctaggactgtccccagtacatctcaccacccacagccctttttttgccttgattcgagcctcaccctggccttttggcttcccctgcctgagagagacctgaggaggggacagagcccagcccctctcctgtggctgagcaggcctctgtgtccatgacacctgtcttccgggcctgggggctgtgggtgtatgtcctccctactggcttccccggcccctgctgcatgatgctcttggaactcttccccaaggagtcagtcccccaggcctatcaggggatccttttgtatctgcactttgggttttagtttcaaagctccatcaggtacagcttgcatttcaggatgtgtggaaagctcgggtgagggctgccctggttcatcatagctccaccttcctcggaaggagtgggctgttggagaccccccatccatggcacactagctcagcactgcatttcccgagatgattcccaagacagctggtgcctcctggctttcctgtgccaggccaaggggcaccacagaggaccctggatcctttgcctcttcttggttgaaggatctctatgtatgtgtgtatataaatatagttttttatctatatatataaaatagagatctattttttttctggaattctgttagaaaagtaaagaaaaagcaaatgctgttggtttatctcagggtgcccaaagtggttatagtcaatttttggtactaggaaaggcacccaatgcatttcctgacttttaagcatttccttgttggaagcagcagagggccaggccaagttgctgacagtgactttgcaggttgaataaagaaacccttggaggggaagcaggcttgtctgaagcagcatgtatattcactgggcatgtagctcccacaccagccttgagccaggccctggacaggaggggctgttgcaggatgagggaggccagagaaggcatcgaagccaagacctgggcccagctggggagggatgtgggaaaggaaggatgggagggaggaccctctgggaaaatgtggatttgagctggtgagagtgttgctaaggctgggctaaagcctggagagggtaggaggaggcaagaggggtccaggcagggctgatcctggcctctgacctgtccagggcgacccctgaagcccctgctgcctctgggcattgctgggagaggccaaggcaggactcacgtctgaacagagatcccctcgggcattgctgatgggccaccttcagctgcagggaagaagcctaggagaggaggcatgggagggacctgggccttgttcagattggccacctctgctgagaagtccataccagtacacccctaataagttatgccacataccaacgtactgtggatattataacctgcattaaaacaactctaaagaacgctgctcatttacacagaagc

SEQ ID NO: 345343 - DNA, 4683 bp, Homo sapiens
tagggactcataggagaattttattgagaaccacaatgtaggctgcagaccatgggtgagagcggggagctgtcggcatgtgcttgagcatcaaagaaggctttctggaggaggaggggagttctgagcaaggtctgaggcaaacaaggtccaggttcagtgggggtgttcaccccaaggtaactttggggcaggcgctggtaacatgtccttgtcatttcagccacagtacatgtgtgaggccatgctgatcctgggcaaactgcattacgtggagggctcataccgagatgccatcagcatgtacgcacgggccgggattgatgacatgtccatggagaacaagcccctgtatcagatgcggctgctgtcggaggcttttgtcatcaaaggcctctctctggaacgcctacccaactccatcgcctcccgcttccgcctgacagagagggaggaagaagtgatcacctgttttgagagggcctcctggatcgctcaggtgttcctgcaggaattggagaagaccacaaataacagcacgtcgaggcatctgaaaggctgtcacccgcttgactatgagctcacctacttcctggaagctgccctccagagcgcctatgtgaaaaacctgaagaaggggaacatcgtgaagggcatgagagagctccgggaggtgctgcggactgtggagaccaaagcaactcagaacttcaaagtgatggcggccaagcacctggcgggggtcctgctgcactccctgagtgaggagtgctactggagccccctgtcccaccctctgcctgagttcatgggcaaggaggagagttctttcgccactcaggccctgcggaaacctcacctctatgaaggagacaacctctactgccccaaggacaacatcgaggaagccctcctgctcctcctcatcagcgaatccatggcaactcgagatgtggtgctgagccgggtgccggagcaggaggaggaccggacagtgagcttgcagaatgccgcagccatctatgacctcctgagcatcacgttgggcagaaggggacagtacgtcatgctctcggagtgcctggagcgagccatgaagtttgcgtttggagaatttcacctttggtaccaggtggccctctccatggtggcttgtgggaagtcagcctacgctgtgtccctgctgcgggagtgtgtgaagttgcggccctcggaccccaccgtgcccctgatggccgcgaaggtctgcatcgggtcccttcgctggctagaggaagcagagcactttgccatgatggtgatcagcctcggagaggaagccggggagttcctccccaagggctacctggctctgggtctcacctatagcctgcaggccaccgacgccaccctgaagtccaagcaagatgaattgcaccggaaggcactgcagacgctggagagggctcagcagctggcgcccagtgacccccaggtcatcctctatgtctcgctgcagctggccctcgtccgacagatctccagtgccatggagcagctgcaggaggccctgaaggtacgcaaggatgatgcccacgccctccacctgctggcactgctcttctctgcccagaagcaccaccagcatgccctggatgttgtcaacatggccatcaccgagcaccctgagaacttcaacctgatgttcaccaaggtgaagctggagcaggtgctgaaaggcccagaggaagccctcgtgacctgcagacaagtgctgaggctgtggcagaccctgtacagcttctcccagctgggaggcctagaaaaggatggcagcttcggtgagggcctcaccatgaagaagcagagtggcatgcacctgactttgcctgatgcccatgatgcagactctggctcccggcgggcttcgtccatcgccgcctcccggctggaggaggccatgtcagagctgactatgccctcttcggtcctgaagcagggccccatgcagctgtggaccacgctggaacagatctggctgcaggctgctgagctgttcatggagcagcagcacctcaaggaagcaggtttctgcatccaggaggcggcgggcctcttccccacttctcactcagtactctatatgcggggccggctggctgaggtgaagggcaacctggaggaggccaagcagctgtacaaggaggcgctcacggtgaacccagatggcgtgcgcatcatgcatagcctgggtctgatgctgagtcggctgggccacaagagcttggcccagaaggtgcttcgtgatgccgtggagaggcagagtacgtgccacgaggcgtggcagggcctgggcgaggtgctgcaggcccagggccagaacgaggctgccgttgactgcttcctcaccgcccttgagctggaggccagcagccctgtactgcccttctccatcatccccagagagctctgacgacgctgcagccgcagggagggaggggctggccagagggagaggcagcagggaacgtgggtcagggtggggcaacagtggcatcaggtgcggggcctcagggaaatacatctttagtgaacgcctctgcagctgcagccctcgttctcttggctgggccaagagggccttcctggatttctttgttggtgccttgggaaacagtctgacttgaaccctaagtgcctttggagagttttgtggtgaccagacttgctccccaagagctgggcagcggggagcctcacagctgtccttcaccctcacccatgcctctggcttggggtctgggtggggggttctcactccccactctcagcacagtacagacttctggatctctctcaggtcttgcccagggcggtcacaatgtgaagaaactgcgggcaagtgggaagactatgagatttctgggttcccttctcagacttggagttagtagatgattcctgcattgcccctgcttgccctctgagaccagctgggccccaccttgctctttccccctgctaccaagtgcctttggggcctctggggtctgaccaggggtactgagcaccggccctaacacttccatctccacccaccccatctccctggcgatgtgctccagcccaagcagcctccgtaggctttagatcctgtggttgccagatccagtcctttctaataccctgagtcaacacattactcctgcaggtcttaggctacaatgcaggtcccttgagggccaccaacatggaggtaggcagtttctaggactgtccccagtacatctcaccacccacagccctttttttgccttgattcgagcctcaccctggccttttggcttcccctgcctgagagagacctgaggaggggacagagcccagcccctctcctgtggctgagcaggcctctgtgtccatgacacctgtcttccgggcctgggggctgtgggtgtatgtcctccctactggcttccccggcccctgctgcatgatgctcttggaactcttccccaaggagtcagtcccccaggcctatcaggggatccttttgtatctgcactttgggttttagtttcaaagctccatcaggtacagcttgcatttcaggatgtgtggaaagctcgggtgagggctgccctggttcatcatagctccaccttcctcggaaggagtgggctgttggagaccccccatccatggcacactagctcagcactgcatttcccgagatgattcccaagacagctggtgcctcctggctttcctgtgccaggccaaggggcaccacagaggaccctggatcctttgcctcttcttggttgaaggatctctatgtatgtgtgtatataaatatagttttttatctatatatataaaatagagatctattttttttctggaattctgttagaaaagtaaagaaaaagcaaatgctgttggtttatctcagggtgcccaaagtggttatagtcaatttttggtactaggaaaggcacccaatgcatttcctgacttttaagcatttccttgttggaagcagcagagggccaggccaagttgctgacagtgactttgcaggttgaataaagaaacccttggaggggaagcaggcttgtctgaagcagcatgtatattcactgggcatgtagctcccacaccagccttgagccaggccctggacaggaggggctgttgcaggatgagggaggccagagaaggcatcgaagccaagacctgggcccagctggggagggatgtgggaaaggaaggatgggagggaggaccctctgggaaaatgtggatttgagctggtgagagtgttgctaaggctgggctaaagcctggagagggtaggaggaggcaagaggggtccaggcagggctgatcctggcctctgacctgtccagggcgacccctgaagcccctgctgcctctgggcattgctgggagaggccaaggcaggactcacgtctgaacagagatcccctcgggcattgctgatgggccaccttcagctgcagggaagaagcctaggagaggaggcatgggagggacctgggccttgttcagattggccacctctgctgagaagtccataccagtacacccctaataagttatgccacataccaacgtactgtggatattataacctgcattaaaacaactctaaagaacgctgctcatttacacagaagc

SEQ ID NO: 345344 - DNA, 3968 bp, Homo sapiens
gccaaaataaaagactccatgcctttgctggagaagaatgagccgaagatgagcgaagccaaaaattatctaagcagtatccttaaccatgggaggctctcgccacagtacatgtgtgaggccatgctgatcctgggcaaactgcattacgtggagggctcataccgagatgccatcagcatgtacgcacgggccgggattgatgacatgtccatggagaacaagcccctgtatcagatgcggctgctgtcggaggcttttgtcatcaaaggcctctctctggaacgcctacccaactccatcgcctcccgcttccgcctgacagagagggaggaagaagtgatcacctgttttgagagggcctcctggatcgctcaggtgttcctgcaggaattggagaagaccacaaataacagcacgtcgaggcatctgaaaggctgtcacccgcttgactatgagctcacctacttcctggaagctgccctccagagcgcctatgtgaaaaacctgaagaaggggaacatcgtgaagggcatgagagagctccgggaggtgctgcggactgtggagaccaaagcaactcagaacttcaaagtgatggcggccaagcacctggcgggggtcctgctgcactccctgagtgaggagtgctactggagccccctgtcccaccctctgcctgagttcatgggcaaggaggagagttctttcgccactcaggccctgcggaaacctcacctctatgaaggagacaacctctactgccccaaggacaacatcgaggaagccctcctgctcctcctcatcagcgaatccatggcaactcgagatgtggtgctgagccgggtgccggagcaggaggaggaccggacagtgagcttgcagaatgccgcagccatctatgacctcctgagcatcacgttgggcagaaggggacagtacgtcatgctctcggagtgcctggagcgagccatgaagtttgcgtttggagaatttcacctttggtaccaggtggccctctccatggtggcttgtgggaagtcagcctacgctgtgtccctgctgcgggagtgtgtgaagttgcggccctcggaccccaccgtgcccctgatggccgcgaaggtctgcatcgggtcccttcgctggctagaggaagcagagcactttgccatgatggtgatcagcctcggagaggaagccggggagttcctccccaagggctacctggctctgggtctcacctatagcctgcaggccaccgacgccaccctgaagtccaagcaagatgaattgcaccggaaggcactgcagacgctggagagggctcagcagctggcgcccagtgacccccaggtcatcctctatgtctcgctgcagctggccctcgtccgacagatctccagtgccatggagcagctgcaggaggccctgaaggtacgcaaggatgatgcccacgccctccacctgctggcactgctcttctctgcccagaagcaccaccagcatgccctggatgttgtcaacatggccatcaccgagcaccctgagaacttcaacctgatgttcaccaaggtgaagctggagcaggtgctgaaaggcccagaggaagccctcgtgacctgcagacaagtgctgaggctgtggcagaccctgtacagcttctcccagctgggaggcctagaaaaggatggcagcttcggtgagggcctcaccatgaagaagcagagtggcatgcacctgactttgcctgatgcccatgatgcagactctggctcccggcgggcttcgtccatcgccgcctcccggctggaggaggccatgtcagagctgactatgccctcttcggtcctgaagcagggccccatgcagctgtggaccacgctggaacagatctggctgcaggctgctgagctgttcatggagcagcagcacctcaaggaagcaggtttctgcatccaggaggcggcgggcctcttccccacttctcactcagtactctatatgcggggccggctggctgaggtgaagggcaacctggaggaggccaagcagctgtacaaggaggcgctcacggtgaacccagatggcgtgcgcatcatgcatagcctgggtctgatgctgagtcggctgggccacaagagcttggcccagaaggtgcttcgtgatgccgtggagaggcagagtacgtgccacgaggcgtggcagggcctgggcgaggtgctgcaggcccagggccagaacgaggctgccgttgactgcttcctcaccgcccttgagctggaggccagcagccctgtactgcccttctccatcatccccagagagctctgacgacgctgcagccgcagggagggaggggctggccagagggagaggcagcagggaacgtgggtcagggtggggcaacagtggcatcaggtgcggggcctcagggaaatacatctttagtgaacgcctctgcagctgcagccctcgttctcttggctgggccaagagggccttcctggatttctttgttggtgccttgggaaacagtctgacttgaaccctaagtgcctttggagagttttgtggtgaccagacttgctccccaagagctgggcagcggggagcctcacagctgtccttcaccctcacccatgcctctggcttggggtctgggtggggggttctcactccccactctcagcacagtacagacttctggatctctctcaggtcttgcccagggcggtcacaatgtgaagaaactgcgggcaagtgggaagactatgagatttctgggttcccttctcagacttggagttagtagatgattcctgcattgcccctgcttgccctctgagaccagctgggccccaccttgctctttccccctgctaccaagtgcctttggggcctctggggtctgaccaggggtactgagcaccggccctaacacttccatctccacccaccccatctccctggcgatgtgctccagcccaagcagcctccgtaggctttagatcctgtggttgccagatccagtcctttctaataccctgagtcaacacattactcctgcaggtcttaggctacaatgcaggtcccttgagggccaccaacatggaggtaggcagtttctaggactgtccccagtacatctcaccacccacagccctttttttgccttgattcgagcctcaccctggccttttggcttcccctgcctgagagagacctgaggaggggacagagcccagcccctctcctgtggctgagcaggcctctgtgtccatgacacctgtcttccgggcctgggggctgtgggtgtatgtcctccctactggcttccccggcccctgctgcatgatgctcttggaactcttccccaaggagtcagtcccccaggcctatcaggggatccttttgtatctgcactttgggttttagtttcaaagctccatcaggtacagcttgcatttcaggatgtgtggaaagctcgggtgagggctgccctggttcatcatagctccaccttcctcggaaggagtgggctgttggagaccccccatccatggcacactagctcagcactgcatttcccgagatgattcccaagacagctggtgcctcctggctttcctgtgccaggccaaggggcaccacagaggaccctggatcctttgcctcttcttggttgaaggatctctatgtatgtgtgtatataaatatagttttttatctatatatataaaatagagatctattttttttctggaattctgttagaaaagtaaagaaaaagcaaatgctgttggtttatctcagggtgcccaaagtggttatagtcaatttttggtactaggaaaggcacccaatgcatttcctgacttttaagcatttccttgttggaagcagcagagggccaggccaagttgctgacagtgactttgcaggttgaataaagaaacccttggagggga

SEQ ID NO: 345345 - DNA, 3615 bp, Homo sapiens
gccaaaataaaagactccatgcctttgctggagaagaatgagccgaagatgagcgaagccaaaaattatctaagcagtatccttaaccatgggaggctctcgccacagtacatgtgtgaggccatgctgatcctgggcaaactgcattacgtggagggctcataccgagatgccatcagcatgtacgcacgggccgggattgatgacatgtccatggagaacaagcccctgtatcagatgcggctgctgtcggaggcttttgtcatcaaaggcctctctctggaacgcctacccaactccatcgcctcccgcttccgcctgacagagagggaggaagaagtgatcacctgttttgagagggcctcctggatcgctcaggtgttcctgcaggaattggagaagaccacaaataacagcacgtcgaggcatctgaaaggctgtcacccgcttgactatgagctcacctacttcctggaagctgccctccagagcgcctatgtgaaaaacctgaagaaggggaacatcgtgaagggcatgagagagctccgggaggtgctgcggactgtggagaccaaagcaactcagaacttcaaagtgatggcggccaagcacctggcgggggtcctgctgcactccctgagtgaggagtgctactggagccccctgtcccaccctctgcctgagttcatgggcaaggaggagagttctttcgccactcaggccctgcggaaacctcacctctatgaaggagacaacctctactgccccaaggacaacatcgaggaagccctcctgctcctcctcatcagcgaatccatggcaactcgagatgtggtgctgagccgggtgccggagcaggaggaggaccggacagtgagcttgcagaatgccgcagccatctatgacctcctgagcatcacgttgggcagaaggggacagtacgtcatgctctcggagtgcctggagcgagccatgaagtttgcgtttggagaatttcacctttggtaccaggtggccctctccatggtggcttgtgggaagtcagcctacgctgtgtccctgctgcgggagtgtgtgaagttgcggccctcggaccccaccgtgcccctgatggccgcgaaggtctgcatcgggtcccttcgctggctagaggaagcagagcactttgccatgatggtgatcagcctcggagaggaagccggggagttcctccccaagggctacctggctctgggtctcacctatagcctgcaggccaccgacgccaccctgaagtccaagcaagatgaattgcaccggaaggcactgcagacgctggagagggctcagcagctggcgcccagtgacccccaggtcatcctctatgtctcgctgcagctggccctcgtccgacagatctccagtgccatggagcagctgcaggaggccctgaaggtacgcaaggatgatgcccacgccctccacctgctggcactgctcttctctgcccagaagcaccaccagcatgccctggatgttgtcaacatggccatcaccgagcaccctgagaacttcaacctgatgttcaccaaggtgaagctggagcaggtgctgaaaggcccagaggaagccctcgtgacctgcagacaagtgctgaggctgtggcagaccctgtacagcttctcccagctgggaggcctagaaaaggatggcagcttcggtgagggcctcaccatgaagaagcagagtggcatgcacctgactttgcctgatgcccatgatgcagactctggctcccggcgggcttcgtccatcgccgcctcccggctggaggaggccatgtcagagctgactatgccctcttcggtcctgaagcagggccccatgcagctgtggaccacgctggaacagatctggctgcaggctgctgagctgttcatggagcagcagcacctcaaggaagcaggtttctgcatccaggaggcggcgggcctcttccccacttctcactcagtactctatatgcggggccggctggctgaggtgaagggcaacctggaggaggccaagcagctgtacaaggaggcgctcacggtgaacccagatggcgtgcgcatcatgcatagcctgggtctgatgctgagtcggctgggccacaagagcttggcccagaaggtgcttcgtgatgccgtggagaggcagagtacgtgccacgaggcgtggcagggcctgggcgaggtgctgcaggcccagggccagaacgaggctgccgttgactgcttcctcaccgcccttgagctggaggccagcagccctgtactgcccttctccatcatccccagagagctctgacgacgctgcagccgcagggagggaggggctggccagagggagaggcagcagggaacgtgggtcagggtggggcaacagtggcatcaggtgcggggcctcagggaaatacatctttagtgaacgcctctgcagctgcagccctcgttctcttggctgggccaagagggccttcctggatttctttgttggtgccttgggaaacagtctgacttgaaccctaagtgcctttggagagttttgtggtgaccagacttgctccccaagagctgggcagcggggagcctcacagctgtccttcaccctcacccatgcctctggcttggggtctgggtggggggttctcactccccactctcagcacagtacagacttctggatctctctcaggtcttgcccagggcggtcacaatgtgaagaaactgcgggcaagtgggaagactatgagatttctgggttcccttctcagacttggagttagtagatgattcctgcattgcccctgcttgccctctgagaccagctgggccccaccttgctctttccccctgctaccaagtgcctttggggcctctggggtctgaccaggggtactgagcaccggccctaacacttccatctccacccaccccatctccctggcgatgtgctccagcccaagcagcctccgtaggctttagatcctgtggttgccagatccagtcctttctaataccctgagtcaacacattactcctgcaggtcttaggctacaatgcaggtcccttgagggccaccaacatggaggtaggcagtttctaggactgtccccagtacatctcaccacccacagccctttttttgccttgattcgagcctcaccctggccttttggcttcccctgcctgagagagacctgaggaggggacagagcccagcccctctcctgtggctgagcaggcctctgtgtccatgacacctgtcttccgggcctgggggctgtgggtgtatgtcctccctactggcttccccggcccctgctgcatgatgctcttggaactcttccccaaggagtcagtcccccaggcctatcaggggatccttttgtatctgcactttgggttttagtttcaaagctccactagctcagcactgcatttcccgagatgattcccaagacagctggtgcctcctggctttcctgtgccaggccaaggggcaccacagaggaccctggatcctttgcctcttcttggttgaaggatctctatgtatgtgtgtatataaatatagttttttatctatata

SEQ ID NO: 345346 - DNA, 917 bp, Homo sapiens
gccaaaataaaagactccatgcctttgctggagaagaatgagccgaagatgagcgaagccaaaaattatctaagcagtatccttaaccatgggaggctctcgccacagtacatgtgtgaggccatgctgatcctgggcaaactgcattacgtggagggctcataccgagatgccatcagcatgtacgcacgggccgggattgatgacatgtccatggagaacaagcccctgtatcagatgcggctgctgtcggaggcttttgtcatcaaaggcctctctctggaacgcctacccaactccatcgcctcccgcttccgcctgacagagagggaggaagaagtgatcacctgttttgagagggcctcctggatcgctcaggtgttcctgcaggaattggagaagaccacaaataacagcacgtcgaggcatctgaaaggctgtcacccgcttgactatgagctcacctacttcctggaagctgccctccagagcgcctatgtgaaaaacctgaagaaggggaacatcgtgaagggcatgagagagctccgggaggtgctgcggactgtggagaccaaagcaactcagaacttcaaagtgatggcggccaagcacctggcgggggtcctgctgcactccctgagtgaggagtgctactggagccccctgtcccaccctctgcctgagttcatgggcaaggaggagagttctttcgccactcaggccctgcggaaacctcacctctatgaaggagacaacctctactgccccaaggacaacatcgaggaagccctcctgctcctcctcatcagcgaatccatggcaactcgagatgtggtgctgagccgggtgccggagcaggaggaggaccggtcaataacctctgcgctgggacgttctacatcgtccctgcggccttt

SEQ ID NO: 345347 - DNA, 1216 bp, Homo sapiens
ttaaataaaacatgttattaaaattaatttcaccttttacctttttcagtgtgactaaaaaaaatcttagtagaaatttttaaattacacatgtggttcacatttgtggcttacatcatatttttttggacagtgcttggttgacttaatatgtgcctggccctttgggctccttgggtcagggggctctcaggaaaataaaacctcagtgaacctgtgacctagttagaaacaggcaaacatgcagagttggctagggacagaagagctccataacagggcaagcccatttaagtccacgtgtatttatcaagcacctactgagtacaagacactgagggaggtagaggacccacctctccctcccagaaggagtatggtcacaactttctctggactttgctgctcaaaatgtggtccacccaccagcagtgtaggcatcattggggagctggttagaaatgcaattaagaattagaatctgtgttttaacaagctctcctgggtgattcatatgtgcatccaagtttgaggctgtggctgtgttagattacaatgtatcctgaactataatagtggcatgggtatgtcattagaaactcaaaagaggagggggagggggtaaaaaaaaactcaaagaggaagtgatccctccctccctcccttccttccttgcttccttcccctctgtctctctctttctttctgtctttctgtctgtctttattttcttcagggtctcgctgtgttactcaggctggtctccaactcctgggctcaagcgatcctcctacttcagcctcccgaagcgttgggattacaggagtgaggcactgcgcccagctgatttttaaagagctattccaaagtaatatattcacttccttaaaccttttattccaacgtactgtgtgcaaggcattgtgttgtgcactctgaaggcaatcaagacgaatccagcatggaccctgccctcaaggaggttgcaggtctcttgggaagataagtcctatcagcaagtaaatagccttcctccaaggtagaccgtgataggagtgctatccacgaggaagcaagtctgagggggatgctctttggggataagcagagagcagactctgagtaatggcagtactagaattggatccttctggggctggatctagacaaggttgtaaaggtactttggggctagtaagggcagactggaacacca

SEQ ID NO: 345348 - DNA, 316 bp, Homo sapiens
gcagcaaagatggggagaaactgaggcacacagagaaagcaagcggtccaggggcatggcagaggctgctgccctcatggcactctgctttctgcgagttagggaggtgagcatgtggagccgccctggtggggcaggatccccaggtgaaagtgggcccttgctggggtgtgctgatggccactctccgtccccacagcctgatgttcaccaaggtgaagctggagcaggtgctgaaaggcccagaggaagccctcgtgacctgcagacaagtgctgaggctgtggcagaccctgtacagcttctcccagctggg

SEQ ID NO: 345349 - DNA, 4358 bp, Homo sapiens
tctttccagcatgcctccggcttcttgggggaacacagtcccggtggtcagaggtcctgcaggggaggcctctctctggaacgcctacccaactccatcgcctcccgcttccgcctgacagagagggaggaagaagtgatcacctgttttgagagggcctcctggatcgctcaggtgttcctgcaggaattggagaagaccacaaataacagcacgtcgaggcatctgaaaggctgtcacccgcttgactatgagctcacctacttcctggaagctgccctccagagcgcctatgtgaaaaacctgaagaaggggaacatcgtgaagggcatgagagagctccgggaggtgctgcggactgtggagaccaaagcaactcagaacttcaaagtgatggcggccaagcacctggcgggggtcctgctgcactccctgagtgaggagtgctactggagccccctgtcccaccctctgcctgagttcatgggcaaggaggagagttctttcgccactcaggccctgcggaaacctcacctctatgaaggagacaacctctactgccccaaggacaacatcgaggaagccctcctgctcctcctcatcagcgaatccatggcaactcgagatgtggtgctgagccgggtgccggagcaggaggaggaccggacagtgagcttgcagaatgccgcagccatctatgacctcctgagcatcacgttgggcagaaggggacagtacgtcatgctctcggagtgcctggagcgagccatgaagtttgcgtttggagaatttcacctttggtaccaggtggccctctccatggtggcttgtgggaagtcagcctacgctgtgtccctgctgcgggagtgtgtgaagttgcggccctcggaccccaccgtgcccctgatggccgcgaaggtctgcatcgggtcccttcgctggctagaggaagcagagcactttgccatgatggtgatcagcctcggagaggaagccggggagttcctccccaagggctacctggctctgggtctcacctatagcctgcaggccaccgacgccaccctgaagtccaagcaagatgaattgcaccggaaggcactgcagacgctggagagggctcagcagctggcgcccagtgacccccaggtcatcctctatgtctcgctgcagctggccctcgtccgacagatctccagtgccatggagcagctgcaggaggccctgaaggtacgcaaggatgatgcccacgccctccacctgctggcactgctcttctctgcccagaagcaccaccagcatgccctggatgttgtcaacatggccatcaccgagcaccctgagaacttcaacctgatgttcaccaaggtgaagctggagcaggtgctgaaaggcccagaggaagccctcgtgacctgcagacaagtgctgaggctgtggcagaccctgtacagcttctcccagctgggaggcctagaaaaggatggcagcttcggtgagggcctcaccatgaagaagcagagtggcatgcacctgactttgcctgatgcccatgatgcagactctggctcccggcgggcttcgtccatcgccgcctcccggctggaggaggccatgtcagagctgactatgccctcttcggtcctgaagcagggccccatgcagctgtggaccacgctggaacagatctggctgcaggctgctgagctgttcatggagcagcagcacctcaaggaagcaggtttctgcatccaggaggcggcgggcctcttccccacttctcactcagtactctatatgcggggccggctggctgaggtgaagggcaacctggaggaggccaagcagctgtacaaggaggcgctcacggtgaacccagatggcgtgcgcatcatgcatagcctgggtctgatgctgagtcggctgggccacaagagcttggcccagaaggtgcttcgtgatgccgtggagaggcagagtacgtgccacgaggcgtggcagggcctgggcgaggtgctgcaggcccagggccagaacgaggctgccgttgactgcttcctcaccgcccttgagctggaggccagcagccctgtactgcccttctccatcatccccagagagctctgacgacgctgcagccgcagggagggaggggctggccagagggagaggcagcagggaacgtgggtcagggtggggcaacagtggcatcaggtgcggggcctcagggaaatacatctttagtgaacgcctctgcagctgcagccctcgttctcttggctgggccaagagggccttcctggatttctttgttggtgccttgggaaacagtctgacttgaaccctaagtgcctttggagagttttgtggtgaccagacttgctccccaagagctgggcagcggggagcctcacagctgtccttcaccctcacccatgcctctggcttggggtctgggtggggggttctcactccccactctcagcacagtacagacttctggatctctctcaggtcttgcccagggcggtcacaatgtgaagaaactgcgggcaagtgggaagactatgagatttctgggttcccttctcagacttggagttagtagatgattcctgcattgcccctgcttgccctctgagaccagctgggccccaccttgctctttccccctgctaccaagtgcctttggggcctctggggtctgaccaggggtactgagcaccggccctaacacttccatctccacccaccccatctccctggcgatgtgctccagcccaagcagcctccgtaggctttagatcctgtggttgccagatccagtcctttctaataccctgagtcaacacattactcctgcaggtcttaggctacaatgcaggtcccttgagggccaccaacatggaggtaggcagtttctaggactgtccccagtacatctcaccacccacagccctttttttgccttgattcgagcctcaccctggccttttggcttcccctgcctgagagagacctgaggaggggacagagcccagcccctctcctgtggctgagcaggcctctgtgtccatgacacctgtcttccgggcctgggggctgtgggtgtatgtcctccctactggcttccccggcccctgctgcatgatgctcttggaactcttccccaaggagtcagtcccccaggcctatcaggggatccttttgtatctgcactttgggttttagtttcaaagctccatcaggtacagcttgcatttcaggatgtgtggaaagctcgggtgagggctgccctggttcatcatagctccaccttcctcggaaggagtgggctgttggagaccccccatccatggcacactagctcagcactgcatttcccgagatgattcccaagacagctggtgcctcctggctttcctgtgccaggccaaggggcaccacagaggaccctggatcctttgcctcttcttggttgaaggatctctatgtatgtgtgtatataaatatagttttttatctatatatataaaatagagatctattttttttctggaattctgttagaaaagtaaagaaaaagcaaatgctgttggtttatctcagggtgcccaaagtggttatagtcaatttttggtactaggaaaggcacccaatgcatttcctgacttttaagcatttccttgttggaagcagcagagggccaggccaagttgctgacagtgactttgcaggttgaataaagaaacccttggaggggaagcaggcttgtctgaagcagcatgtatattcactgggcatgtagctcccacaccagccttgagccaggccctggacaggaggggctgttgcaggatgagggaggccagagaaggcatcgaagccaagacctgggcccagctggggagggatgtgggaaaggaaggatgggagggaggaccctctgggaaaatgtggatttgagctggtgagagtgttgctaaggctgggctaaagcctggagagggtaggaggaggcaagaggggtccaggcagggctgatcctggcctctgacctgtccagggcgacccctgaagcccctgctgcctctgggcattgctgggagaggccaaggcaggactcacgtctgaacagagatcccctcgggcattgctgatgggccaccttcagctgcagggaagaagcctaggagaggaggcatgggagggacctgggccttgttcagattggccacctctgctgagaagtccataccagtacacccctaataagttatgccacataccaacgtactgtggatattataacctgcattaaaacaactctaaagaacgctgctcatttacacagaagc

SEQ ID NO: 345350 - DNA, 5328 bp, Homo sapiens
ttaaataaaacatgttattaaaattaatttcaccttttacctttttcagtgtgactaaaaaaaatcttagtagaaatttttaaattacacatgtggttcacatttgtggcttacatcatatttttttggacagtgcttggttgacttaatatgtgcctggccctttgggctccttgggtcagggggctctcaggaaaataaaacctcagtgaacctgtgacctagttagaaacaggcaaacatgcagagttggctagggacagaagagctccataacagggcaagcccatttaagtccacgtgtatttatcaagcacctactgagtacaagacactgagggaggtagaggacccacctctccctcccagaaggagtatggtcacaactttctctggactttgctgctcaaaatgtggtccacccaccagcagtgtaggcatcattggggagctggttagaaatgcaattaagaattagaatctgtgttttaacaagctctcctgggtgattcatatgtgcatccaagtttgaggctgtggctgtgttagattacaatgtatcctgaactataatagtggcatgggtatgtcattagaaactcaaaagaggagggggagggggtaaaaaaaaactcaaagaggaagtgatccctccctccctcccttccttccttgcttccttcccctctgtctctctctttctttctgtctttctgtctgtctttattttcttcagggtctcgctgtgttactcaggctggtctccaactcctgggctcaagcgatcctcctacttcagcctcccgaagcgttgggattacaggagtgaggcactgcgcccagctgatttttaaagagctattccaaaccacagtacatgtgtgaggccatgctgatcctgggcaaactgcattacgtggagggctcataccgagatgccatcagcatgtacgcacgggccgggattgatgacatgtccatggagaacaagcccctgtatcagatgcggctgctgtcggaggcttttgtcatcaaaggcctctctctggaacgcctacccaactccatcgcctcccgcttccgcctgacagagagggaggaagaagtgatcacctgttttgagagggcctcctggatcgctcaggtgttcctgcaggaattggagaagaccacaaataacagcacgtcgaggcatctgaaaggctgtcacccgcttgactatgagctcacctacttcctggaagctgccctccagagcgcctatgtgaaaaacctgaagaaggggaacatcgtgaagggcatgagagagctccgggaggtgctgcggactgtggagaccaaagcaactcagaacttcaaagtgatggcggccaagcacctggcgggggtcctgctgcactccctgagtgaggagtgctactggagccccctgtcccaccctctgcctgagttcatgggcaaggaggagagttctttcgccactcaggccctgcggaaacctcacctctatgaaggagacaacctctactgccccaaggacaacatcgaggaagccctcctgctcctcctcatcagcgaatccatggcaactcgagatgtggtgctgagccgggtgccggagcaggaggaggaccggacagtgagcttgcagaatgccgcagccatctatgacctcctgagcatcacgttgggcagaaggggacagtacgtcatgctctcggagtgcctggagcgagccatgaagtttgcgtttggagaatttcacctttggtaccaggtggccctctccatggtggcttgtgggaagtcagcctacgctgtgtccctgctgcgggagtgtgtgaagttgcggccctcggaccccaccgtgcccctgatggccgcgaaggtctgcatcgggtcccttcgctggctagaggaagcagagcactttgccatgatggtgatcagcctcggagaggaagccggggagttcctccccaagggctacctggctctgggtctcacctatagcctgcaggccaccgacgccaccctgaagtccaagcaagatgaattgcaccggaaggcactgcagacgctggagagggctcagcagctggcgcccagtgacccccaggtcatcctctatgtctcgctgcagctggccctcgtccgacagatctccagtgccatggagcagctgcaggaggccctgaaggtacgcaaggatgatgcccacgccctccacctgctggcactgctcttctctgcccagaagcaccaccagcatgccctggatgttgtcaacatggccatcaccgagcaccctgagaacttcaacctgatgttcaccaaggtgaagctggagcaggtgctgaaaggcccagaggaagccctcgtgacctgcagacaagtgctgaggctgtggcagaccctgtacagcttctcccagctgggaggcctagaaaaggatggcagcttcggtgagggcctcaccatgaagaagcagagtggcatgcacctgactttgcctgatgcccatgatgcagactctggctcccggcgggcttcgtccatcgccgcctcccggctggaggaggccatgtcagagctgactatgccctcttcggtcctgaagcagggccccatgcagctgtggaccacgctggaacagatctggctgcaggctgctgagctgttcatggagcagcagcacctcaaggaagcaggtttctgcatccaggaggcggcgggcctcttccccacttctcactcagtactctatatgcggggccggctggctgaggtgaagggcaacctggaggaggccaagcagctgtacaaggaggcgctcacggtgaacccagatggcgtgcgcatcatgcatagcctgggtctgatgctgagtcggctgggccacaagagcttggcccagaaggtgcttcgtgatgccgtggagaggcagagtacgtgccacgaggcgtggcagggcctgggcgaggtgctgcaggcccagggccagaacgaggctgccgttgactgcttcctcaccgcccttgagctggaggccagcagccctgtactgcccttctccatcatccccagagagctctgacgacgctgcagccgcagggagggaggggctggccagagggagaggcagcagggaacgtgggtcagggtggggcaacagtggcatcaggtgcggggcctcagggaaatacatctttagtgaacgcctctgcagctgcagccctcgttctcttggctgggccaagagggccttcctggatttctttgttggtgccttgggaaacagtctgacttgaaccctaagtgcctttggagagttttgtggtgaccagacttgctccccaagagctgggcagcggggagcctcacagctgtccttcaccctcacccatgcctctggcttggggtctgggtggggggttctcactccccactctcagcacagtacagacttctggatctctctcaggtcttgcccagggcggtcacaatgtgaagaaactgcgggcaagtgggaagactatgagatttctgggttcccttctcagacttggagttagtagatgattcctgcattgcccctgcttgccctctgagaccagctgggccccaccttgctctttccccctgctaccaagtgcctttggggcctctggggtctgaccaggggtactgagcaccggccctaacacttccatctccacccaccccatctccctggcgatgtgctccagcccaagcagcctccgtaggctttagatcctgtggttgccagatccagtcctttctaataccctgagtcaacacattactcctgcaggtcttaggctacaatgcaggtcccttgagggccaccaacatggaggtaggcagtttctaggactgtccccagtacatctcaccacccacagccctttttttgccttgattcgagcctcaccctggccttttggcttcccctgcctgagagagacctgaggaggggacagagcccagcccctctcctgtggctgagcaggcctctgtgtccatgacacctgtcttccgggcctgggggctgtgggtgtatgtcctccctactggcttccccggcccctgctgcatgatgctcttggaactcttccccaaggagtcagtcccccaggcctatcaggggatccttttgtatctgcactttgggttttagtttcaaagctccatcaggtacagcttgcatttcaggatgtgtggaaagctcgggtgagggctgccctggttcatcatagctccaccttcctcggaaggagtgggctgttggagaccccccatccatggcacactagctcagcactgcatttcccgagatgattcccaagacagctggtgcctcctggctttcctgtgccaggccaaggggcaccacagaggaccctggatcctttgcctcttcttggttgaaggatctctatgtatgtgtgtatataaatatagttttttatctatatatataaaatagagatctattttttttctggaattctgttagaaaagtaaagaaaaagcaaatgctgttggtttatctcagggtgcccaaagtggttatagtcaatttttggtactaggaaaggcacccaatgcatttcctgacttttaagcatttccttgttggaagcagcagagggccaggccaagttgctgacagtgactttgcaggttgaataaagaaacccttggaggggaagcaggcttgtctgaagcagcatgtatattcactgggcatgtagctcccacaccagccttgagccaggccctggacaggaggggctgttgcaggatgagggaggccagagaaggcatcgaagccaagacctgggcccagctggggagggatgtgggaaaggaaggatgggagggaggaccctctgggaaaatgtggatttgagctggtgagagtgttgctaaggctgggctaaagcctggagagggtaggaggaggcaagaggggtccaggcagggctgatcctggcctctgacctgtccagggcgacccctgaagcccctgctgcctctgggcattgctgggagaggccaaggcaggactcacgtctgaacagagatcccctcgggcattgctgatgggccaccttcagctgcagggaagaagcctaggagaggaggcatgggagggacctgggccttgttcagattggccacctctgctgagaagtccataccagtacacccctaataagttatgccacataccaacgtactgtggatattataacctgcattaaaacaactctaaagaacgctgctcatttacacagaagc

SEQ ID NO: 345351 - DNA, 4445 bp, Homo sapiens
gccaaaataaaagactccatgcctttgctggagaagaatgagccgaagatgagcgaagccaaaaattatctaagcagtatccttaaccatgggaggctctcgccacagtacatgtgtgaggccatgctgatcctgggcaaactgcattacgtggagggctcataccgagatgccatcagcatgtacgcacgggccgggattgatgacatgtccatggagaacaagcccctgtatcagatgcggctgctgtcggaggcttttgtcatcaaaggcctctctctggaacgcctacccaactccatcgcctcccgcttccgcctgacagagagggaggaagaagtgatcacctgttttgagagggcctcctggatcgctcaggtgttcctgcaggaattggagaagaccacaaataacagcacgtcgaggcatctgaaaggctgtcacccgcttgactatgagctcacctacttcctggaagctgccctccagagcgcctatgtgaaaaacctgaagaaggggaacatcgtgaagggcatgagagagctccgggaggtgctgcggactgtggagaccaaagcaactcagaacttcaaagtgatggcggccaagcacctggcgggggtcctgctgcactccctgagtgaggagtgctactggagccccctgtcccaccctctgcctgagttcatgggcaaggaggagagttctttcgccactcaggccctgcggaaacctcacctctatgaaggagacaacctctactgccccaaggacaacatcgaggaagccctcctgctcctcctcatcagcgaatccatggcaactcgagatgtggtgctgagccgggtgccggagcaggaggaggaccggacagtgagcttgcagaatgccgcagccatctatgacctcctgagcatcacgttgggcagaaggggacagtacgtcatgctctcggagtgcctggagcgagccatgaagtttgcgtttggagaatttcacctttggtaccaggtggccctctccatggtggcttgtgggaagtcagcctacgctgtgtccctgctgcgggagtgtgtgaagttgcggccctcggaccccaccgtgcccctgatggccgcgaaggtctgcatcgggtcccttcgctggctagaggaagcagagcactttgccatgatggtgatcagcctcggagaggaagccggggagttcctccccaagggctacctggctctgggtctcacctatagcctgcaggccaccgacgccaccctgaagtccaagcaagatgaattgcaccggaaggcactgcagacgctggagagggctcagcagctggcgcccagtgacccccaggtcatcctctatgtctcgctgcagctggccctcgtccgacagatctccagtgccatggagcagctgcaggaggccctgaaggtacgcaaggatgatgcccacgccctccacctgctggcactgctcttctctgcccagaagcaccaccagcatgccctggatgttgtcaacatggccatcaccgagcaccctgagaacttcaaaggcctagaaaaggatggcagcttcggtgagggcctcaccatgaagaagcagagtggcatgcacctgactttgcctgatgcccatgatgcagactctggctcccggcgggcttcgtccatcgccgcctcccggctggaggaggccatgtcagagctgactatgccctcttcggtcctgaagcagggccccatgcagctgtggaccacgctggaacagatctggctgcaggctgctgagctgttcatggagcagcagcacctcaaggaagcaggtttctgcatccaggaggcggcgggcctcttccccacttctcactcagtactctatatgcggggccggctggctgaggtgaagggcaacctggaggaggccaagcagctgtacaaggaggcgctcacggtgaacccagatggcgtgcgcatcatgcatagcctgggtctgatgctgagtcggctgggccacaagagcttggcccagaaggtgcttcgtgatgccgtggagaggcagagtacgtgccacgaggcgtggcagggcctgggcgaggtgctgcaggcccagggccagaacgaggctgccgttgactgcttcctcaccgcccttgagctggaggccagcagccctgtactgcccttctccatcatccccagagagctctgacgacgctgcagccgcagggagggaggggctggccagagggagaggcagcagggaacgtgggtcagggtggggcaacagtggcatcaggtgcggggcctcagggaaatacatctttagtgaacgcctctgcagctgcagccctcgttctcttggctgggccaagagggccttcctggatttctttgttggtgccttgggaaacagtctgacttgaaccctaagtgcctttggagagttttgtggtgaccagacttgctccccaagagctgggcagcggggagcctcacagctgtccttcaccctcacccatgcctctggcttggggtctgggtggggggttctcactccccactctcagcacagtacagacttctggatctctctcaggtcttgcccagggcggtcacaatgtgaagaaactgcgggcaagtgggaagactatgagatttctgggttcccttctcagacttggagttagtagatgattcctgcattgcccctgcttgccctctgagaccagctgggccccaccttgctctttccccctgctaccaagtgcctttggggcctctggggtctgaccaggggtactgagcaccggccctaacacttccatctccacccaccccatctccctggcgatgtgctccagcccaagcagcctccgtaggctttagatcctgtggttgccagatccagtcctttctaataccctgagtcaacacattactcctgcaggtcttaggctacaatgcaggtcccttgagggccaccaacatggaggtaggcagtttctaggactgtccccagtacatctcaccacccacagccctttttttgccttgattcgagcctcaccctggccttttggcttcccctgcctgagagagacctgaggaggggacagagcccagcccctctcctgtggctgagcaggcctctgtgtccatgacacctgtcttccgggcctgggggctgtgggtgtatgtcctccctactggcttccccggcccctgctgcatgatgctcttggaactcttccccaaggagtcagtcccccaggcctatcaggggatccttttgtatctgcactttgggttttagtttcaaagctccatcaggtacagcttgcatttcaggatgtgtggaaagctcgggtgagggctgccctggttcatcatagctccaccttcctcggaaggagtgggctgttggagaccccccatccatggcacactagctcagcactgcatttcccgagatgattcccaagacagctggtgcctcctggctttcctgtgccaggccaaggggcaccacagaggaccctggatcctttgcctcttcttggttgaaggatctctatgtatgtgtgtatataaatatagttttttatctatatatataaaatagagatctattttttttctggaattctgttagaaaagtaaagaaaaagcaaatgctgttggtttatctcagggtgcccaaagtggttatagtcaatttttggtactaggaaaggcacccaatgcatttcctgacttttaagcatttccttgttggaagcagcagagggccaggccaagttgctgacagtgactttgcaggttgaataaagaaacccttggaggggaagcaggcttgtctgaagcagcatgtatattcactgggcatgtagctcccacaccagccttgagccaggccctggacaggaggggctgttgcaggatgagggaggccagagaaggcatcgaagccaagacctgggcccagctggggagggatgtgggaaaggaaggatgggagggaggaccctctgggaaaatgtggatttgagctggtgagagtgttgctaaggctgggctaaagcctggagagggtaggaggaggcaagaggggtccaggcagggctgatcctggcctctgacctgtccagggcgacccctgaagcccctgctgcctctgggcattgctgggagaggccaaggcaggactcacgtctgaacagagatcccctcgggcattgctgatgggccaccttcagctgcagggaagaagcctaggagaggaggcatgggagggacctgggccttgttcagattggccacctctgctgagaagtccataccagtacacccctaataagttatgccacataccaacgtactgtggatattataacctgcattaaaacaactctaaagaacgctgctcatttacacagaagc

SEQ ID NO: 345352 - DNA, 3734 bp, Homo sapiens
gccaaaataaaagactccatgcctttgctggagaagaatgagccgaagatgagcgaagccaaaaattatctaagcagtatccttaaccatgggaggctctcgccacagtacatgtgtgaggccatgctgatcctgggcaaactgcattacgtggagggctcataccgagatgccatcagcatgtacgcacgggccgggattgatgacatgtccatggagaacaagcccctgtatcagatgcggctgctgtcggaggcttttgtcatcaaaggcctctctctggaacgcctacccaactccatcgcctcccgcttccgcctgacagagagggaggaagaagtgatcacctgttttgagagggcctcctggatcgctcaggtgttcctgcaggaattggagaagaccacaaataacagcacgtcgaggcatctgaaaggctgtcacccgcttgactatgagctcacctacttcctggaagctgccctccagagcgcctatgtgaaaaacctgaagaaggggaacatcgtgaagggcatgagagagctccgggaggtgctgcggactgtggagaccaaagcaactcagaacttcaaagtgatggcggccaagcacctggcgggggtcctgctgcactccctgagtgaggagtgctactggagccccctgtcccaccctctgcctgagttcatgggcaaggaggagagttctttcgccactcaggccctgcggaaacctcacctctatgaaggagacaacctctactgccccaaggacaacatcgaggaagccctcctgctcctcctcatcagcgaatccatggcaactcgagatgtggtgctgagccgggtgccggagcaggaggaggaccggacagtgagcttgcagaatgccgcagccatctatgacctcctgagcatcacgttgggcagaaggggacagtacgtcatgctctcggagtgcctggagcgagccatgaagtttgcgtttggagaatttcacctttggtaccaggtggccctctccatggtggcttgtgggaagtcagcctacgctgtgtccctgctgcgggagtgtgtgaagttgcggccctcggaccccaccgtgcccctgatggccgcgaaggtctgcatcgggtcccttcgctggctagaggaagcagagcactttgccatgatggtgatcagcctcggagaggaagccggggagttcctccccaagggctacctggctctgggtctcacctatagcctgcaggccaccgacgccaccctgaagtccaagcaagatgaattgcaccggaaggcactgcagacgctggagagggctcagcagctggcgcccagtgacccccaggtcatcctctatgtctcgctgcagctggccctcgtccgacagatctccagtgccatggagcagctgcaggaggccctgaaggtacgcaaggatgatgcccacgccctccacctgctggcactgctcttctctgcccagaagcaccaccagcatgccctggatgttgtcaacatggccatcaccgagcaccctgagaacttcaacctgatgttcaccaaggtgaagctggagcaggtgctgaaaggcccagaggaagccctcgtgacctgcagacaagtgctgaggctgtggcagaccctgtacagcttctcccagctgggaggcctagaaaaggatggcagcttcggtgagggcctcaccatgaagaagcagagtggcatgcacctgactttgcctgatgcccatgatgcagactctggctcccggcgggcttcgtccatcgccgcctcccggctggaggaggccatgtcagagctgactatgccctcttcggtcctgaagcagggccccatgcagctgtggaccacgctggaacagatctggctgcaggctgctgagctgttcatggagcagcagcacctcaaggaagcaggtttctgcatccaggaggcggcgggcctcttccccacttctcactcagtactctatatgcggggccggctggctgaggtgaagggcaacctggaggaggccaagcagctgtacaaggaggcgctcacggtgaacccagatggcgtgcgcatcatgcatagcctgggtctgatgctgagtcggctgggccacaagagcttggcccagaaggtgcttcgtgatgccgtggagaggcagagtacgtgccacgaggcgtggcagggcctgggcgaggtgctgcaggcccagggccagaacgaggctgccgttgactgcttcctcaccgcccttgagctggaggccagcagccctgtactgcccttctccatcatccccagagagctctgacgacgctgcagccgcagggagggaggggctggccagagggagaggcagcagggaacgtgggtcagggtggggcaacagtggcatcaggtgcggggcctcagggaaatacatctttagtgaacgcctctgcagctgcagccctcgttctcttggctgggccaagagggccttcctggatttctttgttggtgccttgggaaacagtctgacttgaaccctaagtgcctttggagagttttgtggtgaccagacttgctccccaagagctgggcagcggggagcctcacagctgtccttcaccctcacccatgcctctggcttggggtctgggtggggggttctcactccccactctcagcacagtacagacttctggatctctctcaggtcttgcccagggcggtcacaatgtgaagaaactgcgggcaagtgggaagactatgagatttctgggttcccttctcagacttggagttagtagatgattcctgcattgcccctgcttgccctctgagaccagctgggccccaccttgctctttccccctgctaccaagtgcctttggggcctctggggtctgaccaggggtactgagcaccggccctaacacttccatctccacccaccccatctccctggcgatgtgctccagcccaagcagcctccgtaggctttagatcctgtggttgccagatccagtcctttctaataccctgagtcaacacattactcctgcaggtcttaggctacaatgcaggtcccttgagggccaccaacatggaggtaggcagtttctaggactgtccccagtacatctcaccacccacagccctttttttgccttgattcgagcctcaccctggccttttggcttcccctgcctgagagagacctgaggaggggacagagcccagcccctctcctgtggctgagcaggcctctgtgtccatgacacctgtcttccgggcctgggggctgtgggtgtatgtcctccctactggcttccccggcccctgctgcatgatgctcttggaactcttccccaaggagtcagtcccccaggcctatcaggggatccttttgtatctgcactttgggttttagtttcaaagctccatcaggtacagcttgcatttcaggatgtgtggaaagctcgggtgagggctgccctggttcatcatagctccaccttcctcggaaggagtgggctgttggagaccccccatccatggcacactagctcagcactgcatttcccgagatgattcccaagacagctggtgcctcctggctttcctgtgccaggccaaggggcaccacagaggaccctggatcctttgcctcttcttggttgaaggatctctatgtatgtgtgtatataaatatagttttttatctatata

SEQ ID NO: 345353 - DNA, 2796 bp, Homo sapiens
agcttgtgtaccccccgagtatgggatatcgtgacccacgccgtcgcggacgcgtggggagctgactatgccctcttcggtcctgaagcagggccccatgcagctgtggaccacgctggaacagatctggctgcaggctgctgagctgttcatggagcagcagcacctcaaggaagcaggtttctgcatccaggaggcggcgggcctcttccccacttctcactcagtactctatatgcggggccggctggctgaggtgaagggcaacctggaggaggccaagcagctgtacaaggaggcgctcacggtgaacccagatggcgtgcgcatcatgcatagcctgggtctgatgctgagtcggctgggccacaagagcttggcccagaaggtgcttcgtgatgccgtggagaggcagagtacgtgccacgaggcgtggcagggcctgggcgaggtgctgcaggcccagggccagaacgaggctgccgttgactgcttcctcaccgcccttgagctggaggccagcagccctgtactgcccttctccatcatccccagagagctctgacgacgctgcagccgcagggagggaggggctggccagagggagaggcagcagggaacgtgggtcagggtggggcaacagtggcatcaggtgcggggcctcagggaaatacatctttagtgaacgcctctgcagctgcagccctcgttctcttggctgggccaagagggccttcctggatttctttgttggtgccttgggaaacagtctgacttgaaccctaagtgcctttggagagttttgtggtgaccagacttgctccccaagagctgggcagcggggagcctcacagctgtccttcaccctcacccatgcctctggcttggggtctgggtggggggttctcactccccactctcagcacagtacagacttctggatctctctcaggtcttgcccagggcggtcacaatgtgaagaaactgcgggcaagtgggaagactatgagatttctgggttcccttctcagacttggagttagtagatgattcctgcattgcccctgcttgccctctgagaccagctgggccccaccttgctctttccccctgctaccaagtgcctttggggcctctggggtctgaccaggggtactgagcaccggccctaacacttccatctccacccaccccatctccctggcgatgtgctccagcccaagcagcctccgtaggctttagatcctgtggttgccagatccagtcctttctaataccctgagtcaacacattactcctgcaggtcttaggctacaatgcaggtcccttgagggccaccaacatggaggtaggcagtttctaggactgtccccagtacatctcaccacccacagccctttttttgccttgattcgagcctcaccctggccttttggcttcccctgcctgagagagacctgaggaggggacagagcccagcccctctcctgtggctgagcaggcctctgtgtccatgacacctgtcttccgggcctgggggctgtgggtgtatgtcctccctactggcttccccggcccctgctgcatgatgctcttggaactcttccccaaggagtcagtcccccaggcctatcaggggatccttttgtatctgcactttgggttttagtttcaaagctccatcaggtacagcttgcatttcaggatgtgtggaaagctcgggtgagggctgccctggttcatcatagctccaccttcctcggaaggagtgggctgttggagaccccccatccatggcacactagctcagcactgcatttcccgagatgattcccaagacagctggtgcctcctggctttcctgtgccaggccaaggggcaccacagaggaccctggatcctttgcctcttcttggttgaaggatctctatgtatgtgtgtatataaatatagttttttatctatatatataaaatagagatctattttttttctggaattctgttagaaaagtaaagaaaaagcaaatgctgttggtttatctcagggtgcccaaagtggttatagtcaatttttggtactaggaaaggcacccaatgcatttcctgacttttaagcatttccttgttggaagcagcagagggccaggccaagttgctgacagtgactttgcaggttgaataaagaaacccttggaggggaagcaggcttgtctgaagcagcatgtatattcactgggcatgtagctcccacaccagccttgagccaggccctggacaggaggggctgttgcaggatgagggaggccagagaaggcatcgaagccaagacctgggcccagctggggagggatgtgggaaaggaaggatgggagggaggaccctctgggaaaatgtggatttgagctggtgagagtgttgctaaggctgggctaaagcctggagagggtaggaggaggcaagaggggtccaggcagggctgatcctggcctctgacctgtccagggcgacccctgaagcccctgctgcctctgggcattgctgggagaggccaaggcaggactcacgtctgaacagagatcccctcgggcattgctgatgggccaccttcagctgcagggaagaagcctaggagaggaggcatgggagggacctgggccttgttcagattggccacctctgctgagaagtccataccagtacacccctaataagttatgccacataccaacgtactgtggatattataacctgcattaaaacaactctaaagaacgctgctcatttacacagaagc

SEQ ID NO: 345354 - DNA, 2675 bp, Homo sapiens
gccaaaataaaagactccatgcctttgctggagaagaatgagccgaagatgagcgaagccaaaaattatctaagcagtatccttaaccatgggaggctctcgccacagtacatgtgtgaggccatgctgatcctgggcaaactgcattacgtggagggctcataccgagatgccatcagcatgtacgcacgggccgggattgatgacatgtccatggagaacaagcccctgtatcagatgcggctgctgtcggaggcttttgtcatcaaaggcctctctctggaacgcctacccaactccatcgcctcccgcttccgcctgacagagagggaggaagaagtgatcacctgttttgagagggcctcctggatcgctcaggtgttcctgcaggaattggagaagaccacaaataacagcacgtcgaggcatctgaaaggctgtcacccgcttgactatgagctcacctacttcctggaagctgccctccagagcgcctatgtgaaaaacctgaagaaggggaacatcgtgaagggcatgagagagctccgggaggtgctgcggactgtggagaccaaagcaactcagaacttcaaagtgatggcggccaagcacctggcgggggtcctgctgcactccctgagtgaggagtgctactggagccccctgtcccaccctctgcctgagttcatgggcaaggaggagagttctttcgccactcaggccctgcggaaacctcacctctatgaaggagacaacctctactgccccaaggacaacatcgaggaagccctcctgctcctcctcatcagcgaatccatggcaactcgagatgtggtgctgagccgggtgccggagcaggaggaggaccggacagtgagcttgcagaatgccgcagccatctatgacctcctgagcatcacgttgggcagaaggggacagtacgtcatgctctcggagtgcctggagcgagccatgaagtttgcgtttggagaatttcacctttggtaccaggtggccctctccatggtggcttgtgggaagtcagcctacgctgtgtccctgctgcgggagtgtgtgaagttgcggccctcggaccccaccgtgcccctgatggccgcgaaggtctgcatcgggtcccttcgctggctagaggaagcagagcactttgccatgatggtgatcagcctcggagaggaagccggggagttcctccccaagggctacctggctctgggtctcacctatagcctgcaggccaccgacgccaccctgaagtccaagcaagatgaattgcaccggaaggcactgcagacgctggagagggctcagcagctggcgcccagtgacccccaggtcatcctctatgtctcgctgcagctggccctcgtccgacagatctccagtgccatggagcagctgcaggaggccctgaaggtacgcaaggatgatgcccacgccctccacctgctggcactgctcttctctgcccagaagcaccaccagcatgccctggatgttgtcaacatggccatcaccgagcaccctgagaacttcaacctgatgttcaccaaggtgaagctggagcaggtgctgaaaggcccagaggaagccctcgtgacctgcagacaagtgctgaggctgtggcagaccctgtacagcttctcccagctgggaggcctagaaaaggatggcagcttcggtgagggcctcaccatgaagaagcagagtggcatgcacctgactttgcctgatgcccatgatgcagactctggctcccggcgggcttcgtccatcgccgcctcccggctggaggaggccatgtcagagctgactatgccctcttcggtcctgaagcagggccccatgcagctgtggaccacgctggaacagatctggctgcaggctgctgagctgttcatggagcagcagcacctcaaggaagcaggtttctgcatccaggaggcggcgggcctcttccccacttctcactcagtactctatatgcggggccggctggctgaggtgaagggcaacctggaggaggccaagcagctgtacaaggaggcgctcacggtgaacccagatggcgtgcgcatcatgcatagcctgggtctgatgctgagtcggctgggccacaagagcttggcccagaaggtgcttcgtgatgccgtggagaggcagagtacgtgccacgaggcgtggcagggcctgggcgaggtgctgcaggcccagggccagaacgaggctgccgttgactgcttcctcaccgcccttgagctggaggccagcagccctgtactgcccttctccatcatccccagagagctctgacgacgctgcagccgcagggagggaggggctggccagagggagaggcagcagggaacgtgggtcagggtggggcaacagtggcatcaggtgcggggcctcagggaaatacatctttagtgaacagagatcccctcgggcattgctgatgggccaccttcagctgcagggaagaagcctaggagaggaggcatgggagggacctgggccttgttcagattggccacctctgctgagaagtccataccagtacacccctaataagttatgccacataccaacgtactgtggatattataacctgcattaaaacaactctaaagaacgctgctcatttacacagaagc

SEQ ID NO: 345355 - DNA, 845 bp, Homo sapiens
gtctttttttgcccagtttggcccctcataatgctcctacaaataataccgtcacaacaggtcttattgatggggctgtggtcagtggcattggttctggtgaaagattcttccctcctccctccggcttaagttactctagctggttttgtattgaacattttagttctcctccaaataaccaccctgtcagacttcttactgttgtgcgccgagcaaattcttctgagcaacattacgtgtgccttgcaatagttctatcagcaaaagaccgatctctgattgtttccaccaaagaggaactcctccaaaattatgttgatgattttagtgaagagtcctcattttatgaaattctcccatgctgtgctcgctttcgatgtggagagcttatcattgagggacagtggcatcatttggtcctggtaatgagcaaaggcatgttgaaaaacagtactgcagccctttatattgatggacagcttgttaacactgtaaagccttcattaatgtccacaagactcgttggaattttgggtaccttttgggggtaccgtgcctttccctttcgtaagtttcaaccaaggtgaaaggttttaattaacttgaacgaaatggaatccccattggtttgcccttaaaggtaaggtttaaaacaatgtgaattaaatggtttaaaaaaaccgtaagtaattgcctttaaaaaatggtgtgttgcgaaatttggtgtaaaaattaaccttttttaaaatgggattttaaaggaacgtccaattggtattaaaaattgtgatttacccgggcgataaatattttttaacccattttggggggcacttgggctg

SEQ ID NO: 345356 - DNA, 547 bp, Homo sapiens
gtctttttttgcccagtttggcccctcataatgctcctacaaataataccgtcacaacaggtcttattgatggggctgtggtcagtggcattggttctggtgaaagattcttccctcctccctccggcttaagttactctagctggttttgtattgaacattttagttctcctccaaataaccaccctgtcagacttcttactgttgtgcgccgagcaaattcttctgagcaacattacgtgtgccttgcaatagttctatcagcaaaagaccgatctctgattgtttccaccaaagaggaactcctccaaaattatgttgatgattttagtgaagagtcctcattttatgaaattctcccatgctgtgctcgctttcgatgtggagagcttatcattgagggacagtggcatcatttggtcctggtaatgagcaaaggcatgttgaaaaacagtactgcagccctttatattgatggacagcttgttaacactgtaaagcttcattatgtccacagtactccagggggttcaggttcggcaaatcc

SEQ ID NO: 345357 - DNA, 214 bp, Homo sapiens
gagagcaacttgaatcagaagctactagaagaacctgcagagttctgaagcagtttatattcttcttacattttgccttctcctagctggaaagcagagggactggaatttttgaaacgggcttttcccataatggcattcttgatttgtgtggccagagcttgcacaggaggaaagcaggctgctgaatttagtcactgatctctattagcgg

SEQ ID NO: 345358 - DNA, 797 bp, Homo sapiens
  misc_feature (715)..(715): n is a, c, g, or t
gatgatctcatcttgaggtcctcaattacatcaagatccttattccaaataatgtcacattctgagattttaggcaaacatatctttggggggccaaaattcaatcccctaatccatgttagtaaccatgcagtgttccttcttatttctatgttgaccttttcagctctttctatttattgttattatttttgagatagagtttcaatcttgttgcccaggctggagtgcaatggtgcaatcttggctcacggcaacctccgcctcccaggttcaagcaattctcctgcctcagcctcctgagtagctggtatgacaggcatgcaccaccatgcccagctaattttatatttttagtagaggcagggtttcgctgtgttggccagactggtctcaaactcctgatcttgggtgatctgccctcctcagcctcccaaagtgctgggattagaggcgtgagccaccatgcctggccagctctttctaactaaaaaataataataataataataaaaaataaaagatgatacttgcaaaaaaaaaaaaaaagaaaaaaaaaaaactggtggggcggcccgggaccgtgaaaaggtttccaagaccactccggtggggcgcgggcgcccagaggatagggacccgtgccccaggcggctccccagagagaacgggccagaacagtggctggggtccccaccataaaaaaaggccgcgnaacggcgtcgaacaatccgatggggtccgaggcacgcgctccacaacgggtccagggacggaataccgcgcgcggggggaat

SEQ ID NO: 345359 - DNA, 2925 bp, Homo sapiens
ggagcccatgatttcctggaagagccctagagctttgctttttctctcctgcagcacttaaccgaaaccagttttgcaatcaattcctgttcaaaggccaccctactcttcctatccgtctttctccagcccagacactcacagccccctgccagaccaggggacctcggagaggcaaggacagaggttcaggatcttcctctccctcgggacccaaggccacaaaggagagctccgtggagagaagaaaatcatttgactcctggggacacagatttgctgccacagaggctgatggacaaccaggcggagagagaaagtgaggctggtgttggtttgcaaagggatgaggatgacgctcctctgtgtgaagacgtggagctacaagacggagatctgtcccccgaagaaaaaatatttttgagagaatttcccagattgaaagaagatctgaaagggaacattgacaagctccgtgccctcgcagacgatattgacaaaacccacaagaaattcaccaaggctaacatggtggccacctctactgctgtcatctctggagtgatgagcctcctgggtttagcccttgccccagcaacaggaggaggaagcctgctgctctccaccgctggtcaaggtttggcaacagcagctggggtcaccagcatcgtgagtggtacgttggaacgctccaaaaataaagaagcccaagcacgggcggaagacatactgcccacctacgaccaagaggacagggaggatgaggaagagaaggcagactatgtcacagctgctggaaagattatctataatcttagaaacaccttgaagtatgccaagaaaaacgtccgtgcattttggaaactcagagccaacccacgcttggccaatgctaccaagcgtcttctgaccactggccaagtctcctcccggagccgcgtgcaggtgcaaaaggcctttgcgggaacaacactggcgatgaccaaaaatgctcgcgtgctgggaggtgtgatgtccgccttctcccttggctatgacttggccactctctcaaaggaatggaagcacctgaaggaaggagcaaggacaaagtttgcggaagagttgagagccaaggccttggagctggagaggaaactcacagaactcacccagctctacaagagcttgcagcagaaagtgaggtcaagggccagaggggtggggaaggatttaactgggacctgcgaaaccgaggcttactggaaggagttaagggagcatgtgtggatgtggctgtggctgtgtgtgtgtctgtgtgtctgtgtgtatgtacagtttacatgaatgttcctcaggacatggcatacaatggccttggaggtccaaataatatcaagtacatcttggagatgagggtgcctgtcctggacagacctcggcatgccttctgtttctccttcaatgctccttaaggcctatgtgctgggaaaagggtcttccctgtttgtttgtttgtttgtttgtttgtttgttttgagagggtcttgcactccagtctgggtgtcagaatgagaccccatctcaaaaaaaaaaaaaaaaaaaaaaaagaagaagaatacagtcatgtatctcttggtgacagggacgcattctgataaatgtgtcattaggcaattgcattgtagtgtgattatcacagattgtacttatacaaaacttagatggcatagcctactgcatacctaggctatatgggagagcctattgctcccaggctacgcacctgtacagcatgtgactactgaatactataggcaattgcagcacaatgggaaatatttgtgtatctaaacatatgtaaacagagaaaaaggaaagtaaaaatatggcataaaagataagaattggctctcctgtacagggcacttactacgaatggagcttgcagggctgagagttgctccagatgagtcagtgagtggtgaatgaatgtgaaggcctagggcattactgtatactactgtaggctttataaacacagcacacttagggtacacaaaatgcatattaaaacattttcttccttcagtatattaggcaataggaatttttcaagtccactataaatcttatcaaaccatggttgtatatgcagttgaccgaaacattgttattggacacataactatagttgaaagaataagcaaaaagtctatctaggtgtgctgtcttgagcaacttttaattattctcccgtcctgcaatatgagttaatcttctctgatcgatgtagattccaggaaggggtgtccaggacaattaccttccttctggagaaacttcccttaatcaaataagagaacttcaaagaaaatccctccctgtgctttggaagggaagggaggtgggcagcagtgggtcagagatagacctttgttctcttatttctgaggcccttcagtctcctttattcaaagcactcagcatgccaaagcaccctattttagggtatctttttctgagccctaaacactgtgttggggatgtcaactgtgacaggaaaatatcttggggccccagaatcactaaggaaaactcaagcttagggaaacttcttagggcaaacccacctcccactctattcaaagttatctctctgctcactgagatagatacatatctgattgcctcctttggaaaggctaatcagaaactcaaaagaatgcaactgtttgtgtctcacctatctgtgacctggaagctccctccccactgaaccaatgttcttcttacatatattgattaatgtcttatgtctccctaaaatgtataaaaccaaggtatgccccaaccatcttggccacatgtcatcaggacttcctgagtctgtgtcacagtgtgtcctcaaccttggcaaaataaactttctaaattaactgagac

SEQ ID NO: 345360 - DNA, 2621 bp, Homo sapiens
agagccacaggcggagttaggaactaaattgtctcctcctcccaattcatatgttgaagtcctaaaccaaaatgtggctgtatttagagatggaccctttgggaggtaattagggttgactgaggccatagggtgaggtcctaacccgatggaattgacttctttataagaggaggaggaaatacaagagggcctccccacccctgctgcacacctacactgaaggaaggctatttgcagatgcagcaagaaggcagccatctgcaaggcagaagaagagagccctcaccaggaactgaataagtcagtcagtctgggacttccagcctctagaactgtgaaacaataaatttctgtggtgtaagcaactcaatctatagtagtttgttactattttgttatagcaaccaaagatgactaagccagacaggttatgtcactcgccaagtgtcttagtctgtttgtgctgctataacaaaataccttagactgggtaatttacaaacaacagagatgtatccagagatccacagttctggaggctgagaagtctaaaatcaaggcaccagcagattccacatctcgtgaaggctcactctctgcttcacagatggcactgtcttgctgtgttctcacatggcagaaggggcaaacaagcccccctgggcctcttttataaaggcactaactctatgcctaaaggcagggccctcatgactctatcacctaccaaaaggctccacttctttatactattggaggggtagaaggaacttcctttctagaccttgaaggtttaagaatttgaatctataaaacaagctgacaatagacagattaacaggagaaaaagcatatacattttttaatgtgggccagatggcagaagcttaaataacaccccaagctacaggaagtgaggcctctgatggggaggtagtgacacaggctgtgggagggggtagggggaggaagtctgtggtgagcaaagtttgccttattacactgataaagtgtaattacactaataaagctggatcacctgaggttaggagtttgagaacagcctggccaacatggcaaaaccctgtctctactataaatacaaaaattagccaggtgtagtggcagggcacttgtaatcctatctactcgggaggctgaggcaggagaatcgcttggacccaggctgtagaggttgcagtgagccaagatcatgccactgcactccagtctgggtgtcagaatgagaccccatctcaaaaaaaaaaaaaaaaaaaaaaaagaagaagaatacagtcatgtatctcttggtgacagggacgcattctgataaatgtgtcattaggcaattgcattgtagtgtgattatcacagattgtacttatacaaaacttagatggcatagcctactgcatacctaggctatatgggagagcctattgctcccaggctacgcacctgtacagcatgtgactactgaatactataggcaattgcagcacaatgggaaatatttgtgtatctaaacatatgtaaacagagaaaaaggaaagtaaaaatatggcataaaagataagaattggctctcctgtacagggcacttactacgaatggagcttgcagggctgagagttgctccagatgagtcagtgagtggtgaatgaatgtgaaggcctagggcattactgtatactactgtaggctttataaacacagcacacttagggtacacaaaatgcatattaaaacattttcttccttcagtatattaggcaataggaatttttcaagtccactataaatcttatcaaaccatggttgtatatgcagttgaccgaaacattgttattggacacataactatagttgaaagaataagcaaaaagtctatctaggtgtgctgtcttgagcaacttttaattattctcccgtcctgcaatatgagttaatcttctctgatcgatgtagattccaggaaggggtgtccaggacaattaccttccttctggagaaacttcccttaatcaaataagagaacttcaaagaaaatccctccctgtgctttggaagggaagggaggtgggcagcagtgggtcagagatagacctttgttctcttatttctgaggcccttcagtctcctttattcaaagcactcagcatgccaaagcaccctattttagggtatctttttctgagccctaaacactgtgttggggatgtcaactgtgacaggaaaatatcttggggccccagaatcactaaggaaaactcaagcttagggaaacttcttagggcaaacccacctcccactctattcaaagttatctctctgctcactgagatagatacatatctgattgcctcctttggaaaggctaatcagaaactcaaaagaatgcaactgtttgtgtctcacctatctgtgacctggaagctccctccccactgaaccaatgttcttcttacatatattgattaatgtcttatgtctccctaaaatgtataaaaccaaggtatgccccaaccatcttggccacatgtcatcaggacttcctgagtctgtgtcacagtgtgtcctcaaccttggcaaaataaactttctaaattaactgagac

SEQ ID NO: 345361 - DNA, 3911 bp, Homo sapiens
agagccacaggcggagttaggaactaaattgtctcctcctcccaattcatatgttgaagtcctaaaccaaaatgtggctgtatttagagatggaccctttgggaggtaattagggttgactgaggccatagggtgaggtcctaacccgatggaattgacttctttataagaggaggaggaaatacaagagggcctccccacccctgctgcacacctacactgaaggaaggctatttgcagatgcagcaagaaggcagccatctgcaaggcagaagaagagagccctcaccaggaactgaataagtcagtcagtctgggacttccagcctctagaactgtgaaacaataaatttctgtggtgtaagcaactcaatctatagtagtttgttactattttgttatagcaaccaaagatgactaagccagacaggttatgtcactcgccaagtgtcttagtctgtttgtgctgctataacaaaataccttagactgggtaatttacaaacaacagagatgtatccagagatccacagttctggaggctgagaagtctaaaatcaaggcaccagcagattccacatctcgtgaaggctcactctctgcttcacagatggcactgtcttgctgtgttctcacatggcagaaggggcaaacaagcccccctgggcctcttttataaaggcactaactctatgcctaaaggcagggccctcatgactctatcacctaccaaaaggctccacttctttatactattggaggggtagaaggaacttcctttctagaccttgaaggtttaagaatttgaatctataaaacaagctgacaatagacagattaacaggagaaaaagcatatacattttttaatgtgggccagatggcagaagcttaaataacaccccaagctacaggaagtgaggcctctgatggggaggtagtgacacaggctgtgggagggggtagggggaggaagtctgtggtgagcaaagtttgccttattacactgataaagtgtaattacactaataaagctggatcacctgaggttaggagtttgagaacagcctggccaacatggcaaaaccctgtctctactataaatacaaaaattagccaggtgtagtggcagggcacttgtaatcctatctactcgggaggctgaggcaggagaatcgcttggacccaggctgtagaggttgcagtgagccaagatcatgccactgcactccagtctgggtgtcagaatgagaccccatctcaaaaaaaaaaaaaaaaaaaaaaaagaagaagaatacagtcatgtatctcttggtgacagggacgcattctgataaatgtgtcattaggcaattgcattgtagtgtgattatcacagattgtacttatacaaaacttagatggcatagcctactgcatacctaggctatatgggagagcctattgctcccaggctacgcacctgtacagcatgtgactactgaatactataggcaattgcagcacaatgggaaatatttgtgtatctaaacatatgtaaacagagaaaaaggaaagtaaaaatatggcataaaagataagaattggctctcctgtacagggcacttactacgaatggagcttgcagggctgagagttgctccagatgagtcagtgagtggtgaatgaatgtgaaggcctagggcattactgtatactactgtaggctttataaacacagcacacttagggtacacaaaatgcatattaaaacattttcttccttcagtatattaggcaataggaatttttcaagtccactataaatcttatcaaaccatggttgtatatgcagttgaccgaaacattgttattggacacataactatagttgaaagaataagcaaaaagtctatctaggtgtgctgtcttgagcaacttttaattattctcccgtcctgcaatatgagttaatcttctctgatcgatgtagattccaggaaggggtgtccaggacaattaccttccttctggagaaacttcccttaatcaaataagagaacttcaaagaaaatccctccctgtgctttggaagggaagggaggtgggcagcagtgggtcagagatagacctttgttctcttatttctgaggcccttcagtctcctttattcaaagcactcagcatgccaaagcaccctattttagggtatctttttctgagccctaaacactgtgttggggatgtcaactgtgacaggaaaatatcttggggccccagaatcactaaggaaaactcaagcttagggaaacttcttagggcaaacccacctcccactctattcaaagttatctctctgctcactgagatagatacatatctgattgcctcctttggaaaggctaatcagaaactcaaaagaatgcaactgtttgtgtctcacctatctgtgacctggaagctccctccccactgaaccaatgttcttcttacatatattgattaatgtcttatgtctccctaaaatgtataaaaccaaggtatgccccaaccatcttggccacatgtcatcaggacttcctgagtctgtgtcacagtgtgtcctcaaccttggcaaaataaactttctaaattaactgagacctgtctcggattttctgggttcacattttggaaaccatgaatggattctgggtggagatgcccctgacccttgacaaatctatcggtgcttggtaccagcatgagctaactttatggctcaaaccaataggacaatttgctgaggtctgagaggactccctccagaaaatccctgatctcttaaaatttggtagagatcggaagtttattttgctgtacaacacctctttttttggagttttacttgctcccaacaaggaaggcaagttttcctgctttcatgatgatggaaggcaggtgatgtttttatggagtttcagctttcttccaatgcacttagagcactcagaaattgtataatttgtgtgaccattgttagttttgcttaactgttttgttgtttgtttctgtcttagtcaaatctgaaggggaaccctaaattacggggtcaaggactctgaagtggtaggaaaacagccagcttaaaaaactttttttaaattttaattactataggggctttatttacataacacagccagctttttgctagccagaccaaactcaaagagcaatggctgtacttctgaaatagcaacactttgtcctagctgagatttggtaataagattttttttttaagtttttaaagaagctcagtggttgaaagtctgcttaactgaaacagtaacatccatgatgtgtgttttgtgcatgtttgtatttgaaaggccttcatgtttttgtttcttgtttgtttttctctcctaagaccttgtcttttttttgtagcaaaagttttttttttttttttccttttacttctcagttgactgaattctgttttcaccggattttttgactaaaatagctattgcaacagaggctactcttgggttaaggaagaatgtagtttcgttttatgtttaatatcgctcaaagaaaaataaaagcatctccctctaacaccaccagacttttcctctctgtaccttatcatgtaaattttgctatttgattttcacctgggttgtttcctttaatgtgcaaaaatttaaggctatttagctgacaactgcctagggttgtaaaacaggttatcaagaatctgaaagtctaagataggaaaaaaaagtgggggggcattataaatctataaaatgtacttctattggcatgcctaatacgtctttatatgtatgtatgtgttgtgtacacgatgttttagtgctaaaaatatgtaaaagagctctacttggcttaaagaaaaataaaagtgcttaaatcaga

SEQ ID NO: 345362 - DNA, 1743 bp, Homo sapiens
ggagcccatgatttcctggaagagccctagagctttgctttttctctcctgcagcacttaaccgaaaccagttttgcaatcaattcctgttcaaaggccaccctactcttcctatccgtctttctccagcccagacactcacagccccctgccagaccaggggacctcggagaggcaaggacagaggttcaggatcttcctctccctcgggacccaaggccacaaaggagagctccgtggagagaagaaaatcatttgactcctggggacacagatttgctgccacagaggctgatggacaaccaggcggagagagaaagtgaggctggtgttggtttgcaaagggatgaggatgacgctcctctgtgtgaagacgtggagctacaagacggagatctgtcccccgaagaaaaaatatttttgagagaatttcccagattgaaagaagatctgaaagggaacattgacaagctccgtgccctcgcagacgatattgacaaaacccacaagaaattcaccaaggctaacatggtggccacctctactgctgtcatctctggagtgatgagcctcctgggtttagcccttgccccagcaacaggaggaggaagcctgctgctctccaccgctggtcaaggtttggcaacagcagctggggtcaccagcatcgtgagtggtacgttggaacgctccaaaaataaagaagcccaagcacgggcggaagacatactgcccacctacgaccaagaggacagggaggatgaggaagagaaggcagactatgtcacagctgctggaaagattatctataatcttagaaacaccttgaagtatgccaagaaaaacgtccgtgcattttggaaactcagagccaacccacgcttggccaatgctaccaagcgtcttctgaccactggccaagtctcctcccggagccgcgtgcaggtgcaaaaggcctttgcgggaacaacactggcgatgaccaaaaatgctcgcgtgctgggaggtgtgatgtccgccttctcccttggctatgacttggccactctctcaaaggaatggaagcacctgaaggaaggagcaaggacaaagtttgcggaagagttgagagccaaggccttggagctggagaggaaactcacagaactcacccagctctacaagagcttgcagcagaaagtgaggtcaagggccagaggggtggggaaggatttaactgggacctgcgaaaccgaggcttactggaaggagttaagggagcatgtgtggatgtggctgtggctgtgtgtgtgtctgtgtgtctgtgtgtatgtacagtttacatgaatgttcctcaggacatggcatacaatggccttggaggtccaaataatatcaagtacatcttggagatgagggtgcctgtcctggacagacctcggcatgccttctgtttctccttcaatgctccttaaggcctatgtgctgggaaaagggtcttccctgtttgtttgtttgtttgtttgtttgtttgttttgagagggtctctgttgcccaggctggagtgcagtggcgtaatctcggctcactgcaacctctgcctcctgagtgcaagcaagtctcctgcctcagcctcccaagtagctgggattacaggcacgcaccaccacgcccagctaattttggtatttttttgtagagacagggtttcaccattttggccaggctggtctcgaattcctgacctcaagtgatccacccac

SEQ ID NO: 345363 - DNA, 2868 bp, Homo sapiens
ctagaattcagcggccgctttttttctagaattcagcgccgctgaattccacgcgggagggagagcagtgttctgctggagccgatgccaaaaaccatgcatttcttattcagattcattgttttcttttatctgtggggcctttttactgctcagagacaaaagaaagaggagagcaccgaagaagtgaaaatagaagttttgcatcgtccagaaaactgctctaagacaagcaagaagggagacctactaaatgcccattatgacggctacctggctaaagacggctcgaaattctactgcagccggacacaaaatgaaggccaccccaaatggtttgttcttggtgttgggcaagtcataaaaggcctagacattgctatgacagatatgtgccctggagaaaagcgaaaagtagttatacccccttcatttgcatacggaaaggaaggctatgcagaaggcaagattccaccggatgctacattgatttttgagattgaactttatgctgtgaccaaaggaccacggagcattgagacatttaaacaaatagacatggacaatgacaggcagctctctaaagccgagataaacctctacttgcaaagggaatttgaaaaagatgagaagccacgtgacaagtcatatcaggatgcagttttagaagatatttttaagaagaatgaccatgatggtgatggcttcatttctcccaaggaatacaatgtataccaacacgatgaactatagcatatttgtatttctactttttttttttagctatttactgtactttatgtataaaacaaagtcacttttctccaagttgtatttgctatttttcccctatgagaagatattttgatctccccaatacattgattttggtataataaatgtgaggctgttttgcaaacttaacttgcaggaatggtatcgactcgtgtttcctactgctttattctgtaaacaagaattgtagcaccatgaaacagacctctgggtcccagtgggcattttttcccctttcaggatgtaggaggacatgtatagtatgtcaaaaactgcaagcttttcccaactttaaccttaccagcatgttaatatccagtttttttatagtttaaaagttaaagtgcctcatattttgaaaatatccattaaggacccaggaattagcatttcacttgtttatacatttttataacattatgaagacgatataaaaatcctagaactgaagagtcttcctttggtatatgtgcaggaagatagttgtatatctctgttccacaaagaacgcaacacagtctctaaactttttggtgtaagcttctagccttgggtattttccagtggggaatgtttaaaaatatttgaccaaaccaaagactttttgcctcttatagcaagcataaagactgtactgcctggcttttgtattccttcagacattattgtaaatgtgcaactcctcttccctcttgtaaacctttataagatgtctgccaccccaagcttttgtcttgatagttttaaattgatgccatgaaatttcttagttttcgttccctttctctagttatctctttccttatgtcacctcatttcccatcattcttgtcactaatgatgaatgatcattacaaattggtatgctgtcaaattttgataaatgtgccaaacaaaggaggatatacagtgccatggcaattttgtgtcatggtcaagttatgatatcatatgacttgagaatagtatgtaagagatgctgtagaagatcacgttggtaccaaagaaagggcacatgtctatcggaacatagattttgcatactgcatggtatggtcaggctttgtgtccacacccaaatctcatcttgaaattataatccccataatttccataatccccacatgtcaatggagagaccaggtggaggtaactgaatcatgggggtggttttccccgtgctgttctcatgcaatctgatggttttataagtgtttggtagttcctcttgcattcattctcccacccgccaccttgtgaagaaagtccttgcttccccgccttccaccatgattgtaagcttcctgaggcctccccagccatggggaaccatgagtcaatttaacctctttcctttacaaattacccagtctggggcagttctttatagcagtgtgaaaatggactactacactgcatatataggaaagtatggtcagacagtaaatagctctgttcaaaataattgagttccaaacaagtaaagttttttctaccttctgaaacttgctctttccaaaccattgttcatcctttaacttctttacactatcaaaaattctatttaaaaatagagggctttcagatgagtacatacaaaaacaaacaaaagtatacataggggtaacacaaccatgagattagtaaataatacatatggctagcacataatttgacaccttataaaacaagaatctgtactatcttttccttcctcccaatatttcttcatttctatgctcaattttctaatactttttcacatgcttaatcatttactctttcatcgccttccctcaaaaaaacctgctccgttgaagtaaactaagtaactcaatattctttattttggtttggaacctgtctcaattttttgtatccatattaagaagtcaccctataatctaaactttgtaattctaatttttttgtcccattatcatacaaagtgcttttaaacttgtttttaaaaaatgacagataatgccacatgaataggaagatgattcattctaaaacttgtatttacataattaaaaataaatttataatcattctacatacaaaaaaatg

SEQ ID NO: 345364 - DNA, 1048 bp, Homo sapiens
gcaggacaacgcctgccacgcgtcggaactcggccgcgggacatccacggggcgcgagtgacacgcgggagggagagcagtgttctgctggagccgatgccaaaaaccatgcatttcttattcagattcattgttttcttttatctgtggggcctttttactgctcagagacaaaagaaagaggagagcaccgaagaagtgaaaatagaagttttgcatcgtccagaaaactgctctaagacaagcaagaagggagacctactaaatgcccattatgacggctacctggctaaagacggctcgaaattctactgcagccggacacaaaatgaaggccaccccaaatggtttgttcttggtgttgggcaagtcataaaaggcctagacattgctatgacagatatgtgccctggagaaaagcgaaaagtagttatacccccttcatttgcatacggaaaggaaggctatggtagtacttgaagaagtctttcttctgcaaaatatccttgtctcatgtcacagaacaaccctgcatgtcttgaaatgcatgtgacttgttagtgcttaaataacaatacatgcgcagaaggcaagattccaccggatgctacattgatttttgagattgaactttatgctgtgaccaaaggaccacggagcattgagacatttaaacaaatagacatggacaatgacaggcagctctctaaagccgagataaacctctacttgcaaagggaatttgaaaaagatgagaagccacgtgacaagtcatatcaggatgcagttttagaagatatttttaagaagaatgaccatgatggtgatggcttcatttctcccaaggaatacaatgtataccaacacgatgaactatagcatatttgtatttctactttttttttttagctatttactgtactttatgtataaaacaaagtcacttttctccaagttgtatttgctatttttcccctatgagaagatattttgatctccccaatacattgattttggtataataaatgtgaggctgttttgcaaactt

SEQ ID NO: 345365 - DNA, 2880 bp, Homo sapiens
gcaggacaacgcctgccacgcgtcggaactcggccgcgggacatccacggggcgcgagtgacacgcgggagggagagcagtgttctgctggagccgatgccaaaaaccatgcatttcttattcagattcattgttttcttttatctgtggggcctttttactgctcagagacaaaagaaagaggagagcaccgaagaagtgaaaatagaagttttgcatcgtccagaaaactgctctaagacaagcaagaagggagacctactaaatgcccattatgacggctacctggctaaagacggctcgaaattctactgcagccggacacaaaatgaaggccaccccaaatggtttgttcttggtgttgggcaagtcataaaaggcctagacattgctatgacagatatgtgccctggagaaaagcgaaaagtagttatacccccttcatttgcatacggaaaggaaggctatgcagaaggcaagattccaccggatgctacattgatttttgagattgaactttatgctgtgaccaaaggaccacggagcattgagacatttaaacaaatagacatggacaatgacaggcagctctctaaagccgagataaacctctacttgcaaagggaatttgaaaaagatgagaagccacgtgacaagtcatatcaggatgcagttttagaagatatttttaagaagaatgaccatgatggtgatggcttcatttctcccaaggaatacaatgtataccaacacgatgaactatagcatatttgtatttctactttttttttttagctatttactgtactttatgtataaaacaaagtcacttttctccaagttgtatttgctatttttcccctatgagaagatattttgatctccccaatacattgattttggtataataaatgtgaggctgttttgcaaacttaacttgcaggaatggtatcgactcgtgtttcctactgctttattctgtaaacaagaattgtagcaccatgaaacagacctctgggtcccagtgggcattttttcccctttcaggatgtaggaggacatgtatagtatgtcaaaaactgcaagcttttcccaactttaaccttaccagcatgttaatatccagtttttttatagtttaaaagttaaagtgcctcatattttgaaaatatccattaaggacccaggaattagcatttcacttgtttatacatttttataacattatgaagacgatataaaaatcctagaactgaagagtcttcctttggtatatgtgcaggaagatagttgtatatctctgttccacaaagaacgcaacacagtctctaaactttttggtgtaagcttctagccttgggtattttccagtggggaatgtttaaaaatatttgaccaaaccaaagactttttgcctcttatagcaagcataaagactgtactgcctggcttttgtattccttcagacattattgtaaatgtgcaactcctcttccctcttgtaaacctttataagatgtctgccaccccaagcttttgtcttgatagttttaaattgatgccatgaaatttcttagttttcgttccctttctctagttatctctttccttatgtcacctcatttcccatcattcttgtcactaatgatgaatgatcattacaaattggtatgctgtcaaattttgataaatgtgccaaacaaaggaggatatacagtgccatggcaattttgtgtcatggtcaagttatgatatcatatgacttgagaatagtatgtaagagatgctgtagaagatcacgttggtaccaaagaaagggcacatgtctatcggaacatagattttgcatactgcatggtatggtcaggctttgtgtccacacccaaatctcatcttgaaattataatccccataatttccataatccccacatgtcaatggagagaccaggtggaggtaactgaatcatgggggtggttttccccgtgctgttctcatgcaatctgatggttttataagtgtttggtagttcctcttgcattcattctcccacccgccaccttgtgaagaaagtccttgcttccccgccttccaccatgattgtaagcttcctgaggcctccccagccatggggaaccatgagtcaatttaacctctttcctttacaaattacccagtctggggcagttctttatagcagtgtgaaaatggactactacactgcatatataggaaagtatggtcagacagtaaatagctctgttcaaaataattgagttccaaacaagtaaagttttttctaccttctgaaacttgctctttccaaaccattgttcatcctttaacttctttacactatcaaaaattctatttaaaaatagagggctttcagatgagtacatacaaaaacaaacaaaagtatacataggggtaacacaaccatgagattagtaaataatacatatggctagcacataatttgacaccttataaaacaagaatctgtactatcttttccttcctcccaatatttcttcatttctatgctcaattttctaatactttttcacatgcttaatcatttactctttcatcgccttccctcaaaaaaacctgctccgttgaagtaaactaagtaactcaatattctttattttggtttggaacctgtctcaattttttgtatccatattaagaagtcaccctataatctaaactttgtaattctaatttttttgtcccattatcatacaaagtgcttttaaacttgtttttaaaaaatgacagataatgccacatgaataggaagatgattcattctaaaacttgtatttacataattaaaaataaatttataatcattctacatacaaaaaaatg

SEQ ID NO: 345366 - DNA, 3263 bp, Homo sapiens
caccgtttattttcactattcaattgaaagtattttgtatgggccggccgcattcagctttatttttaatgctttttgccaataatttgatcccatcagaacagctcccatggtaccataattcatatatcctgtttttatttgtataggaacctaggagaaagagaaggaaaattgaaaataaattaagtcaaatgcaatacttgtgctaaaaatgttgtcaaaagttgaggccacttctatctgcctagagcacacacatctgtcatcatcaggtgctcatccagggttcaccgccatcaggcaaaggaccacttagcttatctttttcataaactaatttatgcttagatatgaatgactacccaggctgcctaagctcttaataaatcagaaacttgctgcagagatatagaagtttgatgtgaaacaagttcatattcaattggaggtatctctaacaaacattaaagtgattaatctcactagtaataccaccagcaccctcattttacagagtaagaaactgaggcccaaaaaaagtgttaattggaccatagttaatactgaccttgcctgcgttacattaggcattgtaatccaataccttggattacattattttaaaagttgcagtgtagaccttaagtaactgtttaacaaacaacctcttgattaaataagcatttaaaagtaagttgttattaagacctaacattagctataactttattttaggtagtacttgaagaagtctttcttctgcaaaatatccttgtctcatgtcacagaacaaccctgcatgtcttgaaatgcatgtgacttgttagtgcttaaataacaatacatgcgcagaaggcaagattccaccggatgctacattgatttttgagattgaactttatgctgtgaccaaaggaccacggagcattgagacatttaaacaaatagacatggacaatgacaggcagctctctaaagccgagataaacctctacttgcaaagggaatttgaaaaagatgagaagccacgtgacaagtcatatcaggatgcagttttagaagatatttttaagaagaatgaccatgatggtgatggcttcatttctcccaaggaatacaatgtataccaacacgatgaactatagcatatttgtatttctactttttttttttagctatttactgtactttatgtataaaacaaagtcacttttctccaagttgtatttgctatttttcccctatgagaagatattttgatctccccaatacattgattttggtataataaatgtgaggctgttttgcaaacttaacttgcaggaatggtatcgactcgtgtttcctactgctttattctgtaaacaagaattgtagcaccatgaaacagacctctgggtcccagtgggcattttttcccctttcaggatgtaggaggacatgtatagtatgtcaaaaactgcaagcttttcccaactttaaccttaccagcatgttaatatccagtttttttatagtttaaaagttaaagtgcctcatattttgaaaatatccattaaggacccaggaattagcatttcacttgtttatacatttttataacattatgaagacgatataaaaatcctagaactgaagagtcttcctttggtatatgtgcaggaagatagttgtatatctctgttccacaaagaacgcaacacagtctctaaactttttggtgtaagcttctagccttgggtattttccagtggggaatgtttaaaaatatttgaccaaaccaaagactttttgcctcttatagcaagcataaagactgtactgcctggcttttgtattccttcagacattattgtaaatgtgcaactcctcttccctcttgtaaacctttataagatgtctgccaccccaagcttttgtcttgatagttttaaattgatgccatgaaatttcttagttttcgttccctttctctagttatctctttccttatgtcacctcatttcccatcattcttgtcactaatgatgaatgatcattacaaattggtatgctgtcaaattttgataaatgtgccaaacaaaggaggatatacagtgccatggcaattttgtgtcatggtcaagttatgatatcatatgacttgagaatagtatgtaagagatgctgtagaagatcacgttggtaccaaagaaagggcacatgtctatcggaacatagattttgcatactgcatggtatggtcaggctttgtgtccacacccaaatctcatcttgaaattataatccccataatttccataatccccacatgtcaatggagagaccaggtggaggtaactgaatcatgggggtggttttccccgtgctgttctcatgcaatctgatggttttataagtgtttggtagttcctcttgcattcattctcccacccgccaccttgtgaagaaagtccttgcttccccgccttccaccatgattgtaagcttcctgaggcctccccagccatggggaaccatgagtcaatttaacctctttcctttacaaattacccagtctggggcagttctttatagcagtgtgaaaatggactactacactgcatatataggaaagtatggtcagacagtaaatagctctgttcaaaataattgagttccaaacaagtaaagttttttctaccttctgaaacttgctctttccaaaccattgttcatcctttaacttctttacactatcaaaaattctatttaaaaatagagggctttcagatgagtacatacaaaaacaaacaaaagtatacataggggtaacacaaccatgagattagtaaataatacatatggctagcacataatttgacaccttataaaacaagaatctgtactatcttttccttcctcccaatatttcttcatttctatgctcaattttctaatactttttcacatgcttaatcatttactctttcatcgccttccctcaaaaaaacctgctccgttgaagtaaactaagtaactcaatattctttattttggtttggaacctgtctcaattttttgtatccatattaagaagtcaccctataatctaaactttgtaattctaatttttttgtcccattatcatacaaagtgcttttaaacttgtttttaaaaaatgacagataatgccacatgaataggaagatgattcattctaaaacttgtatttacataattaaaaataaatttataatcattctacatacaaaaaaatg

SEQ ID NO: 345367 - DNA, 2728 bp, Homo sapiens
gcaggacaacgcctgccacgcgtcggaactcggccgcgggacatccacggggcgcgagtgacacgcgggagggagagcagtgttctgctggagccgatgccaaaaaccatgcatttcttattcagattcattgttttcttttatctgtggggcctttttactgctcagagacaaaagaaagaggagagcaccgaagaagtgaaaatagaagttttgcatcgtccagaaaactgctctaagacaagcaagaagggagacctactaaatgcccattatgacggctacctggctaaagacggctcgaaattctactgcagcagaaggcaagattccaccggatgctacattgatttttgagattgaactttatgctgtgaccaaaggaccacggagcattgagacatttaaacaaatagacatggacaatgacaggcagctctctaaagccgagataaacctctacttgcaaagggaatttgaaaaagatgagaagccacgtgacaagtcatatcaggatgcagttttagaagatatttttaagaagaatgaccatgatggtgatggcttcatttctcccaaggaatacaatgtataccaacacgatgaactatagcatatttgtatttctactttttttttttagctatttactgtactttatgtataaaacaaagtcacttttctccaagttgtatttgctatttttcccctatgagaagatattttgatctccccaatacattgattttggtataataaatgtgaggctgttttgcaaacttaacttgcaggaatggtatcgactcgtgtttcctactgctttattctgtaaacaagaattgtagcaccatgaaacagacctctgggtcccagtgggcattttttcccctttcaggatgtaggaggacatgtatagtatgtcaaaaactgcaagcttttcccaactttaaccttaccagcatgttaatatccagtttttttatagtttaaaagttaaagtgcctcatattttgaaaatatccattaaggacccaggaattagcatttcacttgtttatacatttttataacattatgaagacgatataaaaatcctagaactgaagagtcttcctttggtatatgtgcaggaagatagttgtatatctctgttccacaaagaacgcaacacagtctctaaactttttggtgtaagcttctagccttgggtattttccagtggggaatgtttaaaaatatttgaccaaaccaaagactttttgcctcttatagcaagcataaagactgtactgcctggcttttgtattccttcagacattattgtaaatgtgcaactcctcttccctcttgtaaacctttataagatgtctgccaccccaagcttttgtcttgatagttttaaattgatgccatgaaatttcttagttttcgttccctttctctagttatctctttccttatgtcacctcatttcccatcattcttgtcactaatgatgaatgatcattacaaattggtatgctgtcaaattttgataaatgtgccaaacaaaggaggatatacagtgccatggcaattttgtgtcatggtcaagttatgatatcatatgacttgagaatagtatgtaagagatgctgtagaagatcacgttggtaccaaagaaagggcacatgtctatcggaacatagattttgcatactgcatggtatggtcaggctttgtgtccacacccaaatctcatcttgaaattataatccccataatttccataatccccacatgtcaatggagagaccaggtggaggtaactgaatcatgggggtggttttccccgtgctgttctcatgcaatctgatggttttataagtgtttggtagttcctcttgcattcattctcccacccgccaccttgtgaagaaagtccttgcttccccgccttccaccatgattgtaagcttcctgaggcctccccagccatggggaaccatgagtcaatttaacctctttcctttacaaattacccagtctggggcagttctttatagcagtgtgaaaatggactactacactgcatatataggaaagtatggtcagacagtaaatagctctgttcaaaataattgagttccaaacaagtaaagttttttctaccttctgaaacttgctctttccaaaccattgttcatcctttaacttctttacactatcaaaaattctatttaaaaatagagggctttcagatgagtacatacaaaaacaaacaaaagtatacataggggtaacacaaccatgagattagtaaataatacatatggctagcacataatttgacaccttataaaacaagaatctgtactatcttttccttcctcccaatatttcttcatttctatgctcaattttctaatactttttcacatgcttaatcatttactctttcatcgccttccctcaaaaaaacctgctccgttgaagtaaactaagtaactcaatattctttattttggtttggaacctgtctcaattttttgtatccatattaagaagtcaccctataatctaaactttgtaattctaatttttttgtcccattatcatacaaagtgcttttaaacttgtttttaaaaaatgacagataatgccacatgaataggaagatgattcattctaaaacttgtatttacataattaaaaataaatttataatcattctacatacaaaaaaatg

SEQ ID NO: 345368 - DNA, 938 bp, Homo sapiens
caccgtttattttcactattcaattgaaagtattttgtatgggccggccgcattcagctttatttttaatgctttttgccaataatttgatcccatcagaacagctcccatggtaccataattcatatatcctgtttttatttgtataggaacctaggagaaagagaaggaaaattgaaaataaattaagtcaaatgcaatacttgtgctaaaaatgttgtcaaaagttgaggccacttctatctgcctagagcacacacatctgtcatcatcaggtgctcatccagggttcaccgccatcaggcaaaggaccacttagcttatctttttcataaactaatttatgcttagatatgaatgactacccaggctgcctaagctcttaataaatcagaaacttgctgcagagatatagaagtttgatgtgaaacaagttcatattcaattggaggtatctctaacaaacattaaagtgattaatctcactagtaataccaccagcaccctcattttacagagtaagaaactgaggcccaaaaaaagtgttaattggaccatagttaatactgaccttgcctgcgttacattaggcattgtaatccaataccttggattacattattttaaaagttgcagtgtagaccttaagtaactgtttaacaaacaacctcttgattaaataagcatttaaaagtaagttgttattaagacctaacattagctataactttattttaggtagtacttgaagaagtctttcttctgcaaaatatccttgtctcatgtcacagaacaaccctgcatgtcttgaaatgcatgtgacttgttagtgcttaaataacaatacatgcggtatgtatatattctttaccttaattcctacttctttgatctgcttctctaaatataagtatcttacggatacttatataaataag

SEQ ID NO: 345369 - DNA, 669 bp, Homo sapiens
gcaggacaacgcctgccacgcgtcggaactcggccgcgggacatccacggggcgcgagtgacacgcgggagggagagcagtgttctgctggagccgatgccaaaaaccatgcatttcttattcagattcattgttttcttttatctgtggggcctttttactgctcagagacaaaagaaagaggagagcaccgaagaagtgaaaatagaagttttgcatcgtccagaaaactgctctaagacaagcaagaagggagacctactaaatgcccattatgacggctacctggctaaagacggctcgaaattctactgcagccggacacaaaatgaaggccaccccaaatggtttgttcttggtgttgggcaagtcataaaaggcctagacattgctatgacagatatgtgccctggagaaaagcgaaaagtagttatacccccttcatttgcatacggaaaggaaggctatggtagtacttgaagaagtctttcttctgcaaaatatccttgtctcatgtcacagaacaaccctgcatgtcttgaaatgcatgtgacttgttagtgcttaaataacaatacatgcggtatgtatatattctttaccttaattcctacttctttgatctgcttctctaaatataagtatcttacggatacttatataaataag

SEQ ID NO: 345370 - DNA, 509 bp, Homo sapiens
gcaggacaacgcctgccacgcgtcggaactcggccgcgggacatccacggggcgcgagtgacacgcgggagggagagcagtgttctgctggagccgatgccaaaaaccatgcatttcttattcagattcattgttttcttttatctgtggggcctttttactgctcagagacaaaagaaagaggagagcaccgaagaagtgaaaatagaagttttgcatcgtccagaaaactgctctaagacaagcaagaagggagacctactaaatgcccattatgacggctacctggctaaagacggctcgaaattctactgcaggtaggaaatgctgcgagctgcccgtgcgtccagttgcacaaaatcttgcctgcctccaccaagcggaagcctcattggttggttggttggggttttattttttaacggtaaaagttgagccctttattcattaaaaaaatcacattatatggcagtgtttctctaataaactgaatatttttatttaaagtg

SEQ ID NO: 345371 - DNA, 300 bp, Homo sapiens
ctttatttttaatgctttttgccaataatttgatcccatcagaacagctcccatggtaccataattcatatatcctgtttttatttgtataggaacctaggagaaagagaaggaaaattgaaaataaattaagtcaaatgcaatacttgtgctaaaaatgttgtcaaaagttgaggccacttctaggcaaaatgttggaggcagagtttgcctttcagtctctttctcattttcaaagttttcctttctgtcttgcgttgtgtcttcagatgcctccacattctgcctaccactagagca

SEQ ID NO: 345372 - DNA, 451 bp, Homo sapiens
tactgttgtatcatttactgtaagtaatcttgcacatgagtttcattattataactattccttaaagttactggaaattcactgtgataccttttaattaaaggaatgttattttggccttccagataaacctctacttgcaaagggaatttgaaaaagatgagaagccacgtgacaagtcatatcaggatgcagttttagaagatatttttaagaagaatgaccatgatggtgatggcttcatttctcccaaggaatacaatgtataccaacacgatgaactatagcatatttgtatttctactttttttttttagctatttactgtactttatgtataaaacaaagtcacttttctccaagttgtatttgctatttttcccctatgagaagatattttgatctccccaatacattgattttggtataataaatgtgaggctgttttgca

SEQ ID NO: 345373 - DNA, 695 bp, Homo sapiens
  misc_feature (25)..(25): n is a, c, g, or t
  misc_feature (103)..(103): n is a, c, g, or t
  misc_feature (139)..(139): n is a, c, g, or t
aagagaatgcttaaaccaggagcgngaagttgcagtgagccgagatcgcaccactgtactcaggctgggcgacagaacaagactccgtctcaaaaaaaaaaanaaaaaactcgagactagttctctctctctcgtgcgnaattcggcacgagctatgacagatatgtgccctggagaaaagcgaaaagtagttatacccccttcatttgcatacggaaaggaaggctatgcagaaggcaagattccaccggatgctacattgatttttgagattgaactttatgctgtgaccaaaggaccacggagcattgagacatttaaacaaatagacatggacaatgacaggcagctctctaaagccgagataaacctctacttgcaaagggaatttgaaaaagatgagaagccacgtgacaagtcatatcaggatgcagttttagaagatatttttaagaagaatgaccatgatggtgatggcttcatttctcccaaggaatacaatgtataccaacacgatgaactatagcatatttgtatttctactttttttttttagctatttactgtactttatgtataaaacaaagtcacttttctccaagttgtatttgctatttttcccctatgagaagatattttgatctccccaatacattgattttggtataataaatgtgaggctgttttgcaaactt

SEQ ID NO: 345374 - DNA, 2994 bp, Homo sapiens
gcaggacaacgcctgccacgcgtcggaactcggccgcgggacatccacggggcgcgagtgacacgcgggagggagagcagtgttctgctggagccgatgccaaaaaccatgcatttcttattcagattcattgttttcttttatctgtggggcctttttactgctcagagacaaaagaaagaggagagcaccgaagaagtgaaaatagaagttttgcatcgtccagaaaactgctctaagacaagcaagaagggagacctactaaatgcccattatgacggctacctggctaaagacggctcgaaattctactgcagccggacacaaaatgaaggccaccccaaatggtttgttcttggtgttgggcaagtcataaaaggcctagacattgctatgacagatatgtgccctggagaaaagcgaaaagtagttatacccccttcatttgcatacggaaaggaaggctatggtagtacttgaagaagtctttcttctgcaaaatatccttgtctcatgtcacagaacaaccctgcatgtcttgaaatgcatgtgacttgttagtgcttaaataacaatacatgcgcagaaggcaagattccaccggatgctacattgatttttgagattgaactttatgctgtgaccaaaggaccacggagcattgagacatttaaacaaatagacatggacaatgacaggcagctctctaaagccgagataaacctctacttgcaaagggaatttgaaaaagatgagaagccacgtgacaagtcatatcaggatgcagttttagaagatatttttaagaagaatgaccatgatggtgatggcttcatttctcccaaggaatacaatgtataccaacacgatgaactatagcatatttgtatttctactttttttttttagctatttactgtactttatgtataaaacaaagtcacttttctccaagttgtatttgctatttttcccctatgagaagatattttgatctccccaatacattgattttggtataataaatgtgaggctgttttgcaaacttaacttgcaggaatggtatcgactcgtgtttcctactgctttattctgtaaacaagaattgtagcaccatgaaacagacctctgggtcccagtgggcattttttcccctttcaggatgtaggaggacatgtatagtatgtcaaaaactgcaagcttttcccaactttaaccttaccagcatgttaatatccagtttttttatagtttaaaagttaaagtgcctcatattttgaaaatatccattaaggacccaggaattagcatttcacttgtttatacatttttataacattatgaagacgatataaaaatcctagaactgaagagtcttcctttggtatatgtgcaggaagatagttgtatatctctgttccacaaagaacgcaacacagtctctaaactttttggtgtaagcttctagccttgggtattttccagtggggaatgtttaaaaatatttgaccaaaccaaagactttttgcctcttatagcaagcataaagactgtactgcctggcttttgtattccttcagacattattgtaaatgtgcaactcctcttccctcttgtaaacctttataagatgtctgccaccccaagcttttgtcttgatagttttaaattgatgccatgaaatttcttagttttcgttccctttctctagttatctctttccttatgtcacctcatttcccatcattcttgtcactaatgatgaatgatcattacaaattggtatgctgtcaaattttgataaatgtgccaaacaaaggaggatatacagtgccatggcaattttgtgtcatggtcaagttatgatatcatatgacttgagaatagtatgtaagagatgctgtagaagatcacgttggtaccaaagaaagggcacatgtctatcggaacatagattttgcatactgcatggtatggtcaggctttgtgtccacacccaaatctcatcttgaaattataatccccataatttccataatccccacatgtcaatggagagaccaggtggaggtaactgaatcatgggggtggttttccccgtgctgttctcatgcaatctgatggttttataagtgtttggtagttcctcttgcattcattctcccacccgccaccttgtgaagaaagtccttgcttccccgccttccaccatgattgtaagcttcctgaggcctccccagccatggggaaccatgagtcaatttaacctctttcctttacaaattacccagtctggggcagttctttatagcagtgtgaaaatggactactacactgcatatataggaaagtatggtcagacagtaaatagctctgttcaaaataattgagttccaaacaagtaaagttttttctaccttctgaaacttgctctttccaaaccattgttcatcctttaacttctttacactatcaaaaattctatttaaaaatagagggctttcagatgagtacatacaaaaacaaacaaaagtatacataggggtaacacaaccatgagattagtaaataatacatatggctagcacataatttgacaccttataaaacaagaatctgtactatcttttccttcctcccaatatttcttcatttctatgctcaattttctaatactttttcacatgcttaatcatttactctttcatcgccttccctcaaaaaaacctgctccgttgaagtaaactaagtaactcaatattctttattttggtttggaacctgtctcaattttttgtatccatattaagaagtcaccctataatctaaactttgtaattctaatttttttgtcccattatcatacaaagtgcttttaaacttgtttttaaaaaatgacagataatgccacatgaataggaagatgattcattctaaaacttgtatttacataattaaaaataaatttataatcattctacatacaaaaaaatg

SEQ ID NO: 345375 - DNA, 934 bp, Homo sapiens
gcaggacaacgcctgccacgcgtcggaactcggccgcgggacatccacggggcgcgagtgacacgcgggagggagagcagtgttctgctggagccgatgccaaaaaccatgcatttcttattcagattcattgttttcttttatctgtggggcctttttactgctcagagacaaaagaaagaggagagcaccgaagaagtgaaaatagaagttttgcatcgtccagaaaactgctctaagacaagcaagaagggagacctactaaatgcccattatgacggctacctggctaaagacggctcgaaattctactgcagccggacacaaaatgaaggccaccccaaatggtttgttcttggtgttgggcaagtcataaaaggcctagacattgctatgacagatatgtgccctggagaaaagcgaaaagtagttatacccccttcatttgcatacggaaaggaaggctatgcagaaggcaagattccaccggatgctacattgatttttgagattgaactttatgctgtgaccaaaggaccacggagcattgagacatttaaacaaatagacatggacaatgacaggcagctctctaaagccgagataaacctctacttgcaaagggaatttgaaaaagatgagaagccacgtgacaagtcatatcaggatgcagttttagaagatatttttaagaagaatgaccatgatggtgatggcttcatttctcccaaggaatacaatgtataccaacacgatgaactatagcatatttgtatttctactttttttttttagctatttactgtactttatgtataaaacaaagtcacttttctccaagttgtatttgctatttttcccctatgagaagatattttgatctccccaatacattgattttggtataataaatgtgaggctgttttgcaaactt

SEQ ID NO: 345376 - DNA, 1626 bp, Homo sapiens
gtggcagcctcgggagtcagggctccctggtccttgacccagctccatccggcggggcccttgtggctgagatcctactgcaggcttagcctatttcggtctctggcttcctctagacacaggcaggagagctggcccaagcacattgataagagcctagtgcccagggattaggagagaaggcatcagctccatcaggtcatctcaggaggggccagaaaagtccagagctgcagtgcccaaagctaccctggtgggaagggttaggggcagtagctcccccagggcttctccagggcagcacagggaccccggatgaagactctgtcccccctcaggcattcagctgcccacaagtttcctgcaccctggaaaagccccccacccttcctctgggaaactgacagctgtcttccacagcctctgatgtggacctggtactgaggagcaagactgtccagttctcctccacatctcccatcccagaatcaggatctgggactggcagggtcccctcctgtgtctcatctcttgcagcagcagctgctgaactccagccatcaacacggtgggaggcagcgggggcttcagccatgtcctagctccccgccctaaaaggaggcagtgaggaccaggcactatttcctccgaggttacttctacccagatgacacctgcctgttcacgccccaaggcagctactgcccctaacccttcccaccagggtagctttgggcactgcagctctggacttttctggcccctcctgagatgacctgatggagctgatgctttctctcctaatccctgggcactaggctcttatcagtgtgcttgggccagctctcctgcctgtgtctagaggaagccagagacagaaataggctaagcctgcagtaggatctcagccacaagggccccgcaggatggagctgggtcaaggaccagggagccctgactcccagaggctgccaccggggagaagcagcggtcctccatccagaacctaagggctgaagcaaaggctgccaggacccttgaagatgcttttggctcacctcatttcaccccacgctctgctggctggcagaggagaaggcagtcgtttcctctctgaagagtatttttttcgattgccctctggttagggtgcacatataaatcagagttaatatatgaacgcgtgtgcatgcacaagtgtgtgtgtgcctgcgtgctgtgcgtggcagggtgtgtgtgtgtgtgtctggctgtgcgttccggagtgtgtgacgatgctgacctagctgtgtggccttgggcttgctgcttcattactcacctggatggggacgagggatgagaagggtgtgggtttggccccatgtcactggccggaaggatgtgtctcagccctgccctgtggggtgcccccgatgggaggctgtcccatctcccagtccccatctctttttccccacactgtccctggccaagccctgcccagagctgaaccctgtagctgcccccttgccctgtgtgggattcgcagtgtctcatttggtgacgtcttactggtgatcatctcctcaccccatctcccaccttgtggaataaatacatgttagcacttcccaaaaaaaaaac

SEQ ID NO: 345377 - DNA, 1015 bp, Homo sapiens
agtaccaggcagaggtggccaggggagtttcattgtgtttttttttccttttagtttctagttacattttggttgtagatgactcgcttaatcttttaagccaacacttgcctgagagcatgtttttatttcagaaatccaactttacctattttttaagctaactggaaatggaggccatgcgccccaaagcagcccgccacccacctgaatgtaagaagtgagtccggcttttgggtttcaccccaagttatctcaaaacaaaagggctggtcaggctgggcggggccttgtacgcgtacaaggccccgcaggatggagctgggtcaaggaccagggagccctgactcccagaggctgccaccggggagaagcagcggtcctccatccagaacctaagggctgaagcaaaggctgccaggacccttgaagatgcttttggctcacctcatttcaccccacgctctgctggctggcagaggagaaggcagtcgtttcctctctgaagagtatttttttcgattgccctctggttagggtgcacatataaatcagagttaatatatgaacgcgtgtgcatgcacaagtgtgtgtgtgcctgcgtgctgtgcgtggcagggtgtgtgtgtgtgtgtctggctgtgcgttccggagtgtgtgacgatgctgacctagctgtgtggccttgggcttgctgcttcattactcacctggatggggacgagggatgagaagggtgtgggtttggccccatgtcactggccggaaggatgtgtctcagccctgccctgtggggtgcccccgatgggaggctgtcccatctcccagtccccatctctttttccccacactgtccctggccaagccctgcccagagctgaaccctgtagctgcccccttgccctgtgtgggattcgcagtgtctcatttggtgacgtcttactggtgatcatctcctcaccccatctcccaccttgtggaataaatacatgttagcacttcccaaaaaaaaaac

SEQ ID NO: 345378 - DNA, 2180 bp, Homo sapiens
gtatggctctgtgggggcagcatggaggtccttccttgctcacgggtggcccacattgagcggaagaagaagccatataatagcaacattggcttctacaccaagaggaatgctcttcgcgttgctgaggtctggatggacgattacaagtctcatgtgtacatagcgtggaacctgccgctggagaatccgggaattgacatcggtgatgtctccgaaagaagagcattaaggaaaagtttaaagtgtaagaatttccagtggtacctggaccatgtttacccagaaatgagaagatacaataataccgttgcttacggggagcttcgcaacaacaaggcaaaagacgtctgcttggaccaggggccgctggagaaccacacagcaatattgtatccgtgccatggctggggaccacagcttgcccgctacaccaaggaaggcttcctgcacttgggtgccctggggaccaccacactcctccctgacacccgctgcctggtggacaactccaagagtcggctgccccagctcctggactgcgacaaggtcaagagcagcctgtacaagcgctggaacttcatccagaatggagccatcatgaacaagggcacgggacgctgcctggaggtggagaaccggggcctggctggcatcgacctcatcctccgcagctgcacaggtcagaggtggaccattaagaactccatcaagtagagggagggagctggggcactggagcctggcccccaggacatggctgctccccccaacatctggaccagctgccctggcggagagacagcaaggggccggcaggtgctcgatgggccccccagggcttctccagggcagcacagggaccccggatgaagactctgtcccccctcaggcattcagctgcccacaagtttcctgcaccctggaaaagccccccacccttcctctgggaaactgacagctgtcttccacagcctctgatgtggacctggtactgaggagcaagactgtccagttctcctccacatctcccatcccagaatcaggatctgggactggcagggtcccctcctgtgtctcatctcttgcagcagcagctgctgaactccagccatcaacacggtgggaggcagcgggggcttcagccatgtcctagctccccgccctaaaaggaggcagtgaggaccaggcactatttcctccgaggttacttctacccagatgacacctgcctgttcacgccccaaggcagctactgcccctaacccttcccaccagggtagctttgggcactgcagctctggacttttctggcccctcctgagatgacctgatggagctgatgctttctctcctaatccctgggcactaggctcttatcagtgtgcttgggccagctctcctgcctgtgtctagaggaagccagagacagaaataggctaagcctgcagtaggatctcagccacaagggccccgcaggatggagctgggtcaaggaccagggagccctgactcccagaggctgccaccggggagaagcagcggtcctccatccagaacctaagggctgaagcaaaggctgccaggacccttgaagatgcttttggctcacctcatttcaccccacgctctgctggctggcagaggagaaggcagtcgtttcctctctgaagagtatttttttcgattgccctctggttagggtgcacatataaatcagagttaatatatgaacgcgtgtgcatgcacaagtgtgtgtgtgcctgcgtgctgtgcgtggcagggtgtgtgtgtgtgtgtctggctgtgcgttccggagtgtgtgacgatgctgacctagctgtgtggccttgggcttgctgcttcattactcacctggatggggacgagggatgagaagggtgtgggtttggccccatgtcactggccggaaggatgtgtctcagccctgccctgtggggtgcccccgatgggaggctgtcccatctcccagtccccatctctttttccccacactgtccctggccaagccctgcccagagctgaaccctgtagctgcccccttgccctgtgtgggattcgcagtgtctcatttggtgacgtcttactggtgatcatctcctcaccccatctcccaccttgtggaataaatacatgttagcacttcccaaaaaaaaaac

SEQ ID NO: 345379 - DNA, 996 bp, Homo sapiens
cctccacatctgtcctcacatcatgggtgctacccgccctctccataccccatcagctttaggaatcagtcttcgtttgagaaagagtaaagcacccccaacccccatagctctccttctgcatcagagaagctgcaaggatgcctcaagagaccagccgccagcacaggcctcaaaggcaggtgcacccctgcgaggacgcatggctcgggtggctcctgggagcctctggaaggggcgtcatcagccctgtcccaccctccgcggggccttgtacgcgtacaaggccccgcaggatggagctgggtcaaggaccagggagccctgactcccagaggctgccaccggggagaagcagcggtcctccatccagaacctaagggctgaagcaaaggctgccaggacccttgaagatgcttttggctcacctcatttcaccccacgctctgctggctggcagaggagaaggcagtcgtttcctctctgaagagtatttttttcgattgccctctggttagggtgcacatataaatcagagttaatatatgaacgcgtgtgcatgcacaagtgtgtgtgtgcctgcgtgctgtgcgtggcagggtgtgtgtgtgtgtgtctggctgtgcgttccggagtgtgtgacgatgctgacctagctgtgtggccttgggcttgctgcttcattactcacctggatggggacgagggatgagaagggtgtgggtttggccccatgtcactggccggaaggatgtgtctcagccctgccctgtggggtgcccccgatgggaggctgtcccatctcccagtccccatctctttttccccacactgtccctggccaagccctgcccagagctgaaccctgtagctgcccccttgccctgtgtgggattcgcagtgtctcatttggtgacgtcttactggtgatcatctcctcaccccatctcccaccttgtggaataaatacatgttagcacttcccaaaaaaaaaac

SEQ ID NO: 345380 - DNA, 580 bp, Homo sapiens
  misc_feature (32)..(32): n is a, c, g, or t
  misc_feature (36)..(38): n is a, c, g, or t
  misc_feature (40)..(40): n is a, c, g, or t
  misc_feature (57)..(57): n is a, c, g, or t
aaaaaaaaaaaaaaaaaaaaaaaaaaaaaganaaannnanataggaaagaagcaacnctcctactgtgcatgtctgataaactgtgggaacagatagtccagtcgacctgcgacaccatcactcctgacgtgagggccctggcggaggacacaggctggagacagctgttcttcaccaacaagctccagctccagcggcagctccgcaagaggaaacaaaaatatggaaacctgagagaaaagcaaccttaggcacacattttcctaccagcagggagctcaggcatggctgtgtttctcttcagtgtccaaatctcttctgtctccttttcttaagaactaagaggttttgttgatgcgtggagccatttgaaactcgtaggggatttgcacacaaatgcagcagagtctggctccccagtgccttgctagagtcaccgtcattctgaggtcaaatcatggcccgaggacaagggctgtaagacagggagccccataggccatcatcatccttatcccacacccattataaaagaggtttctattgtatataaacaaacaataaatgattattagcagg

SEQ ID NO: 345381 - DNA, 502 bp, Homo sapiens
tggcacctgcagttaaaaccctaacaatatacattgtcattttacaaaataaaattaatagcttcacttctacttcattttaaaataagatcatctgcactctgaggcagcattcgtctgcccttgcaacgtgtaactgtcagagtggggtactacagaggactacctgcattatattccctcaaaaacggttttccactcaggaaagttattttcaattgggaaatctgttctgcccattcaaaaagtcttacagccactgatccatggccacagactgcactggaataacctcagaaataataatattagcagcttctatctattgtctactatgtgccaagaaataaacagatagtaaacaactgaattcttaacagcaatccttaaaagtaagtgatattatttctgtcatttctctcaggggtctacaaattatggcgtggacctaatctgaccagcctcctgatttataaataaagctttattggaacagtattta

SEQ ID NO: 345382 - DNA, 785 bp, Homo sapiens
tgtctgagcgacggcggtggcgtcccaagatggcgtcgtggctgccggagactctctttgaaactgtaggacaaggcccgccgcctagcaaagactattaccagttactggtcacccggtctcaggtaatctttagatggtggaagatctctctaaggagtgagtatcgatcaacaaaacctggagaagcaaaagaaacccatgaagacttcctagagaattcacatcttcaaggtcaaactgccttaatatttggtgcaagaatattagactatgtcatcaatttgtgcaaaggtaaatttgacttccttgaacggctctcagacgatttgctcctgactatcatttcttatctggatcttgaagatattgccaggctttgtcaaacatcacacagatttgcaaagacagaatcttgctgctgtcgcccaggctggagtgcaatggtacaatctcggctcactgcaatctctgcctcctgggttcaagcaattctcctgcctcagcctcccaagtagctgggaccacaggccgaacaataccactattcttaactcattttagaggaaataaataaaaataaaatgtggagaacaggggacaacaaaagagaggcgcccagaggggtggaggagtgcaaagggggcgcaagaaaccagagagaacacggggaggaaagcatcagagaccatcaggggggtaacagggacaaatcaacccagggaacaggagccccccccagaagagacgcggggaaaaacaaagggggcccacgtgaaacacag

SEQ ID NO: 345383 - DNA, 1040 bp, Homo sapiens
tgtctgagcgacggcggtggcgtcccaagatggcgtcgtggctgccggagactctctttgaaactgtaggacaaggcccgccgcctagcaaagactattaccagttactggtcacccggtctcagaaaaattgagtttgcatagccgggcgcagtggcttacgcctgtaatcccagcactttgggaggccgagccaggtggatcacgacgtctggagttggagaccagcctgacaaacatggtaatctttagatggtggaagatctctctaaggagtgagtatcgatcaacaaaacctggagaagcaaaagaaacccatgaagacttcctagagaattcacatcttcaaggtcaaactgccttaatatttggtgcaagaatattagactatgtcatcaatttgtgcaaaggtaaatttgacttccttgaacggctctcagacgatttgctcctgactatcatttcttatctggatcttgaagatattgccaggctttgtcaaacatcacacagatttgcaaagctgtgcatgtctgataaactgtgggaacagatagtccagtcgacctgcgacaccatcactcctgacgtgagggccctggcggaggacacaggctggagacagctgttcttcaccaacaagctccagctccagcggcagctccgcaagaggaaacaaaaatatggaaacctgagagaaaagcaaccttaggcacacattttcctaccagcagggagctcaggcatggctgtgtttctcttcagtgtccaaatctcttctgtctccttttcttaagaactaagaggttttgttgatgcgtggagccatttgaaactcgtaggggatttgcacacaaatgcagcagagtctggctccccagtgccttgctagagtcaccgtcattctgaggtcaaatcatggcccgaggacaagggctgtaagacagggagccccataggccatcatcatccttatcccacacccattataaaagaggtttctattgtatataaacaaacaataaatgattattagcagg

SEQ ID NO: 345384 - DNA, 1129 bp, Homo sapiens
tgtctgagcgacggcggtggcgtcccaagatggcgtcgtggctgccggagactctctttgaaactgtaggacaaggcccgccgcctagcaaagactattaccagttactggtcacccggtctcaggtaatctttagatggtggaagatctctctaaggagtgagtatcgatcaacaaaacctggagaagcaaaagaaacccatgaagacttcctagagaattcacatcttcaaggtcaaactgccttaatatttggtgcaagaatattagactatgtcatcaatttgtgcaaaggtaaatttgacttccttgaacggctctcagacgatttgctcctgactatcatttcttatctggatcttgaagatattgccaggctttgtcaaacatcacacagatttgcaaagctgtgcatgtctgataaactgtgggaacagatagtccagtcgacctgcgacaccatcactcctgacgtgagggccctggcggaggacacaggctggagacagctgttcttcaccaacaagctccagctccagcggcagctccgcaagaggaaacaaaaatatggaaacctgagagaaaagcaaccttaggcacacattttcctaccagcagggagctcaggcatggctgtgtttctcttcagtgtccaaatctcttctgtctccttttcttaagaactaagaggttttgttgatgcgtggagccatttgaaactcgtaggggatttgcacacaaatgcagcagagtctggctccccagtgccttgctagagtcaccgtcattctgaggtcaaatcatggcccgaggacaagggctgtaagacagggagccccataggccatcatcatccttatcccacacccattataaaagaggtttctattgtatataaacaaacaataaatgattattagcaggaaaaaacaggaaaaaagacccccgcaggagcactcaatgaccggatggcagggacaatcgggggaacatgacacggtgcaacatggggacaacagcgaagctaccgcggacccagcgacctctcatataccaacgtgggcaagactggccgagcccccaaataagacagccctcataaattcagaaacgccgataaccgggataa

SEQ ID NO: 345385 - DNA, 1193 bp, Homo sapiens
  misc_feature (1121)..(1121): n is a, c, g, or t
  misc_feature (1193)..(1193): n is a, c, g, or t
tgtctgagcgacggcggtggcgtcccaagatggcgtcgtggctgccggagactctctttgaaactgtaggacaaggcccgccgcctagcaaagactattaccagttactggtcacccggtctcaggtaatctttagatggtggaagatctctctaaggagtgagtatcgatcaacaaaacctggagaagcaaaagaaacccatgaagacttcctagagaattcacatcttcaaggtcaaactgccttaatatttggtgcaagaatattagactatgtcatcaatttgtgcaaaggtaaatttgacttccttgaacggctctcagacgatttgctcctgactatcatttcttatctggatcttgaagatattgccaggctttgtcaaacatcacacagatttgcaaagctgtgcatgtctgataaactgtgggaacagatagtccagtcgacctgcgacaccatcactcctgacgtgagggccctggcggaggacacaggctggagacagctgttcttcaccaacaagctccagctccagcggcagctccgcaagaggaaacaaaaatatggaaacctgagagaaaagcaaccttaggcacacattttcctaccagcagggagctcaggcatggctgtgtttctcttcagtgtccaaatctcttctgtctccttttcttaagaactaagaggttttgttgatgcgtggagccatttgaaactcgtaggggatttgcacacaaatgcagcagagtctggctccccagtgccttgctagagtcaccgtcattctgaggtcaaatcatggcccgaggacaagggctgtaagacagggagccccataggccatcatcatccttatcccacacccattataaaagaggtttctattgtatataaacaaacaataaatgattattagcaggctaaaaaaacaaacaaactctggcctcgctggactaaacggcggcaccctgaggacgctttcctttaccgaggtgtaattcctggtccccccgtaactgactctgtgcaaccagacccgacactcatgccatgctccatccccttgctacaccgggtgcagaccccctccccacgatcctggcgagcgctccgagcnaagctgcatggcagagcgcccgccaccgctctccgtcgcatcacagcgcaccacacaggcctaccccatgcn

SEQ ID NO: 345386 - DNA, 821 bp, Homo sapiens
tgtctgagcgacggcggtggcgtcccaagatggcgtcgtggctgccggagactctctttgaaactgtaggacaaggcccgccgcctagcaaagactattaccagttactggtcacccggtctcagaaaaattgagtttgcatagccgggcgcagtggcttacgcctgtaatcccagcactttgggaggccgagccaggtggatcacgacgtctggagttggagaccagcctgacaaacatggtaatctttagatggtggaagatctctctaaggagtgagtatcgatcaacaaaacctggagaagcaaaagaaacccatgaagacttcctagagaattcacatcttcaaggtcaaactgccttaatatttggtgcaagaatattagactatgtcatcaatttgtgcaaaggtaaatttgacttccttgaacggctctcagacgatttgctcctgactatcatttcttatctggatcttgaagatattgccaggctttgtcaaacatcacacagatttgcaaagctgtgcatgtctgataaactgtgggaacagatagtccagtcgacctgcgacaccatcactcctgacgtgagggccctggcggaggacacaggctggagacagctgttcttcaccaacaagctccagctccagcggcagctccgcaagaggaaacaaaaatatggaaacctgagagaaaagcaaccttaggcacacattttcctaccagcagggagctcaggggtctacaaattatggcgtggacctaatctgaccagcctcctgatttataaataaagctttattggaacagtattta

SEQ ID NO: 345387 - DNA, 712 bp, Homo sapiens
tgtctgagcgacggcggtggcgtcccaagatggcgtcgtggctgccggagactctctttgaaactgtaggacaaggcccgccgcctagcaaagactattaccagttactggtcacccggtctcaggtaatctttagatggtggaagatctctctaaggagtgagtatcgatcaacaaaacctggagaagcaaaagaaacccatgaagacttcctagagaattcacatcttcaaggtaaggaacggaacatattatatacccctgttaagttctcattagttagtggtagattttgttaaagaagtttcaaatatattttcacttgaaatattgatatgcagttatgtacttacatatacaatgttagattcttaaaaactagaaaactgttgtttttttctcttggaaaacatattagcatttggccgggcgcggtcgctcatgcctgtaatcccaacactttgggaggccgaggcgggtggatcatgatgtcaggagttcgagaccagcctggccaagatggtgaaaccctgtctctactaaaaatacaaaaattagccgggcatgttggcacatgcctgttatcctagctactcaggaggctgaggcaggagaatcacttgaacccaggaggcagaggttgcagtgagctgagatcagaccattgcactccagcctgggcaacaagaacaaaattctgtcttaaaaaaaa

SEQ ID NO: 345388 - DNA, 924 bp, Homo sapiens
tgtctgagcgacggcggtggcgtcccaagatggcgtcgtggctgccggagactctctttgaaactgtaggacaaggcccgccgcctagcaaagactattaccagttactggtcacccggtctcaggtaatctttagatggtggaagatctctctaaggagtgagtatcgatcaacaaaacctggagaagcaaaagaaacccatgaagacttcctagagaattcacatcttcaaggtcaaactgccttaatatttggtgcaagaatattagactatgtcatcaatttgtgcaaaggtaaatttgacttccttgaacggctctcagacgatttgctcctgactatcatttcttatctggatcttgaagatattgccaggctttgtcaaacatcacacagatttgcaaagctgtgcatgtctgataaactgtgggaacagatagtccagtcgacctgcgacaccatcactcctgacgtgagggccctggcggaggacacaggctggagacagctgttcttcaccaacaagctccagctccagcggcagctccgcaagaggaaacaaaaatatggaaacctgagagaaaagcaaccttaggcacacattttcctaccagcagggagctcaggcatggctgtgtttctcttcagtgtccaaatctcttctgtctccttttcttaagaactaagaggttttgttgatgcgtggagccatttgaaactcgtaggggatttgcacacaaatgcagcagagtctggctccccagtgccttgctagagtcaccgtcattctgaggtcaaatcatggcccgaggacaagggctgtaagacagggagccccataggccatcatcatccttatcccacacccattataaaagaggtttctattgtatataaacaaacaataaatgattattagcagg

SEQ ID NO: 345389 - DNA, 617 bp, Homo sapiens
tctcggcacattttctttaattggattctctgtctctttcatttccctaactttgctgagctggttttaagccagcaactctgattttcacttgtgctactcctccatgaattgattattgatgaattaattatccacctatgacctcattcacagtaagtcatgagtaaaaggcacctactcctgttccctgatgtagcccagtagagcctgcaccaatacggctgtggcctgaccagtcactatatgattatgaaaggagatccaacttaaactaaagggaattattttgaacaagattcatcaaaatcagagcacatatctcaccatattcagacagctgaggatagttgtccatccctctactaaccaatcactacctataacacagtctggattctttcgtaattcttggtacatagaagcttctcagaaattatttgatgaaaggatggataaatgaataaataaattattataaacacttgctataagatctaagaataattacactggttgttaagggtgtgtatgaaataacaaaatataatgaatccttaattagtagaatatatttaatgatttccatttacatttatatcaagaaaaaaaaagga

SEQ ID NO: 345390 - DNA, 269 bp, Homo sapiens
tttgattctggctgcctgaggttacccccagcctccagatgtcctagtctcctttctctgggttttgtgctgcggtttctgttgctctgtcttgatcttcactaattgcctgcagtgtctagttctctgtgaatcccatccatggtgtttcattttcaaactttttaaatttttttttatttttagaagtttgacttggattttttttaaatgaaaatctttatctcttcttttttttctatgtatttatcaattaattataattattt

SEQ ID NO: 345391 - DNA, 360 bp, Homo sapiens
aatttacccagaatagcttgttcagattaaatgcacacagtggttgaaaagcaaacttgattctgctccaaaatattctggatgcactttctgaccttctttttctattgtggattaagaaggtgccaaggcgggcagatcacgaggtcaggagatcgagaccatcctggctaacacggtgaaaccctgtctctactaaaatacaaaaaattagccaggcatggtggtgggcacctgtagtcccagctactcaggaggctgagacaggggaatcgcttgaacctgggaggcagagattgccgagatcatgccactgcactccagcctggtgacagagcgagactctgtctcaaaacaaag

SEQ ID NO: 345392 - DNA, 495 bp, Homo sapiens
tggtccatttaccttgataaggtatcattctatacacagtgttcacatggggtagagcctcagggactagtcctaatattttttcaagagcaaagacaggaatttattttatggacatttttggagatggggcgctggcagaaaacatcgtgttcagaaatttctgaagaatgcaaagttgagtgctattgcatgagtcatcctgcagttggttgtttgttatatttttagcaataaagacattccgagctgaagtcgtcctacccagttttcaaagtgctacagcatatggtggcgagattagcccttggggtctcttctccccacactgtgcgagggatttacaccagtcactttaattaatctaatcataaaaataagaatcatgtcattcagaatgtgtggcctcccttttgccaggcatcagtattaatgattctactggcataaattttttgcacatcagtgagagattccaactattagttaaaaatt

SEQ ID NO: 345393 - DNA, 331 bp, Homo sapiens
cagcaccatgtttccatcagttctacttcccacccctatctgcccaagacccacaggggtgatgcagtatgagcctagatgggtgtctgcacgtgcagttggttacattggaggagagaagcactgggcctgaggaatctacaattttatagcagtcagtaaccaagtgtgctctttgtcttaggagatattacctcatctcttaaagttgctggctataaacacaaccctgaaaatgccctggataaagagcaatcagagcctttcattcttatttctagcaggaacgtacagggatgctcagagagaatggtggattgccacttccaac

SEQ ID NO: 345394 - DNA, 495 bp, Homo sapiens
ctatatatatgtgtatatatatgtgtgtgtatatatatatatatgtatgtatttcacaatcttctctactaaataataattctttgggactttttttcataaacacaaatgtctcaaaattaaacacatttaaaaagtattaattcagcctggagaaaaaggctactctgattatacagatattattattgttttcactagcaatagagaatggcattgtctaatgaattcataaataccacatttaatttttacataaaaatggtgttgctaaggtgcatacagagttgtacagggagagagaggcggagaacttaatgttagttgaagtctcactgttgtcttgttgaagctataatttttctttgtagatgcattatttttcacatagaatagaacaccaaacacttttattactcttggattaaagaaaaaggattagctattttttaagtggttagttattttgaattaaggaaattagaactagtgaga

SEQ ID NO: 345395 - DNA, 355 bp, Homo sapiens
tacagaatcaatctaagtgtccatcaatggatggttggataaagaaaatgtgatgtgtgtatatatatctgtcacatttcatggcgagatatatatatcacatttcatggtgtatgtatatattcagccattaaaacagggtgaaatcatgtttcttgcagcaacatattaatagatgggactagaggtcattatcttaagtgaaacaactcagaaacagaaagtcaaatactgcatgttctcacatataagtggacctaaataatgtgtagaaatggacatacagtatggaataatagacactggagactcagaagggtgagagggagttgagggctgtgaaattacttaatgg

SEQ ID NO: 345396 - DNA, 686 bp, Homo sapiens
gtttcaccatgttggccatgctggtctcctgacctcaggtgatccacccgcctcggcctcccaaagtgctaggattacaggcgtgagccactgcacccggcctgaatcacgtttaatagtagtgagcatatcaatctggttattgggactattaagacttttgtgactttaaaacaaacaatttttttttgttgttgagattgtgtgttgctctgtcgcccaggctggagcgcagtggtgcgatcttagctcactgcaacctctgcctcccaggctcaagtgatccttccgcctcagccttctgagtagctgggactataggtgtacaccaacacgccaagataacttttatattttttgtagagatggagttttgccatgtcacccaggctggtcttgaactcctggactcaagcgatccacttgccttggcctcccaaagtgctgggattacaggcatgagccactgcgcccagccagtgacttttaaaatatttttctgaataaaatatagcatgcattgttaaaaaaaaacctataaaatacagaaaacataaaactaatgaacttttaatattattgctgataaccttgtggcacgttcacatactcagacatagttttacatagttcagactatattatccagttttgtacccagttagaaaattataagcatcattcca

SEQ ID NO: 345397 - DNA, 841 bp, Homo sapiens
tcaagggtttatgcataggagtaagagaaaaatgatacttgtagcccttacaattgtatgactatcctgaacactcctaccgttattcataaaacttttattatgatgtagttgtgctcaaatacttccgagtgcttaccatgtcttgtatacctatgttgttcattacagtagccactagccacatgtggccattaagcacttgaaatgcggctagtccaaattgaaatttactgtaagtgtaaaatacacattggattttgaagacttaattaaaaaatagcatgtaggccgggcacagtggatcacctgaggtcaggagttcgagaccagcctggccaacatggtgaaaccctgtctctaccaaaaatacaaaaattagccaggtgtggtggtgcacgcctatagtctcagctactcaggaggctgaggcaggagaattgcttgaacccaggaggcggaggttgcagtgagccgagatcatgccactgcactccagcctggggcaacagagtgagactctgtctcaaaaaaaaaaaaaaaagcatgtaaagtatctcattaatttttaaattttgaatacatgttcatatggtaatatagtatttgataataaggcagtagtcattttctcaaggcctccatcataaaaatgcagatgactatttatatttttttgtgaatttctcggtgtaaataattccccaaatgatcatactttatattctccggactgcgtgcctcgatgtttgtttgtgctcttgtactggccctccttttctttaatgcctagctcttctaattcatcatagtccttagtttctttttccttgagctgaac

SEQ ID NO: 345398 - DNA, 552 bp, Homo sapiens
ggatctgccgcctcagcctcccaaagtgctgagattacaggtgtgcaccaccatgcccagccgagaagtgaaatttaatgttattaaggatgaggtcatactggaggtggtaggcccttaatccaatgtgattggtgtcatcacgagcagacggccactgaagacacagacacacagggagagcactgtgtgatgactgaggcagggattgagccatgcagctgtgaggaaccccaaagcatgccagccaacccccagaaccccaggcaaggcaaggaagaactcccctacaggtttcagagggagcatggtggacaagctgactttggacttctggacaacagaactgtggttttgttttcagccacctagttggggatcagcccttagaaactgagacaatgcccaactcaggccctggctcttttccacgcacagagtgagagagctttaaatatacaaagagatggctctccaaagcctcccacaatagactgaccatctcacccagccaatctttctggacccaaagtggatttcgtaaccaatttc

SEQ ID NO: 345399 - DNA, 126 bp, Homo sapiens
acacacacacacacacacacacacgcacacaagtacctaaactaatacaactaataaatgattttagcaagattgtatgatttaacatcaatataaatatcatttatgtttctatacaataactac

SEQ ID NO: 345400 - DNA, 404 bp, Homo sapiens
cccctggtggcctgtgctcagggcacctgagggatgcaatggacagtgaggctggaacagatgatggctgtgcctcccatgttagggtagggactttgggctttatcttgcaggtagggagcctttgaaggttttttgacaatgcccagggaggttccattagcttaggggaggaggagcaggaagatgagaacatgaggagtttagtgtgggatgtgttgagtttgaggctctgtggaacatccagtggttgccttgtggtaggcagttggatttatgagccaagactcaggaaaagttctggactagggttagagatctgagaggtattggtagttgatagttagaggattgactatgaatggaactgtacaggccaggcacagttactcacacctttaatc

SEQ ID NO: 345401 - DNA, 988 bp, Homo sapiens
cccacctccactccccactcatttttaatacccgtgcagtggggaattgatactgtggttttcaatgtcacccacactgcagcacggccacagtcaccatcccgatttttgctacaaatgaaaattactttataatgagctccttaacacttttctttaaacctgtgtttggaagacttgcgttggtgtggccctgtgcccaatacctgtgaaatcacagcaccgatgagctggttccaatttttaaaatatatacatgcagtacttccatgactattcaaagaaaaacaattccttccatttgccatctgagatgaccaccagtggtgtgaactacctcctgcccccatctgcagtcccaggatcctgggacagggcttatgaacacaaccactgtagtcagctcacctgatccacagcctggcacccccactgtctggctagggagcctcgaatgggtcccaaggccaccctgctcctcagttacatcatctgcatagtagtggtggttgtgaggaattcaggagctgcagcataagggctcggcaggtcctaagtgcacagtaaatgccagtgattcttaagagtctgagctcccattgtagaggcaagtaagctgaggttcagagacagaaaatgacttgcccaagatcacccagctgggaagtgacagtgccagggttggagccctggttgagctggttccacaggccagagctcattctgccctctccccggaagacctcccaccctgtccccatgcctctgcttctccctcaccccaattccccgctgccttctaggataagtgtgagccactggagaagcagcacgagaaggagaggaaacaggaggagggggaatcctagcaggacacagccttggatcaggacagagacttgggggccatcctgcccctccaacccgacatgtgtacctcagctttttccctcacttgcatcaataaagcttctgtgtttggaacagc

SEQ ID NO: 345402 - DNA, 1257 bp, Homo sapiens
ggcggtgctccgagctggcctttgggggaggttttgtgcgaggcatttcccaagtgctggcaggattgtgtcacagacacagagtaaacttttgctgggctccaagtgaccgcccatagtttattataaaggtgactgcaccctgcagccaccagcactgcctggctccacgtgcctcctggtctcagtatggcgctgtcctgggttcttacagtcctgagcctcctacctctgctggaagcccagatcccattgtgtgccaacctagtaccggtgcccatcaccaacgccaccctggaccggatcactggcaagtggttttatatcgcatcggcctttcgaaacgaggagtacaataagtcggttcaggagatccaagcaaccttcttttacttcacccccaacaagacagaggacacgatctttctcagagagtaccagacccgacaggaccagtgcatctataacaccacctacctgaatgtccagcgggaaaatgggaccatctccagatacgtgggaggccaagagcatttcgctcacttgctgatcctcagggacaccaagacctacatgcttgcttttgacgtgaacgatgagaagaactgggggctgtctgtctatgctgacaagccagagacgaccaaggagcaactgggagagttctacgaagctctcgactgcttgcgcattcccaagtcagatgtcgtgtacaccgattggaaaaaggataagtgtgagccactggagaagcagcacgagaaggagaggaaacaggaggagggggaatcctagcaggacacagccttggatcaggacagagacttgggggccatcctgcccctccaacccgacatgtgtacctcagctttttccctcacttgcatcaataaagcttctgtgtttggaacagcacaaaacaaaaaaaacaacaaaacaaaaacaatttttggggcggcttggccctgaggagagcttttgcaaaacccctcttggtgggggcgcgggcgccaagaaaggtaacgtgcaaacgttgcgcactaaagcgggggttccccaagagaaagaccctggggcgcaaagaacacagcggcgtggggcctccctcccaaattaaaaaaccgccgggggggacaccggccgcgttctgtaaacaacctccagaaggagagactaggcggaccaaccgggggcctctacagggcgggggcccacgaggagagcgaaaataaaacgccggcgccgtgtggtggggtc

SEQ ID NO: 345403 - DNA, 743 bp, Homo sapiens
  misc_feature (31)..(31): n is a, c, g, or t
  misc_feature (35)..(35): n is a, c, g, or t
  misc_feature (38)..(38): n is a, c, g, or t
  misc_feature (42)..(43): n is a, c, g, or t
  misc_feature (46)..(46): n is a, c, g, or t
  misc_feature (53)..(53): n is a, c, g, or t
  misc_feature (60)..(60): n is a, c, g, or t
  misc_feature (62)..(62): n is a, c, g, or t
  misc_feature (66)..(66): n is a, c, g, or t
  misc_feature (83)..(84): n is a, c, g, or t
  misc_feature (99)..(99): n is a, c, g, or t
  misc_feature (108)..(109): n is a, c, g, or t
  misc_feature (130)..(130): n is a, c, g, or t
aaggtttttgaaaaaaaaaaaaaccgccganccantangccnntcngggtctncaatctnanctcnaccttgctgaagccagnnccattgtgtccaacntagtcgggnnccatcacaacgcaccctgacnagatcactggcaagtggttttatatcgcatcggcctttcgaaacgaggagtacaataagtcggttcaggagatccaagcaaccttcttttacttcacccccaacaagacagaggacacgatctttctcagagagtaccagacccgacaggaccagtgcatctataacaccacctacctgaatgtccagcgggaaaatgggaccatctccagatacgtgggaggccaagagcatttcgctcacttgctgatcctcagggacaccaagacctacatgcttgcttttgacgtgaacgatgagaagaactgggggctgtctgtctatgctgacaagccagagacgaccaaggagcaactgggagagttctacgaagctctcgactgcttgcgcattcccaagtcagatgtcgtgtacaccgattggaaaaaggataagtgtgagccactggagaagcagcacgagaaggagaggaaacaggaggagggggaatcctagcaggacacagccttggatcaggacagagacttgggggccatcctgcccctccaacccgacatgtgtacctcagctttttccctcacttgcatcaataaagcttctgtgtttggaacagc

SEQ ID NO: 345404 - DNA, 765 bp, Homo sapiens
ggggatttttaggggcggttggctttgttgggtgagcttgtttgtgtccctgtgggtggacgtggttggtgattggcaggatcctggtatccgctaacaggtcaaaatgcagatcttcgtgaaaacccttaccggcaagaccatcacccttgaggtggagcccagtgacaccatcgaaaatgtgaaggccaagatccaggataaggaaggcattccccccgaccagcagaggctcatctttgcaggcaagcagctggaagatggccgcactctttctgactacaacatccagaaggagtcgaccctgcacctggtcctgcgtctgagaggtggtatgcagatcttcgtgaagaccctgaccagatacgtgggaggccaagagcatttcgctcacttgctgatcctcagggacaccaagacctacatgcttgcttttgacgtgaacgatgagaagaactgggggctgtctgtctatgctgacaagccagagacgaccaaggagcaactgggagagttctacgaagctctcgactgcttgcgcattcccaagtcagatgtcgtgtacaccgattggaaaaaggataagtgtgagccactggagaagcagcacgagaaggagaggaaacaggaggagggggaatcctagcaggacacagccttggatcaggacagagacttgggggccatcctgcccctccaacccgacatgtgtacctcagctttttccctcacttgcatcaataaagcttctgtgtttggaacagc

SEQ ID NO: 345405 - DNA, 350 bp, Homo sapiens
cagaacgtgggaggccaagaggacgtgaacgatgagaagaactgggggctgtctgtctatgctgacaagccagagacgaccaaggagcaactgggagagttctacgaagctctcgactgcttgcgcattcccaagtcagatgtcgtgtacaccgattggaaaaaggataagtgtgagccactggagaagcagcacgagaaggagaggaaacaggaggagggggaatcctagcaggacacagccttggatcaggacagagacttgggggccatcctgcccctccaacccgacatgtgtacctcagctttttccctcacttgcatcaataaagcttctgtgtttggaacagc

SEQ ID NO: 345406 - DNA, 1261 bp, Homo sapiens
ggcggtgctccgagctggcctttgggggaggttttgtgcgaggcatttcccaagtgctggcaggattgtgtcacagacacagagtaaacttttgctgggctccaagtgaccgcccatagtttattataaaggtgactgcaccctgcagccaccagcactgcctggctccacgtgcctcctggtctcagtatggcgctgtcctgggttcttacagtcctgagcctcctacctctgctggaagcccagatcccattgtgtgccaacctagtaccggtgcccatcaccaacgccaccctggaccggatcactggcaagtggttttatatcgcatcggcctttcgaaacgaggagtacaataagtcggttcaggagatccaagcaaccttcttttacttcacccccaacaagacagaggacacgatctttctcagagagtaccagacccgacaggaccagtgcatctataacaccacctacctgaatgtccagcgggaaaatgggaccatctccagatacgtgggaggccaagagcatttcgctcacttgctgatcctcagggacaccaagacctacatgcttgcttttgacgtgaacgatgagaagaactgggggctgtctgtctatgctgacaagccagagacgaccaaggagcaactgggagagttctacgaagctctcgactgcttgcgcattcccaagtcagatgtcgtgtacaccgattggaaaaaggataagtgtgagccactggagaagcagcacgagaaggagaggaaacaggaggagggggaatcctagcaggacacagccttggatcaggacagagacttgggggccatcctgcccctccaacccgacatgtgtacctcagctttttccctcacttgcatcaataaagcttctgtgtttggaacagccagagcgggactttaccttcattaaacctctgcaaagctaaccatgaattcttagtctactgtgaaaatcgatggggtctggacacatgcgatggactgagttacagaagagacttgatggcagcgaaagatgtcatgaagaccaccggggattgcggactccacgacacgatttaggaccaaactgacgtactaactgggaccacacgaaataacgatcggcgaaaggcaaaggagtcagttgacaacacacacaagacgcccgcgcgagaagcactagcttgtcaccacgaacagtggcggggagagacgaaacggcaacaagcaaggacacggaccctaaatag

SEQ ID NO: 345407 - DNA, 1078 bp, Homo sapiens
ggcggtgctccgagctggcctttgggggaggttttgtgcgaggcatttcccaagtgctggcaggattgtgtcacagacacagagtaaacttttgctgggctccaagtgaccgcccatagtttattataaaggtgactgcaccctgcagccaccagcactgcctggctccacgtgcctcctggtctcagtatggcgctgtcctgggttcttacagtcctgagcctcctacctctgctggaagcccagatcccattgtgtgccaacctagtaccggtgcccatcaccaacgccaccctggaccggatcactggcaagtggttttatatcgcatcggcctttcgaaacgaggagtacaataagtcggttcaggagatccaagcaaccttcttttacttcacccccaacaagacagaggacacgatctttctcagagagtaccagacccgacaggaccagtgcatctataacaccacctacctgaatgtccagcgggaaaatgggaccatctccagatacgtgggaggccaagagcatttcgctcacttgctgatcctcagggacaccaagacctacatgcttgcttttgacgtgaacgatgagaagaactgggggctgtctgtctatgctgacaagccagagacgaccaaggagcaactgggagagttctacgaagctctcgactgcttgcgcattcccaagtcagatgtcgtgtacaccgattggaaaaaggataagtgtgagccactggagaagcagcacgagaaggagaggaaacaggaggagggggaatcctagcaggacacagccttggatcaggacagagacttgggggccatcctgcccctccaacccgacatgtgtacctcagctttttccctcacttgcatcaataaagcttctgtgtttggaacagccaaaaaaaaaaaaacaaattgtcggcgccccggaaaatttaacactccgtgggccgcccaagaaaaaggaacgtcgtccagacccgctcgaggcggcccaaaaccggggcggcgacacaagtcgttcttcaccccccccccctcccgcaaacaataacccccaa

SEQ ID NO: 345408 - DNA, 845 bp, Homo sapiens
ggcggtgctccgagctggcctttgggggaggttttgtgcgaggcatttcccaagtgctggcaggattgtgtcacagacacagagtaaacttttgctgggctccaagtgaccgcccatagtttattataaaggtgactgcaccctgcagccaccagcactgcctggctccacgtgcctcctggtctcagtatggcgctgtcctgggttcttacagtcctgagcctcctacctctgctggaagcccagatcccattgtgtgccaacctagtaccggtgcccatcaccaacgccaccctggaccggatcactggcaagtggttttatatcgcatcggcctttcgaaacgaggagtacaataagtcggttcaggagatccaagcaaccttcttttacttcacccccaacaagacagaggacacgatctttctcagagagtaccagacccgacaggaccagtgcatctataacaccacctacctgaatgtccagcgggaaaatgggaccatctccagatacgtgggaggccaagagcatttcgctcacttgctgatcctcagggacaccaagacctacatgcttgcttttgacgtgaacgatgagaagaactgggggctgtctgtctatgctgacaagccagagacgaccaaggagcaactgggagagttctacgaagctctcgactgcttgcgcattcccaagtcagatgtcgtgtacaccgattggaaaaagcgggtaagtccgtaccggacacaggctgggagcagggcagagaactggggggccatggttgcgcgggcaggcggacatgtggaccttaacgtgtttccttcggtgcgcataggggg

SEQ ID NO: 345409 - DNA, 828 bp, Homo sapiens
ggcggtgctccgagctggcctttgggggaggttttgtgcgaggcatttcccaagtgctggcaggattgtgtcacagacacagagtaaacttttgctgggctccaagtgaccgcccatagtttattataaaggtgactgcaccctgcagccaccagcactgcctggctccacgtgcctcctggtctcagtatggcgctgtcctgggttcttacagtcctgagcctcctacctctgctggaagcccagatcccattgtgtgccaacctagtaccggtgcccatcaccaacgccaccctggaccggatcactggcaagtggttttatatcgcatcggcctttcgaaacgaggagtacaataagtcggttcaggagatccaagcaaccttcttttacttcacccccaacaagacagaggacacgatctttctcagagagtaccagacccgacaggaccagtgcatctataacaccacctacctgaatgtccagcgggaaaatgggaccatctccagatacgtgggaggccaagagcatttcgctcacttgctgatcctcagggacaccaagacctacatgcttgcttttgacgtgaacgatgagaagaactgggggctgtctgtctatgctgacaagccagagacgaccaaggagcaactgggagagttctacgaagctctcgactgcttgcgcattcccaagtcagatgtcgtgtacaccgattggaaaaaggtaaacgcaagggattggacagtgcccaccttgtccatggcccaacttgggcagccccagaggcccagagcaggagagctgccaggcaaggctgcacag

SEQ ID NO: 345410 - DNA, 824 bp, Homo sapiens
gatagatgattggttcgacgtgcgtcctgagtctcgtaattgaacatgtgtctgtagtctgttacactagcgtaaatccttggtacactcatgtatgtgaattgccatacttcacactagtgtgacaacgcctcaggtagcgcgagatgcgcaatgcttctgaaagcacaatcctggatgcgaagattcatgtgggctcaattggcttgtgaatctatcaaatcagggagttctcagaagacgcaggacgtcaggataatcataatgtacggcctcgggactatccaagcaaccttcttttacttcacccccaacaagacagaggacacgatctttctcagagagtaccagacccgacaggaccagtgcatctataacaccacctacctgaatgtccagcgggaaaatgggaccatctccagatacgtgggaggccaagagcatttcgctcacttgctgatcctcagggacaccaagacctacatgcttgcttttgacgtgaacgatgagaagaactgggggctgtctgtctatgctgacaagccagagacgaccaaggagcaactgggagagttctacgaagctctcgactgcttgcgcattcccaagtcagatgtcgtgtacaccgattggaaaaaggataagtgtgagccactggagaagcagcacgagaaggagaggaaacaggaggagggggaatcctagcaggacacagccttggatcaggacagagacttgggggccatcctgcccctccaacccgacatgtgtacctcagctttttccctcacttgcatcaataaagcttctgtgtttggaacagc

SEQ ID NO: 345411 - DNA, 855 bp, Homo sapiens
ggcggtgctccgagctggcctttgggggaggttttgtgcgaggcatttcccaagtgctggcaggattgtgtcacagacacagagtaaacttttgctgggctccaagtgaccgcccatagtttattataaaggtgactgcaccctgcagccaccagcactgcctggctccacgtgcctcctggtctcagtatggcgctgtcctgggttcttacagtcctgagcctcctacctctgctggaagcccagatcccattgtgtgccaacctagtaccggtgcccatcaccaacgccaccctggaccggatcactggcaagtggttttatatcgcatcggcctttcgaaacgaggagtacaataagtcggttcaggagatccaagcaaccttcttttacttcacccccaacaagacagaggacacgatctttctcagagagtaccagacccgacaggaccagtgcatctataacaccacctacctgaatgtccagcgggaaaatgggaccatctccagatacgtgggaggccaagagcatttcgctcacttgctgatcctcagggacaccaagacctacatgcttgcttttgacgtgaacgatgagaagaactgggggctgtctgtctatgttgcgcattcccaagtcagatgtcgtgtacaccgattggaaaaaggataagtgtgagccactggagaagcagcacgagaaggagaggaaacaggaggagggggaatcctagcaggacacagccttggatcaggacagagacttgggggccatcctgcccctccaacccgacatgtgtacctcagctttttccctcacttgcatcaataaagcttctgtgtttggaacagc

SEQ ID NO: 345412 - DNA, 860 bp, Homo sapiens
ggcggtgctccgagctggcctttgggggaggttttgtgcgaggcatttcccaagtgctggcaggattgtgtcacagacacagagtaaacttttgctgggctccaagtgaccgcccatagtttattataaaggtgactgcaccctgcagccaccagcactgcctggctccacgtgcctcctggtctcagtatggcgctgtcctgggttcttacagtcctgagcctcctacctctgctggaagcccagatcccattgtgtgccaacctagtaccggtgcccatcaccaacgccaccctggaccggatcactggcaagtggttttatatcgcatcggcctttcgaaacgaggagtacaataagtcggttcaggagatccaagcaaccttcttttacttcacccccaacaagacagaggacacgatctttctcagagagtaccagacccgacaggaccagtgcatctataacaccacctacctgaatgtccagcgggtgatcctcagggacaccaagacctacatgcttgcttttgacgtgaacgatgagaagaactgggggctgtctgtctatgctgacaagccagagacgaccaaggagcaactgggagagttctacgaagctctcgactgcttgcgcattcccaagtcagatgtcgtgtacaccgattggaaaaaggataagtgtgagccactggagaagcagcacgagaaggagaggaaacaggaggagggggaatcctagcaggacacagccttggatcaggacagagacttgggggccatcctgcccctccaacccgacatgtgtacctcagctttttccctcacttgcatcaataaagcttctgtgtttggaacagc

SEQ ID NO: 345413 - DNA, 960 bp, Homo sapiens
ggcggtgctccgagctggcctttgggggaggttttgtgcgaggcatttcccaagtgctggcaggattgtgtcacagacacagagtaaacttttgctgggctccaagtgaccgcccatagtttattataaaggtgactgcaccctgcagccaccagcactgcctggctccacgtgcctcctggtctcagtatggcgctgtcctgggttcttacagtcctgagcctcctacctctgctggaagcccagatcccattgtgtgccaacctagtaccggtgcccatcaccaacgccaccctggaccggatcactggcaagtggttttatatcgcatcggcctttcgaaacgaggagtacaataagtcggttcaggagatccaagcaaccttcttttactttacccccaacaagacagaggacacgatctttctcagagagtaccagacccgccagaaccagtgcttctataactccagttacctgaatgtccagcgggagaatgggaccgtctccagatacgagggaggccgagaacatgttcgctcacctgctgttccttagggacaccaagaccttgatgtttggttcctgacctggacgatgagaagaactgggggctgtctttctatgctgacaagccagagacgaccaaggagcaactgggagagttctacgaagctctcgactgcttgcgcattcccaagtcagatgtcgtgtacaccgactggaaggagggggaatcctagcaggacacagccttggatcaggacagagacttgggggccatcctgcccctccaacccgacatgtgtacctcagctttttccctcacttgcatcaataaagcttctgtgtttggaacagttttaaaaacacaattatttttctctattgtggactaattacatttatttaagtttatttgtaaaatgttatagggctaaaattctggggggggggccg

SEQ ID NO: 345414 - DNA, 929 bp, Homo sapiens
  misc_feature (787)..(787): n is a, c, g, or t
ggcggtgctccgagctggcctttgggggaggttttgtgcgaggcatttcccaagtgctggcaggattgtgtcacagacacagagtaaacttttgctgggctccaagtgaccgcccatagtttattataaaggtgactgcaccctgcagccaccagcactgcctggctccacgtgcctcctggtctcagtatggcgctgtcctgggttcttacagtcctgagcctcctacctctgctggaagcccagatcccattgtgtgccaacctagtaccggtgcccatcaccaacgccaccctggaccggatcactggcaagtggttttatatcgcatcggcctttcgaaacgaggagtacaataagtcggttcaggagatccaagcaaccttcttttacttcacccccaacaagacagaggacacgatctttctcagagagtaccagacccgccagaaccagtgcttctataactccagttacctgaatgtccagcgggagaatgggaccgtctccagatacgagggaggccgagaacatgttcgctcacctgctgttccttagggacaccaagaccttgatgtttggttcctgacctggacgatgagaagaactgggggctgtctttctatgctgacaagccagagacgaccaaggagcaactgggagagttctacgaagctctcgactgcttgcgcattcccaagtcagatgtcgtgtacaccgactggaaggaggataagtgtgagccactggagaagcagcacgagaaggagaggaaacaggaggagtnggcatatcttcccggtccgctcttgtgtctatactgacactttagggtcgctttcttttgtaacacgttatgtagacctacagtgtttcacttctagtaccaatggaagtttgatatctggccctatcgagatttttaaatg

SEQ ID NO: 345415 - DNA, 802 bp, Homo sapiens
ggcggtgctccgagctggcctttgggggaggttttgtgcgaggcatttcccaagtgctggcaggattgtgtcacagacacagagtaaacttttgctgggctccaagtgaccgcccatagtttattataaaggtgactgcaccctgcagccaccagcactgcctggctccacgtgcctcctggtctcagtatggcgctgtcctgggttcttacagtcctgagcctcctacctctgctggaagcccagatcccattgtgtgccaacctagtaccggtgcccatcaccaacgccaccctggaccggatcactggcaagtggttttatatcgcatcggcctttcgaaacgaggagtacaataagtcggttcaggagatccaagcaaccttcttttacttcacccccaacaagacagaggacacgatctttctcagagagtaccagacccgccagaaccagtgcttctataactccagttacctgtcagaactttccatacgagtatatcagaacacacccttccaaggtatgtatgctctgttgttcctgtcctgtcttcactgagcgcagggctggaggcctcttagacattctccttggtcctcgttcagctgcccactgtagtatccacagtgcccgagttctcgctggttttggcaattaaacctccttcctactggtttagactacacttacaacaaggaaaatgcccctcgtgtgaccatagattgagatttataccacataccacacatagccacagaaacatcatcttgaaataaagaagagttttggccaaaaaaaa

SEQ ID NO: 345416 - DNA, 943 bp, Homo sapiens
ggcggtgctccgagctggcctttgggggaggttttgtgcgaggcatttcccaagtgctggcaggattgtgtcacagacacagagtaaacttttgctgggctccaagtgaccgcccatagtttattataaaggtgactgcaccctgcagccaccagcactgcctggctccacgtgcctcctggtctcagtatggcgctgtcctgggttcttacagtcctgagcctcctacctctgctggaagcccagatcccattgtgtgccaacctagtaccggtgcccatcaccaacgccaccctggaccggatcactggcaagtggttttatatcgcatcggcctttcgaaacgaggagtacaataagtcggttcaggagatccaagcaaccttcttttactttacccccaacaagacagaggacacgatctttctcagagagtaccagacccgagggaggccgagaacatgttcgctcacctgctgttccttagggacaccaagaccttgatgtttggttcctgacctggacgatgagaagaactgggggctgtctttctatgctgacaagccagagacgaccaaggagcaactgggagagttctacgaagctctcgactgcttgcgcattcccaagtcagatgtcgtgtacaccgactggaaggaggataagtgtgagccactggagaagcagcacgagaaggagaggaaacaggaggagggggaatcctagcaggacacagccttggatcaggacagagacttgggggccatcctgcccctccaacccgacatgtgtacctcagctttttccctcacttgcatcaataaagcttctgtgtttggaacagttttaaaaacacaattatttttctctattgtggactaattacatttatttaagtttatttgtaaaatgttatagggctaaaattctggggggggggccg

SEQ ID NO: 345417 - DNA, 915 bp, Homo sapiens
ggcggtgctccgagctggcctttgggggaggttttgtgcgaggcatttcccaagtgctggcaggattgtgtcacagacacagagtaaacttttgctgggctccaagtgaccgcccatagtttattataaaggtgactgcaccctgcagccaccagcactgcctggctccacgtgcctcctggtctcagtatggcgctgtcctgggttcttacagtcctgagcctcctacctctgctggaagcccagatcccattgtgtgccaacctagtaccggtgcccatcaccaacgccaccctggaccggcaccagttatcaagttcgatacagaggaggaggctatagcaatcgctaacgcagctgatgttgggttagcaggttatttttactctcaagacccagcccagatctggagagtggcagagcagctggaagtgggcatggttggcgtcaacgaaggattaatttcctctgtggagtgcccttttggtggcagtgaagcagtccggccttgggcgagaggggtccaagtatggcattgatgagtatctggaactcaagtatgtgtgttacgggggcttgtagggattcttgtggttctttaagaaaaagtttcacaaggagacttatctacatatataggtacatgccatccattattcttaaataaactaataggttttcagaagcaaaaaaacaaaagcaaaacacgcaacacagaaacaaaactgtgcggggggcgggccttgggccctctgaaaaagccttcttaaaccccaattctggtgtgggcgccgggggccccactagggctcgggcaacaagggcgcaaaccgggccccccaaggggacccccggggcacgaaccacgggggggggccttcccccaacgagcaaaaaggcgcgggggcacccggg

SEQ ID NO: 345418 - DNA, 953 bp, Homo sapiens
agcacggccacagtcaccatcccgatttttgctacaaatgaaaattactgtataatgagctccttaacacttttctttaaacctgtgtttggaagacttgtgttggtgtggccctgtgccctaatacctgtgaaatcacagcaccgatgagctggttccaatttttaaaatatatacatgcagtacttccatgactattcaaagaaaaacaattccttccatttgccacctgagatgaccaccagggatgtgaactacctcctgccccatccccagccccaggatcctgggacagggcttatgaacgcaaccactgtagtcagctcacttgatccacagcctggcacctccactgtctggctagggagcctcgaatgggtcccaaggccaccctgctcctcagttacatcatctgcatagtagtggtggttgtgaggaattcaggagctgcagcataagggccctgcaggtactatgtgctcagtaaatgccagtggttcttaagggtctgagctcccattgtagaggcaagtaagctgaggttcagagacaggccctggttgagctggttccacaggccagagctcattctgccctctccccggaagacctcccaccctgtccccatgcctctgcttctccctcaccccaattccccgctgccttctaggataagtgtgagccactggagaagcagcacgagaaggagaggaaacaggaggagggggaatcctagcaggacacagccttggatcaggacagagacttgggggccatcctgcccctccaacccgacatgtgtacctcagctttttccctcacttgcatcaataaagcttctgtgtttggaacagttttaaaaacacaattatttttctctattgtggactaattacatttatttaagtttatttgtaaaatgttatagggctaaaattctggggggggggccg

SEQ ID NO: 345419 - DNA, 914 bp, Homo sapiens
ggcggtgctccgagctggcctttgggggaggttttgtgcgaggcatttcccaagtgctggcaggattgtgtcacagacacagagtaaacttttgctgggctccaagtgaccgcccatagtttattataaaggtgactgcaccctgcagccaccagcactgcctggctccacgtgcctcctggtctcagtatggcgctgtcctgggttcttacagtcctgagcctcctacctctgctggaagcccagatcccattgtgtgccaacctagtaccggtgcccatcaccaacgccaccctggaccggatcactggcaagtggttttatatcgcatcggcctttcgaaacgaggagtacaataagtcggttcaggagatccaagcaaccttcttttacttcacccccaacaagacagaggacacgatctttctcagagagtaccagacccgacaggaccagtgcatctataacaccacctacctgaatgtccagcgggaaaatgggaccatctccagatacgtgggaggccaagagcatttcgctcacttgctgatcctcagggacaccaagacctacatgcttgcttttgacgtgaacgatgagaagaactgggggctgtctgtctatgctgacaagccagagacgaccaaggagcaactgggagagttctacgaagctctcgactgcttgcgcattcccaagtcagatgtcgtgtacaccgattggaaaaaggataagtgtgagccactggagaagcagcacgagaaggagaggaaacaggaggagggggaatcctagcaggacacagccttggatcaggacagagacttgggggccatcctgcccctccaacccgacatgtgtacctcagctttttccctcacttgcatcaataaagcttctgtgtttggaacagc

SEQ ID NO: 345420 - DNA, 820 bp, Homo sapiens
ccgagctaaagagaaaagaagggaattaaaggtttccacttcctcgtgccgaattcgggccgaagccctggctccacgtgcctcctggtctcagtatggcgctgtcctgggttcttacagtcctgagcctcctacctctgctggaagcccagatcccattgtgtgccaacctagtaccggtgcccatcaccaacgccaccctggaccggatcactggcaagtggttttatatcgcatcggcctttcgaaacgaggagtacaataagtcggttcaggagatccaagcaaccttcttttacttcacccccaacaagacagaggacacgatctttctcagagagtaccagacccgacaggaccagtgcatctataacaccacctacctgaatgtccagcgggaaaatgggaccatctccagatacgtgggaggccaagagcatttcgctcacttgctgatcctcagggacaccaagacctacatgcttgcttttgacgtgaacgatgagaagaactgggggctgtctgtctatgctgacaagccagagacgaccaaggagcaactgggagagttctacgaagctctcgactgcttgcgcattcccaagtcagatgtcgtgtacaccgattggaaaaaggataagtgtgagccactggagaagcagcacgagaaggagaggaaacaggaggagggggaatcctagcaggacacagccttggatcaggacagagacttgggggccatcctgcccctccaacccgacatgtgtacctcagctttttccctcacttgcatcaataaagcttctgtgtttggaacagc

SEQ ID NO: 345421 - DNA, 888 bp, Homo sapiens
gctgtctctcctgctgtcttgtgaagaagggacttgcttcctctttgccttccaccatgattgtaagtttcctgaggcctcccagccatgtttcctctgaagcctgcggaactatcactggcaagtggttttatatcgcatcggcctttcgaaacgaggagtacaataagtcggttcaggagatccaagcaaccttcttttacttcacccccaacaagacagaggacacgatctttctcagagagtaccagacccgacaggaccagtgcatctataacaccacctacctgaatgtccagcgggaaaatgggaccatctccagatacgtgggaggccaagagcatttcgctcacttgctgatcctcagggacaccaagacctacatgcttgcttttgacgtgaacgatgagaagaactgggggctgtctgtctatgctgacaagccagagacgaccaaggagcaactgggagagttctacgaagctctcgactgcttgcgcattcccaagtcagatgtcgtgtacaccgattggaaaaaggataagtgtgagccactggagaagcagcacgagaaggagaggaaacaggaggagggggaatcctagcaggacacagccttggatcaggacagagacttgggggccatcctgcccctccaacccgacatgtgtacctcagctttttccctcacttgcatcaataaagcttctgtgtttggaacagccaaaaaaaaaaaaacaaattgtcggcgccccggaaaatttaacactccgtgggccgcccaagaaaaaggaacgtcgtccagacccgctcgaggcggcccaaaaccggggcggcgacacaagtcgttcttcaccccccccccctcccgcaaacaataacccccaa

SEQ ID NO: 345422 - DNA, 984 bp, Homo sapiens
ggcggtgctccgagctggcctttgggggaggttttgtgcgaggcatttcccaagtgctggcaggattgtgtcacagacacagagtaaacttttgctgggctccaagtgaccgcccatagtttattataaaggtgactgcaccctgcagccaccagcactgcctggctccacgtgcctcctggtctcagtatggcgctgtcctgggttcttacagtcctgagcctcctacctctgctggaagcccagatcccattgtgtgccaacctagtaccggtgcccatcaccaacgccaccctggaccggatcactggcaagtggttttatatcgcatcggcctttcgaaacgaggagtacaataagtcggttcaggagatccaagcaaccttcttttacttcacccccaacaagacagaggacacgatctttctcagagagtaccagacccgacaggaccagtgcatctataacaccacctacctgaatgtccagcgggaaaatgggaccatctccagatacgtgggaggccaagagcatttcgctcacttgctgatcctcagggacaccaagacctacatgcttgcttttgacgtgaacgatgagaagaactgggggctgtctgtctatgctgacaagccagagacgaccaaggagcaactgggagagttctacgaagctctcgactgcttgcgcattcccaagtcagatgtcgtgtacaccgattggaaaaaggataagtgtgagccactggagaagcagcacgagaaggagaggaaacaggaggagggggaatcctagcaggacacagccttggatcaggacagagacttgggggccatcctgcccctccaacccgacatgtgtacctcagctttttccctcacttgcatcaataaagcttctgtgtttggaacagccaaaaaaaaacaaaacacaaaaaaaaagaaaacacttttgggccacgccacggccctaaaaagctctaaa

SEQ ID NO: 345423 - DNA, 978 bp, Homo sapiens
  misc_feature (55)..(55): n is a, c, g, or t
tatcatacgagtgtatgagttgtagaagaaatgaaagaagagttaggtgtcagcntaggatggtaccttgggttatgacggaccaaatccttcttggagggaaggggactgctaagcatgtccctcccagggacatccccgcttgctggcctaatagcagagcttaacacacaggatgggagcaggcagtgctgagctggttttctaagtccggagtcttaacaggtgctttggggttgccgctgaatagaacaggctaaggtggctttggaagcattttgcaagaccacgcccaggccgccaagcttcggtttcattgtgtgccaacctagtaccggtgcccatcaccaacgccaccctggaccggatcactggcaagtggttttatatcgcatcggcctttcgaaacgaggagtacaataagtcggttcaggagatccaagcaaccttcttttacttcacccccaacaagacagaggacacgatctttctcagagagtaccagacccgacaggaccagtgcatctataacaccacctacctgaatgtccagcgggaaaatgggaccatctccagatacgtgggaggccaagagcatttcgctcacttgctgatcctcagggacaccaagacctacatgcttgcttttgacgtgaacgatgagaagaactgggggctgtctgtctatgctgacaagccagagacgaccaaggagcaactgggagagttctacgaagctctcgactgcttgcgcattcccaagtcagatgtcgtgtacaccgattggaaaaaggataagtgtgagccactggagaagcagcacgagaaggagaggaaacaggaggagggggaatcctagcaggacacagccttggatcaggacagagacttgggggccatcctgcccctccaacccgacatgtgtacctcagctttttccctcacttgcatcaataaagcttctgtgtttggaacagc

SEQ ID NO: 345424 - DNA, 835 bp, Homo sapiens
  misc_feature (764)..(764): n is a, c, g, or t
ggcggtgctccgagctggcctttgggggaggttttgtgcgaggcatttcccaagtgctggcaggattgtgtcacagacacagagtaaacttttgctgggctccaagtgaccgcccatagtttattataaaggtgactgcaccctgcagccaccagcactgcctggctccacgtgcctcctggtctcagtatggcgctgtcctgggttcttacagtcctgagcctcctacctctgctggaagcccagatcccattgtgtgccaacctagtaccggtgcccatcaccaacgccaccctggaccggatcactggcaagtggttttatatcgcatcggcctttcgaaacgaggagtacaataagtcggttcaggagatccaagcaaccttcttttacttcacccccaacaagacagaggacacgatctttctcagagagtaccagacccgacaggaccagtgcatctataacaccacctacctgaatgtccagcgggaaaatgggaccatctccagatacgtgggaggccaagagcatttcgctcacttgctgatcctcagggacaccaagacctacatgcttgcttttgacgtgaacgatgagaagaactgggggctgtctgtctatgctgacaagccagagacgaccaaggagcaactgggagagttctacgaagctctcgactgcttgcgcattcccaagtcagatgtcgtgtacaccgattggaaaaagggtgctagcgggacacgggcgtgggatcagaccgnagacttgggggcggtcctgggggtggagggcgggaggtgcgctagcggggtgccggacgtgtcgtgggggg

SEQ ID NO: 345425 - DNA, 762 bp, Homo sapiens
ggcggtgctccgagctggcctttgggggaggttttgtgcgaggcatttcccaagtgctggcaggattgtgtcacagacacagagtaaacttttgctgggctccaagtgaccgcccatagtttattataaaggtgactgcaccctgcagccaccagcactgcctggctccacgtgcctcctggtctcagtatggcgctgtcctgggttcttacagtcctgagcctcctacctctgctggaagcccagatcccattgtgtgccaacctagtaccggtgcccatcaccaacgccaccctggaccggatcactggcaagtggttttatatcgcatcggcctttcgaaacgaggagtacaataagtcggttcaggagatccaagcaaccttcttttacttcacccccaacaagacagaggacacgatctttctcagagagtaccagacccgacaggaccagtgcatctataacaccacctacctgaatgtccagcgggaaaatgggaccatctccagatacgtgggaggccaagagcatttcgctcacttgctgatcctcagggacaccaagacctacatgcttgcttttgacgtgaacgatgagaagaactgggggctgtctgtctatgctgacaagccagagacgaccaaggagcaactgggagagttctacgaagctctcgactgcctccagtggctcacacttatcctttttccaatcggtgtacacgacatctgacttgggaatgcgcaacggtcgaggtcg

SEQ ID NO: 345426 - DNA, 960 bp, Homo sapiens
ggcggtgctccgagctggcctttgggggaggttttgtgcgaggcatttcccaagtgctggcaggattgtgtcacagacacagagtaaacttttgctgggctccaagtgaccgcccatagtttattataaaggtgactgcaccctgcagccaccagcactgcctggctccacgtgcctcctggtctcagtatggcgctgtcctgggttcttacagtcctgagcctcctacctctgctggaagcccagatcccattgtgtgccaacctagtaccggtgcccatcaccaacgccaccctggaccggatcactggcaagtggttttatatcgcatcggcctttcgaaacgaggagtacaataagtcggttcaggagatccaagcaaccttcttttacttcacccccaacaagacagaggacacgatctttctcagagagtaccagacccgccagaaccagtgcttctataactccagttacctgaatgtccagcgggagaatgggaccgtctccagatacgagggaggccgagaacatgttcgctcacctgctgttccttagggacaccaagaccttgatgtttggttcctgacctggacgatgagaagaactgggggctgtctttctatgctgacaagccagagacgaccaaggagcaactgggagagttctacgaagctctcgactgcttgcgcattcccaagtcagatgtcgtgtacaccgactggaaggaggataagtgtgagccactggagaagcagcacgagaaggagaggaaacaggaggagggggaatcctagcaggacacagccttggatcaggactccctcacttgcatcaataaagcttctgtgtttggaacagttttaaaaacacaattatttttctctattgtggactaattacatttatttaagtttatttgtaaaatgttatagggctaaaattctggggggggggccg

SEQ ID NO: 345427 - DNA, 990 bp, Homo sapiens
ggcggtgctccgagctggcctttgggggaggttttgtgcgaggcatttcccaagtgctggcaggattgtgtcacagacacagagtaaacttttgctgggctccaagtgaccgcccatagtttattataaaggtgactgcaccctgcagccaccagcactgcctggctccacgtgcctcctggtctcagtatggcgctgtcctgggttcttacagtcctgagcctcctacctctgctggaagcccagatcccattgtgtgccaacctagtaccggtgcccatcaccaacgccaccctggaccggatcactggcaagtggttttatatcgcatcggcctttcgaaacgaggagtacaataagtcggttcaggagatccaagcaaccttcttttacttcacccccaacaagacagaggacacgatctttctcagagagtaccagacccgtgggaggccaagagcatttcgctcacttgctgatcctcagggacaccaagacctacatgcttgcttttgacgtgaacgatgagaagaactgggggctgtctgtctatgctgacaagccagagacgaccaaggagcaactgggagagttctacgaagctctcgactgcttgcgcattcccaagtcagatgtcgtgtacaccgattggaaaaagggctaacgtgtgagccactggagaagcagcacgagaaggagaggaaacacggaagtggtgaacaatctaaaagaagagaaaggttgttggccaagtatctttcgattcaactgtccaacaatagtccaccgaatatgattgggtccaccgcggttgattattctatcgcttccacaagcagtggactggctttggatccaacgtgggcacggcagaagggaaggagttcattacaaccggagccgcgttgctaccgacacggttaagaacatttcacgggccaagctgacatgaatctacccttgacaaatatgcctttggacacaacacag

SEQ ID NO: 345428 - DNA, 964 bp, Homo sapiens
ggcggtgctccgagctggcctttgggggaggttttgtgcgaggcatttcccaagtgctggcaggattgtgtcacagacacagagtaaacttttgctgggctccaagtgaccgcccatagtttattataaaggtgactgcaccctgcagccaccagcactgcctggctccacgtgcctcctggtctcagtatggcgctgtcctgggttcttacagtcctgagcctcctacctctgctggaagcccagatcccattgtgtgccaacctagtaccggtgcccatcaccaacgccaccctggaccggatcactggcaagtggttttatatcgcatcggcctttcgaaacgaggagtacaataagtcggttcaggagatccaagcaaccttcttttacttcacccccaacaagacagaggacacgatctttctcagagagtaccagacccgagaaaccgacaaggacacaagatgcatctataaaaaaaacataaacatgaaatgataccagcggagaaaaaatggggacagtcatacaagatacgatggagagagccaaagagcatattagaaacacttgatgaataaaatcagggaaaacaaaagaactaaaatgattgaataatgaaagtagaaacgaatgagaagaaatggagggctgaatagactaatgactagaacaaagacaagaagacgaaacaaggagacaaataggaagaagtactaacaaaaacacaacggaatgatatgaaacaatataaccagagtcagaatgtacgagatacaaccagaatagaaaaaaagaaaaaaatgaaaccaaaggagaaaacaaacagaaaaggaaaagaaaacacggaggaggggaaaaacatagaaagaaacaaaaataggaaaccaagaaaaagacatgaagagacaaacaagaacaaccaacacgaaaggagtaaaaaagaaaaaccatcaaagcg

SEQ ID NO: 345429 - DNA, 445 bp, Homo sapiens
aaatagcatttacgtgacagtgacttcagtctgtcttctttcctcctttgtccttccctgaatttgaatctctaaatctaggacatgaattctagagtgggagggatgagtaaaccaacaaggtaacaaaagcataagtaagagcaatgtcaatcagaggcatctatgctgagctggaagtcttccagcaggacactgctagaggggaccagtagtgccttttgggcaggaagtggtatttcagttgtactatgaagggtgagagttagatttgtggaaggacctggattagcaaaacatttgggttcgagagtatagagattgctcagggtgcagtagccagttgaccagcaggttacatgaagcgggtgttgcctggagaagcaggaaagctgttgggtcagaattgtggagagagatggatagggggcaggttattaagcct

SEQ ID NO: 345430 - DNA, 526 bp, Homo sapiens
tctggaacatagggccagaaagatttgtaagatttggttcctactctcaagaaactgggattccgattatctgcaaaaaatcatattcctgaaatcagattccctaaatgaaagcaagtccatatggtataagcccttggtacattttaagccgaggatacctttcctacctcccaaacctaagattataagagtggccaccagagccctcaccctggtctatttccttctacaacactggccagcacattcatagaacctggttgcagagataagtcaaatcactgcaaacttgggatggccaacgccccatcctagcttctctagattcctttgcagggatgtccacagggtgcttttatatatgtcttcatgccctcctgcttcgtctactcttcatgccccatctaagtgtttttgaaaaatgaaatacttaagttagaaaaccagacttagcaagttgtacttccaaaagcagcaatcatttcagtaaataaacattttctgattgagaacattaattcag

SEQ ID NO: 345431 - DNA, 109 bp, Homo sapiens
agataacgctatagagaaaacactgtttactgaacagtgctttgaaaccacgagggtgatcagagccccatttcgccttctagagataaacctgtctcccttcctgcag

SEQ ID NO: 345432 - DNA, 453 bp, Homo sapiens
aattgtgtggcttcctcgcaaaactgcagggccagggaatttcttattctcatcctagttcaaactctacctgcagaagttaatcaaattttgcattttaggtttctgttcaatccacagcttcttctccaggtttttcttgctgaaagaatgtgagtgatgacttcaaaaatttttacacacggacctgaaactattctctacagacggtgcagcctaatatctcccagactagcacttcccatggccctgcacttggggcctcactgcctggtagaaatgaagatttaactgctgtgccatctcttctaaatctggagtggattttttgttgtttgtttttatgtttttgttcaattggctatttctgagatgaatgacaaatttccttgattccattgtatatcaatttatactataatatctataataaaatgttgacaatgataaatt

SEQ ID NO: 345433 - DNA, 376 bp, Homo sapiens
gcatacattcatttaattgttaacttatttattcagtaagatcttactgagcatttgctatgttctagatatcggtgtcacatcaatgagtaaactggatttgttgccagttgtcatcaaacttaagcaaatagggacgagacacaactaaatgagacattgtaagacacgatgataagtgctacagcaagagaggtcaagttcatggaagctcagagccctcagtgcagtcaaggggagagagtccagcgctatgctgcccagcatggtaacgatgaacacatatgactgttgaatgctggaaatgtcactaatcccaatggagctatgttttatgaaatacacatagactatcaagatgtaatatgcaaaaaaa

SEQ ID NO: 345434 - DNA, 461 bp, Homo sapiens
gcacttcttcctttggctgatttaaacttgcatgcttactatataataaactgcaaccatgagcatagtggttttagtgagttctgtgagtctttcatcaaacctcagggtggttttaggaatcccttgaaattgcaattgttgacagaaatgagggtggtcttatgggaactgttttccccctaactgtatcgctggcatctgagacaacaagaacacccttgagtgattcctctcctcttgggtatgagagggacctttgacttgcttccaatcaatagaatacagtacaggcaacggactgtacataattatgtgtatgtaattgtgttaaacaagtttgtagcactcctcttgctggagtacctcccttgctggctttgaagaatcgagctactgttgtgggctgcctatgttgggaggctcacatggtaaggaactgaagacagcttctaggaact

SEQ ID NO: 345435 - DNA, 1004 bp, Homo sapiens
aattttgtaaaattttgatttggtttcttggttgtccatagctcagaagtacaaatacctgtctatatatgctttatgaggatgttgccatatgcatctttcatattttgtttgaaataaaagtaaaaattatgagaaatagttgctcagagttggcttctgaggttgctttttagaattcagctgttttaaaatggtattactctttttgagtcaagttctgggctagttgtccacaagattcaaatgaggccaaaccaaacatgttttgaaacattaaagtacaggaaaggcctcttaatagttcattctctccttctctttcagagtaaccagaataagttgttactaaatttaattttaaagaatagactgttcctgtaccgaaatctgccaagttgctacagaaatatttctttttaaagagcagaaatgtgtttatgatcagcccaaagtagtaaagatgaaaagtgacttaaatgtaaatgctgtcttaaagaaatgcttgtcataagccccaaaaccttccagagtgtttcaggaagacttacacaaaacctttttgaattgtttagtaaattttatcatgtgaccttttttatgagtgtaagactgaattattgaaagacctcatagcacaagggagccatgctgccagagtttgaatcttaccaccatccctcactggctgtgtgaccttggggaacgtttctaacctggcttttgtgggttttgtcctgtagatggaaagaatgacttctcaaggggttgttgtaaggttgcatgagagtacatgtcacagagcactccaggttagctaccccatcatcaccagcagtcttagagaggtgtctagtgtagtggttaagagtaggacctcacgctggttcatgcctgtaatcctagcactttgggaggctgaggtgggaggatggcttgagctcaggaatttgagaccaacctggtcaagatggtgagatccggtctctacaaaataattaaaa

SEQ ID NO: 345436 - DNA, 212 bp, Homo sapiens
cagaagccttttccctcaaaatagcaattagcatcccaggaaacacccttgggacagcctagaccagataacctctcaggctctgtctgccacgttactccacactctagctgcagggagctgaggcagctgctggccagcgattcccaagatcctgggggaagggccaggcggcgcccagagaaggctccctcagggaatggtggcagctg

SEQ ID NO: 345437 - DNA, 193 bp, Homo sapiens
ttttcctgaatgtgtccaatttgcaccatctctcccacagaggacaaataaaaaaatctcgcattacttaagaattatttcgtggcgtgtgtctctccagacttttgttatggtgtcactacttgcaagctgtgagtctgttttgagaactctctccatctctccaaataaaaacatatcagaacagtgatgg

SEQ ID NO: 345438 - DNA, 2786 bp, Homo sapiens
ctttctccttctctgtctcactctctctctttctctccctctcctatcggagcacaatgaaagcctgtgtatcgccgtgactccgggcgggagccagtgtcagcaaagcggctaacaacagacgagaaagagaaaggaaaatacaagctactttttttttccatctataaagcggagcaaatacaggagatagaaccagattgcttattgcgagtccagaccctcagatccactggccggggatggaatgtacaaaagtggacagaaaagtggctggacatgactcggtgcaatttgctggaagtttgtaagtttgaccatcgtttgtaaattactctcggaagagtttgtctctcttgatactgtattagaatagagccgggggtgaggaatagaaacgtaagcgggaaagaaaaaaatgtgttgaaggatctctctcagtggctagcgacttaagattgcttttcatttaaggctaggaaaccttagagggagtgaggattttaccggtgattggattagctgaagaaaaaagcatggtccaaaagtccaattactgacattgttaacagttgaaaagctgtctccctcttttgggagaagacaacatcctacagtaccccaaagaggagaaaacaccggagcgaaaggaaagggaggaaaaattaaaagccaaaagacagtctcccttgatttttgcacattttgaacagtgacttaaacatcttctgaaacagcactgttttgttttgttttggttttttatttaacctgaggaaaagtcaaggctgctggttacatagacatggtagaaatgtgtttctctgcagaaacatccccataaagaattgtcggaaacaactaggtgagggggagtcctctctattaatacctctctcaataccttttgctgtgtgtttctgtctcttgctggacaatccctgaattcttgatctaacccccagatcgtgtgtttacaaagtacctagtggctcttgtcagcttggtggaggaaaaaaaatccaccaactctgtccaacttctccagagctgtcaaatgcaattagagtaagttaatcagggtttgtttccaacttatcctccccccagttggtttctattctttctccccaccctctttttactaactcccctcccccacaacttctccacggctcccccacaacctctgaagacctctattcatgtggccctgaacactgagctcacattgtcaaaaacagacttgcctgcaatagccagcagtagcctctttccacctcaccatcccagaggcagcaatcattgtgtccggtaagatgggggacacagcgcccccgcaggcccccgcaggagggctagggggggcctctggggcggggctccttggagggggctcagtcaccccgagagtgcacagtgctatcgtggagcgcctccgggctcggatcgctgtctgccgccaacaccacctgagctgtgaaggacgatatgaacgaggtaggccgagagctcagaccgggaaagagaaagcaccttgcagctcctgagccttgtacagcatggccagggggcaaggaaagctggcaaacacaccaaggccaccgccactgctgccaccactacagcccctccaccgccccctgctgcccctcctgcggcctcccaagcagcagcaacagcagccccaccgcccccaccagactatcaccatcaccaccagcagcacctgctgaacagtagcaataatggtggcagtggtgggataaacggagagcagcagccgcccgcttcaaccccaggggaccagaggaactcagccctgattgcggtaagcacctggctttctcatggttctggctgtggtcctgtgaccttttgtgagggtagagtttgctttggcctaaggtagagtggatggcaatgaaaaaggccaagatgtcacctgactaccttaaaggccattgggtgtgttcgggtggtttcatgcgcctactcatcatgttctgttggtgctcactcctgggttttccttcgcttataggatattccttaactgataagaagcctgagttttccagaggctctctggggtccacatcttataaaagaagaggctaccagctggcaagatctgagccactgaggaaggttctatctcatggatcctccagctttggccagccagctctgattaggcccccaagccatttttcagccccaaagcatttatcagcccagctggcctttattaaagcctttttctccttgccccatttcccctctcccttttgaagtgacccccttcttcttcgcttaagagaacataaatggtaagctgtaacaaatagcaaattccccgaatgtcccctcagtcaaaaacaaaatttggggaaaatatcccaaagagagactagggaggcactgtttcttaagaggcctactctctgattccctctagactctctcactcctgagccacatctcgattattttcccaagcactccagtccaatccagtaatgctcccttagagcattcgttaagcagacaggcacgaagcagctatttacacagatcatcatcctaggaaataccttgtcttcagccactcctggtgataggatatcaaacccaaaagttctgattaagtttctggctggaagttcttccccagaggcacagacacacaccatcccagaggagtatcccttggatcattgattctcagtgccagtcctggtcaggtgactgcctgctgtttgcaggcttccccccaaagctgc

SEQ ID NO: 345439 - DNA, 5488 bp, Homo sapiens
ctttctccttctctgtctcactctctctctttctctccctctcctatcggagcacaatgaaagcctgtgtatcgccgtgactccgggcgggagccagtgtcagcaaagcggctaacaacagacgagaaagagaaaggaaaatacaagctactttttttttccatctataaagcggagcaaatacaggagatagaaccagattgcttattgcgagtccagaccctcagatccactggccggggatggaatgtacaaaagtggacagaaaagtggctggacatgactcggtgcaatttgctggaagtttgtaagtttgaccatcgtttgtaaattactctcggaagagtttgtctctcttgatactgtattagaatagagccgggggtgaggaatagaaacgtaagcgggaaagaaaaaaatgtgttgaaggatctctctcagtggctagcgacttaagattgcttttcatttaaggctaggaaaccttagagggagtgaggattttaccggtgattggattagctgaagaaaaaagcatggtccaaaagtccaattactgacattgttaacagttgaaaagctgtctccctcttttgggagaagacaacatcctacagtaccccaaagaggagaaaacaccggagcgaaaggaaagggaggaaaaattaaaagccaaaagacagtctcccttgatttttgcacattttgaacagtgacttaaacatcttctgaaacagcactgttttgttttgttttggttttttatttaacctgaggaaaagtcaaggctgctggttacatagacatggtagaaatgtgtttctctgcagaaacatccccataaagaattgtcggaaacaactaggtgagggggagtcctctctattaatacctctctcaataccttttgctgtgtgtttctgtctcttgctggacaatccctgaattcttgatctaacccccagatcgtgtgtttacaaagtacctagtggctcttgtcagcttggtggaggaaaaaaaatccaccaactctgtccaacttctccagagctgtcaaatgcaattagagtaagttaatcagggtttgtttccaacttatcctccccccagttggtttctattctttctccccaccctctttttactaactcccctcccccacaacttctccacggctcccccacaacctctgaagacctctattcatgtggccctgaacactgagctcacattgtcaaaaacagacttgcctgcaatagccagcagtagcctctttccacctcaccatcccagaggcagcaatcattgtgtccggtaagatgggggacacagcgcccccgcaggcccccgcaggagggctagggggggcctctggggcggggctccttggagggggctcagtcaccccgagagtgcacagtgctatcgtggagcgcctccgggctcggatcgctgtctgccgccaacaccacctgagctgtgaaggacgatatgaacgaggtaggccgagagctcagaccgggaaagagaaagcaccttgcagctcctgagccttgtacagcatggccagggggcaaggaaagctggcaaacacaccaaggccaccgccactgctgccaccactacagcccctccaccgccccctgctgcccctcctgcggcctcccaagcagcagcaacagcagccccaccgcccccaccagactatcaccatcaccaccagcagcacctgctgaacagtagcaataatggtggcagtggtgggataaacggagagcagcagccgcccgcttcaaccccaggggaccagaggaactcagccctgattgcgctccagggttccttgaaaagaaaacaggtagttaacctatctcctgccaacagcaagcgacccaatggctttgtggacaactcatttcttgatatcaaaagaattcgtgttggggagaatctctctgcaggacaaggtggcctccaaataaacaatggacaaagtcagattatgtcagggaccttgcctatgagccaagcacccctgcgaaagactaacactctgccatcccatacacattctcctggcaatggcctgtttaacatgggcttaaaggaggtaaagaaggagccaggagagactctgtcttgcagtaagcacatggatggccaaatgacccaagagaatatttttcctaataggtacggagacgaccctggagaacaactgatggatcctgagctgcaggaactgttcaatgaactgaccaacatatctgtgcctcccatgagtgaccttgaactggagaacatgatcaatgccaccataaagcaggatgacccatttaacattgacttgggtcagcaaagccagaggagcacacctaggccctccttacccatggagaaaatagtgatcaaaagtgaatactcaccgggcttgactcagggcccctcaggctctcctcagctgaggcccccatcagctggccccgcattctccatggccaactctgccctctccacttcgtctccaatcccttcagtccctcagagccaggctcagcctcagacaggctccggagcaagccgggccttgccaagctggcaggaagtatcccatgcccagcagctcaaacagatagctgctaatcgtcagcagcatgcccggatgcagcagcaccagcagcagcaccagcctaccaactggtcagccttgccctcctctgctggaccatcaccaggtccatttgggcaggagaaaatccccagcccttcttttggtcagcagacattcagcccacagagctcccccatgcctggggtagctggcggcagcggccagtcgaaagtaatggctaactacatgtacaaggccggcccctcagcccagggtgggcacctagatgtcctcatgcagcaaaagcctcaggatctcagtcgaagttttattaacaacccgcacccagccatggagccccgtcagggcaacaccaagcctttgtttcattttaactcagatcaagcgaaccagcagatgccttctgttttgccttcccagaacaagccttctctcctacactacacccaacagcaacagcagcaacagcagcagcagcagcagcagcagcagcagcaacagcagcagcagcagcaacagcaacagcaacagcaacagcagagttcaatttcagctcaacaacagcaacagcagcagagctcaatttcagcccaacagcagcagcagcagcaacaacagcagcagcagcagcaacaacaacagcaacaacagcagcagcagcagcagcaacaaccatcttctcagcctgcccaatctctaccaagccagcctttgctaaggtcacctttgccacttcagcaaaagctcctacttcagcaaatgcagaatcagcccattgcaggaatgggataccaagtctcccaacaacagagacaggatcaacactctgtggtaggccagaacacaggccccagtccaagtcctaacccctgctcaaatccaaacactggaagtggttacatgaactcccagcaatcactgttgaatcagcaattgatgggaaagaagcagactctacagaggcagatcatggagcagaaacagcaacttcttctccagcagcagatgctggctgacgcggagaaaattgctccacaagatcagataaaccgacatttgtcaaggccacctccagattataaagaccaaagaagaaatgtgggcaatatgcaaccaactgctcagtattctggtggctcatccacaataagcttaaactctaaccaggctttggcaaacccagtttcaacacacaccattttaactcccaattccagcctcctgtctacttctcacgggacaagaatgccatcattatctacagcagttcagaatatggggatgtatggaaatctgccttgtaatcaacctaacacatacagtgtcacttcaggaatgaatcaattgacccaacagagaaacccaaagcaattgttagcaaatcaaaacaaccctatgatgccacggccacctaccttagggccaagtaataataacaatgtagccacttttggagctggatctgttggtaattcacaacaattgagaccaaatttaacccatagtatggcaagcatgccaccacagagaacatcaaacgtaatgatcacatccaacacaactgcaccaaactgggcctctcaagaaggaacaagcaaacagcaagaagccctgacgtctgcaggagtccgcttccccacaggtacacctgcagcctataccccaaatcagtcactgcaacaggcagtaggtagccagcaattttcccagagggcagtggctcctcctaaccagttaacaccagcagtgcaaatgagacccatgaaccaaatgagccaaacactaaatgggcaaaccatgggtcccctcaggggtctgaatctcagacccaatcagctaagcacacagattttgcctaatttgaatcagtcaggaacagggttgaatcagtcgaggacgggcatcaaccagccaccatccctgacgcccagcaattttccttcacccaaccaaagttccagggcttttcaaggaactgaccacagcagtgacttagcttttgacttcctcagccaacaaaatgataacatgggccctgccctaaacagtgatgctgatttcattgattctttattgaagacagagcctggtaatgatgactggatgaaagacatcaatcttgatgaaatcttggggaacaattcctaaagaagaaagggaagacaatttacaaactccaagcactaaaaggcagtatattacagaaactctgtagaggctgaactgttgatgttcaggtggactacatgaagataacatgcttaaaaatggaaagcagaaagtaactgcagtgatgaacattttggtccaaattcttgttttaaatcttacacctgaaagtaaaatattgggatcacttttccctgtctaaactccaggatacagtatccaatttatccaaacagaactgtggtgtcaatgtgtaattaattgtgtaaaatagccttcccaagtttctttttccctggaaaataaaaaaggtaatagaacttgtagtttatttaaaccccatgtcatgaggaggtactagttccaagcaacaaactccttaatttgctctaatagataggtatggtttaatctttccattgtgtcttttcatttaattttcctgaagcttgcaggatagattgaaatgttataggtttgtttggagtaaccaaacagtatgcaaattaagaaaaagccagagaacctagaaaacatccagtggattacagaatttcttccccatattcactcctcacttttacaattttcccacaatcctctacttcagtgggatgctgtgtctagtgattaaacaaaaatatagagctgtgcaatttgattttggcttccacaacgaatatctga

SEQ ID NO: 345440 - DNA, 866 bp, Homo sapiens
tgctcatttaatttatgagcaatgactgctcggctcattgggaatccacatccccaagttagactggggatatgctctctgtactgtctccttctatggaattccaccccacccagagagagatgacttcacagtttgttcatatgagcatcatcccatgtcgtccccaacccagggctggtaggtgctacagcttgtgcttcatgctgctcctgtggcccctattcctacccagctcagagctttgcagggtctactgcagacaatcagaagtcagtttctaacaaatagcaacagccacaaatctcttcctccttcctctctgacattaccctgtgcaacttttctcaaagtctgttgcaccactcagcaaagcaagttgcaccagctatatcagaatcacctggggcagcctattaaaaatgcagactgttgagaccatcctggctaacacggtgaaaccctgtctctactaaaaatacaaaaaattagccggccgtggtggcgggcagctactcgggaggctgaggcaggagaatgacctgaacctgggaggcagagcttgcagtgagctgagattgtgccactgcactccagcctgggtgacagagcaagactccgtctcaaaaaaaaaaaaaaagaaaaatgcagactggctggcgcggtggctcatgcttgtaatcccagcactttgggaggctgaggcgggcagatcaactgagatcgggggttcgagaccagcctgatcaacatggagaaacctggtctctactaaaaatacataattagctgggcgtagtggcgcatacctgtaatcccagctacttgggtggccaaggcttgaacccaggaggcggaggttgcgg

SEQ ID NO: 345441 - DNA, 354 bp, Homo sapiens
cttgtggatgaccttgacgcctatttcgttagcgaagatgagacaatcacggcagtctgcaaggaacccacgcggcccaagttcaagatgccagagatgaatatcaaagcccccaagatccccatgcctgactttgatttgcatctgaaaggaacccacggccgtgggttccttgcagaggaagcatgcactcaggagtcacagagcacgggcagtatcgtgcgcttctcctttctggaaatcacgtgcacatactcacatacgcgtaacgaacacacatacagacaaggcaagccacaaactgttatacaggtaggaaggaggaagatctgacaaagcagcaggtgtcatact

SEQ ID NO: 345442 - DNA, 2336 bp, Homo sapiens
tggatgtgaacttgcccaaggctgacgttgatgtctcaggacccaaggtggatgttgaagtcccagatgtgagccttgaaggtccagaagggaagctgaagggccccaagtttaagatgcctgagatgcacttcaagacccccaagatctccatgcctgatgttgatttcaatttaaagggacccaaaatcaaaggagatgttgatgtttctgccccaaagctggagggagagttaaaaggtccagaattggatgtcaaaggtcccaaattagatgctgacatgccagaagtagctgtggaaggcccaaatggcaagtggaaaactcctaagttcaagatgccagatatgcactttaaagctcccaaaatctctatgccagacctcgatctacacttgaagagccccaaggcaaaaggagaggtggatgtagatgttcccaaattggaaggggaccttaaagggccacatgtggatgtcagtgggccagacattgacattgagggaccagagggcaaattgaaaggccctaagttcaagatgcctgatatgcatttcaaagcccccaatatttctatgcctgatgttgatctaaatctcaaaggacccaaaatcaagggggatgtggatgtgtctgtgcctgaggtagaaggtaaacttgaagtaccagatatgaacatcaggggccccaaagttgatgtaaatgcccccgatgtccaagctccagactggcacctgaagatgcccaagatgaaaatgcccaagttcagcatgcctggcttcaaagcagagggccctgaagtagacgtcaacttgcctaaggctgacgttgacatctcaggacccaaggtggacattgaaggccctgatgttaatattgaaggaccagagggaaagttgaaagggcctaagttaaagatgccagagatgaacatcaaagcccccaagatctccatgcctgactttgatttgcatctgaaaggtcccaaggtgaagggcgatgtggatgtttctctgcccaaagtggaaggtgacctcaagggccccgaagttgacatcaaggggcccaaagtggatattaatgccccagatgtgggtgttcaaggcccagactggcacctgaagatgcccaaggtgaaaatgccaaagttcagtatgcctggcttcaaaggagagggcccagatggggatgtgaagctgcccaaggctgacattgatgtctcaggacccaaagtggacattgaaggccctgatgttaacattgaaggaccagagggaaagttgaaagggcctaagttcaagatgccagagatgaatatcaaagcccccaagatctccatgcctgatattgacttaaacctgaaaggacccaaagtgaagggtgatgtggatgtttcccttcctaaagtggaaggtgacctcaagggcccagaagttgacatcaagggcccaaaagtggacattgacgcacctgatgttgatgttcatggcccagactggcacctaaagatgcccaagataaaaatgcccaagatcagcatgcctggcttcaaaggagaaggtccagatgtggacgtgaacctgcccaaggctgacattgatgtctcaggaccgaaagtggatgttgaatgtcccgatgtgaatatcgaaggacctgaaggaaagtggaaaagtccaaagtttaagatgccagagatgcattttaagactccaaagatatccatgccagatattgacctgaatctcacaggtccaaaaataaaaggagatgtggatgttacaggccctaaggtagagggagatctgaaaggtcctgaagttgacctcaaaggccccaaagtggacattgatgtcccagatgttaatgttcagggtccagactggcacctgaagatgcccaagatgaaaatgcccaagttcagcatgcctggcttcaaagcagagggccctgaagtggatgtgaacctgcccaaggctgacgttgatgtctcaggccccaaagtggacgttgaaggccctgatgttaacattgaaggaccagagggaaagttgaaagggcccaagttcaagatgccagagatgaatatcaaagcccccaagatccccatgcctgactttgatttgcatctgaaaggaacccacggccgtgggttccttgcagaggaagcatgcactcaggagtcacagagcacgggcagtatcgtgcgcttctcctttctggaaatcacgtgcacatactcacatacgcgtaacgaacacacatacagacaaggcaagccacaaactgttatacaggtaggaaggaggaagatctgacaaagcagcaggtgtcatact

SEQ ID NO: 345443 - DNA, 1568 bp, Homo sapiens
tggatgtgaacttgcccaaggctgacgttgatgtctcaggacccaaggtggatgttgaagtcccagatgtgagccttgaaggtccagaagggaagctgaagggccccaagtttaagatgcctgagatgcacttcaagacccccaagatctccatgcctgatgttgatttcaatttaaagggacccaaaatcaaaggagatgttgatgtttctgccccaaagctggagggagagttaaaaggtccagaattggatgtcaaaggtcccaaattagatgctgacatgccagaagtagctgtggaaggcccaaatggcaagtggaaaactcctaagttcaagatgccagatatgcactttaaagctcccaaaatctctatgccagacctcgatctacacttgaagagccccaaggcaaaaggagaggtggatgtagatgttcccaaattggaaggggaccttaaagggccacatgtggatgtcagtgggccagacattgacattgagggaccagagggcaaattgaaaggccctaagttcaagatgcctgatatgcatttcaaagcccccaatatttctatgcctgatgttgatctaaatctcaaaggacccaaaatcaagggggatgtggatgtgtctgtgcctgaggtagaaggtaaacttgaagtaccagatatgaacatcaggggccccaaagttgatgtaaatgcccccgatgtccaagctccagactggcacctgaagatgcccaagatgaaaatgcccaagttcagcatgcctggcttcaaagcagagggccctgaagtagacgtcaacttgcctaaggctgacattgatgtctcaggaccgaaagtggatgttgaatgtcccgatgtgaatatcgaaggacctgaaggaaagtggaaaagtccaaagtttaagatgccagagatgcattttaagactccaaagatatccatgccagatattgacctgaatctcacaggtccaaaaataaaaggagatgtggatgttacaggccctaaggtagagggagatctgaaaggtcctgaagttgacctcaaaggccccaaagtggacattgatgtcccagatgttaatgttcagggtccagactggcacctgaagatgcccaagatgaaaatgcccaagttcagcatgcctggcttcaaagcagagggccctgaagtggatgtgaacctgcccaaggctgacgttgatgtctcaggccccaaagtggacgttgaaggccctgatgttaacattgaaggaccagagggaaagttgaaagggcccaagttcaagatgccagagatgaatatcaaagcccccaagatccccatgcctgactttgatttgcatctgaaaggaacccacggccgtgggttccttgcagaggaagcatgcactcaggagtcacagagcacgggcagtatcgtgcgcttctcctttctggaaatcacgtgcacatactcacatacgcgtaacgaacacacatacagacaaggcaagccacaaactgttatacaggtaggaaggaggaagatctgacaaagcagcaggtgtcatact

SEQ ID NO: 345444 - DNA, 428 bp, Homo sapiens
atgttgagctggagtgtcctgatgcaaagttgaaaggccctaaatttaagatgccagacatgcacttcaaggcccccaagatctccatgcctgatgtggacttacacttgaaaggccccaaagtcaaaggggatgtggatgtgtcggtgccaaaattggagggagatttaacaggtcccagtgtgggtgtggaggtgcctgatgttgagctggagtgtcctgatgcaaagttgaaagggcccaagtttaagatgcctgagatgcacttcaagacccccaagtcaaaggggatgtggatgtgtctttgccaaaattggagggagatttaacaggccccagtgtggatgtggaggtgcctgatgttgagctggagtgtcctgatgcaaagttgaaagggcccaagtttaagatgcctgagatgcacttca

SEQ ID NO: 345445 - DNA, 431 bp, Homo sapiens
atgttgagctggagtgtcctgatgcaaagttgaaaggccctaaatttaagatgccagacatgcacttcaaggcccccaagatctccatgcctgatgtggacttacacttgaaaggccccaaagtcaaaggggatgtggatgtgtcggtgccaaaattggagggagatttaacaggtcccagtgtgggtgtggaggtgcctgatgaatagcgattaaaccccacgatcactttattaatattcattcattcatttgttacatgctggggagaataaaatgaattctcctcattataaatagaatgagattgaagtccaaaggaaaataaatagtatacaggttttcattcatttatttattcattcagtccacatttcttcaattcttactaaagccaggccctatcacgggtgccgataaatagcgagggg

SEQ ID NO: 345446 - DNA, 1732 bp, Homo sapiens
tggatgtgaacttgcccaaggctgacgttgatgtctcaggacccaaggtggatgttgaagtcccagatgtgagccttgaaggtccagaagggaagctgaagggccccaagtttaagatgcctgagatgcacttcaagacccccaagatctccatgcctgatgttgatttcaatttaaagggacccaaaatcaaaggagatgttgatgtttctgccccaaagctggagggagagttaaaaggtccagaattggatgtcaaaggtcccaaattagatgctgacatgccagaagtagctgtggaaggcccaaatggcaagtggaaaactcctaagttcaagatgccagatatgcactttaaagctcccaaaatctctatgccagacctcgatctacacttgaagagccccaaggcaaaaggagaggtggatgtagatgttcccaaattggaaggggaccttaaagggccacatgtggatgtcagtgggccagacattgacattgagggaccagagggcaaattgaaaggccctaagttcaagatgcctgatatgcatttcaaagcccccaatatttctatgcctgatgttgatctaaatctcaaaggacccaaaatcaagggggatgtggatgtgtctgtgcctgaggtagaaggtaaacttgaagtaccagatatgaacatcaggggccccaaagttgatgtaaatgcccccgatgtccaagctccagactggcacctgaagatgcccaagatgaaaatgcccaagttcagcatgcctggcttcaaagcagagggccctgaagtagacgtcaacttgcctaaggctgacgttgacatctcaggacccaaggtggacattgaaggccctgatgttaatattgaaggaccagagggaaagttgaaagggcctaagttaaagatgccagagatgaacatcaaagcccccaagatctccatgcctgactttgatttgcatctgaaaggtcccaaggtgaagggcgatgtggatgtttctctgcccaaagtggaaggtgacctcaagggccccgaagttgacatcaaggggcccaaagtggatattaatgccccagatgtgggtgttcaaggcccagactggcacctgaagatgcccaaggtgaaaatgccaaagttcagtatgcctggcttcaaaggagagggcccagatggggatgtgaagctgcccaaggctgacattgatgtctcaggacccaaagtggacattgaaggccctgatgttaacattgaaggaccagagggaaagttgaaagggcctaagttcaagatgccagagatgaatatcaaagcccccaagatctccatgcctgatattgacttaaacctgaaaggacccaaagtgaagggtgatgtggatgtttcccttcctaaagtggaaggtgacctcaagggcccagaagttgacatcaagggcccaaaagtggacattgacgcacctgatgttgatgttcatggcccagactggcacctaaagatgcccaagataaaaatgcccaagatcagcatgcctggcttcaaaggagaaggtccagatgtggacgtgaacctgcccaaggctgacattgatgtctcaggaccgaaagtggatgttgaatgtcccgatgtgaatatcgaaggacctgagctgctggaacctattccctatgaattcatggcataataggtgttaaaaaaaaaaataaaggacctctgggctac

SEQ ID NO: 345447 - DNA, 855 bp, Homo sapiens
atgttgagctggagtgtcctgatgcaaagttgaaaggccctaaatttaagatgccagacatgcacttcaaggcccccaagatctccatgcctgatgtggacttacacttgaaaggccccaaagtcaaaggggatgtggatgtgtcggtgccaaaattggagggagatttaacaggtcccagtgtgggtgtggaggtgcctgatgttgagctggagtgtcctgatgcaaagttgaaagggcccaagtttaagatgcctgagatgcacttcaagacccccaagatctccatgcctgatgtggacttacacctgaaaggccccaaagtcaaaggggatatggatgtgtctgtgcccaaggtagaaggtgaaatgaaagtgccagatgttgacatcaaaggacccaaaatggacattgatgccccagatgtggatgttcatggcccagactggcacctgaagatgcccaagatgaaaatgcccaagttcagcatgcctggcttcaaagcagagggcccagaagtggatgtgaacttgcccaaggctgatgttgttgtctcaggacccaaggtggatgttgaagtcccagatgtgagccttgaaggtccagaagggaagctgaagggccccaagcttaagatgcctgagatgcacttcaaggcccccaagatctccatgcctgatgtggacttacacttgaaaggccccaaagtcaaaggggatgtggatgtgtctttgccaaaattggagggagatttaacaggccccagtgtggatgtggaggtgcctgatgttgagctggagtgtcctgatgcaaagttgaaagggcccaagtttaagatgcctgagatgcacttca

SEQ ID NO: 345448 - DNA, 621 bp, Homo sapiens
caggtagttgcgtttcttctcaggtagttgcgtttcttcttgcgtttcttctcaggtagttgcgtttcttctcaggtagagggagatctgaaaggtcctgaagttgacctcaaaggccccaaagtggacattgatgtcccagatgttaatgttcagggtccagactggcacctgaagatgcccaagatgaaaatgcccaagttcagcatgcctggcttcaaagcagagggccctgaagtggatgtgaacctgcccaaggctgacgttgatgtctcaggccccaaagtggacgttgaaggccctgatgttaacattgaaggaccagagggaaagttgaaagggcccaagttcaagatgccagagatgaatatcaaagcccccaagatccccatgcctgactttgatttgcatctgaaaggaacccacggccgtgggttccttgcagaggaagcatgcactcaggagtcacagagcacgggcagtatcgtgcgcttctcctttctggaaatcacgtgcacatactcacatacgcgtaacgaacacacatacagacaaggcaagccacaaactgttatacaggtaggaaggaggaagatctgacaaagcagcaggtgtcatact

SEQ ID NO: 345449 - DNA, 470 bp, Homo sapiens
gttcctgcgcctcgggaggaggctctgcgcgggactgcaggttctgccccgcatcggagtgatcgctgagcctgacgctctcgaaggctgggcctggggcccgcaatctactccggaggctttcccactgggcagggtcgctagcaggaggaggaagcattcccatgtgaaagatgagctccctataaaagcaacgctcttatcatcgagaacagaaagttgaagccaagagagagctccacaagctgaccttgttaaactaacccttatcttcttagtcgcttctttacccaattaactaccctagccgaagcccctttgccttattacattttgcaacagtgttcgttgtccaattcagtatacaagtgagtgactctggatgctttttggggtcttcgtttccttatgagggcttctgtgccatgtaaaacttgtattaaataaatttgtatgcttttctcctgtta

SEQ ID NO: 345450 - DNA, 461 bp, Homo sapiens
gagtgccggggccacaggaagaatttgtggcgacatcatcccttccccaggtgccacccgggtgcagtgaggacctggagcccctgccccaggctgtgaggagacttgaccagagctgcctgaatgctccacggagcagaggaggaagcattcccatgtgaaagatgagctccctataaaagcaacgctcttatcatcgagaacagaaagttgaagccaagagagagctccacaagctgaccttgttaaactaacccttatcttcttagtcgcttctttacccaattaactaccctagccgaagcccctttgccttattacattttgcaacagtgttcgttgtccaattcagtatacaagtgagtgactctggatgctttttggggtcttcgtttccttatgagggcttctgtgccatgtaaaacttgtattaaataaatttgtatgcttttctcctgtta

SEQ ID NO: 345451 - DNA, 942 bp, Homo sapiens
gttcctgcgcctcgggaggaggctctgcgcgggactgcaggttctgccccgcatcggagtgatcgctgagcctgacgctctcgaaggctgggcctggggcccgcaatctactccggaggctttcccactgggcagggtcgctagcaggaggaggaagcattcccatgtgaaagatgagctccctataaaagcaacgctcttatcatcgagaacagaaagttgaagccaagagagagctccacaagctgaccttgttaaactaacccttatcttcttagtcgcttctttacccaattaactaccctagccgaagcccctttgccttattacattttgcaacagtgttcgttgtccaattcagtatacaagtgagtgactctggatgctttttggggtcttcgtttccttatgagggcttctgtgccatgtaaaacttgtattaaataaatttgtatgcttttctcctgttaatctgtctatatcgattgaactttagggtccagtcagaacccaaagaggatggaggtggagttttggctcctctacagctatctgaataatcaaaattcaagatattccatgttctttctgagtttctttgaaattaaaaatgcagacaaccactcaactaatacgtcagcgagatacgttttctgtccttattgccttactgatgaaattgcctttattcataaaaaataaatgtgggagtcttgtttatttatttctaatgacattaacttgacattaaccttggtgctcttgggaaccataaatgggccctgtactacttgttacagagtataaattcccagaactacaagtacatcatattcctcaagttactgaagaatttcatgatccatgtgtcaggcctctgagcccaagctaagtcatcatatcccctgtgacctgcacgtatacatccagatggccggttcc

SEQ ID NO: 345452 - DNA, 192 bp, Homo sapiens
tgggagatttgagcaaggtttaagttgaaataattaggcatcagcaaaccataatcacaacagcagggacgtggctgctgctccaaatctgcctaacgaaggcagcacaatctttaatacctgtgcagctttgtaaatggagacaggatactctcttttgaaagctgagattccctgtccagtctgggggag

SEQ ID NO: 345453 - DNA, 526 bp, Homo sapiens
ctgaatgatgacttacatgttccatacaacataaatgaagagacaatattagttagacatgtccaagcaattctttaacattcaaatgataagcaaagaattttacaaatatgtaggatggagaaaaataaataacctaaaaaagaacaaaaattgggctggcctcagtcttctctatggcaataaatgatagcctacaattaagcaagttgacaacattttaggaaaaaatggtcttttgcatttgtgaagacagcaaaaatattatcagctataagaattcagaaagcatataactacatacccatcctccaaattttactcaaattcatgatgggacaactggatttccacatgtaaaagaatgaagttggacccctacaccatctacaaaaattaattcaaaatgaaagaatgacttaaatatatgtactaacaccacagaactcttagcagaaaacataggggcaaagcttcatgacactggatttggcaatgatttcttggatatgacatcaaaagcaca

SEQ ID NO: 345454 - DNA, 709 bp, Homo sapiens
tttgctttttattaaatgtacatagcattgtcttctaactcacgttcttgaccagcctttaaaacacacacactgctttacacgttttatctccttgtcgccttagtctatatatacactgttgacttcattaaaattatataaagtgccattctaggttcctggatgaccatctttttttcccttccagcttctacttatacgattattattgccattatttctttccaggaatttctatatgattttgataagcatcatcatatttagtgttatcagcaaagacacaagctcaaaagtgacatcttttccatgaatccaggaaagaagaaaaatccactcagttcagataaatcctagcaattcccaaagggaaaggcattggatatgtgtttgatgagaaagaaaatgaaaaaggggtggggtggtagtactcttctacctgcttctcaaaaccagaacattgctcggtcagattaaacccagtgaaaaacacttacaataaccagtatacagcatgttttcccacagcttatttggaaaaaaagacaggtaacagtcaaagttagagaagctgtaagcaatggacaggcttgatattaagtgtgcaggatctgggctaaatgccttaaaatgtgcaattcaactttccacttctgaatgtggaggcttctcccaagttagtggctgggtggaggggaaatacttg

SEQ ID NO: 345455 - DNA, 361 bp, Homo sapiens
gtttcattgttgctactgtgcactgtttcactgttgcactgaggttttagtacagatgaggttcacgttgcccaggctggtcttgaactcctgggctcaagtgatcctgggcaatcccaagcagtgctgggactgcaagcatgagccactgtgcccagcctaaaaacaaatccctgttattccctgtctcagtaaatggaatcaccatgtaaccagttttacacattagagaccgggtagtcagctgggtgtggtggctcatgcctgtaatcccagcactttgcaaggccgaggtgggtggatcacctgaggtaaggagttcgagagcagcctggccaacatgacgaaaccctgtctctaa

SEQ ID NO: 345456 - DNA, 740 bp, Homo sapiens
  misc_feature (113)..(113): n is a, c, g, or t
  misc_feature (684)..(684): n is a, c, g, or t
aatacagcgcattcaacttgcaaacacccttccactcccacaaagagcaagctgtcactggccaatcaaaacaatgaaccataatgaaacagtttttcttgctccacccactnggtgaccaaatttgaaaaaaaaaaaaaaccgcgccaactcatgttgttttcaatcaggtccgccaagtttgtatttaaggaactgtttcagttcataccttccactgcgataggaatcatgtctggtcgcggcaaaggcggaaaaggcttggggaagggtggtgctaagcgccatcgtaaggtgctccgggataacatccagggcattacaaaaccggctattcgccgtttggctcggcgcggtggcgtcaagcgcatttccggtcttatctatgaggagactcgaggtgtgcttaaggttttcttagagaacgttattcgagacgccgtcacctatacggagcacgccaagcgcaaaactgtcacagccatggatgtagtatatgccctaaaacgtcaggggcgcactctgtatggcttcggcggctgaatctaagaatacgcggtctcctgagaacttcaaaaaacaaaaaaaaacccaaaggcccttttcagggccgctcacaaagtcgtttaaagagctgaaatgcgttgcgagaatgagtttggatgacagaaataaccgtgacancctgcataagaatgaattgtgtttgccatgaccggccacactgtgacaaaatttca

SEQ ID NO: 345457 - DNA, 744 bp, Homo sapiens
  misc_feature (113)..(113): n is a, c, g, or t
  misc_feature (636)..(636): n is a, c, g, or t
  misc_feature (730)..(730): n is a, c, g, or t
  misc_feature (744)..(744): n is a, c, g, or t
aatacagcgcattcaacttgcaaacacccttccactcccacaaagagcaagctgtcactggccaatcaaaacaatgaaccataatgaaacagtttttcttgctccacccactnggtgaccaaatttgaaaaaaaaaaaaaaccgcgccaactcatgttgttttcaatcaggtccgccaagtttgtatttaaggaactgtttcagttcataccttccactgcgataggaatcatgtctggtcgcggcaaaggcggaaaaggcttggggaagggtggtgctaagcgccatcgtaaggtgctccgggataacatccagggcattacaaaaccggctattcgccgtttggctcggcgcggtggcgtcaagcgcatttccggtcttatctatgaggagactcgaggtgtgcttaaggttttcttagagaacgttattcgagacgccgtcacctatacggagcacgccaagcgcaaaactgtcacagccatggatgtagtatatgccctaaaacgtcaggggcgcactctgtatggcttcggcggctgaatctaagaatacgcggtctcctgagaacttcaaaaaacaaaaaaaaaaaagcggccgctcgattcgaatcagttatcgataccgtcgactcanggggggcccggtaccattcgcctaaagtgatcgtattaaattcatgggcgtcgtttgtcgtgatgggcctggcgttaccttatcgcttgcacanatccccctttgccn

SEQ ID NO: 345458 - DNA, 706 bp, Homo sapiens
  misc_feature (113)..(113): n is a, c, g, or t
aatacagcgcattcaacttgcaaacacccttccactcccacaaagagcaagctgtcactggccaatcaaaacaatgaaccataatgaaacagtttttcttgctccacccactnggtgaccaaatttgaaaaaaaaaaaaaaccgcgccaactcatgttgttttcaatcaggtccgccaagtttgtatttaaggaactgtttcagttcataccttccactgcgataggaatcatgtctggtcgcggcaaaggcggaaaaggcttggggaagggtggtgctaagcgccatcgtaaggtgctccgggataacatccagggcattacaaaaccggctattcgccgtttggctcggcgcggtggcgtcaagcgcatttccggtcttatctatgaggagactcgaggtgtgcttaaggttttcttagagaacgttattcgagacgccgtcacctatacggagcacgccaagcgcaaaactgtcacagccatggatgtagtatatgccctaaaacgtcaggggcgcactctgtatggcttcggcggctgaatctaagaatacgcggtctcctgagaacttcaaaaaacaaataaaatttataataataccatgtcggccgtttctgcccaaccgactttagactccagcaagcttaatcattctggcccaatttgagcctaacttgcccatattcccctatagtgaagtcgaa

SEQ ID NO: 345459 - DNA, 877 bp, Homo sapiens
  misc_feature (1)..(1): n is a, c, g, or t
  misc_feature (33)..(33): n is a, c, g, or t
  misc_feature (73)..(74): n is a, c, g, or t
  misc_feature (88)..(88): n is a, c, g, or t
  misc_feature (90)..(90): n is a, c, g, or t
  misc_feature (97)..(97): n is a, c, g, or t
  misc_feature (123)..(123): n is a, c, g, or t
  misc_feature (542)..(542): n is a, c, g, or t
nccaggccaaattggtaacccccggccccatcnccaccttaaacgacgcccatgattgtaatacgactcaccnnaggccaaggttacngnccccccntcgagttcgacgtatcgttagcttgntatcgaattcgcggccgcgcgacggctgcgagaagacgacagaaggggactgcgataggaatcatgtctggtcgcggcaaaggcggaaaaggcttggggaagggtggtgctaagcgccatcgtaaggtgctccgggataacatccagggcattacaaaaccggctattcgccgtttggctcggcgcggtggcgtcaagcgcatttccggtcttatctatgaggagactcgaggtgtgcttaaggttttcttagagaacgttattcgagacgccgtcacctatacggagcacgccaagcgcaaaactgtcacagccatggatgtagtatatgccctaaaacgtcaggggcgcactctgtatggcttcggcggctgaatctaagaatacgcggtctcctgagaacttcaaaaaacaaatanttataaaaaaaacatgtggccgcccttggtccaacaagtcttttaatttcttcaagctttttcatttcggcgccaaattaagcgatcttttggccaaatacccccttataaggggggggttttaacaaaaaaaggggcccgcgttttaaaaacagttgatttgtgaaaaaccctgggggtcccacactaaaagacctttttgaacaaaaacccttttttgcgggcggtgggattaacaaaaaagcccccacccaaagggtcttttcaaaaaaatgggccccctttaaggggcaatgaaaaatttgccggcctaaatattttttaccccgcgattt

SEQ ID NO: 345460 - DNA, 695 bp, Homo sapiens
  misc_feature (1)..(1): n is a, c, g, or t
  misc_feature (33)..(33): n is a, c, g, or t
  misc_feature (73)..(74): n is a, c, g, or t
  misc_feature (88)..(88): n is a, c, g, or t
  misc_feature (90)..(90): n is a, c, g, or t
  misc_feature (97)..(97): n is a, c, g, or t
  misc_feature (123)..(123): n is a, c, g, or t
  misc_feature (639)..(639): n is a, c, g, or t
nccaggccaaattggtaacccccggccccatcnccaccttaaacgacgcccatgattgtaatacgactcaccnnaggccaaggttacngnccccccntcgagttcgacgtatcgttagcttgntatcgaattcgcggccgcgcgacggctgcgagaagacgacagaaggggactgcgataggaatcatgtctggtcgcggcaaaggcggaaaaggcttggggaagggtggtgctaagcgccatcgtaaggtgctccgggataacatccagggcattacaaaaccggctattcgccgtttggctcggcgcggtggcgtcaagcgcatttccggtcttatctatgaggagactcgaggtgtgcttaaggttttcttagagaacgttattcgagacgccgtcacctatacggagcacgccaagcgcaaaactgtcacagccatggatgtagtatatgccctaaaacgtcaggggcgcactctgtatggcttcggcggctgaatctaagaatacgcggtctcctgagaacttcaaaaaacaaaaaaaaacccaaaggcccttttcagggccgctcacaaagtcgtttaaagagctgaaatgcgttgcgagaatgagtttggatgacagaaataaccgtgacancctgcataagaatgaattgtgtttgccatgaccggccacactgtgacaaaatttca

SEQ ID NO: 345461 - DNA, 784 bp, Homo sapiens
  misc_feature (26)..(26): n is a, c, g, or t
  misc_feature (39)..(39): n is a, c, g, or t
  misc_feature (449)..(449): n is a, c, g, or t
cagaaacttagtggaatccccccggncttgccaggaacncggccgcgcgacacggctgcgagaagacgacagaaggggactgcgataggaatcatgtctggtcgcggcaaaggcggaaaaggcttggggaagggtggtgctaagcgccatcgtaaggtgctccgggataacatccagggcattacaaaaccggctattcgccgtttggctcggcgcggtggcgtcaagcgcatttccggtcttatctatgaggagactcgaggtgtgcttaaggttttcttagagaacgttattcgagacgccgtcacctatacggagcacgccaagcgcaaaactgtcacagccatggatgtagtatatgccctaaaacgtcaggggcgcactctgtatggcttcggcggctgaatctaagaatacgcggtctcctgagaacttcaaaaaacaaatanttataaaaaaaacatgtggccgcccttggtccaacaagtcttttaatttcttcaagctttttcatttcggcgccaaattaagcgatcttttggccaaatacccccttataaggggggggttttaacaaaaaaaggggcccgcgttttaaaaacagttgatttgtgaaaaaccctgggggtcccacactaaaagacctttttgaacaaaaacccttttttgcgggcggtgggattaacaaaaaagcccccacccaaagggtcttttcaaaaaaatgggccccctttaaggggcaatgaaaaatttgccggcctaaatattttttaccccgcgattt

SEQ ID NO: 345462 - DNA, 668 bp, Homo sapiens
  misc_feature (113)..(113): n is a, c, g, or t
  misc_feature (566)..(566): n is a, c, g, or t
aatacagcgcattcaacttgcaaacacccttccactcccacaaagagcaagctgtcactggccaatcaaaacaatgaaccataatgaaacagtttttcttgctccacccactnggtgaccaaatttgaaaaaaaaaaaaaaccgcgccaactcatgttgttttcaatcaggtccgccaagtttgtatttaaggaactgtttcagttcataccttccactgcgataggaatcatgtctggtcgcggcaaaggcggaaaaggcttggggaagggtggtgctaagcgccatcgtaaggtgctccgggataacatccagggcattacaaaaccggctattcgccgtttggctcggcgcggtggcgtcaagcgcatttccggtcttatctatgaggagactcgaggtgtgcttaaggttttcttagagaacgttattcgagacgccgtcacctatacggagcacgccaagcgcaaaactgtcacagccatggatgtagtatatgccctaaaacgtcaggggcgcactctgtatggcttcggcgggcttgggaaaaaaaattttcccccctntttttaaaaaaaaaagggggggaaaaaaaaaaattttttaaaaccccccgggcgccgtcttatgagaacttaaaaacaataaaaaaggctaccgatcttcta

SEQ ID NO: 345463 - DNA, 438 bp, Homo sapiens
  misc_feature (7)..(7): n is a, c, g, or t
  misc_feature (9)..(10): n is a, c, g, or t
  misc_feature (37)..(38): n is a, c, g, or t
gggcacngnnaaaaaaaaaaagtggtaaaggaacccnnacaacagccacccctacaaaaccggctattcgccgtttggctcggcgcggtggcgtcaagcgcatttccggtcttatctatgaggagactcgaggtgtgcttaaggttttcttagagaacgttattcgagacgccgtcacctatacggagcacgccaagcgcaaaactgtcacagccatggatgtagtatatgccctaaaacgtcaggggcgcactctgtatggcttcggcggctgaatctaagaatacgcggtctcctgagaacttcaaaaaacaaataaaatttataataataccatgtcggccgtttctgcccaaccgactttagactccagcaagcttaatcattctggcccaatttgagcctaacttgcccatattcccctatagtgaagtcgaa

SEQ ID NO: 345464 - DNA, 654 bp, Homo sapiens
  misc_feature (1)..(1): n is a, c, g, or t
  misc_feature (33)..(33): n is a, c, g, or t
  misc_feature (73)..(74): n is a, c, g, or t
  misc_feature (88)..(88): n is a, c, g, or t
  misc_feature (90)..(90): n is a, c, g, or t
  misc_feature (97)..(97): n is a, c, g, or t
  misc_feature (123)..(123): n is a, c, g, or t
  misc_feature (588)..(588): n is a, c, g, or t
  misc_feature (652)..(652): n is a, c, g, or t
nccaggccaaattggtaacccccggccccatcnccaccttaaacgacgcccatgattgtaatacgactcaccnnaggccaaggttacngnccccccntcgagttcgacgtatcgttagcttgntatcgaattcgcggccgcgcgacggctgcgagaagacgacagaaggggactgcgataggaatcatgtctggtcgcggcaaaggcggaaaaggcttggggaagggtggtgctaagcgccatcgtaaggtgctccgggataacatccagggcattacaaaaccggctattcgccgtttggctcggcgcggtggcgtcaagcgcatttccggtcttatctatgaggagactcgaggtgtgcttaaggttttcttagagaacgttattcgagacgccgtcacctatacggagcacgccaagcgcaaaactgtcacagccatggatgtagtatatgccctaaaacgtcaggggcgcactctgtatggcttcggcggctgaatctaagaatacgcggtctcctgagaacttcaaaaaacaaaaagcggccgtcgaatgtcgacgcggccgcgaattcgtatcaactatcgnacctcgactcaggggggccgtaccaattgccctatatgatcgtattacaatcatggcgcgtttngt

SEQ ID NO: 345465 - DNA, 830 bp, Homo sapiens
  misc_feature (1)..(1): n is a, c, g, or t
  misc_feature (33)..(33): n is a, c, g, or t
  misc_feature (73)..(74): n is a, c, g, or t
  misc_feature (88)..(88): n is a, c, g, or t
  misc_feature (90)..(90): n is a, c, g, or t
  misc_feature (97)..(97): n is a, c, g, or t
  misc_feature (123)..(123): n is a, c, g, or t
nccaggccaaattggtaacccccggccccatcnccaccttaaacgacgcccatgattgtaatacgactcaccnnaggccaaggttacngnccccccntcgagttcgacgtatcgttagcttgntatcgaattcgcggccgcgcgacggctgcgagaagacgacagaaggggactgcgataggaatcatgtctggtcgcggcaaaggcggaaaaggcttggggaagggtggtgctaagcgccatcgtaaggtgctccgggataacatccagggcattacaaaaccggctattcgccgtttggctcggcgcggtggcgtcaagcgcatttccggtcttatctatgaggagactcgaggtgtgcttaaggttttcttagagaacgttattcgagacgccgtcacctatacggagcacgccaagcgcaaaactgtcacagccatggatgtagtatatgccctaaaacgtcaggggcgcactctgtatggcttcggcggctgaatctaagaatacgcggtctcctgagaacttcaaaaaacaaaatcttgtcggccgtttcggaccagactattgtatactccagcatgttgatgcatgcggccgtattacgtgcttagtcgcacaaatccctctaatgggaggtctacaacaaactagtgcccgttgttcaacaacgtgactgctgaaacaacccgtgtttcacacatattaaacgtcgttgcagaacattcttttttccacatggtgcagtaatcgcgaaggagcccaccacagagcgttcttcaccacagtgccacactcatgagtggatgtggttggcgccgattattttt

SEQ ID NO: 345466 - DNA, 771 bp, Homo sapiens
  misc_feature (436)..(436): n is a, c, g, or t
cgaaccggccgcgcgacacgccgagaagagacgaaggtacggctgcgagaagacgacagaaggggactgcgataggaatcatgtctggtcgcggcaaaggcggaaaaggcttggggaagggtggtgctaagcgccatcgtaaggtgctccgggataacatccagggcattacaaaaccggctattcgccgtttggctcggcgcggtggcgtcaagcgcatttccggtcttatctatgaggagactcgaggtgtgcttaaggttttcttagagaacgttattcgagacgccgtcacctatacggagcacgccaagcgcaaaactgtcacagccatggatgtagtatatgccctaaaacgtcaggggcgcactctgtatggcttcggcggctgaatctaagaatacgcggtctcctgagaacttcaaaaaacaaatanttataaaaaaaacatgtggccgcccttggtccaacaagtcttttaatttcttcaagctttttcatttcggcgccaaattaagcgatcttttggccaaatacccccttataaggggggggttttaacaaaaaaaggggcccgcgttttaaaaacagttgatttgtgaaaaaccctgggggtcccacactaaaagacctttttgaacaaaaacccttttttgcgggcggtgggattaacaaaaaagcccccacccaaagggtcttttcaaaaaaatgggccccctttaaggggcaatgaaaaatttgccggcctaaatattttttaccccgcgattt

SEQ ID NO: 345467 - DNA, 127 bp, Homo sapiens
ggagatgctgaaaaggcagctgataaaattcgacatcctttcctgataaaatctagtaagccaggaagacaatgctacttccttaaactcgtgataaatatttatctgaaatcaacagtcagcatca

SEQ ID NO: 345468 - DNA, 363 bp, Homo sapiens
atcccttgttgatggacattgacgttagtgcttggttttctcttctgtaattggagtggtgaatgtccttgtagctaaatctctgcacacatccatgattattttcaaaagataattcctagaagtagaattcctattttgttgccaaacgccttccagaatggatgttcaggtttacatttcaactagcatttataactgttcatttccccacatcctaatcaaacaaggaaggcattttatttaccctttcctagttgaatagttgtaggatgatgtctcattgtttatgatttttaaaaaatgttttgaaacaatttcagtcctacaagaaattacatatgcagtacaggtctcactcca

SEQ ID NO: 345469 - DNA, 142 bp, Homo sapiens
tgtatttttagtagagacggggtttcaccgtgttggccaggatggtctcgatctcttgacctcgtgatccaccaggcgtgcgccaccgcgccaggcctatttatactttttaaataactcgtcacacttttatcatattctc

SEQ ID NO: 345470 - DNA, 1059 bp, Homo sapiens
gatgtcctcatttatggaacccctgctatccacccgcacaccccgcttggggcctgctttacccaaagcctttcccgtcgcagtcagtggcattactggcctccagtggctcaggcgagagcactcggtgatctctgactcctctctttctctcgtaggccgtaatggtcctcaggaaatcattccagctctaccttgagagcacacacagaacctgacgcttcttaccacccccaccctgtagcatcttagcccggggcctgtcatctctttcccgggtcacacacagcagtggtgttcatgaagctcctcctgccctcacagtggctgttctcacacagaagctgggtcagacccgcagaggcccctgtctacagggcctcacagtggcctgtgaagaccctgcactttctgctcgctgtaacctctttgccggctgtctccctctgcccactttacccggccacacctgcccccagtgctgtctgtgaccacccaggcatgcgtccaccttgagccctggcaccggctgccctctctgctcaggagacatctaccccagataacttgttcggtcctttccttctcatctttcaagactttgcacaaatcttcccttctccttaaagttttatcctgaccactgaattcaacacttcatccctttctcccttccttactgagctccgctttttgatttttttctggagcatttcactttgtaacttaatgtgtaatttacctatttcttatgttcatgtctaattgtctgtttccactagaatgcaagcatcacaggggcagggtgtttgtgtattgatgtatttcaagatctagaacagtgtgctcagcacatagtagaccatatgttttgatcatatgaatgaatgcctgcatccaagaatgttcttacagtcttgggtggtcttgggggtcagcctttggtggggaaccaacttgggagaaggaatagctctgacggctgctgggtattggctacctgaataataagggctcttggagtcatttagcacaagggtttttcacctgcatttagag

SEQ ID NO: 345471 - DNA, 385 bp, Homo sapiens
tcccgggagcagggacagtgtgtgggcaggcagggctggcgacaagagctgagggaagaccagaagggctgaatggcatgtttgagggggaggccactgtgctgtgcttcaggctggcagggcagccacacctgggaatctgggtgccaaggtgagcagggctgggaaagcccctgtaggactttaatggagtggttggaaggagggggtcaaactttcaatgtgcctcttccagcctttcaggtcaggcaggtctggtgttgggttgccctgccctgtccacatcctacagagagagcttccgaatgggcagcccctttccatgcctgtacccctgacatccagcataggacttcttttccttttttgagacaaggtctgactc

SEQ ID NO: 345472 - DNA, 410 bp, Homo sapiens
catcccttacgccatactttggtaaatactgttcatggtcttagaaatgccaagcaagcagacagcaggaaactagtgatctagaatcagcaagaaacctctaagataaagaaactgaagcacagttaagtaatccatccaagatcacacagctaatgggaggagtgaaccccatacactcaagtaccaataccacactcttaatcactaagccaggatcaatctgatcatccacaagtgttctcctggagggactcagaaatgagttgtgcagagcgatgcagaatcattccttggagcacttccagcagaaataagacacagaaagaaggttctacttcactgatcctcaaacattgcaatatgtgtacatgtcaatcagcaataaacttaaatataagatcgtcaac

SEQ ID NO: 345473 - DNA, 669 bp, Homo sapiens
ctcctgcctcagagcccttcccaggactgtatcattggggcagataagaggatttgctgcggggctaaggcagtgtccacggggccttgaacagtgcatccccttggaggcactcagccacccagcagcttagcttgttgcattggcgagaagattctgtgggaaggaatagggtgtaaacgactctcactttccacactgtctgactcccgtaagctgttatccttgaaaataaagtgcagtgtttggcaagatagaaagggctgtggtggcagtttgcctagagagccctagtgttagcttagtgtcctctcagctgggatccagttcccttcaaagcaccttctccctacattcctgtgggaatgccctgtaggaagagggaattttctgtgagaagaaggtggattccctgaggaaatctgtgagacagaacatgtggctaatttttttttcatatgttactttaatcttcataaacaaggcatgtgttccttgcagaagcagtatgtggagacagccaagcttgcagcagttgcagtagtgtggaaatctttttgcctgtcttataatttcgtttgtttttttacttccccagattagtctgctgaactcaattcatgagaacttctcacagtaagtactgtcagtcctccttcccactaatac

SEQ ID NO: 345474 - DNA, 439 bp, Homo sapiens
gctcaaggatgtgaagtaaggctttaaagctcctgcacggctactcagcactaggtcccattggatcttaacatcttggatacccagctggttgcttttcctatagaacagcatgtgttgatagcttcttatcacctagtcagttcaactatgctgatttgagttcatgagttgggccatgtctgaactggccttcacttcagtgggatgttgtccttagcaactcttgtcttttcactttcttccccagtggctggtctgaggtttcagtgcttaagaggatttgaaatgagaactctcgtcttaagcactattccttatgaccccctttttcttactggctgtgtagggatctatgttggagccatctgcagggtttgtagccttttcccatggagaatatattacaatttgttcgaaaattgagacttcgtcaggc

SEQ ID NO: 345475 - DNA, 2874 bp, Homo sapiens
ggcaggcggcggcggcggcggcggcggcggcagagggagtttccgctttgcactccaccccggtagcagctccgcggcagggacagcttcctccggacgcttggcgggcttcgctctcgccttacgacagcccggtcggatcatggggttgcccagggggccggagggccagggtctcccggaggtggaaacaagagaagatgaagaacaaaatgtcaagttgactgaaattctggagctcttggttgcagctgggtatttcagggcaagaattaaaggcttatcaccctttgacaaggtagtaggaggaatgacttggtgtatcaccacttgcaactttgatgtagatgttgatttgctctttcaagaaaactctacgataggtcaaaaaatagctctgtcagaaaaaattgtctcggtcctgccaaggatgaaatgcccacaccagctggagccccaccagatccaggggatggattttattcacatatttcctgttgttcagtggctggtgaaacgagctatagaaacaaaagaagagatgggtgactatatccgctcctactctgtatcccagttccagaagacttacagtctccctgaggatgatgacttcataaagagaaaagaaaaggccatcaagacagttgtggacctctcagaagtgtacaagccccgtcggaaatacaaacgccaccagggagcagaggagctacttgatgaagaatctcgaatccatgctacacttttggaatatggcaggagatatggatttagccgccagagcaaaatggagaaggctgaggacaagaaaacggcacttccagcagggctgtcagctacagaaaaagctgatgcccacgaggaagatgagcttcgagcagctgaagagcagcgtattcagtcgctgatgaccaagatgaccgctatggcaaatgaggagagccgtctcaccgcaagctccgtgggccagattgtgggactctgctctgctgagatcaagcagattgtgtccgagtatgcagagaagcagtctgagctatcagctgaagaaagtccagaaaaattaggaacctcccagctacatcgccggaaagtcatttccttgaacaaacagattgcgcaaaagaccaaacatcttgaagagctgcgagcaagtcacaccagcctacaagccagatataatgaagccaagaaaacgctgacagagctgaagacttacagtgagaaactggacaaagagcaagcagccctcgagaagatagaatccaaagctgatccaagtatcctacagaacctgagagcacttgtagccatgaatgaaaatctgaaaagtcaagaacaggaatttaaagcacattgtcgagaggagatgacacgactacagcaagaaattgaaaacctgaaagctgagagagcaccacgtggagatgaaaagaccctctccagtggagagccgcctggtaccttgacctctgcaatgactcatgacgaagacctagacagacggtataatatggagaaagagaaactttacaagatacgtttactacaggctcgaagaaatcgagaaatagcaattttgcaccgcaagattgatgaagtccctagccgtgccgagctaatacagtatcagaagagatttattgaactctaccgccagatttcagcagtgcacaaagaaaccaagcagttcttcactttatataataccctggatgataaaaaggtttatttggaaaaagagattagtctgctgaactcaattcatgagaacttctcacaggccatggcctcccctgctgcccgggaccagtttttacgtcagatggaacagattgtggaaggaattaagcaaagtagaatgaagatggaaaagaaaaagcaagagaacaaaatgagaagagaccagttgaacgaccagtacttggagctgttagaaaagcagaggctatactttaagactgtgaaagagttcaaggaggagggccgcaagaacgagatgctgctgtccaaggtgaaagcgaaggcctcctgaacatccccagccgtggctgtatgtcattgattttacttttaagcaccgtatatcacctacaagatcatgaaatggttctgaaagcgacagtagagagatgcagttgtgatgatttcaacaacctggatgttttctttctcctctttgcttccattcatctctgttggctgctgttgatggagtcagacagtaaacacgtggcttggataacacccatcatcctatgaagaatatagggagtacttgttctctgttgattcaacttttatgtctccagtaacattgcgcttatgaaggtacctgtatttgtatggactctgaataaagaagaattcatttgtttagcaagtattagttcagcaaccactgagaaataagcactgaggaagattcagagacgtgtaaaacacagttcctactgcacaagtacccagcaggtggcccagggaggcagatacagcacacttgaccgcagaactgggctatccaagatgtttttcagtaaacagaaggcatttagctgaaatgatcagcccatgtagtgttggtcacttgggcctttcacctgccatggtaccttttgttcccagctcctccaggtgccagccagcaggcttggtggtgacagcaactggaacgaaagttcagtgttgttttaatttttatacgttactcaagttgatttctcagaaaattgaaaacagaccttgtgctgaggacacgtcaataaaaattataccttcccctgccccaatgttcatgtgagtcacagcatgcagaggggctgtgcatccccctcattgaaggcacatttgatgaggctacgctgcagatgg

SEQ ID NO: 345476 - DNA, 2384 bp, Homo sapiens
ggcaggcggcggcggcggcggcggcggcggcagagggagtttccgctttgcactccaccccggtagcagctccgcggcagggacagcttcctccggacgcttggcgggcttcgctctcgccttacgacagcccggtcggatcatggggttgcccagggggccggagggccagggtctcccggaggtggaaacaagagaagatgaagaacaaaatgtcaagttgactgaaattctggagctcttggttgcagctgggtatttcagggcaagaattaaaggcttatcaccctttgacaaggtagtaggaggaatgacttggtgtatcaccacttgcaactttgatgtagatgttgatttgctctttcaagaaaactctacgataggtcaaaaaatagctctgtcagaaaaaattgtctcggtcctgccaaggatgaaatgcccacaccagctggagccccaccagatccaggggatggattttattcacatatttcctgttgttcagtggctggtgaaacgagctatagaaacaaaagaagagatgggtgactatatccgctcctactctgtatcccagttccagaagacttacagtctccctgaggatgatgacttcataaagagaaaagaaaaggccatcaagacagttgtggacctctcagaagtgtacaagccccgtcggaaatacaaacgccaccagggagcagaggagctacttgatgaagaatctcgaatccatgctacacttttggaatatggcaggagatatggatttagccgccagagcaaaatggagaaggctgaggacaagaaaacggcacttccagcagggctgtcagctacagaaaaagctgatgcccacgaggaagatgagcttcgagcagctgaagagcagcgtattcagtcgctgatgaccaagatgaccgctatggcaaatgaggagagccgtctcaccgcaagctccgtgggccagattgtgggactctgctctgctgagatcaagcagattgtgtccgagtatgcagagaagcagtctgagctatcagctgaagaaagtccagaaaaattaggaacctcccagctacatcgccggaaagtcatttccttgaacaaacagattgcgcaaaagaccaaacatcttgaagagctgcgagcaagtcacaccagcctacaagccagatataatgaagccaagaaaacgctgacagagctgaagacttacagtgagaaactggacaaagagcaagcagccctcgagaagatagaatccaaagctgatccaagtatcctacagaacctgagagcacttgtagccatgaatgaaaatctgaaaagtcaagaacaggaatttaaagcacattgtcgagaggagatgacacgactacagcaagaaattgaaaacctgaaagctgagagagcaccacgtggagatgaaaagaccctctccagtggagagccgcctggtaccttgacctctgcaatgactcatgacgaagacctagacagacggtataatatggagaaagagaaactttacaagatacgtttactacaggctcgaagaaatcgagaaatagcaattttgcaccgcaagattgatgaagtccctagccgtgccgagctaatacagtatcagaagagatttattgaactctaccgccagatttcagcagtgcacaaagaaaccaagcagttcttcactttatataataccctggatgataaaaaggtttatttggaaaaagagattagtctgctgaactcaattcatgagaacttctcacaggccatggcctcccctgctgcccgggaccagtttttacgtcagatggaacagattgtggaaggaattaagcaaagtagaatgaagatggaaaagaaaaagcaagagaacaaaatgagaagagaccagttgaacgaccagtacttggagctgttagaaaagcagaggctatactttaagactgtgaaagagttcaaggaggagggccgcaagaacgagatgctgctgtccaaggtgaaagcgaaggcctcctgaacatccccagccgtggctgtatgtcattgattttacttttaagcaccgtatatcacctacaagatcatgaaatggttctgaaagcgacagtagagagatgcagttgtgatgatttcaacaacctggatgttttctttctcctctttgcttccattcatctctgttggctgctgttgatggagtcagacagtaaacacgtggcttggataacacccatcatcctatgaagaatatagggagtacttgttctctgttgattcaacttttatgtctccagtaacattgcgcttatgaaggtacctgtatttgtatggactctgaataaagaagaattcatttgtttagc

SEQ ID NO: 345477 - DNA, 1387 bp, Homo sapiens
taattttagtcacattttactgcaagaaaatacatattagttatgaaagttacagggaaagtatgacaaaaaagattaacatgcaattataagaccaggctaatttccatgccttctcagaggtttagcatccttaattgcctgggatcccaggggcccccgtggctccactgtgcgttacaaagacctgattgcctctcctaagagtcataatctggatacagagctgactgcttggcatttccccctgcctcagagtcctgtgtgccggtcataactctactggtttttctttcagggccatggcctcccctgctgcccgggaccagtttttacgtcagatggaacagattgtggaaggaattaagcaaagtagaatgaagatggaaaagaaaaagcaagagaacaaaatgagaagagaccagttgaacgaccagtacttggagctgttagaaaagcagaggctatactttaagactgtgaaagagttcaaggaggagggccgcaagaacgagatgctgctgtccaaggtgaaagcgaaggcctcctgaacatccccagccgtggctgtatgtcattgattttacttttaagcaccgtatatcacctacaagatcatgaaatggttctgaaagcgacagtagagagatgcagttgtgatgatttcaacaacctggatgttttctttctcctctttgcttccattcatctctgttggctgctgttgatggagtcagacagtaaacacgtggcttggataacacccatcatcctatgaagaatatagggagtacttgttctctgttgattcaacttttatgtctccagtaacattgcgcttatgaaggtacctgtatttgtatggactctgaataaagaagaattcatttgtttagcaagtattagttcagcaaccactgagaaataagcactgaggaagattcagagacgtgtaaaacacagttcctactgcacaagtacccagcaggtggcccagggaggcagatacagcacacttgaccgcagaactgggctatccaagatgtttttcagtaaacagaaggcatttagctgaaatgatcagcccatgtagtgttggtcacttgggcctttcacctgccatggtaccttttgttcccagctcctccaggtgccagccagcaggcttggtggtgacagcaactggaacgaaagttcagtgttgttttaatttttatacgttactcaagttgatttctcagaaaattgaaaacagaccttgtgctgaggacacgtcaataaaaattataccttcccctgccccaatgttcatgtgagtcacagcatgcagaggggctgtgcatccccctcattgaaggcacatttgatgaggctacgctgcagatgg

SEQ ID NO: 345478 - DNA, 1725 bp, Homo sapiens
ctcctgcctcagagcccttcccaggactgtatcattggggcagataagaggatttgctgcggggctaaggcagtgtccacggggccttgaacagtgcatccccttggaggcactcagccacccagcagcttagcttgttgcattggcgagaagattctgtgggaaggaatagggtgtaaacgactctcactttccacactgtctgactcccgtaagctgttatccttgaaaataaagtgcagtgtttggcaagatagaaagggctgtggtggcagtttgcctagagagccctagtgttagcttagtgtcctctcagctgggatccagttcccttcaaagcaccttctccctacattcctgtgggaatgccctgtaggaagagggaattttctgtgagaagaaggtggattccctgaggaaatctgtgagacagaacatgtggctaatttttttttcatatgttactttaatcttcataaacaaggcatgtgttccttgcagaagcagtatgtggagacagccaagcttgcagcagttgcagtagtgtggaaatctttttgcctgtcttataatttcgtttgtttttttacttccccagattagtctgctgaactcaattcatgagaacttctcacaggccatggcctcccctgctgcccgggaccagtttttacgtcagatggaacagattgtggaaggaattaagcaaagtagaatgaagatggaaaagaaaaagcaagagaacaaaatgagaagagaccagttgaacgaccagtacttggagctgttagaaaagcagaggctatactttaagactgtgaaagagttcaaggaggagggccgcaagaacgagatgctgctgtccaaggtgaaagcgaaggcctcctgaacatccccagccgtggctgtatgtcattgattttacttttaagcaccgtatatcacctacaagatcatgaaatggttctgaaagcgacagtagagagatgcagttgtgatgatttcaacaacctggatgttttctttctcctctttgcttccattcatctctgttggctgctgttgatggagtcagacagtaaacacgtggcttggataacacccatcatcctatgaagaatatagggagtacttgttctctgttgattcaacttttatgtctccagtaacattgcgcttatgaaggtacctgtatttgtatggactctgaataaagaagaattcatttgtttagcaagtattagttcagcaaccactgagaaataagcactgaggaagattcagagacgtgtaaaacacagttcctactgcacaagtacccagcaggtggcccagggaggcagatacagcacacttgaccgcagaactgggctatccaagatgtttttcagtaaacagaaggcatttagctgaaatgatcagcccatgtagtgttggtcacttgggcctttcacctgccatggtaccttttgttcccagctcctccaggtgccagccagcaggcttggtggtgacagcaactggaacgaaagttcagtgttgttttaatttttatacgttactcaagttgatttctcagaaaattgaaaacagaccttgtgctgaggacacgtcaataaaaattataccttcccctgccccaatgttcatgtgagtcacagcatgcagaggggctgtgcatccccctcattgaaggcacatttgatgaggctacgctgcagatgg

SEQ ID NO: 345479 - DNA, 1211 bp, Homo sapiens
ggcaggcggcggcggcggcggcggcggcggcagagggagtttccgctttgcactccaccccggtagcagctccgcggcagggacagcttcctccggacgcttggcgggcttcgctctcgccttacgacagcccggtcggatcatggggttgcccagggggccggagggccagggtctcccggaggtggaaacaagagaagatgaagaacaaaatgtcaagttgactgaaattctggagctcttggttgcagctgggtatttcagggcaagaattaaaggcttatcaccctttgacaaggtagtaggaggaatgacttggtgtatcaccacttgcaactttgatgtagatgttgatttgctctttcaagaaaactctacgataggtcaaaaaatagctctgtcagaaaaaattgtctcggtcctgccaaggatgaaatgcccacaccagctggagccccaccagatccaggggatggattttattcacatatttcctgttgttcagtggctggtgaaacgagctatagaaacaaaagaagagatgggtgactatatccgctcctactctgtatcccagttccagaagacttacagtctccctgaggatgatgacttcataaagagaaaagaaaaggccatcaagacagttgtggacctctcagaagtgtacaagccccgtcggaaatacaaacgccaccagggagcagaggagctacttgatgaagaatctcgaatccatgctacacttttggaatatggcaggtaatgagtgggacccagtctaggtgtctcttttaaaagaaaagctaatttaagttgcttcatttggattaacttgactagcttctacccgattgagtttctgccttcagccatgagatttccaacatcagggacttttctctggtaatgaattacctgtttctgtgggcatcctttgcaattcctctctggaaatgtgcacctggctctgccttcctttgggagttggggtgttccaggcatttacagaggctgaggtactctgtcctgcatgcccctgtttgttaaaatcttcaggtaaatgaaaacagtttcagtgatttcactttaagtgttagaataataatttcaatttcctgtgaatattgtcctaactaggaaaatgaagaacttagaagtagttttgtcacttcttaaaaacatctcgtttaaaaaaaaaaatcttattt

SEQ ID NO: 345480 - DNA, 401 bp, Homo sapiens
atggccatgttattcccctatttaagactttttgatgatacctgttgcctatatgatattgacataaccacagttatgtccctgtacttttttacacatgctgttccctcagcccagaatgcaggttctgttgatagggattttggtcattgtgtcagaatctcttctgtacgccaggttttgaacaggcctctgtaaatgccctggcttggtgtgactggctgcccagtactgctttgcccacattgaacagggcttgattacatgaaccaaggtcaactaactaaatcctttggatttgccatcccttttttccacagcagtctgagctatcagctgaagaaagtccagaaaaattaggaacctcccagctacatcgccggaaagtcatttccttgaac

SEQ ID NO: 345481 - DNA, 276 bp, Homo sapiens
tattttggctccctagagaacatgtaaggccttttaccaaatagtactgtctctgtctcccttttgcatttaggctcgaagaaatcgagaaatagcaattttgcaccgcaagattgatgaagtccctagccgtgccgagctaatacagtatcagaagagatttattgaactctaccgccagagtaggtgcattgaccacagacaagctcttgaggctgggaagggacaggcgaggggtctgttccactttagcatgggggagcatgcaccagagca

SEQ ID NO: 345482 - DNA, 2267 bp, Homo sapiens
attcaggaggagagccttctcacactcagtaacttggctgtctcatccacttaggaagtgtacaagccccgtcggaaatacaaacgccaccagggagcagaggagctacttgatgaagaatctcgaatccatgctacacttttggaatatggcaggagatatggatttagccgccagagcaaaatggagaaggctgaggacaagaaaacggcacttccagcagggctgtcagctacagaaaaagctgatgcccacgaggaagatgagcttcgagcagctgaagagcagcgtattcagtcgctgatgaccaagatgaccgctatggcaaatgaggagagccgtctcaccgcaagctccgtgggccagattgtgggactctgctctgctgagatcaagcagattgtgtccgagtatgcagagaagcagtctgagctatcagctgaagaaagtccagaaaaattaggaacctcccagctacatcgccggaaagtcatttccttgaacaaacagattgcgcaaaagaccaaacatcttgaagagctgcgagcaagtcacaccagcctacaagccagatataatgaagccaagaaaacgctgacagagctgaagacttacagtgagaaactggacaaagagcaagcagccctcgagaagatagaatccaaagctgatccaagtatcctacagaacctgagagcacttgtagccatgaatgaaaatctgaaaagtcaagaacaggaatttaaagcacattgtcgagaggagatgacacgactacagcaagaaattgaaaacctgaaagctgagagagcaccacgtggagatgaaaagaccctctccagtggagagccgcctggtaccttgacctctgcaatgactcatgacgaagacctagacagacggtataatatggagaaagagaaactttacaagatacgtttactacaggctcgaagaaatcgagaaatagcaattttgcaccgcaagattgatgaagtccctagccgtgccgagctaatacagtatcagaagagatttattgaactctaccgccagatttcagcagtgcacaaagaaaccaagcagttcttcactttatataataccctggatgataaaaaggtttatttggaaaaagagattagtctgctgaactcaattcatgagaacttctcacaggccatggcctcccctgctgcccgggaccagtttttacgtcagatggaacagattgtggaaggaattaagcaaagtagaatgaagatggaaaagaaaaagcaagagaacaaaatgagaagagaccagttgaacgaccagtacttggagctgttagaaaagcagaggctatactttaagactgtgaaagagttcaaggaggagggccgcaagaacgagatgctgctgtccaaggtgaaagcgaaggcctcctgaacatccccagccgtggctgtatgtcattgattttacttttaagcaccgtatatcacctacaagatcatgaaatggttctgaaagcgacagtagagagatgcagttgtgatgatttcaacaacctggatgttttctttctcctctttgcttccattcatctctgttggctgctgttgatggagtcagacagtaaacacgtggcttggataacacccatcatcctatgaagaatatagggagtacttgttctctgttgattcaacttttatgtctccagtaacattgcgcttatgaaggtacctgtatttgtatggactctgaataaagaagaattcatttgtttagcaagtattagttcagcaaccactgagaaataagcactgaggaagattcagagacgtgtaaaacacagttcctactgcacaagtacccagcaggtggcccagggaggcagatacagcacacttgaccgcagaactgggctatccaagatgtttttcagtaaacagaaggcatttagctgaaatgatcagcccatgtagtgttggtcacttgggcctttcacctgccatggtaccttttgttcccagctcctccaggtgccagccagcaggcttggtggtgacagcaactggaacgaaagttcagtgttgttttaatttttatacgttactcaagttgatttctcagaaaattgaaaacagaccttgtgctgaggacacgtcaataaaaattataccttcccctgccccaatgttcatgtgagtcacagcatgcagaggggctgtgcatccccctcattgaaggcacatttgatgaggctacgctgcagatgg

SEQ ID NO: 345483 - DNA, 1438 bp, Homo sapiens
ggcaggcggcggcggcggcggcggcggcggcagagggagtttccgctttgcactccaccccggtagcagctccgcggcagggacagcttcctccggacgcttggcgggcttcgctctcgccttacgacagcccggtcggatcatggggttgcccagggggccggagggccagggtctcccggaggtggaaacaagagaagatgaagaacaaaatgtcaagttgactgaaattctggagctcttggttgcagctgggtatttcagggcaagaattaaaggcttatcaccctttgacaaggtagtaggaggaatgacttggtgtatcaccacttgcaactttgatgtagatgttgatttgctctttcaagaaaactctacgataggtcaaaaaatagctctgtcagaaaaaattgtctcggtcctgccaaggatgaaatgcccacaccagctggagccccaccagatccaggggatggattttattcacatatttcctgttgttcagtggctggtgaaacgagctatagaaacaaaagaagagatgggtgactatatccgctcctactctgtatcccagttccagaagacttacagtctccctgaggatgatgacttcataaagagaaaagaaaaggccatcaagacagttgtggacctctcagaagtgtacaagccccgtcggaaatacaaacgccaccagggagcagaggagctacttgatgaagaatctcgaatccatgctacacttttggaatatggcaggagatatggatttagccgccagagcaaaatggagaaggctgaggacaagaaaacggcacttccagcagggctgtcagctacagaaaaagctgatgcccacgaggaagatgagcttcgagcagctgaagagcagcgtattcagtcgctgatgaccaagatgaccgctatggcaaatgaggagagccgtctcaccgcaagctccgtgggccagattgtgggactctgctctgctgagatcaagcagattgtgtccgagtatgcagagaagcagtctgagctatcagctgaagaaagtccagaaaaattaggaacctcccagctacatcgccggaaagtcatttccttgaacaaacagattgcgcaaaagaccaaacatcttgaagagctgcgagcaagtcacaccagcctacaagccagatataatgaagccaagaaaacgctgacagagctgaagacttacagtgagaaactggacaaagagcaagcagccctcgagaagatagaatccaaagctgatccaagtatcctacagaacctgagagcacttgtagccatgaatgaaaatctgaaaagtcaagaacaggaatttaaagcacattgtcgagtaagtgttgtttggtgtcagcaaataaaccaggacgcttattgaatctcttggtttacctccgttgtcctg

SEQ ID NO: 345484 - DNA, 358 bp, Homo sapiens
ccttggatatcaccgcaaagatccatgtaggcatattgcttctgtcttacatgttcagaaccactcactgctgctcccttccattcctctttcagcagcgtattcagtcgctgatgaccaagatgaccgctatggcaaatgaggaggtgagtgggagtcggggaggtgtggggatggggacttggcaccaccctgctctgctggggtcttctcccagagagcccaccttctccggagctgcctctcaccagcacacagtacctcctcttccccagggagttccttttgttaatctgtttttaatgcctagtgctgccacccatgggaacctctaggagggaggcttgaaggacccttg

SEQ ID NO: 345485 - DNA, 1063 bp, Homo sapiens
aatcaagatcagatttatgcaggtgaagaattccttacgctttaagtcattttccatctccaggctagcagttcagttgatttccaggaagaggaatcaataaggtagatttatttttaatatatggatatccatagagtctagcttagtcttttggtaagttaaagtttgctagtcggacctgctataggaattcttttttgttgctgtttcctcctccctcagctagatacaagattaggtaggcaggaggttaggcggccagtctaggtccagaaaagtagatcaagtgggtagcaaggtgagccgcaaatcttagctgggcctgagtttgcactgttctgctctaagggccaacaaataaggctctattaaaaattatttaactcatctaaactatacaaagttatttgatttggtcagtttccttggattggagaaatttaaaatgacttaaattaatgtgtaatacttagtagtaatgtcaaatgtttaaacctggtatgtaaattagtcaagcaacggcctttcctgtctgtttggtgcagctgaacacatgggtctatataaagttcttttgctctcaaatataaatagcagctcaaaagatagctggaaggttgcaggaagttcttagcaaggtcaaaaacaattctcatgtgaagccatggtgatttcttaccgtttgctgtcatgataattattggggcatataatcggatgtgctcttcaatcatttcgtgagattttcagccaacaataaaagggttttgttttgttttgtgttttggtagcagtggtggtggtggtggtggtggtggtaagtatccagtctcttgaccaggggtgttagactcttgggtattcataaggttttcccggggcctggcagggcctcctcctgactcccaatcgttcctggccatcctggaagctacctctgcatgttccacctccgcatgctcccagagctgtgctgtcattcttgatgcttttatttacaccgatactgactagcatatagatttggagggggaaaataaaaagttatctatgataaatt

SEQ ID NO: 345486 - DNA, 643 bp, Homo sapiens
tacaaattatgtggatggttgataggtattacgtaaagaagggcttccttggtgtcagtggaaaaactcagagataaatgttaagaaatattacattccagttttgggatttgtgaagaaaaaatgaagagagcaaagaaaaaaggaaaaaaaataaaaagaaatatgttgtttgcaaggaaatccagccttcaaaagaactgggttccctgaatgaaggcttcagcagttgtacaagggggaaaaaacaaaaaagttacacctaatctgtttattagtctcattgatgaaaaagagcagttttctcacatgatgacccaaccttcaggggttatttaaatggctgtaaatatcagcattacgtaagttagagacgtgtaagttgtttttgtaagagaattggcatttataggaaaggggcttggggcttatattggggattgatgttaaactgaaaaaggatgattccatgttttttggtggcctttctcaggttacaaagttgttttctctgaggtacttgaaggggatgcttaaagttttgtgaataaggtgattggtgactattagctttttaatttttttacaaacattttcttataaaaatattttatttatttatttatgaggtggagtctcactc

SEQ ID NO: 345487 - DNA, 273 bp, Homo sapiens
ctatcaactgatttgaatcacatactttaatgtctgaggccatatattctactatgtatgatctacacagttttgagatgttacatattcatgattcatttgaaagtgtaaaaaagggtactttagttttaccctaatggctaaatatttaaaatactgttatggggctgggcatggtggccactgtaagcccagcactttgggaggctgaggtgggaggattgcttgagccaggagttcaagcctaggcaacaaagcaagaccttatctctc

SEQ ID NO: 345488 - DNA, 249 bp, Homo sapiens
aggtgttcttatgagagaaaggcagagagggagactggagacacagagacacacaggggagccgactgtgtgaagatggaggcagagatgggagttgtgctgccacaagccaaggacaactgcaataccagaggctgggaaaggcaaggagacattcaccccaagagccttcggaggcagtgcagccctgctgacatcttgatttcagccttaggagaataaattactgttgttttaagtcaccaagtt

SEQ ID NO: 345489 - DNA, 388 bp, Homo sapiens
cgttaagcagtgagcagctgaagcaaagacgttttctcccttccagatctataagtagtaaggaaggcagtgtggctggggcccctaggagtttgcactatggcaaggcaaagcaaggaggcaatgtgaacaccaagcagaaggagtcctatgaagaggcagatgtgctgtcagggtgcaaaaccacgtcgtattgaggcagttgatataaaggatgttccgcgaatgactttttcccactcatggcctatactatcaaaggggagaggtgtggggtttactgagccccttgtgctgcgtactgtaactcaatcctcagtaccactgcgacgaggtaaaaatgatgattcccattttacaaataaagaacctgtggccagtgcaattt

SEQ ID NO: 345490 - DNA, 300 bp, Homo sapiens
agtttcataaatcttgtagttatcttgtgcataacataactatgctgcatcttgggggtcaaagcactcctgtgcggtggtgttcatgggtgttagcatttctttcttctgaagcaatccaggaggctcagaaaaccacagcagctgggtcctggaggcggattctagggaatgactctccctggcttcccccaaggcctctctgaccctgtccagcctctcccccactccctggaggtcaggagtgtccactctggggtcaaggctgggctctgcatctgcacccgtgtttgtgactct

SEQ ID NO: 345491 - DNA, 627 bp, Homo sapiens
ccatctctttatgaatgtatgtacatatatatccccagataggtgtgcacagttttacacgtgaccttatactattctgactattgggtaccttgcttttcttagacctttccccatgtcggctggtgtggttttatataattcttaatggctatatggtagctgtttctatgcacataccatagttcaaccagtgctgaactgattgacatttgtggtttatagttttttgtctgagtgaatacaacttttggcattagtgcctaactctttagataagttaaagtcttagaaatgaaagaactgttttaaagtgtggatacacagattgtgagatctaaataagtaattatgaaagagaagaaagtttacagaaatgttgagcctttttcttaggaagctgtcaaattcaaattggtattcatagcctccggtaccaaccactcagccatcaaaaagtgttgagaaatcttacacatatataaaagaaaaaaaacttcgaggggggggccccggacccttcggcctattgtgaggcgttttacaattcactggccggcggtttacaacgtcgtgactgggcccggcggttacccaactttgcctttgagcacattcccttttggc

SEQ ID NO: 345492 - DNA, 351 bp, Homo sapiens
atgatgaaactaaggatcccagaggctgagtgacttccccggagtccctcggtgggatcgttgattccttttccacaactggaaccagaggccagaagagatggccccccgaaggaccaggactaggacacgaaggcaggtttcgggacctcagacgtctacagtaaccacgctgcgcgaccaacacctaaggatgccccggctccagactgagacccaagtctgacttccccctgccagttgaggctccttgcctggttgctgcgacgattcgagatgggccttacccgggccccacgcgtgtcgcaggcacgcagcacgcacgcttagtaaacaccagctgtagtgagc

SEQ ID NO: 345493 - DNA, 428 bp, Homo sapiens
ccattccattccattccagtccattcaattcaattcttgtccattccattgcattccataccattctagtctattctgttctattccattcgagtccattccattgcattccatacctttcgagtctattccgttctattccattctagtccattccattccattagagtccattccattaaattccattgtattccattcgagtccattccattccatttggttccatttgtgtccattccattccatttgaatccattccattccatttctttcgagtccattccattccattccattctattccattcaagtccattccattccattcagttccattccattccgggtccgttccgttccattccgggtccgttccgttccattccgggtccgtaccgttccgttactgatctataggagtggtg

SEQ ID NO: 345494 - DNA, 477 bp, Homo sapiens
ggcctgtcatgtgaccagtagagagtagagtgagcagccgtgggttttctaggccaggagaggaggagccagcatgtagcttgtgtagtctccttttaaagatgctctttgctgaggtgccttttgcacttaattgaaatcagctggagtgagatgttttcttaagtcatataagatacatagtaagaactgagaaagcaattttcttttatttgaacccctccacccgtcacttcaagataggctatttgtgtttgtagctagctgtgctgttctcttggatacccgtgattttagctgactcaggttctcaagtctgaatatattgtacttgcctttcagtgacatgccaacccaatttcccacggggcaggtggaggcgtttaatgttaattggggaaaaaaatcaatataagtcttttagaattattcctttttttctttttggagacagggtcttggtctgttgcctggact

SEQ ID NO: 345495 - DNA, 224 bp, Homo sapiens
tctaactaataaactgctgtgcttgggcctatttttatgttaacatgaattattcttagcgtatgcttaaaagattactcccactatcttgatggttaagcatgcaagtgttcaaggttacatgtacacatgtgcactcataaatgtgtaagtgagtatgtgtactattgggccatctgaagtggaatttcatccaagcatccagactattaaaaaagtgacta

SEQ ID NO: 345496 - DNA, 193 bp, Homo sapiens
tctgtgaatctagaattctctatccagaagtatccttcaagcataaaggtgaaataaagacattttcatgtagaagaaaactaagatgattaatcgtcacatctgcgtgccaggaacaggtaaaggaggttcttccagttgaagaatggacacttatcctcagcaagcaaacagcatcagctgtgactagtat

SEQ ID NO: 345497 - DNA, 645 bp, Homo sapiens
atacctcaatattttttcacacatgaactaaagaaatgttggaggctgaaagattgagggtcgtgattaactcagtatcctaccactggaggctatatgagtaaacaacaaactgttctcataaatgcagaatgttggcaaactgacaaactgcgtatgccacccataaggaatgctgagggcagtcatgtcccaagtgcaatgtttcttgagattcggtacatctgaagcctgttagtaataatatgaacctgtgattaattaagcagctgaccaatcattacctcttcctccttgctcttgttacccaataaatacgaagggctgtagaagctcaggcactgcctttgctcactagaagcagggagccctcttcttcttcccctggccccttcctttaaaacagttacttttgtcttaagttttcatttctagttcatcccccttcactcagtctcgtaatgacagtctcaagtagtaacagttgtagtgaaggtctcaagtagtaattgtggcagtctgccacaaagaaacatttacagagtgccccagatgtcttacttgtgtgccctcctactcactacctcttctccagaatacataaccattatactggcttctcacaccatacgttttgtttgaggt

SEQ ID NO: 345498 - DNA, 529 bp, Homo sapiens
gtctggtctgaattgattttcttcccaaagaaatcaggcttataaacaagtggtcctatttgaacatcaaatttacctacgcattgcaggttatctaataagtccatgcacaggcatttttaacatccccacaaattaatctattatatgcacttcttttcttctccaataaatcttaaatctacaaactaaaggcccaaatcaaatgattgcacttcatgaattctatagcatccataatggatgtggctcctttgttattttgagcacgcagggtgcaactttgaaaggttagctaatgtattttttgttgctagaaactatttgtcctctatccttccctcctttccaggcagctgcctgggcattaggttttactaacttctcctgaggatgatgtaaccaaaccaaagagttgattcttagtttttgggtttcaaacgcttgggctttgaatttcataaggcaaaactaagaaagactttgggaccatacaattattccaaagccactgaagtgtatgtaaatg

SEQ ID NO: 345499 - DNA, 337 bp, Homo sapiens
tccaagattaggtaatgagacagcagcttgatatcatgccgtctgaaagaagccatgttgtgaatgaagagacccatttggtgaacaatggaagcaccctgccaagagccatatgagtgaacctggaagtgatcctcctgttactgtcaaatcctcagagtcaggaatcccagccaaaaccttgactatatcctcatgataggctgtgagctagaaccacctacctacgccattcctggatttctgatcatcttctgaactgtgtgagataaatgtttgaagttgctaaatttgggagttggggggcacaatttgttatgcagcagtaggtaactaa

SEQ ID NO: 345500 - DNA, 354 bp, Homo sapiens
gcttctcccgcttggttgcttccattattccccaactgcggaaacaccagccaccatatgtccgccggagaataagcgtgagtgtcgcggtggacagttgccgccaaaggtgtccagacggatggcattctcaaagtagggatcttagcatcctctccatacatcatcacccaagaatggtagaggaaagagtaggagtggggttacagataggagagaaaggaggttgaggccacaaaattggcatttctctaattatcaaccccctcctccaccatcctgccaccatttgttatggcaaagttctctttctgtgccccttccctaataaagaaatcctcagtcagcctccac

SEQ ID NO: 345501 - DNA, 211 bp, Homo sapiens
cactttcaaaaaaaagggaagaattgtcagaaagcattgtctaatatgccaaattttaaatcataattattaattcttcaaactaatttctagaggaccaggatgactgttagctcatattcaggtctctgaaataagaattgagcattgtttttattgctttagttacaggagcttgtgggcaacatgtctcactgaggcatttataagg

SEQ ID NO: 345502 - DNA, 796 bp, Homo sapiens
tgaaagaaaccagattcaaagagctagaactgaatggttccatttgcaggccattctagaaaaggcaaattatcactggtttttaggatctgggtttgaggcgatgagacggttacaaaggaaacttttgggagtactgtaaaagttttctatcttgactgtggtagttttacatgtcaaaactcagaatattatactaagaaggataaattttactatatgtcaatcagacctcaatgagcctgacactaagaaaaaaaattaacaggaaaaacaattatatagtaattatgcaactaatttgttaaagaatgaattataacgaatatgaatttgtaaccacaaacccaagtgcagaagtcacacttcttaattacaaaataaaagaattatttaaaaatacactttcagatgtatttgtttacttctcactgggcatatataccaattttaaatgttccatggcataagcattaatttgtcagtaaaataattatttaaataggaatactgcatacattagcttttttctgaaactactttcattagtttctaaataggcccaatgttttcatgtgcctttgctataaatgaactaaaaacactgctcttatagaatatattaagtagagaattaatttactactgatgctttcatggttttagatttttcaaatacctggaataccatcatccacttattggtcccctgcatttcagaaatcttattaaaatggtacttaaatagctctcttacactgcagaggcaggtgtgtgtttggaagttggcgggaaa

SEQ ID NO: 345503 - DNA, 304 bp, Homo sapiens
tcttcctaccacgctatatcacaaagactccctagagacagtgcaaacccatggccaacctcgactattagtccacatcaaagatggctagaatgactgggagagagaaaagcaacacagatggcctctggccctcacaccctctcctgctcattcccaagcccgcagtggtctctgaatcggctaggcttgccgctgcttccttctgtaacctcagtgagatatatcaacctggcctggctatatccttggggtctccaacgtctccagtgatgtccagaaatcctcaaaaagttctaacaat

SEQ ID NO: 345504 - DNA, 466 bp, Homo sapiens
gacagttctgtacagaataagagtcacataagatgtgatttgttaaagattatagaaatctcagaagatagattatggatgaaaatatttgtttaatttagagtactaataataaaaatagtgcattttacattttaaaaagaaaacaatttttattgtgtcatattttctgtagtaacaaacagaattaattatcagtaatacaaatttcatctgctttaatttattgcctgtttttgaaattagaataatgatatatttggtttaattatccattacaaattgccttattatttttcattcatctttcaccattaatccagaaaccttaaaatagcttttattttgacccatgccttcagtagatatcaacagacttgagttcatctatggatcctattagtttaaactgtgacaaattttgactgcttaagctttagaaaagaatttattctttaaaatagcc

SEQ ID NO: 345505 - DNA, 362 bp, Homo sapiens
tacttaacgtcttcatgtattaactgtgtgagcacagacaggcgatttgaactcttcagactttagtgtcctcatctacaatgcctagctgatgacactgggttgttgtgaagaacaagtgaagtaacaaacatcaaaacgctttgtaggctggatgtggtgcctcacacctataatgccagcactttggaaggtggaggcaggtagattgcttgagtccaggagtagattgcttgagaccagcctaggtagcatggcgaaaccctgtctctacaaaaaatacaaaaattagccaggtgtggtggtgtgcacctgtagtcccagctactcaggaggctgaagcgggagtatcacttgagccc

SEQ ID NO: 345506 - DNA, 203 bp, Homo sapiens
aaatgggaggaggcagattgcctgacaatacagaacaaatagcacaatagaggaagcagctggtgaatcttgtactcaggagacaagtgaagaggaacactagagattcatttctatggtgacagggtcccatttcagtgtccttattctgaaagtaattttggcacttttattggaaaatagtgagatgttaaacttagaaa

SEQ ID NO: 345507 - DNA, 452 bp, Homo sapiens
agttgtccagccgttctctctcctttcttacctcttcctgccttcccacctctctgcatcctcacccttaatggtcacaatgccgcatttccagggtgaccccaggttccctccccgtggctcacagtgctggtcaaagcatttgagcccccaaatgccccactctccagatcggagtgtaaagtagtaggtgccagtcctgctccctcgtggggctgggcagtgagctctccctaacacacacaaagcacctccagctcagaggaagctcacacctcccatccatgccttcaggcttttcggcactggcatttagaaagctattctctggattcagaacccccagagagagcttttctctgtccttcctgattattggtgtgtaaatgaaggcctagagtagtggttcttaaacttgagcgtgatgagagtcacctggggaggtgttggaa

SEQ ID NO: 345508 - DNA, 114 bp, Homo sapiens
ggcatgtatttggggctctgcttagtaaacatttattttagaaatgttatttgtggaaagagagcttttatacatttttagctgacaaatttatttttctcccatgcttcctat

SEQ ID NO: 345509 - DNA, 183 bp, Homo sapiens
tccccatcaaaatataaaaataaataagtcagttaatctgaaagccttgactagaaggccaatgacagccatatttctgagagacgcagagcttcaatctgagagatagaagagtatctgaaatccagcagcaagagagaagaatctcctttattattgacaactcagggtttctggccatca

SEQ ID NO: 345510 - DNA, 533 bp, Homo sapiens
agctgggtgtggtggtgcacacctgtaaatcccagctactcgggaggctgaagtaggagaatcacttgaacctggaggtggaggttgcaaaaaaattgaaatacaaacacaatggatgggtgttataatagtttaggtacagcaaagaaagtaaattggaagatagaactaaagaaattatatggaaaagaaacacagaggggcatggggctgaaaaatagtttaggacacaggaaggatagagtgagaaaatcctctctaactggagtactagaagaaaaataaataggatgggcaggagcagtgtttaaagaagccctacaaatacccagcaggatcaaagggaaaaaaatccacatattatagacagacatcatagccaaagatcttaaaagtagtcagaaaaaaaggcattgccttcaaagaagaccaacgactgatttcccagtagcaacagaggaagccagaagacagtagaatgattcctaaatggttccgaaagaaagtaactatcaatctagcattctatatcc

SEQ ID NO: 345511 - DNA, 335 bp, Homo sapiens
ggttcaagcaattctcctgcctcagcctcccgagtagctgagactacaggtgcatgccgccatgcccggctaattttttgtattttagtagagatggggtttcaccgtgttgccgaggctggtctcgaactcctgagctcaggcaatccatctgcctcagcctcccaaagtctggtgctgggatcacaggcgtgagccactgcgcccggccacattttttttttaatgcacaaaatttcaaaattgattttaagccaggtccccaagttttttaaagcaactgctgtctaaaaatgcaaatcaaaaatgtctggtgagaaactcggggctgtggc

SEQ ID NO: 345512 - DNA, 350 bp, Homo sapiens
cctcagtctccttacagattctattattatacctgacagtcacagaaaatagaatatatgttaacagcatcccactggtgcctagaagccgttatctcccaaaacctcggtagggggagccatttctctactgaaattggaaatccagctttttgaacacctgttaactttgaatttgattgggagcagttgtgtttgtccacgggaatgtttttcttgacctaatcttgggatcagccccctttccctgcatccgtatttctggagttgctactgcagggggtgcccacaaggaagtttatactcacgtttcagctgattagataaacgcttaagaacaattttatttt

SEQ ID NO: 345513 - DNA, 417 bp, Homo sapiens
  misc_feature (159)..(159): n is a, c, g, or t
gtctctactatctgttaactaactagagacataactcacaatatgcagtccccactgagtgttcaccataatttgagattcttggcatgttaacttttcattatggaatattgaataatttcaatattattcatacatttcttgatgttcaaacatacncaaaaatagaataatgaaactctacccatcatccagcctgggtgacaagagcaaaactcagtctcaaaaaaaaaaaagaaaaaaaaagatatatatattcctactcttattaaatgaatatagcatttcttagcaacttcttttgatttgtgagtatatattttcttggcctcaaaattaaagtaaaaagtatcctcttactcagaggaggacaggggcaagagcctgggtgacaagagcaaaactcagtctcaaaaa

SEQ ID NO: 345514 - DNA, 550 bp, Homo sapiens
  misc_feature (159)..(159): n is a, c, g, or t
gtctctactatctgttaactaactagagacataactcacaatatgcagtccccactgagtgttcaccataatttgagattcttggcatgttaacttttcattatggaatattgaataatttcaatattattcatacatttcttgatgttcaaacatacncaaaaatagaataatgaaactctacccatcatccagcctgggtgacaagagcaaaactcagtctcaaaaaaaaaaaagaaaaaaaaagatatatatattcctactcttattaaatgaatatagcatttcttagcaacttcttttgatttgtgagtatatattttcttggcctcaaaattaaagtaaaaagtatcctcttactcagaggaggacaggggcaagagcctgggaccttatttgctaattaaaatgcacacacacacacacacacacagaaattttgagagccattttaatataattgcctccctagaaacataccttttagggaatttttatcactaaaccacatgttatttaaatacgtacatgtttaacataaatacataca

SEQ ID NO: 345515 - DNA, 267 bp, Homo sapiens
ccttggttgtgcagacacaatcttaaactactagcattatgcgtcagcttctgaaactaaaatatgtttttaaaaagagcttttaaatacattcagcttacttttctctagcactgaaagccataacataaaaaagtgagacaggaatgtttttttaacagcaaagagatgctttgtatccagaaaagctgaacaattacagtgtagctaaaatgttctttgaagtactgtatagcacttaactttaaaagctctctgcttgcttct

SEQ ID NO: 345516 - DNA, 480 bp, Homo sapiens
aggctggccaacatgtgaaaccctgtctccattgaaaatacaaaaattagccaagcgtggtggcagatgtctgtaatcccagctgctagggaggctgaggcaggagaattgcttgaatccaggaggcggaggttgcagtgagccaagatcgtgccactgcactccagcctgggggacaagagtgaaattccatctcaaaaaaaaaaaaaaaaaaaagcaaataaaaaaagattcacctttgacacagtgggctaagtaggatgatctgtcctcaccaatgccagtgggcatcatccatcccattgaggacctgacctgggtagaacgaaaaggtagaggaaaagtgaattttctctctctctatccttgagctgagaaatctgtcttctcctgcccttggacatcagagttccttggttctggacctttgggctctaggacttataccagggcacctgctcagcattccaccatccccac

SEQ ID NO: 345517 - DNA, 360 bp, Homo sapiens
aaggaccagccttaagctttttgaaagtgggatccttctggcacatgtccccttctttgcaaccatctttgatgccatgctagtagagacaggactctgatctactgaaaactgagaaagatcaaataactaatatagctaataagcatgcctcacatattcttgctcatttcgagttttggtaatagtaagacaccgtaccaatactgaagaacccagaacagagcgtcaatcctccattgtgctttgatatctcagatataaacaaaactctgtcatgtccacatttgctaggctaaaaatgttaggaaattgtatgtagtaatcagaaatacagactgccatggacagagccaaaac

SEQ ID NO: 345518 - DNA, 598 bp, Homo sapiens
acgccgccgcttgtgctgcagccatgtctctagtgatccctgaaaagttccagcatattttgcgagtactcaacaccaacatcgatggaacgattcggaagcatagcacatgtatgcaccatcagcatgacacgatatgagagagcgtagttgggtgcccgaaccgatatggcgtcactgctgggctcgatctgtaggcgaagacagtcaatgtacaacttggacctcacctcataggagggacgggagaacctaagctgagggatcgagggttgagaaagttgctggtaatctatccattaatgtcaagaatcgcacgccagtacaagatcccagactggttcgtagaatagacaaaagacggatgtagaagtgatcggagaaagtaacagcgaaggtcactaggtcacaaatggtatggacagacaagctcagcgaagatcgtggagcgatcggtagtagagttggggcgccatagacgggatgacgctcacattctggggcttaattagtgtcggaggccacgcacacgtacgaccaccgcgcgccatgtaagcaccgtgggtgtgtcacaagaagaaatataaatcgatgcctg

SEQ ID NO: 345519 - DNA, 821 bp, Homo sapiens
  misc_feature (784)..(785): n is a, c, g, or t
aatttgtgagcaattgaaatattacatttccaaaggatctacgtccaactcttggtgtccactaataaatgctctttctttggattactttatttctctttgtagctctgtttcctattttgtagtctcccatttccatcttccttcttacacttccatctagttgactactgacaccactgaaccaaaattttcatctttcctcttaaatgtgttcaacttctgagctcttctttcactctttgacttgcttggcccctagatttgatcactcacacatcctgaaaattattcctcctgaataattctgaaatccattcccagagtctccattcttactggaattgcaggcagaagaaattgcatgagccacaaaggaaagaaagacacctaggtgtgttaggggagcggagtcatggtagagttagggaaaggacatgaaaatcattactgccatgtgattctgaattctgttttccctaggttacagtgaatgacaatttaagaaaataattgggatgcaaattgagaaagatatgtctcatttaaatttttttctaccatttacagaacttgaaggtctcttcacagactaatttcttatctcgagcatggtggttccccatcttttatttttttgagaaaaatgtacaaggctcaattccttgctgcttctcctggccgctgtcttggcctcctggctgcttcaaatcatcatgcaaaaagtattcacgggttcagaagattggtgaagacaatgagaaatcgtacttgatcttccaanntatttaaatatttgaaaaaacatacgaaataataaa

SEQ ID NO: 345520 - DNA, 1959 bp, Homo sapiens
aatttgtgagcaattgaaatattacatttccaaaggatctacgtccaactcttggtgtccactaataaatgctctttctttggattactttatttctctttgtagctctgtttcctattttgtagtctcccatttccatcttccttcttacacttccatctagttgactactgacaccactgaaccaaaattttcatctttcctcttaaatgtgttcaacttctgagctcttctttcactctttgacttgcttggcccctagatttgatcactcacacatcctgaaaattattcctcctgaataattctgaaatccattcccagagtctccattcttactggaattgcaggcagaagaaattgcatgagccacaaaggaaagaaagacacctaggtgtgttaggggagcggagtcatggtagagttagggaaaggacatgaaaatcattactgccatgtgattctgaattctgttttccctaggttacagtgaatgacaatttaagaaaataattgggatgcaaattgagaaagatatgtctcatttaaatttttttctaccatttacagaacttgaaggtctcttcacagactaatttcttatctcgagcatggtggttccccatcttttatttttttgagaaaaatgtacaaggctcaattccttgctgcttctcctggccgctgtcttggcctcctggctgcttcaaatcatcatgcaaaaagtattcacgggttcagaagattggtgaagacaatgagaaatcgacctgaggagcaaaacaaaggcatcagctcttacaccaaaagagttaacgctgtaaccaaaggtatagttttgttttttattttaggagaactgactggtaaatgaagaaatggaccaaattttgtgtaaacgattagaaagatgaacaaagtattgccctttgactggttttcttcttcatcctgagaaagatacattctcttgcagctcttcattcattggtgacaagcccccaccccgggactttactaatgagcttgttaaagaggtgccaaagaacatattcctcctttctttattctttctccaccaaaaccctctacttcagaattttttcaggatatttttcagcccaaggtcagaagaatgtgttaatattttaaataaaatatctggacatctacagccactgtgtaaatagaactgcctaatgttgagagtggtttttagcattaggtttagcaagggggagatccgtgggttgtgcgtcagctttgggtgaattttgtttctaccctgtcacggggaaagttcgggttgagtccaggagtgcacactgctgctgccacccaatgcgctacgtatcactttttttgtgttttgttttgttttgtttttaaaagatcattttatcttaaaaaggaaagctgatccaagtaaacacgaaagtatttgacacaccccacagattttacatgtgtgtaaatgtttcactttaaaatctctatgacagatacacaggaaacatgagatggtttctgctaatgagtggcccttgagtacacacttagatgctgtctgccctgtaaatttggatctggtgccccagggcagtcaactcttctagcacaggctgaaaacacgtgtgtgtcaactgaggttcacaccacttggggaatgagcctgttttctttccaggtcaggccctggtgtgagatcaattttagggctcctaattggagcacagaaatgtatttggtcaaatttcattgaaggtgatttcttcctttttctgttgtacttcatggaaaaaccaagatggaacctgaaagttaatgtatccttgcttttagcaagagactcagtttcttataactagtcctaaggacatatgccgcaattgagtaattttacttttaccctatgaaaataacatggtgctgcactataatatactctcggaatcagtg

SEQ ID NO: 345521 - DNA, 1489 bp, Homo sapiens
cccacctcccccaggcccagccccagggccccctcaggacatttcagaacctccaggggggtcgccactgccatctccaccttccacagcacccccaccacctcccctgctgctggaacccccacctcctgagccaggggttctcttagctctactccaacaaactgtgtctttaaggatctgggcacttgtttcttgtggggggtgggaggtacacagcaggtgttgggcgacctgactcagacacagaggagtctttgatccccaaagaccaacgatgagaagcagtggcccaggaagaccgagagtgggcttctgtttcccaaagcgctggtgtgactgtggactgtttacacgtggggggtgggaggggaaggagggtagagagaaggaaccattaaggacctgggcgctgagtttctgctctctggtactatctgctttagcaagagttatttaaaacagttttacaagcacggcctactgagcaggttctgaaagcaaggggtggggcactgactgaactggaacccatcgagatagctgtgattgcctgtcaggcccttgcaaagggctgaggcccagctctgtctggtgggtgtgcagggcaccgaagggagatctttagcctccatcacctgccatcccaagcaagagtggacacctggggttcctagccgcattgaggtgggaccaggaatgtgtatgtataacatgtggagaaggaccatgtgtggggtggggagtgaagctcccacatgtggaatggaagccctttgcattggccaagggcagaggtgggagattgatggttcatttttccttggccctagcccttagctacagggaggcctagagagaggacacttggcaagtttaggatgggaaacaaggttaagcctggctttgctattcagacctgtgcagccctgattttggggactgggcccaaggagccatgagtcttaggcttgacactaggggccttacatggccaggtctcatatgggatttggagaaggcatttttcctaacactgatactacaagtcaccaatactcttgatgccttaagatgctagaaagccttggagagtggaggcagcagagatgggaatggaggtctgaagaagcttgctgctgttggggaatgtgtttgggaaagtcaagagtggtaggattggttggctgggcgcggtggctcacacctgtaatcccagcactttgggaggccgaggccggtggatcacttgaggtcagaagttcgagaccagcctgcccaaatggtgaaaccccatctctactaaaaatacggaaaaaaaaaaaaaaagagtgctaggattgggccagttaagagcaggggagacctggctgggcatggtggctcacacctgtaattctagcactttgggaggctgaggcgggtggatcatgaggtcaagagattaagaccatcctggcctacatggcgaaaccctgtctctactaaa

SEQ ID NO: 345522 - DNA, 1084 bp, Homo sapiens
cccacctcccccaggcccagccccagggccccctcaggacatttcagaacctccaggggggtcgccactgccatctccaccttccacagcacccccaccacctcccctgctgctggaacccccacctcctgagccaggggttctcttagctctactccaacaaactgtgtctttaaggatctgggcacttgtttcttgtggggggtgggaggtacacagcaggtgttgggcgacctgactcagacacagaggagtctttgatccccaaagaccaacgatgagaagcagtggcccaggaagaccgagagtgggcttctgtttcccaaagcgctggtgtgactgtggactgtttacacgtggggggtgggaggggaaggagggtagagagaaggaaccattaaggacctgggcgctgagtttctgctctctggtactatctgctttagcaagagttatttaaaacagttttacaagcacggcctactgagcaggttctgaaagcaaggggtggggcactgactgaactggaacccatcgagatagctgtgattgcctgtcaggcccttgcaaagggctgaggcccagctctgtctggtgggtgtgcagggcaccgaagggagatctttagcctccatcacctgccatcccaagcaagagtggacacctggggttcctagccgcattgaggtgggaccaggaatgtgtatgtataacatgtggagaaggaccatgtgtggggtggggagtgaagctcccacatgtggaatggaagccctttgcattggccaagggcagaggtgggagattgatggttcatttttccttggccctagcccttagctacagggaggcctagagagaggacacttggcaagtttaggatgggaaacaaggttaagcctggctttgctattcagacctgtgcagccctgattttggggactgggcccaaggagccggctctttgtgtccaccaaaaaaaaaaccaaaagttaagaattagctgggcttggcagcacacacctgcagtcaggaggctgacgtaagaggatcgcttgagcctcagaggtcaaggctgcagtca

SEQ ID NO: 345523 - DNA, 378 bp, Homo sapiens
ctgctcaggggcccatcggaaagccacctcctgagccaggggttctcttagctctactccaacaaactgtgtctttaaggatctgggcacttgtttcttgtggggggtgggaggtacacagcaggtgttgggcgacctgactcagacacagaggagtctttgatccccaaagaccaacgatgagaagcagtggcccaggaagaccgagagtgggcttctgtttcccaaagcgctggtgtgactgtggactgtttacacgtggggggtgggaggggaaggagggtagagagaaggaaccattaaggacctgggcgctgagtttctgctctctggtactatctgctttagcaagagttatttaaaacagttttacaagca

SEQ ID NO: 345524 - DNA, 890 bp, Homo sapiens
agcccatttcacagcctgaccctgacccccagactattctattccctaagtgagatgatttttaagatttcgtttgagcctgtggcctttggtttgggctgctaaagggtccttcggtccgcctgcttcttctcccttctctgcggcatcaagctggtcctggctgactctgcaaaatactttggtagaattttcaggaatggtaaatggtgtcatttagatgtcagctataatacagtgaatgcctagactgctgtcttaagaaggatcctgaggctgtgcgtggtggatcgtgcctataatcccagcacttcgggaggctgaggcgggtgatcacttgagctcaggaattcaagaccagcctgggcaacatggtgaaaccctgtctctacaaaaataaaaaataaaaaaaaaaaataaggatgctgagaccggttcctgcttcagcaagaatgaaggctttaaatcagggagtgggagtcgctgctctgggtgccaagtgttcaccattccccagaagctctgaccaggtccattctgtggttcagaagtatatgagttaaattacaataggaagttctttcagattttccattttaattgtccttccttaaaacgatcctccccagaacatgaggtttatctctactgggtcccagggagcccatgctcttctcaccatgggttgttcctaattggtcaaatatgattctcctttctagccaaatcctctgttgattttggatgtttttctgagctgctccctttgtcctttttggctttgagaagttatttgccagttatgatggcaaaccagggtctcagcttggactgcctgcttgtaaccctttcttcagcttggatgaggactccatccttgcaacgctgag

SEQ ID NO: 345525 - DNA, 599 bp, Homo sapiens
tgctgggattacaggcatgagccactgtacgtggctgggtttatatttttacaaagcaatttcagtaaatgctatgtacacttttacttatacagcccatcagcccccatccctcaggtcctggccattcctctacatacattcattcgcttttattccctaccctgtatgtctactgtaacaccgggagtcctggcccccatgcttctggctgcccctaagaatccctgtgttggtctctgtagtgttagttgtgtggccatctgctagaggaaccttcagtcctcagttctgcccgcaaaattcccctgcttggaaatcatcagaaattcccattgctaaacttgatgttttggctttcaaagcatccataatttaatttccaactatcatgttaaggctgttctctttcttattctctctttcactctcttttttaggatattccatgttctagtcaaaatgaactgttcaccctttcccacttttctagctttgtgcatttgctcacttcttccctcatctggaaagccccaatcgtgcccaccctccaagctcagcgacccatctcccttactcccagccccagctgacaatct

SEQ ID NO: 345526 - DNA, 485 bp, Homo sapiens
gtctcaaaaaaaaaaaaaaaaaaaaaaatcttgtggcaattccatattaatacccagagcttctcaaattgtttttatttgtatgcttttgtttatagctgcatagaattctattgtgtaccaaagtttatttaaccaatctgctttaggcaaatatttgggttatttccaaacctttagcactaaaaacaatgctcaatgaataattacacatggaaacatatacagatgaatctgtggaatacaattctagatatgagattgcagaatcaaaagacaaatgcatttataataatgataaatattgacatattttatagggatttgtcccatttttgcatttctgccagcaacatagaagagcgtcagaacagggcttttctgaatgggttcccactattaacaggagctgtgataatttatacattgacaaaaaaagaacaaaatcagtgtgatatattaaaaacagaatggttttctaatgc

SEQ ID NO: 345527 - DNA, 290 bp, Homo sapiens
aacacatgaaatttgcaggacacatttaaaccacagcacttagtgaatgactggagagtaagaggaggtaaaattgacaggtaggcagaggccaaatcacaaaaagccttgaaggccccggaagtgtttggattttactagaactgcaatgggaagcctctggagtttttaagaaggatagtggtaaaatttgtgtttttaaaaagattaccctggttggtgtgtagagaatggacagtggaagtatcaagagttgaaagtataggaggctatcccagtaatccatgcaa

SEQ ID NO: 345528 - DNA, 455 bp, Homo sapiens
tctgagtatattttgtattcttatacacttgactcgggtccagttgataactggcagagttttataacactgcaccgagaagagcccatgcaacatgtgtcataacagttcgttaaagaatagcatcaacaaaaaaattagttcttagaattttttattttccaactaatagttgtcactttctccatttatccaaagcataccaatctttcaaggtcatctgaagtcccactgtactactaagccttctggctgacttcagaccccattcatgtgagctttttgtatccaaaatgcctctacagcctcggtggcccaatatgatctgaattttataccatctgctcttcactcacaaggctctggctatactctcttgtattctttaaaaacccaaactcattcctcctctcaaggattttgcattcatttttcctttggagctatatattctt

SEQ ID NO: 345529 - DNA, 582 bp, Homo sapiens
aggttcacaagcaggtggttgagagtgcttacgaggtgatcaaactcaaaggctacacatcctgggccattggactctctgtggcagatttggcagaaagtataatgaagaatcttaggcgggtgcacccaatttccaccatgattggtggaataaaggatgatgtcttccttagcattccttgcatcttgggagagaatggaatctcagaccgtgtgaaggtgactctgactcctgaggaaggggcccatttgaagaacagtgcagatccactttgggggatacaaaaagagctgcaattttaaagtcttctgatgtcatactatttcactgtctaggctacaataggattttagttggaggttgtgcatattgtcctttttatctgatctgtgattaaagcagtgatgttaagatggattgggaaaaacatcaattcctaaggttagaaataggaatggtttgtaaaatcctacagtatattctgtaggtactatatcctgtaggtagctataacttgtagtaccattctgtaggctggatggtactaatcttgtgtagtcctaaactggtttgtgtgaa

SEQ ID NO: 345530 - DNA, 348 bp, Homo sapiens
ccttgcccaagaatgagcaagtcttctgagatccttggaggtcaaagatgttgggagcttcagagatctgcttcaccttcctatgaaatcgatctcaactttcacccccagcctacttccctgccacgtcccatgtcattctttttatctccctcccaaacccaagtctaaaaggaatagactgggaaaaaggaaaaaaaaatttcttatttttctctttgggggtttcacatcagtcccagatcattagctatgctcaggagaatgaagttttctcccctcaattcattttttttattttgagagtttttaattttttttaattaattacttattttttgagatgag

SEQ ID NO: 345531 - DNA, 215 bp, Homo sapiens
tttctgctaaaaatggcagttgtgtgagttttatttcttagaaaataactatattttatatttggtgaatatcttagttttgcatttaatttgctaagcagaatcaatgcaatcactatcatattctatagtttttcctaacagattgatagagtaaaatgtatggtttttctaatttttagcatttgtgtccaataaaatgactttatataatt

SEQ ID NO: 345532 - DNA, 763 bp, Homo sapiens
aatgtaggtcatgtgggttgttgtgtcaggtgagcctaatgtgatatgtgaaaactagaaactactttgaccagtctcccagacaaggcattagggagaaattttactgatttaaaataatcatgatagtcataaagaattggagaggcataaaattgtaactttttttttgcttttgacccagttattctaatagttttatgatttagaaagatctttaacatatctcatagatttaggccagacttgcctcgtatctgtgcagcgtatgaagccatgactgattgcctttgtttcaaacaaactgttagctttgcaatttgtctctgtgggatggacagctcgaaaaccatttctgtcatttccaggagaaagtgtcaagactggatagaatcgttgcagaacacaatcagttctctcttgggattaaagaattacaagactggatgacggatgcgattcacatgctggattcatactgccacccgacatccgacaaaagtgtgctggacagcaggacgctcaagctcgaggtgtgcatctttacacagaaatatctccaacctacagaatttgtttttctcaaaatttcccgtctccatccacctggggtgatgatgtcacattctctccatgataaatctcagatgctttgtgagtgcaacgctgtctgccttgggtgcacatgccagagaattcctgaatcatctgaccccggatgttttccaaaaaataaaataaaataaagcccgaatctgattac

SEQ ID NO: 345533 - DNA, 1899 bp, Homo sapiens
actcctgagctcaagctatctgctcacctcggccacccaaagtgctgggattacaggcgtgagccactgtgcccagcctgggtggactttgaatgtcaagtgaaggaccttggacttgctattaaaatattttcttgtcctggacactatctaaaaccttgcagaatctaaagatccaaatgaaggactttgaagtaagtgctgagcctatccaggactggctgagtaaaactgagaagatggtccatgaaagcagcaatcgcctctatgatctgccagcaaagaggagggagcagcagaagctccaggtgatgagcccgcctccccgtagccccatctgacctagtctttgtccgtcctctgtcgaccttacagatgcatgctcagcacccttgagttagactgtgctgccgtgagacatagtgtgtttttccccatttctggtggattttatgttttctgactttccttggaagtatgatttgtttccttccatgatttgtgctccacggtgtgtagattggagataataaagcctccagggtacacggactgcctgccagtgttgatttccatgttctctgggccaaagcttcgtccgcgatgtgcttttccccagcctctgaatagtaacttgcttgtgcttttcagtctgtccttgaggaaatacactgctacgagcctcagctcaacaggctgaaagagaaagctcagcagctgtgggaaggacaagctgccagcaagagctttaggcacagagtgtcgcagctgtcttctcagtatctagcgctaagcaatttaacaaaggagaaagtgtcaagactggatagaatcgttgcagaacacaatcagttctctcttgggattaaagaattacaagactggatgacggatgcgattcacatgctggattcatactgccacccgacatccgacaaaagtgtgctggacagcaggacgctcaagctcgaggctctattatcagtcaaacaggaaaaagagattcagatgaaaatgatagtgaccaggggagaatctgtccttcagaatacttctccagaaggcattcccactattcagcagcagctgcagagtgtgaaggatatgtgggcatcccttttgtctgcagggattcgttgtaaaagccaactcgaaggagctctctccaagtggacaagttatcaggatggcgttcgacagttctccggttggatggatagtatggaagccaacctgaatgaatcagaaaggcagcatgcggagctgcgggataaaacaacgatgctcggaaaagccaagttattaaatgaagaagtgctgagttacagcagcttgctggagaccatcgaagtcaaaggggctggcatgacagaacactatgtcacccagctagaactccaggatctacaggaacgatacagagccatccaagagagggccaaggaagccgtaaccaagtctgaaaaacttgtccgcctgcaccaagagtatcagagagacctaaaggcatttgaagtttggttggggcaagaacaagaaaagctcgaccagtattcagttcttgaaggtgatgcccacactcatgagacaacattgcgtgatcttcaggagctacaggtacactgtgcagaggggcaggccctgttgaactcagtgctgcacaccagagaggatgtgatcccatcaggtatcccacaggcagaggaccgggctttagagtctctccggcaagactggcaggcttaccagcacaggctgtccgagactcgaactcagttcaataacgtggtgaacaaattgaggctaatggagcaaaagtttcagcaagtagatgaatggctcaaaacagcagaggagaaagttagtcccaggaccagacgtcagtctaacagggcaacc

SEQ ID NO: 345534 - DNA, 1202 bp, Homo sapiens
actcctgagctcaagctatctgctcacctcggccacccaaagtgctgggattacaggcgtgagccactgtgcccagcctgggtggactttgaatgtcaagtgaaggaccttggacttgctattaaaatattttcttgtcctggacactatctaaaaccttgcagaatctaaagatccaaatgaaggactttgaagtaagtgctgagcctatccaggactggctgagtaaaactgagaagatggtccatgaaagcagcaatcgcctctatgatctgccagcaaagaggagggagcagcagaagctccaggtgatgagcccgcctccccgtagccccatctgacctagtctttgtccgtcctctgtcgaccttacagatgcatgctcagcacccttgagttagactgtgctgccgtgagacatagtgtgtttttccccatttctggtggattttatgttttctgactttccttggaagtatgatttgtttccttccatgatttgtgctccacggtgtgtagattggagataataaagcctccagggtacacggactgcctgccagtgttgatttccatgttctctgggccaaagcttcgtccgcgatgtgcttttccccagcctctgaatagtaacttgcttgtgcttttcagtctgtccttgaggaaatacactgctacgagcctcagctcaacaggctgaaagagaaagctcagcagctgtgggaaggacaagctgccagcaagagctttaggcacagagtgtcgcagctgtcttctcagtatctagcgctaagcaatttaacaaaggagaaagtgtcaagactggatagaatcgttgcagaacacaatcagttctctcttgggattaaagaattacaagactggatgacggatgcgattcacatgctggattcatactgccacccgacatccgacaaaagtgtgctggacagcaggacgctcaagctcgaggtgtgcatctttacacagaaatatctccaacctacagaatttgtttttctcaaaatttcccgtctccatccacctggggtgatgatgtcacattctctccatgataaatctcagatgctttgtgagtgcaacgctgtctgccttgggtgcacatgccagagaattcctgaatcatctgaccccggatgttttccaaaaaataaaataaaataaagcccgaatctgattac

SEQ ID NO: 345535 - DNA, 1433 bp, Homo sapiens
cagacttcgatcgcggagaatctgtccttcaaatacttctccagaaggcattcccactattcagtcagcagctgcagagtgtgaatggatatgtgggcatcccttttgtctgcagggattcgttgtaaaagccaactcgaaggagctctctccaagtggacaagttatcaggatggagttcgacagttctccggtaggtatggatagtatggaagccaacctgaatgaatcataagaggcagcatgcggagctgcgggataaaactgagaagatggtccatgaaagcagcaatcgcctctatgatctgccagcaaagaggagggagcagcagaagctccaggagaaagtgtcaagactggatagaatcgttgcagaacacaatcagttctctcttgggattaaagaattacaagactggatgacggatgcgattcacatgctggattcatactgccacccgacatccgacaaaagtgtgctggacagcaggacgctcaagctcgaggctctattatcagtcaaacaggaaaaagagattcagatgaaaatgatagtgaccaggggagaatctgtccttcagaatacttctccagaaggcattcccactattcagcagcagctgcagagtgtgaaggatatgtgggcatcccttttgtctgcagggattcgttgtaaaagccaactcgaaggagctctctccaagtggacaagttatcaggatggcgttcgacagttctccggttggatggatagtatggaagccaacctgaatgaatcagaaaggcagcatgcggagctgcgggataaaacaacgatgctcggaaaagccaagttattaaatgaagaagtgctgagttacagcagcttgctggagaccatcgaagtcaaaggggctggcatgacagaacactatgtcacccagctagaactccaggatctacaggaacgatacagagccatccaagagagggccaaggaagccgtaaccaagtctgaaaaacttgtccgcctgcaccaagagtatcagagagacctaaaggcatttgaagtttggttggggcaagaacaagaaaagctcgaccagtattcagttcttgaaggtgatgcccacactcatgagacaacattgcgtgatcttcaggagctacaggtacactgtgcagaggggcaggccctgttgaactcagtgctgcacaccagagaggatgtgatcccatcaggtatcccacaggcagaggaccgggctttagagtctctccggcaagactggcaggcttaccagcacaggctgtccgagactcgaactcagttcaataacgtggtgaacaaattgaggctaatggagcaaaagtttcagcaagtagatgaatggctcaaaacagcagaggagaaagttagtcccaggaccagacgtcagtctaacagggcaacc

SEQ ID NO: 345536 - DNA, 447 bp, Homo sapiens
gctagttccatgtttctgcatattggcctgggtttaaatgttccttgcttcctgaggctgcccttcagacctggactcagtgtccttaagccctgggcagcctgctcactcccaagcaagcttcttcctgatctcttgaccccttgcttactggagtggatggagcagacacaatgacattttagactcctaaggattctcaatgtggatttattgtcctttcaaatccctttcagccaactcgaaggagctctctccaagtggacaagttatcaggatggcgttcgacagttctccggttggatggatagtatggaagccaacctgaatgaatcagaaaggcagcatgcggagctgcgggataaaacaacgatgctcggaaaagccaaggtgagagctggatttcagattccatgtgttttctcacaggcttctttagaatgccac

SEQ ID NO: 345537 - DNA, 1460 bp, Homo sapiens
aatgtaggtcatgtgggttgttgtgtcaggtgagcctaatgtgatatgtgaaaactagaaactactttgaccagtctcccagacaaggcattagggagaaattttactgatttaaaataatcatgatagtcataaagaattggagaggcataaaattgtaactttttttttgcttttgacccagttattctaatagttttatgatttagaaagatctttaacatatctcatagatttaggccagacttgcctcgtatctgtgcagcgtatgaagccatgactgattgcctttgtttcaaacaaactgttagctttgcaatttgtctctgtgggatggacagctcgaaaaccatttctgtcatttccaggagaaagtgtcaagactggatagaatcgttgcagaacacaatcagttctctcttgggattaaagaattacaagactggatgacggatgcgattcacatgctggattcatactgccacccgacatccgacaaaagtgtgctggacagcaggacgctcaagctcgaggctctattatcagtcaaacaggaaaaagagattcagatgaaaatgatagtgaccaggggagaatctgtccttcagaatacttctccagaaggcattcccactattcagcagcagctgcagagtgtgaaggatatgtgggcatcccttttgtctgcagggattcgttgtaaaagccaactcgaaggagctctctccaagtggacaagttatcaggatggcgttcgacagttctccggttggatggatagtatggaagccaacctgaatgaatcagaaaggcagcatgcggagctgcgggataaaacaacgatgctcggaaaagccaagttattaaatgaagaagtgctgagttacagcagcttgctggagaccatcgaagtcaaaggggctggcatgacagaacactatgtcacccagctagaactccaggatctacaggaacgatacagagccatccaagagagggccaaggaagccgtaaccaagtctgaaaaacttgtccgcctgcaccaagagtatcagagagacctaaaggcatttgaagtttggttggggcaagaacaagaaaagctcgaccagtattcagttcttgaaggtgatgcccacactcatgagacaacattgcgtgatcttcaggagctacaggtacactgtgcagaggggcaggccctgttgaactcagtgctgcacaccagagaggatgtgatcccatcaggtatcccacaggcagaggaccgggctttagagtctctccggcaagactggcaggcttaccagcacaggctgtccgagactcgaactcagttcaataacgtggtgaacaaattgaggctaatggagcaaaagtttcagcaagtagatgaatggctcaaaacagcagaggagaaagttagtcccaggaccagacgtcagtctaacagggcaacc

SEQ ID NO: 345538 - DNA, 403 bp, Homo sapiens
tgctccacttctccatcgcattgcagcatccacacacatttacctctggagacaggagctccttggaagctgggaggtcactcggtggtcaaggggtagatgatcttagttttacagtgctgcgctgtctcccaggctgaatgacgctgaagccaagcaaattcgggcagtctctggacctttctaatggaggtgtcccataaccatgttccatcctagttccctggcataggcttgttgaagctgcagaaaatgtcagggatttattagtgatttaccgactccttcatacttagtgttcaggaaaatttattcatgtaatacttcttcaaccaaagaggaaatatcaattagagctttgtaagtttcttttccacttcctattttggctatcaagctatag

SEQ ID NO: 345539 - DNA, 453 bp, Homo sapiens
acaggagggtgaggtcagcaccttcaattcaacagaacctccttagagatgaaccccatcgaccaccccacagggcacagagccagtttcggacttctcagcgctccgcctctcttaggtctcctctgaatcagcagcaaccctgggtgggaggggcagacttttgttattccaaattaaatgatgagaaagctgggcaaaagggaatgaatcgatttgcccaaggtcttaagtgctcctgcctagaaggcaggttttttaaagagagaagatgactttttaaaataattgatgtttttttaaaatgtaagaaaagtaaacaaatatatcaggtcataaataataagactcatttaagtccatcaatcttccccagattcatctaaaaatcaatacgatcatgattcaagatccaaagggctgattaagcccctaggcatatagttgtactcc

SEQ ID NO: 345540 - DNA, 416 bp, Homo sapiens
aaaaaaaaaaaattagctgggttatggcagtggcacactagtagtcccagctactcggaaggctgaggcaggagaattgctcgaacccaggagtggaggttgcagtaagccaagatcatgccattgcactccagcctgggcgacagagcaagactccatctcaaaaaagaaaaaaaaagagactacctcatacttcatacacatacaaactctggatggattaaaggtctaaatagaaaaaacaaagttttaaagctgttagaagaaaatacagatggatatctttatgacctcaggttagagaagaatttcttaaagatgaccctaaattatgaaccaaatgatgatgaaaactaattatggaaaactaataatttgattatctcaaaattaaaaactttggaatggcaatacac

SEQ ID NO: 345541 - DNA, 494 bp, Homo sapiens
tggctcagccttgaaccatgcatgaaaaggacagataccaagcagcctggctaagaactaaagagctgaactgagatttgattgctgctcaagaaacaggacttaaagtgaatccagtcagcttattattgcccgtgaagacaaagtaatttacagtctcctgaggaatatgagggaatctagaacctcctaagcataacactcaacaatgtccaggatgcaggccaaaattatttaacatatgaagaaccaggaaaatgcgacctattcgaaaatgtgaaaaagatagtcaatagaaaccaatctgtagatgactgagatgttggaattagcagataagaattttacgactgcttgtaactgtggtaacaacataatgggaaatatgctcataatgaatgaaaaaaagaaaaaatctcatatggttaataagaactataaataagaaccaagtagaaattctagaatggaagaacacaatagccaatataaaa

SEQ ID NO: 345542 - DNA, 415 bp, Homo sapiens
attaatactccctgcctatattttccaagtcgcaccgaagattaacattgctcagaaagcttcacatgtgagataaatgcactcaaagattcctcacaagtagctctttggagcttcagatgtgaaatggatcattcctcaatctgtaatagacccttctgtgaagctcttcaatcaaaccagagaattcaagagtttccaacacctaagagtggtatttggcaaatggtgggccaaaggaataaagaaggcatgcaaaactcttgacagaagacattcagaaattgatttgatatcagatacaaggagaaaatatgccagtaagaaaatgcatttttcaagattaaattcggcatttgttacttaatagcatttgtcatattccaatttttcatatgtagtaaattcatttcaa

SEQ ID NO: 345543 - DNA, 412 bp, Homo sapiens
ataaaatcttttcattataattcttcaagacaggaaaaaattaaaaccttcaaaagcttcacatgtgagataaatgcactcaaagattcctcacaagtagctctttggagcttcagatgtgaaatggatcattcctcaatctgtaatagacccttctgtgaagctcttcaatcaaaccagagaattcaagagtttccaacacctaagagtggtatttggcaaatggtgggccaaaggaataaagaaggcatgcaaaactcttgacagaagacattcagaaattgatttgatatcagatacaaggagaaaatatgccagtaagaaaatgcatttttcaagattaaattcggcatttgttacttaatagcatttgtcatattccaatttttcatatgtagtaaattcatttcaa

SEQ ID NO: 345544 - DNA, 1058 bp, Homo sapiens
aaaaacagattaccaaaatacagtttttgacttaattactggggcttctaggtcttaatggatgagatttctttgagaatggaaaacaataaaccgttgtgttgacatgcctgtgagctttttaaatgcttggggaaatagtttcaaattcactgaacattgctaaaaaatttcacttacaaaagaaatctcatttccttaacgtttctttttaaaagtcaatttaaataagcaacttagtagcctttggaacttgggtcatcagtcatccagtttctgttctcagctcctggagaaagaattttacaaaggatgggaaacttcaaataagtgcaattcattttgggctgacccagtgccctggataatgtgttttgttcggttcgtgcttcagacatttcttgcaggatatcgtagtttggagatttcttcctcccgtaactgattttacatacctaggatcaccactctacggcagttgtgaacatattaagaggaagaaaacaagtgggctattgaattgcagtttcctcatctacatgtgcgtgaccttttttccttgtaagaaggaaaaaaacaaaacggttcttttggagagggccagggttctctaagtatgtcagggatcaaaagtgggaaactgggaaaatgcaacttcaacgtgttttgtcttttaacggaacttatgcttgtaaaacacatcagaagtacagtgtttggttctgcaagtcatttctgttgttgttttttccttgttacgtggaggccggggggactgggggctggaggaggtgttccctccaacatgactgggcgtgtaacacgtttgcatcaacttttcacagtcagacatgtgctttcgaacaaaggagcagtggagacaggcagagatgggggcttgacacagtttacagattttgtgcttcaacagtactttacaaatgacttgctcaattttaacgtccatcaccacaagagacattggagtaaaatgagaaaattggagctacttgaaccaatcttttttggggagtgggggggaggggaaccattaattt

SEQ ID NO: 345545 - DNA, 666 bp, Homo sapiens
gactcttttacattggaagactaaatctccccaaacaggtgtcattctggagcaaattgaaagagtttgagcttggattatagtgaggattcctaagatcttctggaccacgtgtctttctcttgaaaagccttcagaccgaagtgtgttctctttttatatcctattctagaccatagtcctaccatgcctaaaagtgacctgctttggagatacggctgatcagtacaggtatatggaagaaattctctgtgaattttgtaattcacaaattttaagaagttgctacaattgtacaggatgatcatgggaagctatgtatctcagtttgtctacccaagatgggcatcctgggaggatgacaggtgaacttgtcacatacatatcccaattgggaaaaggaataaggaattatctgaatgattaggttttgaagtttaagacccctaggaattcaaaatattcgagaagaaaattctgacaatgatcaataatttatttagttaacaacactgtgggcagctacaatatggtttcagctacaatatggcagctacagtatttcaattgattcccatgctacctatcaaaataaaataaaatttgaaagtctttcttatatttgcatgtctgatattttcatagagagtgccattgtgtgagaat

SEQ ID NO: 345546 - DNA, 7566 bp, Homo sapiens
ctccttctgcagcgcggccggcgggcgctcctcttcccgggaccagcgaggcggcggccgctgctccagcgtcccccagccgcgggcccccgacgcgctgcagccggcagcccaccgccgccttcttggcgcgaccccaacccagccccacaggagactctctgaagaccagcaggaaagcagtgagcccttacaggtcgccttcgtcagacgtcagaatgattccttgcagagccgcgctgacctttgcccgatgtctgatccggagaaaaatcgtgaccctggacagtctagaagacaccaaattatgccgctgcttatccaccatggacctcattgccctgggcgttggaagcacccttggggccggggtttatgtcctcgctggggaggtggccaaggcagactcgggccccagcatcgtggtgtccttcctcattgctgccctggcttcagtgatggctggcctctgctatgccgaatttggggcccgtgttcccaagacggggtctgcatatttgtacacctacgtgactgtcggagagctgtgggccttcatcactggctggaatctcattttatcgtatgtgataggtacatcaagtgttgcaagagcctggagtggcacctttgatgaacttcttagcaaacagattggtcagtttttgaggacatacttcagaatgaattacactggtcttgcagaatatcccgatttttttgctgtgtgccttatattacttctagcaggtcttttgtcttttggagtaaaagagtctgcttgggtgaataaagtcttcacagctgttaatattctcgtccttctgtttgtgatggttgctgggtttgtgaaaggaaatgtggcaaactggaagattagtgaagagtttctcaaaaatatatcagcaagtgccagagagccaccttctgaaaacggaacaagtatctatggggctggtggctttatgccttatggctttacgggaacgttggctggtgctgcaacttgcttttatgcctttgtgggatttgactgcattgcaacaactggtgaagaagttcggaatccccagaaagctattcccattggaattgtgacgtctttgcttgtttgctttatggcctattttggggtctctgcagctttaacacttatgatgccgtactacctcctcgatgaaaaaagcccccttcctgtagcgtttgaatatgtgggatggggtcctgccaaatatgtcgtcgcagctggttctctctgcgccttgtcaacaagtcttcttggatccattttcccaatgcctcgtgtaatctatgctatggcggaggatgggttgcttttcaaatgtctagctcaaatcaattccaaaacgaagacaccaataattgctactttatcatcgggtgcagtggcagctttgatggcctttctgtttgacctgaaggcgcttgtggacatgatgtccattggcacactcatggcctactctctggtggcagcctgtgttctcatcctcaggtaccagcctggcttatcttacgaccagcccaaatgttctcctgagaaagatggtctgggatcgtctcccagggtaacctcgaagagtgagtcccaggtcaccatgctgcagagacagggcttcagcatgcggaccctcttctgcccctcccttctgccaacacagcagtcagcttctctcgtgagctttctggtaggattcctagctttcctcgtgttgggcctgagtgtcttgaccacttacggagttcatgccatcaccaggctggaggcctggagcctcgctctcctcgcgctgtttcttgttctcttcgttgccatcgttctcaccatctggaggcagccccagaatcagcaaaaagtagccttcatggttccattcttaccatttttgccagcgttcagcatcttggtgaacatttacttgatggtccagttaagtgcagacacttgggtcagattcagcatttggatggcaattggcttcctgatttacttttcttatggcattagacacagcctggagggtcatctgagagatgaaaacaatgaagaagatgcttatccagacaacgttcatgcagcagcagaagaaaaatctgccattcaagcaaatgaccatcacccaagaaatctcagttcacctttcatattccatgaaaagacaagtgaattctaacacttgcaggagcagagctggtcatcgtcttagcatacatatcctacactgagtaaaccgtaacgggatgtcatcagcatgctgggttgtcatgggtttgctgcatacatagttcaccctaatttatacttactcatctggacagcatctcctcagatggtgaattatgtgcacggggaaacctcctgagtggaagtttcattcatcagtgatgaatagcccccaaacagtgggagtgtgtatgtatgtgtgtatgtatgtatctatgtatatgcttgggaacatgagtgttacaagttagctggtgttttactattattgtgttacatttttccagtgtcgtcattaatcggtggcatatactgcacatactgaaatagagggaaatcactgaatgtaaagaggtttcatctatgccccctgcagttggggaaatactagtagctttaccttgtttgacttcattaatgtcagtttaggggatgccaaaaatgcagttactcatcatggtgtctgtcactggttaggggtaagatgaggggataaggaaagagacttttcaataagttgtgaatgccaacagtgggtttaatgcaaattttttttcctgtgaggtatgacagtttgctcaaacttcagccaacaggggtgtctgcttctgctgcactacacaggccaggagtggcattccatgccactagttggcatccttttgaacttttgtctcctttgcaaacagtggtcctaaaatacgaggtcttcacttgctgtgaatgacgtatccccagtcagggacttaagagaggcactgtgatatacttgggaccctttaaattaaaaagtgaagatagtcaccagggccagaaagctcatggagtggccgtaatgagaatatgtttgaagatcaaagagttagaccaatgcttgaataagtagaccccaagcatccttttctaaaaagtgacttaaaataagccaacagactctcccagaccacacaactagtggaatgattcctcctttttccattacttacttaatcacagtttagtttttttcttaacctcgtcaggcccagagttcacttctttgtttctctgtttcttttgtcttgtcttagagatgagggggctacagcagcatcatgcaaagagggaaagatgaagggatagaagaagagaaaatccccctgttctgataggaacggcctgttccattgttaaatggcaaatggcccaatttaagggctttggatctaatttgcctctgatgtttcctttggaaacatttaggaatatttttctccccctaccccataaattgtgtagcactttttattccatttgctttcaaatgactacactaagcctaataatacaagctccagtgttatacaataacccatcagtgattggggaatcaaacattttggtttaaaaaacatgattatttaaaactggaaactaaaaagaatcaaattgaattaaagctatataaacacagttaacccttgtaaatgagtaaacaaatttttacatgtaagattctctaattgtcatattttactttttaggattccctaatagtggactgtttatttgcagtgtatttgcttctcatgaactatttctcgtacaaatcattaaatagttcattggatgaggctgggtgacatttcccaggacagcatggtgaacattaccaggcatgctagctggcccgtgtaatcccaagacaaggaaaacattcgttttcctcatgggtcttccaagaaatgagctattttattgatgccattaaaaagcaagttgcgatggttttgtatagccaggagtttattgtgattaaacatcaaagaaacaggtagaaagcctgggtttctggctgctagcgttatagcatccatgacacagaactcattacggacattccacaacttccagggtgcacatggtaaaatctgaagcccagaattttctctcaagctgcgtggtttactggagagaaggagttggataagcacaggctcgggtattttggtagggactgtaggcatgctcataaatccttgctgttgtcacagtacgctgaaaacccgtttgattctatacccaatcaagaatagacccttcacacaggaaatgtgaacaattgttatatatgaacactcaaatcttttactgtaacgaaaccaagaaacttgtttagaatgtgataggcagctaaaactgttatgcccactgtgctcaatttgaagcagaattcagtgaaaaattatttttccacattgaaacactttgcagacacaaatatctatgaaaagatgctttgtcagccactgtgcctttttttctgtgaagactcaacggatgtgtgtgtttgtatgtttgttaacagttacatatgtttgtatgagtgtatatatatatctgtgtgtgtgtatctctaacgtcagtgtataagtaagttgggtttatggtgggctttgactatgtcattaggtgggtacaaaacccaactgatgtggagaaaaattgatgtttgatgttgatagatatgcttatacctaatttttagtttttaaactattttaaaatatactatgattttatatgtatatttcctatagactctttaagatgtatttataatgtttctaatatgaaatcactaaactctagtacattatagcaggtgctttgtaatctggaatggagaagaggtaggggcatttggggattcctgtttacttgctgctgccacaccttttccgactgatctgtcctggtaggtgtttattagcaaaagtcagtatcaccagctctttggcacctttctgtttctgcttgtgaattcataatgttttcaactaaattttttttttactttctcagaattacctaaatgttttgtagagttttgactagtaatcaatcaaaattatataaagtcttctccagtaattaagaaatacatatgcaaattcttttgtgattgagtaaaagcagcttaaattacttttcttttctacattaagaaatatattctcaacattttcagtgagaatttcttgtaatggcacctcaaattttatactcttaaaaaaaaacaataatttgtgaattaccaccaaaaggcaatggcagtcctacatttaagaatagagctatgcaaactctgttaaaaactatgaggaaaacttatattagaacttttgatatatactaaaatactgattatcttaatcacattttccccagagataaacattgagagaacgaaagccaaagtgtcatttaagagagatatatatgaaaaagtaacattaatatatagaactttaccatcaccagccgtagttgatagaaaatattagtttcagaattaccctcctttaaaaaataagagactatttgttttcttttaatttctatgaataaaagaaatttttaaaaactttaaaattttaaatattagtcaaaatactttttaagtcctgagtgcttacaggtagttgttaaaaaaattttaaggccaggcatggtggctcgctcacacctataatcctaggatcttgggaggtcgaggcaagctgatcgcttgagcccaggagtttaagaccggcctgagtagcatagcaagaccctgtctctacaaaaaaaacaaaaattagctgggcatggtggcatgcacatgtagtcagagctactgggggtgctgaggtgggaggatcgcttgagcccaggagagtgaggctgcagtgagctgagattacgccactgcactctagcctgggcaacggtgagaccctgcctcaaaaaaaataaaaataaaaataaaacactttaattagaatctatttttacctattttctaaatttatttaaatgcttagcaggaagcataaggaaaagccatcggcctccaatacccatgatgacagagggagcacttgagccttgccttccctcctcttaaatcagggtgtgttccgagattacagaacatcacaccttggcgtgatgaaatcatgccaagattctgactctccctttccggtgatactgctcatgatttctcctaatacgcttcaagcaactgttaccacaaaaaatacagtttccgcagggctttaaaggattgagtttagcatgtatatcatgcgttattaaagttcacgtgattcatgtgaaattaactgtcctttttgctagtgccaaaacagtgccttctctgcacactttacttgtttataaagttctcccacatgtccttaaatatcaagggggaaagtatggatattcgcgtagcaataatgccagcaaaggtcattttcattttttagtcatatagatatgaaaataagttcatatagatatgaaattgcttgactttattgttttggggagattttttttccttacatgattatattaaacactttaaaatagccttccggtttctggattttgagaagcctgatctgttattgttgtggttgttggtgtttgtaatattcattattgtttgtatatacacggtttagtcttactgatttcaaatgcattttgttattgctcaacccaactggtaacactgtttgctgggagcattatacttaactttgattcaccatggttgatgccactgccatgatcgctgggtcttaaagagctttccctagccactgacagccccgtggagatcataatcagggccccaggctggttccaggatcaggcagcctatagagtgtgagcatctatgtgtagctacccttgttgggtgggctcttagactgatggggtaggatatgaagtgaaagacttcaaatgcaagtaaggtagtttgggctccttaattccaaacatcccatgagtatatcaagatgaataaggaccaagggacctctgtgactcatagaagggctggctgaatcctgaagtagcatagtgggacctggtctacaatttatgcacatgcactgacagccttgctgtgccacgtgtctcaccaagacccagttgggaaagagcgtcatattgccaacaggttgggtttctctggcctacacctgattaatgggccctttatctttggtgtcccctaggagtgtccagttgttttattgctgtattttgttattgcagtacttaataaaaattgttgatagggcccaaaaccctacagaaattctatgtctgtaaaaaccaacaaaggcattggacttgtgtgaatgtacagggtttttttagtagtaattttaaatttaaatgttttaagtgatcatcagtgttcctttttacttataaagttggattcttttttagaatttgtaataaataaaaactgctgctttaccactgtaaaa

SEQ ID NO: 345547 - DNA, 7540 bp, Homo sapiens
gaattccggctctcaaattttctatagaatcaagatagaacctttagatgtctcaccacgaaactagcaactggaatgaagatagaaacaagtggttataactcagacaaactaatttgtcgagggtttattggaacacctgccccaccggtttgcgacagcaagtttctcctgtcgccttcgtcagacgtcagaatgattccttgcagagccgcgctgacctttgcccgatgtctgatccggagaaaaatcgtgaccctggacagtctagaagacaccaaattatgccgctgcttatccaccatggacctcattgccctgggcgttggaagcacccttggggccggggtttatgtcctcgctggggaggtggccaaggcagactcgggccccagcatcgtggtgtccttcctcattgctgccctggcttcagtgatggctggcctctgctatgccgaatttggggcccgtgttcccaagacggggtctgcatatttgtacacctacgtgactgtcggagagctgtgggccttcatcactggctggaatctcattttatcgtatgtgataggtacatcaagtgttgcaagagcctggagtggcacctttgatgaacttcttagcaaacagattggtcagtttttgaggacatacttcagaatgaattacactggtcttgcagaatatcccgatttttttgctgtgtgccttatattacttctagcaggtcttttgtcttttggagtaaaagagtctgcttgggtgaataaagtcttcacagctgttaatattctcgtccttctgtttgtgatggttgctgggtttgtgaaaggaaatgtggcaaactggaagattagtgaagagtttctcaaaaatatatcagcaagtgccagagagccaccttctgaaaacggaacaagtatctatggggctggtggctttatgccttatggctttacgggaacgttggctggtgctgcaacttgcttttatgcctttgtgggatttgactgcattgcaacaactggtgaagaagttcggaatccccagaaagctattcccattggaattgtgacgtctttgcttgtttgctttatggcctattttggggtctctgcagctttaacacttatgatgccgtactacctcctcgatgaaaaaagcccccttcctgtagcgtttgaatatgtgggatggggtcctgccaaatatgtcgtcgcagctggttctctctgcgccttgtcaacaagtcttctgggctctatgtttcctttaccccgaattctgtttgccatggcccgggatggcttactgtttagatttcttgccagagtgagtaagaggcagtcaccagttgctgccacgttgactgcaggggtcatttctgctttgatggcctttctgtttgacctgaaggcgcttgtggacatgatgtccattggcacactcatggcctactctctggtggcagcctgtgttctcatcctcaggtaccagcctggcttatcttacgaccagcccaaatgttctcctgagaaagatggtctgggatcgtctcccagggtaacctcgaagagtgagtcccaggtcaccatgctgcagagacagggcttcagcatgcggaccctcttctgcccctcccttctgccaacacagcagtcagcttctctcgtgagctttctggtaggattcctagctttcctcgtgttgggcctgagtgtcttgaccacttacggagttcatgccatcaccaggctggaggcctggagcctcgctctcctcgcgctgtttcttgttctcttcgttgccatcgttctcaccatctggaggcagccccagaatcagcaaaaagtagccttcatggttccattcttaccatttttgccagcgttcagcatcttggtgaacatttacttgatggtccagttaagtgcagacacttgggtcagattcagcatttggatggcaattggcttcctgatttacttttcttatggcattagacacagcctggagggtcatctgagagatgaaaacaatgaagaagatgcttatccagacaacgttcatgcagcagcagaagaaaaatctgccattcaagcaaatgaccatcacccaagaaatctcagttcacctttcatattccatgaaaagacaagtgaattctaacacttgcaggagcagagctggtcatcgtcttagcatacatatcctacactgagtaaaccgtaacgggatgtcatcagcatgctgggttgtcatgggtttgctgcatacatagttcaccctaatttatacttactcatctggacagcatctcctcagatggtgaattatgtgcacggggaaacctcctgagtggaagtttcattcatcagtgatgaatagcccccaaacagtgggagtgtgtatgtatgtgtgtatgtatgtatctatgtatatgcttgggaacatgagtgttacaagttagctggtgttttactattattgtgttacatttttccagtgtcgtcattaatcggtggcatatactgcacatactgaaatagagggaaatcactgaatgtaaagaggtttcatctatgccccctgcagttggggaaatactagtagctttaccttgtttgacttcattaatgtcagtttaggggatgccaaaaatgcagttactcatcatggtgtctgtcactggttaggggtaagatgaggggataaggaaagagacttttcaataagttgtgaatgccaacagtgggtttaatgcaaattttttttcctgtgaggtatgacagtttgctcaaacttcagccaacaggggtgtctgcttctgctgcactacacaggccaggagtggcattccatgccactagttggcatccttttgaacttttgtctcctttgcaaacagtggtcctaaaatacgaggtcttcacttgctgtgaatgacgtatccccagtcagggacttaagagaggcactgtgatatacttgggaccctttaaattaaaaagtgaagatagtcaccagggccagaaagctcatggagtggccgtaatgagaatatgtttgaagatcaaagagttagaccaatgcttgaataagtagaccccaagcatccttttctaaaaagtgacttaaaataagccaacagactctcccagaccacacaactagtggaatgattcctcctttttccattacttacttaatcacagtttagtttttttcttaacctcgtcaggcccagagttcacttctttgtttctctgtttcttttgtcttgtcttagagatgagggggctacagcagcatcatgcaaagagggaaagatgaagggatagaagaagagaaaatccccctgttctgataggaacggcctgttccattgttaaatggcaaatggcccaatttaagggctttggatctaatttgcctctgatgtttcctttggaaacatttaggaatatttttctccccctaccccataaattgtgtagcactttttattccatttgctttcaaatgactacactaagcctaataatacaagctccagtgttatacaataacccatcagtgattggggaatcaaacattttggtttaaaaaacatgattatttaaaactggaaactaaaaagaatcaaattgaattaaagctatataaacacagttaacccttgtaaatgagtaaacaaatttttacatgtaagattctctaattgtcatattttactttttaggattccctaatagtggactgtttatttgcagtgtatttgcttctcatgaactatttctcgtacaaatcattaaatagttcattggatgaggctgggtgacatttcccaggacagcatggtgaacattaccaggcatgctagctggcccgtgtaatcccaagacaaggaaaacattcgttttcctcatgggtcttccaagaaatgagctattttattgatgccattaaaaagcaagttgcgatggttttgtatagccaggagtttattgtgattaaacatcaaagaaacaggtagaaagcctgggtttctggctgctagcgttatagcatccatgacacagaactcattacggacattccacaacttccagggtgcacatggtaaaatctgaagcccagaattttctctcaagctgcgtggtttactggagagaaggagttggataagcacaggctcgggtattttggtagggactgtaggcatgctcataaatccttgctgttgtcacagtacgctgaaaacccgtttgattctatacccaatcaagaatagacccttcacacaggaaatgtgaacaattgttatatatgaacactcaaatcttttactgtaacgaaaccaagaaacttgtttagaatgtgataggcagctaaaactgttatgcccactgtgctcaatttgaagcagaattcagtgaaaaattatttttccacattgaaacactttgcagacacaaatatctatgaaaagatgctttgtcagccactgtgcctttttttctgtgaagactcaacggatgtgtgtgtttgtatgtttgttaacagttacatatgtttgtatgagtgtatatatatatctgtgtgtgtgtatctctaacgtcagtgtataagtaagttgggtttatggtgggctttgactatgtcattaggtgggtacaaaacccaactgatgtggagaaaaattgatgtttgatgttgatagatatgcttatacctaatttttagtttttaaactattttaaaatatactatgattttatatgtatatttcctatagactctttaagatgtatttataatgtttctaatatgaaatcactaaactctagtacattatagcaggtgctttgtaatctggaatggagaagaggtaggggcatttggggattcctgtttacttgctgctgccacaccttttccgactgatctgtcctggtaggtgtttattagcaaaagtcagtatcaccagctctttggcacctttctgtttctgcttgtgaattcataatgttttcaactaaattttttttttactttctcagaattacctaaatgttttgtagagttttgactagtaatcaatcaaaattatataaagtcttctccagtaattaagaaatacatatgcaaattcttttgtgattgagtaaaagcagcttaaattacttttcttttctacattaagaaatatattctcaacattttcagtgagaatttcttgtaatggcacctcaaattttatactcttaaaaaaaaacaataatttgtgaattaccaccaaaaggcaatggcagtcctacatttaagaatagagctatgcaaactctgttaaaaactatgaggaaaacttatattagaacttttgatatatactaaaatactgattatcttaatcacattttccccagagataaacattgagagaacgaaagccaaagtgtcatttaagagagatatatatgaaaaagtaacattaatatatagaactttaccatcaccagccgtagttgatagaaaatattagtttcagaattaccctcctttaaaaaataagagactatttgttttcttttaatttctatgaataaaagaaatttttaaaaactttaaaattttaaatattagtcaaaatactttttaagtcctgagtgcttacaggtagttgttaaaaaaattttaaggccaggcatggtggctcgctcacacctataatcctaggatcttgggaggtcgaggcaagctgatcgcttgagcccaggagtttaagaccggcctgagtagcatagcaagaccctgtctctacaaaaaaaacaaaaattagctgggcatggtggcatgcacatgtagtcagagctactgggggtgctgaggtgggaggatcgcttgagcccaggagagtgaggctgcagtgagctgagattacgccactgcactctagcctgggcaacggtgagaccctgcctcaaaaaaaataaaaataaaaataaaacactttaattagaatctatttttacctattttctaaatttatttaaatgcttagcaggaagcataaggaaaagccatcggcctccaatacccatgatgacagagggagcacttgagccttgccttccctcctcttaaatcagggtgtgttccgagattacagaacatcacaccttggcgtgatgaaatcatgccaagattctgactctccctttccggtgatactgctcatgatttctcctaatacgcttcaagcaactgttaccacaaaaaatacagtttccgcagggctttaaaggattgagtttagcatgtatatcatgcgttattaaagttcacgtgattcatgtgaaattaactgtcctttttgctagtgccaaaacagtgccttctctgcacactttacttgtttataaagttctcccacatgtccttaaatatcaagggggaaagtatggatattcgcgtagcaataatgccagcaaaggtcattttcattttttagtcatatagatatgaaaataagttcatatagatatgaaattgcttgactttattgttttggggagattttttttccttacatgattatattaaacactttaaaatagccttccggtttctggattttgagaagcctgatctgttattgttgtggttgttggtgtttgtaatattcattattgtttgtatatacacggtttagtcttactgatttcaaatgcattttgttattgctcaacccaactggtaacactgtttgctgggagcattatacttaactttgattcaccatggttgatgccactgccatgatcgctgggtcttaaagagctttccctagccactgacagccccgtggagatcataatcagggccccaggctggttccaggatcaggcagcctatagagtgtgagcatctatgtgtagctacccttgttgggtgggctcttagactgatggggtaggatatgaagtgaaagacttcaaatgcaagtaaggtagtttgggctccttaattccaaacatcccatgagtatatcaagatgaataaggaccaagggacctctgtgactcatagaagggctggctgaatcctgaagtagcatagtgggacctggtctacaatttatgcacatgcactgacagccttgctgtgccacgtgtctcaccaagacccagttgggaaagagcgtcatattgccaacaggttgggtttctctggcctacacctgattaatgggccctttatctttggtgtcccctaggagtgtccagttgttttattgctgtattttgttattgcagtacttaataaaaattgttgatagggcccaaaaccctacagaaattctatgtctgtaaaaaccaacaaaggcattggacttgtgtgaatgtacagggtttttttagtagtaattttaaatttaaatgttttaagtgatcatcagtgttcctttttacttataaagttggattcttttttagaatttgtaataaataaaaactgctgctttaccactgtaaaa

SEQ ID NO: 345548 - DNA, 7512 bp, Homo sapiens
ctccttctgcagcgcggccggcgggcgctcctcttcccgggaccagcgaggcggcggccgctgctccagcgtcccccagccgcgggcccccgacgcgctgcagccggcagcccaccgccgccttcttggcgcgaccccaacccagccccacaggagactctctgaagaccagcaggaaagcagtgagcccttacaggtcgccttcgtcagacgtcagaatgattccttgcagagccgcgctgacctttgcccgatgtctgatccggagaaaaatcgtgaccctggacagtctagaagacaccaaattatgccgctgcttatccaccatggacctcattgccctgggcgttggaagcacccttggggccggggtttatgtcctcgctggggaggtggccaaggcagactcgggccccagcatcgtggtgtccttcctcattgctgccctggcttcagtgatggctggcctctgctatgccgaatttggggcccgtgttcccaagacggggtctgcatatttgtacacctacgtgactgtcggagagctgtgggccttcatcactggctggaatctcattttatcgtatgtgataggtacatcaagtgttgcaagagcctggagtggcacctttgatgaacttcttagcaaacagattggtcagtttttgaggacatacttcagaatgaattacactggtcttgcagaatatcccgatttttttgctgtgtgccttatattacttctagcaggtcttttgtcttttggagtaaaagagtctgcttgggtgaataaagtcttcacagctgttaatattctcgtccttctgtttgtgatggttgctgggtttgtgaaaggaaatgtggcaaactggaagattagtgaagagtttctcaaaaatatatcagcaagtgccagagagccaccttctgaaaacggaacaagtatctatggggctggtggctttatgccttatggctttacgggaacgttggctggtgctgcaacttgcttttatgcctttgtgggatttgactgcattgcaacaactggtgaagaagttcggaatccccagaaagctattcccattggaattgtgacgtctttgcttgtttgctttatggcctattttggggtctctgcagctttaacacttatgatgccgtactacctcctcgatgaaaaaagcccccttcctgtagcgtttgaatatgtgggatggggtcctgccaaatatgtcgtcgcagctggttctctctgcgccttgtcaacaagtcttcttggatccattttcccaatgcctcgtgtaatctatgctatggcggaggatgggttgcttttcaaatgtctagctcaaatcaattccaaaacgaagacaccaataattgctactttatcatcgggtgcagtggcagctttgatggcctttctgtttgacctgaaggcgcttgtggacatgatgtccattggcacactcatggcctactctctggtggcagcctgtgttctcatcctcaggtaccagcctggcttatcttacgaccagcccaaatgttctcctgagaaagatggtctgggatcgtctcccagggtaacctcgaagagtgagtcccaggtcaccatgctgcagagacagggcttcagcatgcggaccctcttctgcccctcccttctgccaacacagcagtcagcttctctcgtgagctttctggtaggattcctagctttcctcgtgttgggcctgagtgtcttgaccacttacggagttcatgccatcaccaggctggaggcctggagcctcgctctcctcgcgctgtttcttgttctcttcgttgccatcgttctcaccatctggaggcagccccagaatcagcaaaaagtagccttcatggttccattcttaccatttttgccagcgttcagcatcttggtgaacatttacttgatggtccagttaagtgcagacacttgggtcagattcagcatttggatggcaattggcttcctgatttacttttcttatggcattagacacagcctggagggtcatctgagagatgaaaacaatgaagaagatgcttatccagacaacgttcatgcagcagcagaagaaaaatctgccattcaagcaaatgaccatcacccaagaaatctcagttcacctttcatattccatgaaaagacaagtgaattctaacacttgcaggagcagagctggtcatcgtcttagcatacatatcctacactgagtaaaccgtaacgggatgtcatcagcatgctgggttgtcatgggtttgctgcatacatagttcaccctaatttatacttactcatctggacagcatctcctcagatggtgaattatgtgcacggggaaacctcctgagtggaagtttcattcatcagtgatgaatagcccccaaacagtgggagtgtgtatgtatgtgtgtatgtatgtatctatgtatatgcttgggaacatgagtgttacaagttagctggtgttttactattattgtgttacatttttccagtgtcgtcattaatcggtggcatatactgcacatactgaaatagagggaaatcactgaatgtaaagaggtttcatctatgccccctgcagttggggaaatactagtagctttaccttgtttgacttcattaatgtcagtttaggggatgccaaaaatgcagttactcatcatggtgtctgtcactggttaggggtaagatgaggggataaggaaagagacttttcaataagttgtgaatgccaacagtgggtttaatgcaaattttttttcctgtgaggtatgacagtttgctcaaacttcagccaacaggggtgtctgcttctgctgcactacacaggccaggagtggcattccatgccactagttggcatccttttgaacttttgtctcctttgcaaacagtggtcctaaaatacgaggtcttcacttgctgtgaatgacgtatccccagtcagggacttaagagaggcactgtgatatacttgggaccctttaaattaaaaagtgaagatagtcaccagggccagaaagctcatggagtggccgtaatgagaatatgtttgaagatcaaagagttagaccaatgcttgaataagtagaccccaagcatccttttctaaaaagtgacttaaaataagccaacagactctcccagaccacacaactagtggaatgattcctcctttttccattacttacttaatcacagtttagtttttttcttaacctcgtcaggcccagagttcacttctttgtttctctgtttcttttgtcttgtcttagagatgagggggctacagcagcatcatgcaaagagggaaagatgaagggatagaagaagagaaaatccccctgttctgataggaacggcctgttccattgttaaatggcaaatggcccaatttaagggctttggatctaatttgcctctgatgtttcctttggaaacatttaggaatatttttctccccctaccccataaattgtgtagcactttttattccatttgctttcaaatgactacactaagcctaataatacaagctccagtgttatacaataacccatcagtgattggggaatcaaacattttggtttaaaaaacatgattatttaaaactggaaactaaaaagaatcaaattgaattaaagctatataaacacagttaacccttgtaaatgagtaaacaaatttttacatgtaagattctctaattgtcatattttactttttaggattccctaatagtggactgtttatttgcagtgtatttgcttctcatgaactatttctcgtacaaatcattaaatagttcattggatgaggctgggtgacatttcccaggacagcatggtgaacattaccaggcatgctagctggcccgtgtaatcccaagacaaggaaaacattcgttttcctcatgggtcttccaagaaatgagctattttattgatgccattaaaaagcaagttgcgatggttttgtatagccaggagtttattgtgattaaacatcaaagaaacaggtagaaagcctgggtttctggctgctagcgttatagcatccatgacacagaactcattacggacattccacaacttccagggtgcacatggtaaaatctgaagcccagaattttctctcaagctgcgtggtttactggagagaaggagttggataagcacaggctcgggtattttggtagggactgtaggcatgctcataaatccttgctgttgtcacagtacgctgaaaacccgtttgattctatacccaatcaagaatagacccttcacacaggaaatgtgaacaattgttatatatgaacactcaaatcttttactgtaacgaaaccaagaaacttgtttagaatgtgataggcagctaaaactgttatgcccactgtgctcaatttgaagcagaattcagtgaaaaattatttttccacattgaaacactttgcagacacaaatatctatgaaaagatgctttgtcagccactgtgcctttttttctgtgaagactcaacggatgtgtgtgtttgtatgtttgttaacagttacatatgtttgtatgagtgtatatatatatctgtgtgtgtgtatctctaacgtcagtgtataagtaagttgggtttatggtgggctttgactatgtcattaggtgggtacaaaacccaactgatgtggagaaaaattgatgtttgatgttgatagatatgcttatacctaatttttagtttttaaactattttaaaatatactatgattttatatgtatatttcctatagactctttaagatgtatttataatgtttctaatatgaaatcactaaactctagtacattatagcaggtgctttgtaatctggaatggagaagaggtaggggcatttggggattcctgtttacttgctgctgccacaccttttccgactgatctgtcctggtaggtgtttattagctaatgttttcaactaaattttttttttactttctcagaattacctaaatgttttgtagagttttgactagtaatcaatcaaaattatataaagtcttctccagtaattaagaaatacatatgcaaattcttttgtgattgagtaaaagcagcttaaattacttttcttttctacattaagaaatatattctcaacattttcagtgagaatttcttgtaatggcacctcaaattttatactcttaaaaaaaaacaataatttgtgaattaccaccaaaaggcaatggcagtcctacatttaagaatagagctatgcaaactctgttaaaaactatgaggaaaacttatattagaacttttgatatatactaaaatactgattatcttaatcacattttccccagagataaacattgagagaacgaaagccaaagtgtcatttaagagagatatatatgaaaaagtaacattaatatatagaactttaccatcaccagccgtagttgatagaaaatattagtttcagaattaccctcctttaaaaaataagagactatttgttttcttttaatttctatgaataaaagaaatttttaaaaactttaaaattttaaatattagtcaaaatactttttaagtcctgagtgcttacaggtagttgttaaaaaaattttaaggccaggcatggtggctcgctcacacctataatcctaggatcttgggaggtcgaggcaagctgatcgcttgagcccaggagtttaagaccggcctgagtagcatagcaagaccctgtctctacaaaaaaaacaaaaattagctgggcatggtggcatgcacatgtagtcagagctactgggggtgctgaggtgggaggatcgcttgagcccaggagagtgaggctgcagtgagctgagattacgccactgcactctagcctgggcaacggtgagaccctgcctcaaaaaaaataaaaataaaaataaaacactttaattagaatctatttttacctattttctaaatttatttaaatgcttagcaggaagcataaggaaaagccatcggcctccaatacccatgatgacagagggagcacttgagccttgccttccctcctcttaaatcagggtgtgttccgagattacagaacatcacaccttggcgtgatgaaatcatgccaagattctgactctccctttccggtgatactgctcatgatttctcctaatacgcttcaagcaactgttaccacaaaaaatacagtttccgcagggctttaaaggattgagtttagcatgtatatcatgcgttattaaagttcacgtgattcatgtgaaattaactgtcctttttgctagtgccaaaacagtgccttctctgcacactttacttgtttataaagttctcccacatgtccttaaatatcaagggggaaagtatggatattcgcgtagcaataatgccagcaaaggtcattttcattttttagtcatatagatatgaaaataagttcatatagatatgaaattgcttgactttattgttttggggagattttttttccttacatgattatattaaacactttaaaatagccttccggtttctggattttgagaagcctgatctgttattgttgtggttgttggtgtttgtaatattcattattgtttgtatatacacggtttagtcttactgatttcaaatgcattttgttattgctcaacccaactggtaacactgtttgctgggagcattatacttaactttgattcaccatggttgatgccactgccatgatcgctgggtcttaaagagctttccctagccactgacagccccgtggagatcataatcagggccccaggctggttccaggatcaggcagcctatagagtgtgagcatctatgtgtagctacccttgttgggtgggctcttagactgatggggtaggatatgaagtgaaagacttcaaatgcaagtaaggtagtttgggctccttaattccaaacatcccatgagtatatcaagatgaataaggaccaagggacctctgtgactcatagaagggctggctgaatcctgaagtagcatagtgggacctggtctacaatttatgcacatgcactgacagccttgctgtgccacgtgtctcaccaagacccagttgggaaagagcgtcatattgccaacaggttgggtttctctggcctacacctgattaatgggccctttatctttggtgtcccctaggagtgtccagttgttttattgctgtattttgttattgcagtacttaataaaaattgttgatagggcccaaaaccctacagaaattctatgtctgtaaaaaccaacaaaggcattggacttgtgtgaatgtacagggtttttttagtagtaattttaaatttaaatgttttaagtgatcatcagtgttcctttttacttataaagttggattcttttttagaatttgtaataaataaaaactgctgctttaccactgtaaaa

SEQ ID NO: 345549 - DNA, 7521 bp, Homo sapiens
ctccttctgcagcgcggccggcgggcgctcctcttcccgggaccagcgaggcggcggccgctgctccagcgtcccccagccgcgggcccccgacgcgctgcagccggcagcccaccgccgccttcttggcgcgaccccaacccagccccacaggagactctctgaagaccagcaggaaagcagtgagcccttacaggtcgccttcgtcagacgtcagaatgattccttgcagagccgcgctgacctttgcccgatgtctgatccggagaaaaatcgtgaccctggacagtctagaagacaccaaattatgccgctgcttatccaccatggacctcattgccctgggcgttggaagcacccttggggccggggtttatgtcctcgctggggaggtggccaaggcagactcgggccccagcatcgtggtgtccttcctcattgctgccctggcttcagtgatggctggcctctgctatgccgaatttggggcccgtgttcccaagacggggtctgcatatttgtacacctacgtgactgtcggagagctgtgggccttcatcactggctggaatctcattttatcgtatgtgataggtacatcaagtgttgcaagagcctggagtggcacctttgatgaacttcttagcaaacagattggtcagtttttgaggacatacttcagaatgaattacactggtcttgcagaatatcccgatttttttgctgtgtgccttatattacttctagcaggtcttttgtcttttggagtaaaagagtctgcttgggtgaataaagtcttcacagctgttaatattctcgtccttctgtttgtgatggttgctgggtttgtgaaaggaaatgtggcaaactggaagattagtgaagagtttctcaaaaatatatcagcaagtgccagagagccaccttctgaaaacggaacaagtatctatggggctggtggctttatgccttatggctttacgggaacgttggctggtgctgcaacttgcttttatgcctttgtgggatttgactgcattgcaacaactggtgaagaagttcggaatccccagaaagctattcccattggaattgtgacgtctttgcttgtttgctttatggcctattttggggtctctgcagctttaacacttatgatgccgtactacctcctcgatgaaaaaagcccccttcctgtagcgtttgaatatgtgggatggggtcctgccaaatatgtcgtcgcagctggttctctctgcgccttgtcaacaagtcttcttggatccattttcccaatgcctcgtgtaatctatgctatggcggaggatgggttgcttttcaaatgtctagctcaaatcaattccaaaacgaagacaccaataattgctactttatcatcgggtgcagtggcagctttgatggcctttctgtttgacctgaaggcgcttgtggacatgatgtccattggcacactcatggcctactctctggtggcagcctgtgttctcatcctcaggtaccagcctggcttatcttacgaccagcccaaatgttctcctgagaaagatggtctgggatcgtctcccagggtaacctcgaagagtgagtcccaggtcaccatgctgcagagacagggcttcagcatgcggaccctcttctgcccctcccttctgccaacacagcagtcagcttctctcgtgagctttctggtaggattcctagctttcctcgtgttgggcctgagtgtcttgaccacttacggagttcatgccatcaccaggctggaggcctggagcctcgctctcctcgcgctgtttcttgttctcttcgttgccatcgttctcaccatctggaggcagccccagaatcagcaaaaagtagccttcatggttccattcttaccatttttgccagcgttcagcatcttggtgaacatttacttgatggtccagttaagtgcagacacttgggtcagattcagcatttggatggcaattggcttcctgatttacttttcttatggcattagacacagcctggagggtcatctgagagatgaaaacaatgaagaagatgcttatccagacaacgttcatgcagcagcagaagaaaaatctgccattcaagcaaatgaccatcacccaagaaatctcagttcacctttcatattccatgaaaagacaagtgaattctaacacttgcaggagcagagctggtcatcgtcttagcatacatatcctacactgagtaaaccgtaacgggatgtcatcagcatgctgggttgtcatgggtttgctgcatacatagttcaccctaatttatacttactcatctggacagcatctcctcagatggtgaattatgtgcacggggaaacctcctgagtggaagtttcattcatcagtgatgaatagcccccaaacagtgggagtgtgtatgtatgtgtgtatgtatgtatctatgtatatgcttgggaacatgagtgttacaagttagctggtgttttactattattgtgttacatttttccagtgtcgtcattaatcggtggcatatactgcacatactgaaatagagggaaatcactgaatgtaaagaggtttcatctatgccccctgcagttggggaaatactagtagctttaccttgtttgacttcattaatgtcagtttaggggatgccaaaaatgcagttactcatcatggtgtctgtcactggttaggggtaagatgaggggataaggaaagagacttttcaataagttgtgaatgccaacagtgggtttaatgcaaattttttttcctgtgaggtatgacagtttgctcaaacttcagccaacaggggtgtctgcttctgctgcactacacaggccaggagtggcattccatgccactagttggcatccttttgaacttttgtctcctttgcaaacagtggtcctaaaatacgaggtcttcacttgctgtgaatgacgtatccccagtcagggacttaagagaggcactgtgatatacttgggaccctttaaattaaaaagtgaagatagtcaccagggccagaaagctcatggagtggccgtaatgagaatatgtttgaagatcaaagagttagaccaatgcttgaataagtagaccccaagcatccttttctaaaaagtgacttaaaataagccaacagactctcccagaccacacaactagtggaatgattcctcctttttccattacttacttaatcacagtttagtttttttcttaacctcgtcaggcccagagttcacttctttgtttctctgtttcttttgtcttgtcttagagatgagggggctacagcagcatcatgcaaagagggaaagatgaagggatagaagaagagaaaatccccctgttctgataggaacggcctgttccattgttaaatggcaaatggcccaatttaagggctttggatctaatttgcctctgatgtttcctttggaaacatttaggaatatttttctccccctaccccataaattgtgtagcactttttattccatttgctttcaaatgactacactaagcctaataatacaagctccagtgttatacaataacccatcagtgattggggaatcaaacattttggtttaaaaaacatgattatttaaaactggaaactaaaaagaatcaaattgaattaaagctatataaacacagttaacccttgtaaatgagtaaacaaatttttacatgtaagattctctaattgtcatattttactttttaggattccctaatagtggactgtttatttgcagtgtatttgcttctcatgaactatttctcgtacaaatcattaaatagttcattggatgaggctgggtgacatttcccaggacagcatggtgaacattaccaggcatgctagctggcccgtgtaatcccaagacaaggaaaacattcgttttcctcatgggtcttccaagaaatgagctattttattgatgccattaaaaagcaagttgcgatggttttgtatagccaggagtttattgtgattaaacatcaaagaaacaggtagaaagcctgggtttctggctgctagcgttatagcatccatgacacagaactcattacggacattccacaacttccagggtgcacatggtaaaatctgaagcccagaattttctctcaagctgcgtggtttactggagagaaggagttggataagcacaggctcgggtattttggtagggactgtaggcatgctcataaatccttgctgttgtcacagtacgctgaaaacccgtttgattctatacccaatcaagaatagacccttcacacaggaaatgtgaacaattgttatatatgaacactcaaatcttttactgtaacgaaaccaagaaacttgtttagaatgtgataggcagctaaaactgttatgcccactgtgctcaatttgaagcagaattcagtgaaaaattatttttccacattgaaacactttgcagacacaaatatctatgaaaagatgctttgtcagccactgtgcctttttttctgtgaagactcaacggatgtgtgtgtttgtatgtttgttaacagttacatatgtttgtatgagtgtatatatatatctgtgtgtgtgtatctctaacgtcagtgtataagtaagttgggtttatggtgggctttgactatgtcattaggtgggtacaaaacccaactgatgtggagaaaaattgatgtttgatgttgatagatatgcttatacctaatttttagtttttaaactattttaaaatatactatgattttatatgtatatttcctatagactctttaagatgtatttataatgtttctaatatgaaatcactaaactctagtacattatagcaggtgctttgtaatctggaatggagaagaggtaggggcatttggggattcctgtttacttgctgctgccacaccttttccgactgatctgtcctggtaggtgtttattagcaaaagtcagtatcaccagctctttggcacctttctgtttctgcttgtgaattcataatgttttcaactaaattttttttttactttctcagaattacctaaatgttttgtagagttttgactagtaatcaatcaaaattatataaagtcttctccagtaattaagaaatacatatgcaaattcttttgtgattgagtaaaagcagcttaaattacttttcttttctacattaagaaatatattctcaacattttcagtgagaatttcttgtaatggcacctcaaattttatactcttaaaaaaaaacaataatttgtgaattaccaccaaaaggcaatggcagtcctacatttaagaatagagctatgcaaactctgttaaaaactatgaggaaaacttatattagaacttttgatatatactaaaatactgattatcttaatcacattttccccagagataaacattgagagaacgaaagccaaagtgtcatttaagagagatatatatgaaaaagtaacattaatatatagaactttaccatcaccagccgtagttgatagaaaatattagtttcagaattaccctcctttaaaaaataagagactatttgttttcttttaatttctatgaataaaagaaatttttaaaaactttaaaattttaaatattagtcaaaatactttttaagtcctgagtgcttacaggtagttgttaaaaaaattttaaggccaggcatggtggctcgctcacacctataatcctaggatcttgggaggtcgaggcaagctgatcgcttgagcccaggagtttaagaccggcctgagtagcatagcaagaccctgtctctacaaaaaaaacaaaaattagctgggcatggtggcatgcacatgtagtcagagctactgggggtgctgaggtgggaggatcgcttgagcccaggagagtgaggctgcagtgagctgagattacgccactgcactctagcctgggcaacggtgagaccctgcctcaaaaaaaataaaaataaaaataaaacactttaattaggaagcataaggaaaagccatcggcctccaatacccatgatgacagagggagcacttgagccttgccttccctcctcttaaatcagggtgtgttccgagattacagaacatcacaccttggcgtgatgaaatcatgccaagattctgactctccctttccggtgatactgctcatgatttctcctaatacgcttcaagcaactgttaccacaaaaaatacagtttccgcagggctttaaaggattgagtttagcatgtatatcatgcgttattaaagttcacgtgattcatgtgaaattaactgtcctttttgctagtgccaaaacagtgccttctctgcacactttacttgtttataaagttctcccacatgtccttaaatatcaagggggaaagtatggatattcgcgtagcaataatgccagcaaaggtcattttcattttttagtcatatagatatgaaaataagttcatatagatatgaaattgcttgactttattgttttggggagattttttttccttacatgattatattaaacactttaaaatagccttccggtttctggattttgagaagcctgatctgttattgttgtggttgttggtgtttgtaatattcattattgtttgtatatacacggtttagtcttactgatttcaaatgcattttgttattgctcaacccaactggtaacactgtttgctgggagcattatacttaactttgattcaccatggttgatgccactgccatgatcgctgggtcttaaagagctttccctagccactgacagccccgtggagatcataatcagggccccaggctggttccaggatcaggcagcctatagagtgtgagcatctatgtgtagctacccttgttgggtgggctcttagactgatggggtaggatatgaagtgaaagacttcaaatgcaagtaaggtagtttgggctccttaattccaaacatcccatgagtatatcaagatgaataaggaccaagggacctctgtgactcatagaagggctggctgaatcctgaagtagcatagtgggacctggtctacaatttatgcacatgcactgacagccttgctgtgccacgtgtctcaccaagacccagttgggaaagagcgtcatattgccaacaggttgggtttctctggcctacacctgattaatgggccctttatctttggtgtcccctaggagtgtccagttgttttattgctgtattttgttattgcagtacttaataaaaattgttgatagggcccaaaaccctacagaaattctatgtctgtaaaaaccaacaaaggcattggacttgtgtgaatgtacagggtttttttagtagtaattttaaatttaaatgttttaagtgatcatcagtgttcctttttacttataaagttggattcttttttagaatttgtaataaataaaaactgctgctttaccactgtaaaa

SEQ ID NO: 345550 - DNA, 7594 bp, Homo sapiens
ctccttctgcagcgcggccggcgggcgctcctcttcccgggaccagcgaggcggcggccgctgctccagcgtcccccagccgcgggcccccgacgcgctgcagccggcagcccaccgccgccttcttggcgcgaccccaacccagccccacaggagactctctgaagaccagcaggaaagcagtgagcccttacaggtcgccttcgtcagacgtcagaatgattccttgcagagccgcgctgacctttgcccgatgtctgatccggagaaaaatcgtgaccctggacagtctagaagacaccaaattatgccgctgcttatccaccatggacctcattgccctgggcgttggaagcacccttggggccggggtttatgtcctcgctggggaggtggccaaggcagactcgggccccagcatcgtggtgtccttcctcattgctgccctggcttcagtgatggctggcctctgctatgccgaatttggggcccgtgttcccaagacggggtctgcatatttgtacacctacgtgactgtcggagagctgtgggccttcatcactggctggaatctcattttatcgtatgtgataggtacatcaagtgttgcaagagcctggagtggcacctttgatgaacttcttagcaaacagattggtcagtttttgaggacatacttcagaatgaattacactggtcttgcagaatatcccgatttttttgctgtgtgccttatattacttctagcaggtcttttgtcttttggagtaaaagagtctgcttgggtgaataaagtcttcacagctgttaatattctcgtccttctgtttgtgatggttgctgggtttgtgaaaggaaatgtggcaaactggaagattagtgaagagtttctcaaaaatatatcagcaagtgccagagagccaccttctgaaaacggaacaagtatctatggggctggtggctttatgccttatggctttacgggaacgttggctggtgctgcaacttgcttttatgcctttgtgggatttgactgcattgcaacaactggtgaagaagttcggaatccccagaaagctattcccattggaattgtgacgtctttgcttgtttgctttatggcctattttggggtctctgcagctttaacacttatgatgccgtactacctcctcgatgaaaaaagcccccttcctgtagcgtttgaatatgtgggatggggtcctgccaaatatgtcgtcgcagctggttctctctgcgccttgtcaacaagtcttcttggatccattttcccaatgcctcgtgtaatctatgctatggcggaggatgggttgcttttcaaatgtctagctcaaatcaattccaaaacgaagacaccaataattgctactttatcatcgggtgcagtggcagctttgatggcctttctgtttgacctgaaggcgcttgtggacatgatgtccattggcacactcatggcctactctctggtggcagcctgtgttctcatcctcaggtaccagcctggcttatcttacgaccagcccaaatgttctcctgagaaagatggtctgggatcgtctcccagggtaacctcgaagagtgagtcccaggtcaccatgctgcagagacagggcttcagcatgcggaccctcttctgcccctcccttctgccaacacagcagtcagcttctctcgtgagctttctggtaggattcctagctttcctcgtgttgggcctgagtgtcttgaccacttacggagttcatgccatcaccaggctggaggcctggagcctcgctctcctcgcgctgtttcttgttctcttcgttgccatcgttctcaccatctggaggcagccccagaatcagcaaaaagtagccttcatggttccattcttaccatttttgccagcgttcagcatcttggtgaacatttacttgatggtccagttaagtgcagacacttgggtcagattcagcatttggatggcaattggcttcctgatttacttttcttatggcattagacacagcctggagggtcatctgagagatgaaaacaatgaagaagatgcttatccagacaacgttcatgcagcagcagaagaaaaatctgccattcaagcaaatgaccatcacccaagaaatctcagttcacctttcatattccatgaaaagacaagtgaattctaacacttgcaggagcagagctggtcatcgtcttagcatacatatcctacactgagtaaaccgtaacgggatgtcatcagcatgctgggttgtcatgggtttgctgcatacatagttcaccctaatttatacttactcatctggacagcatctcctcagatggtgaattatgtgcacggggaaacctcctgagtggaagtttcattcatcagtgatgaatagcccccaaacagtgggagtgtgtatgtatgtgtgtatgtatgtatctatgtatatgcttgggaacatgagtgttacaagttagctggtgttttactattattgtgttacatttttccagtgtcgtcattaatcggtggcatatactgcacatactgaaatagagggaaatcactgaatgtaaagaggtttcatctatgccccctgcagttggggaaatactagtagctttaccttgtttgacttcattaatgtcagtttaggggatgccaaaaatgcagttactcatcatggtgtctgtcactggttaggggtaagatgaggggataaggaaagagacttttcaataagttgtgaatgccaacagtgggtttaatgcaaattttttttcctgtgaggtatgacagtttgctcaaacttcagccaacaggggtgtctgcttctgctgcactacacaggccaggagtggcattccatgccactagttggcatccttttgaacttttgtctcctttgcaaacagtggtcctaaaatacgaggtcttcacttgctgtgaatgacgtatccccagtcagggacttaagagaggcactgtgatatacttgggaccctttaaattaaaaagtgaagatagtcaccagggccagaaagctcatggagtggccgtaatgagaatatgtttgaagatcaaagagttagaccaatgcttgaataagtagaccccaagcatccttttctaaaaagtgacttaaaataagccaacagactctcccagaccacacaactagtggaatgattcctcctttttccattacttacttaatcacagtttagtttttttcttaacctcgtcaggcccagagttcacttctttgtttctctgtttcttttgtcttgtcttagagatgagggggctacagcagcatcatgcaaagagggaaagatgaagggatagaagaagagaaaatccccctgttctgataggaacggcctgttccattgttaaatggcaaatggcccaatttaagggctttggatctaatttgcctctgatgtttcctttggaaacatttaggaatatttttctccccctaccccataaattgtgtagcactttttattccatttgctttcaaatgactacactaagcctaataatacaagctccagtgttatacaataacccatcagtgattggggaatcaaacattttggtttaaaaaacatgattatttaaaactggaaactaaaaagaatcaaattgaattaaagctatataaacacagttaacccttgtaaatgagtaaacaaatttttacatgtaagattctctaattgtcatattttactttttaggattccctaatagtggactgtttatttgcagtgtatttgcttctcatgaactatttctcgtacaaatcattaaatagttcattggatgaggctgggtgacatttcccaggacagcatggtgaacattaccaggcatgctagctggcccgtgtaatcccaagacaaggaaaacattcgttttcctcatgggtcttccaagaaatgagctattttattgatgccattaaaaagcaagttgcgatggttttgtatagccaggagtttattgtgattaaacatcaaagaaacaggtagaaagcctgggtttctggctgctagcgttatagcatccatgacacagaactcattacggacattccacaacttccagggtgcacatggtaaaatctgaagcccagaattttctctcaagctgcgtggtttactggagagaaggagttggataagcacaggctcgggtattttggtagggactgtaggcatgctcataaatccttgctgttgtcacagtacgctgaaaacccgtttgattctatacccaatcaagaatagacccttcacacaggaaatgtgaacaattgttatatatgaacactcaaatcttttactgtaacgaaaccaagaaacttgtttagaatgtgataggcagctaaaactgttatgcccactgtgctcaatttgaagcagaattcagtgaaaaattatttttccacattgaaacactttgcagacacaaatatctatgaaaagatgctttgtcagccactgtgcctttttttctgtgaagactcaacggatgtgtgtgtttgtatgtttgttaacagttacatatgtttgtatgagtgtatatatatatctgtgtgtgtgtatctctaacgtcagtgtataagtaagttgggtttatggtgggctttgactatgtcattaggtgggtacaaaacccaactgatgtggagaaaaattgatgtttgatgttgatagatatgcttatacctaatttttagtttttaaactattttaaaatatactatgattttatatgtatatttcctatagactctttaagatgtatttataatgtttctaatatgaaatcactaaactctagtacattatagcaggtgctttgtaatctggaatggagaagaggtaggggcatttggggattcctgtttacttgctgctgccacaccttttccgactgatctgtcctggtaggtgtttattagcaaaagtcagtatcaccagctctttggcacctttctgtttctgcttgtgaattcataatgttttcaactaaattttttttttactttctcagaattacctaaatgttttgtagagttttgactagtaatcaatcaaaattatataaagtcttctccagtaattaagaaatacatatgcaaattcttttgtgattgagtaaaagcagcttaaattacttttcttttctacattaagaaatatattctcaacattttcagtgagaatttcttgtaatggcacctcaaattttatactcttaaaaaaaaacaataatttgtgaattaccaccaaaaggcaatggcagtcctacatttaagaatagagctatgcaaactctgttaaaaactatgaggaaaacttatattagaacttttgatatatactaaaatactgattatcttaatcacattttccccagagataaacattgagagaacgaaagccaaagtgtcatttaagagagatatatatgaaaaagtaacattaatatatagaactttaccatcaccagccgtagttgatagaaaatattagtttcagaattaccctcctttaaaaaataagagactatttgttttcttttaatttctatgaataaaagaaatttttaaaaactttaacaactatgacaataattagatcagaaactactaaccccaacgctccctgcagcctgccttacaggctagctcgtccacacacaaacactcccacacggcccagcgcatggtggctcgctcacacctataatcctaggatcttgggaggtcgaggcaagctgatcgcttgagcccaggagtttaagaccggcctgagtagcatagcaagaccctgtctctacaaaaaaaacaaaaattagctgggcatggtggcatgcacatgtagtcagagctactgggggtgctgaggtgggaggatcgcttgagcccaggagagtgaggctgcagtgagctgagattacgccactgcactctagcctgggcaacggtgagaccctgcctcaaaaaaaataaaaataaaaataaaacactttaattagaatctatttttacctattttctaaatttatttaaatgcttagcaggaagcataaggaaaagccatcggcctccaatacccatgatgacagagggagcacttgagccttgccttccctcctcttaaatcagggtgtgttccgagattacagaacatcacaccttggcgtgatgaaatcatgccaagattctgactctccctttccggtgatactgctcatgatttctcctaatacgcttcaagcaactgttaccacaaaaaatacagtttccgcagggctttaaaggattgagtttagcatgtatatcatgcgttattaaagttcacgtgattcatgtgaaattaactgtcctttttgctagtgccaaaacagtgccttctctgcacactttacttgtttataaagttctcccacatgtccttaaatatcaagggggaaagtatggatattcgcgtagcaataatgccagcaaaggtcattttcattttttagtcatatagatatgaaaataagttcatatagatatgaaattgcttgactttattgttttggggagattttttttccttacatgattatattaaacactttaaaatagccttccggtttctggattttgagaagcctgatctgttattgttgtggttgttggtgtttgtaatattcattattgtttgtatatacacggtttagtcttactgatttcaaatgcattttgttattgctcaacccaactggtaacactgtttgctgggagcattatacttaactttgattcaccatggttgatgccactgccatgatcgctgggtcttaaagagctttccctagccactgacagccccgtggagatcataatcagggccccaggctggttccaggatcaggcagcctatagagtgtgagcatctatgtgtagctacccttgttgggtgggctcttagactgatggggtaggatatgaagtgaaagacttcaaatgcaagtaaggtagtttgggctccttaattccaaacatcccatgagtatatcaagatgaataaggaccaagggacctctgtgactcatagaagggctggctgaatcctgaagtagcatagtgggacctggtctacaatttatgcacatgcactgacagccttgctgtgccacgtgtctcaccaagacccagttgggaaagagcgtcatattgccaacaggttgggtttctctggcctacacctgattaatgggccctttatctttggtgtcccctaggagtgtccagttgttttattgctgtattttgttattgcagtacttaataaaaattgttgatagggcccaaaaccctacagaaattctatgtctgtaaaaaccaacaaaggcattggacttgtgtgaatgtacagggtttttttagtagtaattttaaatttaaatgttttaagtgatcatcagtgttcctttttacttataaagttggattcttttttagaatttgtaataaataaaaactgctgctttaccactgtaaaa

SEQ ID NO: 345551 - DNA, 7520 bp, Homo sapiens
ctccttctgcagcgcggccggcgggcgctcctcttcccgggaccagcgaggcggcggccgctgctccagcgtcccccagccgcgggcccccgacgcgctgcagccggcagcccaccgccgccttcttggcgcgaccccaacccagccccagtcgccttcgtcagacgtcagaatgattccttgcagagccgcgctgacctttgcccgatgtctgatccggagaaaaatcgtgaccctggacagtctagaagacaccaaattatgccgctgcttatccaccatggacctcattgccctgggcgttggaagcacccttggggccggggtttatgtcctcgctggggaggtggccaaggcagactcgggccccagcatcgtggtgtccttcctcattgctgccctggcttcagtgatggctggcctctgctatgccgaatttggggcccgtgttcccaagacggggtctgcatatttgtacacctacgtgactgtcggagagctgtgggccttcatcactggctggaatctcattttatcgtatgtgataggtacatcaagtgttgcaagagcctggagtggcacctttgatgaacttcttagcaaacagattggtcagtttttgaggacatacttcagaatgaattacactggtcttgcagaatatcccgatttttttgctgtgtgccttatattacttctagcaggtcttttgtcttttggagtaaaagagtctgcttgggtgaataaagtcttcacagctgttaatattctcgtccttctgtttgtgatggttgctgggtttgtgaaaggaaatgtggcaaactggaagattagtgaagagtttctcaaaaatatatcagcaagtgccagagagccaccttctgaaaacggaacaagtatctatggggctggtggctttatgccttatggctttacgggaacgttggctggtgctgcaacttgcttttatgcctttgtgggatttgactgcattgcaacaactggtgaagaagttcggaatccccagaaagctattcccattggaattgtgacgtctttgcttgtttgctttatggcctattttggggtctctgcagctttaacacttatgatgccgtactacctcctcgatgaaaaaagcccccttcctgtagcgtttgaatatgtgggatggggtcctgccaaatatgtcgtcgcagctggttctctctgcgccttgtcaacaagtcttcttggatccattttcccaatgcctcgtgtaatctatgctatggcggaggatgggttgcttttcaaatgtctagctcaaatcaattccaaaacgaagacaccaataattgctactttatcatcgggtgcagtggcagctttgatggcctttctgtttgacctgaaggcgcttgtggacatgatgtccattggcacactcatggcctactctctggtggcagcctgtgttctcatcctcaggtaccagcctggcttatcttacgaccagcccaaatgttctcctgagaaagatggtctgggatcgtctcccagggtaacctcgaagagtgagtcccaggtcaccatgctgcagagacagggcttcagcatgcggaccctcttctgcccctcccttctgccaacacagcagtcagcttctctcgtgagctttctggtaggattcctagctttcctcgtgttgggcctgagtgtcttgaccacttacggagttcatgccatcaccaggctggaggcctggagcctcgctctcctcgcgctgtttcttgttctcttcgttgccatcgttctcaccatctggaggcagccccagaatcagcaaaaagtagccttcatggttccattcttaccatttttgccagcgttcagcatcttggtgaacatttacttgatggtccagttaagtgcagacacttgggtcagattcagcatttggatggcaattggcttcctgatttacttttcttatggcattagacacagcctggagggtcatctgagagatgaaaacaatgaagaagatgcttatccagacaacgttcatgcagcagcagaagaaaaatctgccattcaagcaaatgaccatcacccaagaaatctcagttcacctttcatattccatgaaaagacaagtgaattctaacacttgcaggagcagagctggtcatcgtcttagcatacatatcctacactgagtaaaccgtaacgggatgtcatcagcatgctgggttgtcatgggtttgctgcatacatagttcaccctaatttatacttactcatctggacagcatctcctcagatggtgaattatgtgcacggggaaacctcctgagtggaagtttcattcatcagtgatgaatagcccccaaacagtgggagtgtgtatgtatgtgtgtatgtatgtatctatgtatatgcttgggaacatgagtgttacaagttagctggtgttttactattattgtgttacatttttccagtgtcgtcattaatcggtggcatatactgcacatactgaaatagagggaaatcactgaatgtaaagaggtttcatctatgccccctgcagttggggaaatactagtagctttaccttgtttgacttcattaatgtcagtttaggggatgccaaaaatgcagttactcatcatggtgtctgtcactggttaggggtaagatgaggggataaggaaagagacttttcaataagttgtgaatgccaacagtgggtttaatgcaaattttttttcctgtgaggtatgacagtttgctcaaacttcagccaacaggggtgtctgcttctgctgcactacacaggccaggagtggcattccatgccactagttggcatccttttgaacttttgtctcctttgcaaacagtggtcctaaaatacgaggtcttcacttgctgtgaatgacgtatccccagtcagggacttaagagaggcactgtgatatacttgggaccctttaaattaaaaagtgaagatagtcaccagggccagaaagctcatggagtggccgtaatgagaatatgtttgaagatcaaagagttagaccaatgcttgaataagtagaccccaagcatccttttctaaaaagtgacttaaaataagccaacagactctcccagaccacacaactagtggaatgattcctcctttttccattacttacttaatcacagtttagtttttttcttaacctcgtcaggcccagagttcacttctttgtttctctgtttcttttgtcttgtcttagagatgagggggctacagcagcatcatgcaaagagggaaagatgaagggatagaagaagagaaaatccccctgttctgataggaacggcctgttccattgttaaatggcaaatggcccaatttaagggctttggatctaatttgcctctgatgtttcctttggaaacatttaggaatatttttctccccctaccccataaattgtgtagcactttttattccatttgctttcaaatgactacactaagcctaataatacaagctccagtgttatacaataacccatcagtgattggggaatcaaacattttggtttaaaaaacatgattatttaaaactggaaactaaaaagaatcaaattgaattaaagctatataaacacagttaacccttgtaaatgagtaaacaaatttttacatgtaagattctctaattgtcatattttactttttaggattccctaatagtggactgtttatttgcagtgtatttgcttctcatgaactatttctcgtacaaatcattaaatagttcattggatgaggctgggtgacatttcccaggacagcatggtgaacattaccaggcatgctagctggcccgtgtaatcccaagacaaggaaaacattcgttttcctcatgggtcttccaagaaatgagctattttattgatgccattaaaaagcaagttgcgatggttttgtatagccaggagtttattgtgattaaacatcaaagaaacaggtagaaagcctgggtttctggctgctagcgttatagcatccatgacacagaactcattacggacattccacaacttccagggtgcacatggtaaaatctgaagcccagaattttctctcaagctgcgtggtttactggagagaaggagttggataagcacaggctcgggtattttggtagggactgtaggcatgctcataaatccttgctgttgtcacagtacgctgaaaacccgtttgattctatacccaatcaagaatagacccttcacacaggaaatgtgaacaattgttatatatgaacactcaaatcttttactgtaacgaaaccaagaaacttgtttagaatgtgataggcagctaaaactgttatgcccactgtgctcaatttgaagcagaattcagtgaaaaattatttttccacattgaaacactttgcagacacaaatatctatgaaaagatgctttgtcagccactgtgcctttttttctgtgaagactcaacggatgtgtgtgtttgtatgtttgttaacagttacatatgtttgtatgagtgtatatatatatctgtgtgtgtgtatctctaacgtcagtgtataagtaagttgggtttatggtgggctttgactatgtcattaggtgggtacaaaacccaactgatgtggagaaaaattgatgtttgatgttgatagatatgcttatacctaatttttagtttttaaactattttaaaatatactatgattttatatgtatatttcctatagactctttaagatgtatttataatgtttctaatatgaaatcactaaactctagtacattatagcaggtgctttgtaatctggaatggagaagaggtaggggcatttggggattcctgtttacttgctgctgccacaccttttccgactgatctgtcctggtaggtgtttattagcaaaagtcagtatcaccagctctttggcacctttctgtttctgcttgtgaattcataatgttttcaactaaattttttttttactttctcagaattacctaaatgttttgtagagttttgactagtaatcaatcaaaattatataaagtcttctccagtaattaagaaatacatatgcaaattcttttgtgattgagtaaaagcagcttaaattacttttcttttctacattaagaaatatattctcaacattttcagtgagaatttcttgtaatggcacctcaaattttatactcttaaaaaaaaacaataatttgtgaattaccaccaaaaggcaatggcagtcctacatttaagaatagagctatgcaaactctgttaaaaactatgaggaaaacttatattagaacttttgatatatactaaaatactgattatcttaatcacattttccccagagataaacattgagagaacgaaagccaaagtgtcatttaagagagatatatatgaaaaagtaacattaatatatagaactttaccatcaccagccgtagttgatagaaaatattagtttcagaattaccctcctttaaaaaataagagactatttgttttcttttaatttctatgaataaaagaaatttttaaaaactttaaaattttaaatattagtcaaaatactttttaagtcctgagtgcttacaggtagttgttaaaaaaattttaaggccaggcatggtggctcgctcacacctataatcctaggatcttgggaggtcgaggcaagctgatcgcttgagcccaggagtttaagaccggcctgagtagcatagcaagaccctgtctctacaaaaaaaacaaaaattagctgggcatggtggcatgcacatgtagtcagagctactgggggtgctgaggtgggaggatcgcttgagcccaggagagtgaggctgcagtgagctgagattacgccactgcactctagcctgggcaacggtgagaccctgcctcaaaaaaaataaaaataaaaataaaacactttaattagaatctatttttacctattttctaaatttatttaaatgcttagcaggaagcataaggaaaagccatcggcctccaatacccatgatgacagagggagcacttgagccttgccttccctcctcttaaatcagggtgtgttccgagattacagaacatcacaccttggcgtgatgaaatcatgccaagattctgactctccctttccggtgatactgctcatgatttctcctaatacgcttcaagcaactgttaccacaaaaaatacagtttccgcagggctttaaaggattgagtttagcatgtatatcatgcgttattaaagttcacgtgattcatgtgaaattaactgtcctttttgctagtgccaaaacagtgccttctctgcacactttacttgtttataaagttctcccacatgtccttaaatatcaagggggaaagtatggatattcgcgtagcaataatgccagcaaaggtcattttcattttttagtcatatagatatgaaaataagttcatatagatatgaaattgcttgactttattgttttggggagattttttttccttacatgattatattaaacactttaaaatagccttccggtttctggattttgagaagcctgatctgttattgttgtggttgttggtgtttgtaatattcattattgtttgtatatacacggtttagtcttactgatttcaaatgcattttgttattgctcaacccaactggtaacactgtttgctgggagcattatacttaactttgattcaccatggttgatgccactgccatgatcgctgggtcttaaagagctttccctagccactgacagccccgtggagatcataatcagggccccaggctggttccaggatcaggcagcctatagagtgtgagcatctatgtgtagctacccttgttgggtgggctcttagactgatggggtaggatatgaagtgaaagacttcaaatgcaagtaaggtagtttgggctccttaattccaaacatcccatgagtatatcaagatgaataaggaccaagggacctctgtgactcatagaagggctggctgaatcctgaagtagcatagtgggacctggtctacaatttatgcacatgcactgacagccttgctgtgccacgtgtctcaccaagacccagttgggaaagagcgtcatattgccaacaggttgggtttctctggcctacacctgattaatgggccctttatctttggtgtcccctaggagtgtccagttgttttattgctgtattttgttattgcagtacttaataaaaattgttgatagggcccaaaaccctacagaaattctatgtctgtaaaaaccaacaaaggcattggacttgtgtgaatgtacagggtttttttagtagtaattttaaatttaaatgttttaagtgatcatcagtgttcctttttacttataaagttggattcttttttagaatttgtaataaataaaaactgctgctttaccactgtaaaa

SEQ ID NO: 345552 - DNA, 7712 bp, Homo sapiens
ctccttctgcagcgcggccggcgggcgctcctcttcccgggaccagcgaggcggcggccgctgctccagcgtcccccagccgcgggcccccgacgcgctgcagccggcagcccaccgccgccttcttggcgcgaccccaacccagccccacaggagactctctgaagaccagcaggaaagcagtgagcccttacagtcccaaaacagaaagagcagatgtctcaccacgaaactagcaactggaatgaagatagaaacaagtggttataactcagacaaactaatttgtcgagggtttattggaacacctgccccaccggtttgcgacagcaagtttctcctgtcgccttcgtcagacgtcagaatgattccttgcagagccgcgctgacctttgcccgatgtctgatccggagaaaaatcgtgaccctggacagtctagaagacaccaaattatgccgctgcttatccaccatggacctcattgccctgggcgttggaagcacccttggggccggggtttatgtcctcgctggggaggtggccaaggcagactcgggccccagcatcgtggtgtccttcctcattgctgccctggcttcagtgatggctggcctctgctatgccgaatttggggcccgtgttcccaagacggggtctgcatatttgtacacctacgtgactgtcggagagctgtgggccttcatcactggctggaatctcattttatcgtatgtgataggtacatcaagtgttgcaagagcctggagtggcacctttgatgaacttcttagcaaacagattggtcagtttttgaggacatacttcagaatgaattacactggtcttgcagaatatcccgatttttttgctgtgtgccttatattacttctagcaggtcttttgtcttttggagtaaaagagtctgcttgggtgaataaagtcttcacagctgttaatattctcgtccttctgtttgtgatggttgctgggtttgtgaaaggaaatgtggcaaactggaagattagtgaagagtttctcaaaaatatatcagcaagtgccagagagccaccttctgaaaacggaacaagtatctatggggctggtggctttatgccttatggctttacgggaacgttggctggtgctgcaacttgcttttatgcctttgtgggatttgactgcattgcaacaactggtgaagaagttcggaatccccagaaagctattcccattggaattgtgacgtctttgcttgtttgctttatggcctattttggggtctctgcagctttaacacttatgatgccgtactacctcctcgatgaaaaaagcccccttcctgtagcgtttgaatatgtgggatggggtcctgccaaatatgtcgtcgcagctggttctctctgcgccttgtcaacaagtcttcttggatccattttcccaatgcctcgtgtaatctatgctatggcggaggatgggttgcttttcaaatgtctagctcaaatcaattccaaaacgaagacaccaataattgctactttatcatcgggtgcagtggcagctttgatggcctttctgtttgacctgaaggcgcttgtggacatgatgtccattggcacactcatggcctactctctggtggcagcctgtgttctcatcctcaggtaccagcctggcttatcttacgaccagcccaaatgttctcctgagaaagatggtctgggatcgtctcccagggtaacctcgaagagtgagtcccaggtcaccatgctgcagagacagggcttcagcatgcggaccctcttctgcccctcccttctgccaacacagcagtcagcttctctcgtgagctttctggtaggattcctagctttcctcgtgttgggcctgagtgtcttgaccacttacggagttcatgccatcaccaggctggaggcctggagcctcgctctcctcgcgctgtttcttgttctcttcgttgccatcgttctcaccatctggaggcagccccagaatcagcaaaaagtagccttcatggttccattcttaccatttttgccagcgttcagcatcttggtgaacatttacttgatggtccagttaagtgcagacacttgggtcagattcagcatttggatggcaattggcttcctgatttacttttcttatggcattagacacagcctggagggtcatctgagagatgaaaacaatgaagaagatgcttatccagacaacgttcatgcagcagcagaagaaaaatctgccattcaagcaaatgaccatcacccaagaaatctcagttcacctttcatattccatgaaaagacaagtgaattctaacacttgcaggagcagagctggtcatcgtcttagcatacatatcctacactgagtaaaccgtaacgggatgtcatcagcatgctgggttgtcatgggtttgctgcatacatagttcaccctaatttatacttactcatctggacagcatctcctcagatggtgaattatgtgcacggggaaacctcctgagtggaagtttcattcatcagtgatgaatagcccccaaacagtgggagtgtgtatgtatgtgtgtatgtatgtatctatgtatatgcttgggaacatgagtgttacaagttagctggtgttttactattattgtgttacatttttccagtgtcgtcattaatcggtggcatatactgcacatactgaaatagagggaaatcactgaatgtaaagaggtttcatctatgccccctgcagttggggaaatactagtagctttaccttgtttgacttcattaatgtcagtttaggggatgccaaaaatgcagttactcatcatggtgtctgtcactggttaggggtaagatgaggggataaggaaagagacttttcaataagttgtgaatgccaacagtgggtttaatgcaaattttttttcctgtgaggtatgacagtttgctcaaacttcagccaacaggggtgtctgcttctgctgcactacacaggccaggagtggcattccatgccactagttggcatccttttgaacttttgtctcctttgcaaacagtggtcctaaaatacgaggtcttcacttgctgtgaatgacgtatccccagtcagggacttaagagaggcactgtgatatacttgggaccctttaaattaaaaagtgaagatagtcaccagggccagaaagctcatggagtggccgtaatgagaatatgtttgaagatcaaagagttagaccaatgcttgaataagtagaccccaagcatccttttctaaaaagtgacttaaaataagccaacagactctcccagaccacacaactagtggaatgattcctcctttttccattacttacttaatcacagtttagtttttttcttaacctcgtcaggcccagagttcacttctttgtttctctgtttcttttgtcttgtcttagagatgagggggctacagcagcatcatgcaaagagggaaagatgaagggatagaagaagagaaaatccccctgttctgataggaacggcctgttccattgttaaatggcaaatggcccaatttaagggctttggatctaatttgcctctgatgtttcctttggaaacatttaggaatatttttctccccctaccccataaattgtgtagcactttttattccatttgctttcaaatgactacactaagcctaataatacaagctccagtgttatacaataacccatcagtgattggggaatcaaacattttggtttaaaaaacatgattatttaaaactggaaactaaaaagaatcaaattgaattaaagctatataaacacagttaacccttgtaaatgagtaaacaaatttttacatgtaagattctctaattgtcatattttactttttaggattccctaatagtggactgtttatttgcagtgtatttgcttctcatgaactatttctcgtacaaatcattaaatagttcattggatgaggctgggtgacatttcccaggacagcatggtgaacattaccaggcatgctagctggcccgtgtaatcccaagacaaggaaaacattcgttttcctcatgggtcttccaagaaatgagctattttattgatgccattaaaaagcaagttgcgatggttttgtatagccaggagtttattgtgattaaacatcaaagaaacaggtagaaagcctgggtttctggctgctagcgttatagcatccatgacacagaactcattacggacattccacaacttccagggtgcacatggtaaaatctgaagcccagaattttctctcaagctgcgtggtttactggagagaaggagttggataagcacaggctcgggtattttggtagggactgtaggcatgctcataaatccttgctgttgtcacagtacgctgaaaacccgtttgattctatacccaatcaagaatagacccttcacacaggaaatgtgaacaattgttatatatgaacactcaaatcttttactgtaacgaaaccaagaaacttgtttagaatgtgataggcagctaaaactgttatgcccactgtgctcaatttgaagcagaattcagtgaaaaattatttttccacattgaaacactttgcagacacaaatatctatgaaaagatgctttgtcagccactgtgcctttttttctgtgaagactcaacggatgtgtgtgtttgtatgtttgttaacagttacatatgtttgtatgagtgtatatatatatctgtgtgtgtgtatctctaacgtcagtgtataagtaagttgggtttatggtgggctttgactatgtcattaggtgggtacaaaacccaactgatgtggagaaaaattgatgtttgatgttgatagatatgcttatacctaatttttagtttttaaactattttaaaatatactatgattttatatgtatatttcctatagactctttaagatgtatttataatgtttctaatatgaaatcactaaactctagtacattatagcaggtgctttgtaatctggaatggagaagaggtaggggcatttggggattcctgtttacttgctgctgccacaccttttccgactgatctgtcctggtaggtgtttattagcaaaagtcagtatcaccagctctttggcacctttctgtttctgcttgtgaattcataatgttttcaactaaattttttttttactttctcagaattacctaaatgttttgtagagttttgactagtaatcaatcaaaattatataaagtcttctccagtaattaagaaatacatatgcaaattcttttgtgattgagtaaaagcagcttaaattacttttcttttctacattaagaaatatattctcaacattttcagtgagaatttcttgtaatggcacctcaaattttatactcttaaaaaaaaacaataatttgtgaattaccaccaaaaggcaatggcagtcctacatttaagaatagagctatgcaaactctgttaaaaactatgaggaaaacttatattagaacttttgatatatactaaaatactgattatcttaatcacattttccccagagataaacattgagagaacgaaagccaaagtgtcatttaagagagatatatatgaaaaagtaacattaatatatagaactttaccatcaccagccgtagttgatagaaaatattagtttcagaattaccctcctttaaaaaataagagactatttgttttcttttaatttctatgaataaaagaaatttttaaaaactttaaaattttaaatattagtcaaaatactttttaagtcctgagtgcttacaggtagttgttaaaaaaattttaaggccaggcatggtggctcgctcacacctataatcctaggatcttgggaggtcgaggcaagctgatcgcttgagcccaggagtttaagaccggcctgagtagcatagcaagaccctgtctctacaaaaaaaacaaaaattagctgggcatggtggcatgcacatgtagtcagagctactgggggtgctgaggtgggaggatcgcttgagcccaggagagtgaggctgcagtgagctgagattacgccactgcactctagcctgggcaacggtgagaccctgcctcaaaaaaaataaaaataaaaataaaacactttaattagaatctatttttacctattttctaaatttatttaaatgcttagcaggaagcataaggaaaagccatcggcctccaatacccatgatgacagagggagcacttgagccttgccttccctcctcttaaatcagggtgtgttccgagattacagaacatcacaccttggcgtgatgaaatcatgccaagattctgactctccctttccggtgatactgctcatgatttctcctaatacgcttcaagcaactgttaccacaaaaaatacagtttccgcagggctttaaaggattgagtttagcatgtatatcatgcgttattaaagttcacgtgattcatgtgaaattaactgtcctttttgctagtgccaaaacagtgccttctctgcacactttacttgtttataaagttctcccacatgtccttaaatatcaagggggaaagtatggatattcgcgtagcaataatgccagcaaaggtcattttcattttttagtcatatagatatgaaaataagttcatatagatatgaaattgcttgactttattgttttggggagattttttttccttacatgattatattaaacactttaaaatagccttccggtttctggattttgagaagcctgatctgttattgttgtggttgttggtgtttgtaatattcattattgtttgtatatacacggtttagtcttactgatttcaaatgcattttgttattgctcaacccaactggtaacactgtttgctgggagcattatacttaactttgattcaccatggttgatgccactgccatgatcgctgggtcttaaagagctttccctagccactgacagccccgtggagatcataatcagggccccaggctggttccaggatcaggcagcctatagagtgtgagcatctatgtgtagctacccttgttgggtgggctcttagactgatggggtaggatatgaagtgaaagacttcaaatgcaagtaaggtagtttgggctccttaattccaaacatcccatgagtatatcaagatgaataaggaccaagggacctctgtgactcatagaagggctggctgaatcctgaagtagcatagtgggacctggtctacaatttatgcacatgcactgacagccttgctgtgccacgtgtctcaccaagacccagttgggaaagagcgtcatattgccaacaggttgggtttctctggcctacacctgattaatgggccctttatctttggtgtcccctaggagtgtccagttgttttattgctgtattttgttattgcagtacttaataaaaattgttgatagggcccaaaaccctacagaaattctatgtctgtaaaaaccaacaaaggcattggacttgtgtgaatgtacagggtttttttagtagtaattttaaatttaaatgttttaagtgatcatcagtgttcctttttacttataaagttggattcttttttagaatttgtaataaataaaaactgctgctttaccactgtaaaa

SEQ ID NO: 345553 - DNA, 7519 bp, Homo sapiens
ctccttctgcagcgcggccggcgggcgctcctcttcccgggaccagcgaggcggcggccgctgctccagcgtcccccagccgcgggcccccgacgcgctgcagccggcagcccaccgccgccttcttggcgcgaccccaacccagccccacaggagactctctgaagaccagcaggaaagcagtgagcccttacaggtcgccttcgtcagacgtcagaatgattccttgcagagccgcgctgacctttgcccgatgtctgatccggagaaaaatcgtgaccctggacagtctagaagacaccaaattatgccgctgcttatccaccatggacctcattgccctgggcgttggaagcacccttggggccggggtttatgtcctcgctggggaggtggccaaggcagactcgggccccagcatcgtggtgtccttcctcattgctgccctggcttcagtgatggctggcctctgctatgccgaatttggggcccgtgttcccaagacggggtctgcatatttgtacacctacgtgactgtcggagagctgtgggccttcatcactggctggaatctcattttatcgtatgtgataggtacatcaagtgttgcaagagcctggagtggcacctttgatgaacttcttagcaaacagattggtcagtttttgaggacatacttcagaatgaattacactggtcttgcagaatatcccgatttttttgctgtgtgccttatattacttctagcaggtcttttgtcttttggagtaaaagagtctgcttgggtgaataaagtcttcacagctgttaatattctcgtccttctgtttgtgatggttgctgggtttgtgaaaggaaatgtggcaaactggaagattagtgaagagtttctcaaaaatatatcagcaagtgccagagagccaccttctgaaaacggaacaagtatctatggggctggtggctttatgccttatggctttacgggaacgttggctggtgctgcaacttgcttttatgcctttgtgggatttgactgcattgcaacaactggtgaagaagttcggaatccccagaaagctattcccattggaattgtgacgtctttgcttgtttgctttatggcctattttggggtctctgcagctttaacacttatgatgccgtactacctcctcgatgaaaaaagcccccttcctgtagcgtttgaatatgtgggatggggtcctgccaaatatgtcgtcgcagctggttctctctgcgccttgtcaacaagtcttcttggatccattttcccaatgcctcgtgtaatctatgctatggcggaggatgggttgcttttcaaatgtctagctcaaatcaattccaaaacgaagacaccaataattgctactttatcatcgggtgcagtggcagctttgatggcctttctgtttgacctgaaggcgcttgtggacatgatgtccattggcacactcatggcctactctctggtggcagcctgtgttctcatcctcaggtaccagcctggcttatcttacgaccagcccaaatgttctcctgagaaagatggtctgggatcgtctcccagggtaacctcgaagagtgagtcccaggtcaccatgctgcagagacagggcttcagcatgcggaccctcttctgcccctcccttctgccaacacagcagtcagcttctctcgtgagctttctggtaggattcctagctttcctcgtgttgggcctgagtgtcttgaccacttacggagttcatgccatcaccaggctggaggcctggagcctcgctctcctcgcgctgtttcttgttctcttcgttgccatcgttctcaccatctggaggcagccccagaatcagcaaaaagtagccttcatggttccattcttaccatttttgccagcgttcagcatcttggtgaacatttacttgatggtccagttaagtgcagacacttgggtcagattcagcatttggatggcaattggcttcctgatttacttttcttatggcattagacacagcctggagggtcatctgagagatgaaaacaatgaagaagatgcttatccagacaacgttcatgcagcagcagaagaaaaatctgccattcaagcaaatgaccatcacccaagaaatctcagttcacctttcatattccatgaaaagacaagtgaattctaacacttgcaggagcagagctggtcatcgtcttagcatacatatcctacactgagtaaaccgtaacgggatgtcatcagcatgctgggttgtcatgggtttgctgcatacatagttcaccctaatttatacttactcatctggacagcatctcctcagatggtgaattatgtgcacggggaaacctcctgagtggaagtttcattcatcagtgatgaatagcccccaaacagtgggagtgtgtatgtatgtgtgtatgtatgtatctatgtatatgcttgggaacatgagtgttacaagttagctggtgttttactattattgtgttacatttttccagtgtcgtcattaatcggtggcatatactgcacatactgaaatagagggaaatcactgaatgtaaagaggtttcatctatgccccctgcagttggggaaatactagtagctttaccttgtttgacttcattaatgtcagtttaggggatgccaaaaatgcagttactcatcatggtgtctgtcactggttaggggtaagatgaggggataaggaaagagacttttcaataagttgtgaatgccaacagtgggtttaatgcaaattttttttcctgtgaggtatgacagtttgctcaaacttcagccaacaggggtgtctgcttctgctgcactacacaggccaggagtggcattccatgccactagttggcatccttttgaacttttgtctcctttgcaaacagtggtcctaaaatacgaggtcttcacttgctgtgaatgacgtatccccagtcagggacttaagagaggcactgtgatatacttgggaccctttaaattaaaaagtgaagatagtcaccagggccagaaagctcatggagtggccgtaatgagaatatgtttgaagatcaaagagttagaccaatgcttgaataagtagaccccaagcatccttttctaaaaagtgacttaaaataagccaacagactctcccagaccacacaactagtggaatgattcctcctttttccattacttacttaatcacagtttagtttttttcttaacctcgtcaggcccagagttcacttctttgtttctctgtttcttttgtcttgtcttagagatgagggggctacagcagcatcatgcaaagagggaaagatgaagggatagaagaagagaaaatccccctgttctgataggaacggcctgttccattgttaaatggcaaatggcccaatttaagggctttggatctaatttgcctctgatgtttcctttggaaacatttaggaatatttttctccccctaccccataaattgtgtagcactttttattccatttgctttcaaatgactacactaagcctaataatacaagctccagtgttatacaataacccatcagtgattggggaatcaaacattttggtttaaaaaacatgattatttaaaactggaaactaaaaagaatcaaattgaattaaagctatataaacacagttaacccttgtaaatgagtaaacaaatttttacatgtaagattctctaattgtcatattttactttttaggattccctaatagtggactgtttatttgcagtgtatttgcttctcatgaactatttctcgtacaaatcattaaatagttcattggatgaggctgggtgacatttcccaggacagcatggtgaacattaccaggcatgctagctggcccgtgtaatcccaagacaaggaaaacattcgttttcctcatgggtcttccaagaaatgagctattttattgatgccattaaaaagcaagttgcgatggttttgtatagccaggagtttattgtgattaaacatcaaagaaacaggtagaaagcctgggtttctggctgctagcgttatagcatccatgacacagaactcattacggacattccacaacttccagggtgcacatggtaaaatctgaagcccagaattttctctcaagctgcgtggtttactggagagaaggagttggataagcacaggctcgggtattttggtagggactgtaggcatgctcataaatccttgctgttgtcacagtacgctgaaaacccgtttgattctatacccaatcaagaatagacccttcacacaggaaatgtgaacaattgttatatatgaacactcaaatcttttactgtaacgaaaccaagaaacttgtttagaatgtgataggcagctaaaactgttatgcccactgtgctcaatttgaagcagaattcagtgaaaaattatttttccacattgaaacactttgcagacacaaatatctatgaaaagatgctttgtcagccactgtgcctttttttctgtgaagactcaacggatgtgtgtgtttgtatgtttgttaacagttacatatgtttgtatgagtgtatatatatatctgtgtgtgtgtatctctaacgtcagtgtataagtaagttgggtttatggtgggctttgactatgtcattaggtgggtacaaaacccaactgatgtggagaaaaattgatgtttgatgttgatagatatgcttatacctaatttttagtttttaaactattttaaaatatactatgattttatatgtatatttcctatagactctttaagatgtatttataatgtttctaatatgaaatcactaaactctagtacattatagcaggtgctttgtaatctggaatggagaagaggtaggggcatttggggattcctgtttacttgctgctgccacaccttttccgactgatctgtcctggtaggtgtttattagcaaaagtcagtatcaccagctctttggcacctttctgtttctgcttgtgaattcataatgttttcaactaaattttttttttactttctcagaattacctaaatgttttgtagagttttgactagtaatcaatcaaaattatataaagtcttctccagtaattaagaaatacatatgcaaattcttttgtgattgagtaaaagcagcttaaattacttttcttttctacattaagaaatatattctcaacattttcagtgagaatttcttgtaatggcacctcaaattttatactcttaaaaaaaaacaataatttgtgaattaccaccaaaaggcaatggcagtcctacatttaagaatagagctatgcaaactctgttaaaaactatgaggaaaacttatattagaacttttgatatatactaaaatactgattatcttaatcacattttccccagagataaacattgagagaacgaaagccaaagtgtcatttaagagagatatatatgaaaaagtaacattaatatatagaactttaccatcaccagccgtagttgatagaaaatattagtttcagaattaccctcctttaaaaaataagagactatttgttttcttttaatttctatgaataaaagaaatttttaaaaactttaaaattttaaatattagtcaaaatactttttaagtcctgagtgcttacaggtagttgttaaaaaaattttaaggccaggcatggtggctcgctcacacctataatcctaggatcttgggaggtcgaggcaagctgatcgcttgagcccaggagtttaagaccggcctgagtagcatagcaagaccctgtctctacaaaaaaaacaaaaattagctgggcatggtggcatgcacatgtagtcagagctactgggggtgctgaggtgggaggatcgcttgagcccaggagagtgaggctgcagtgagctgagattacgccactgcactctagcctgggcaacggtgagaccctgcctcaaaaaaaataaaaataaaaataaaacactttaattagaatctatttttacctattttctaaatttatttaaatgcttagcaggaagcataaggaaaagccatcggcctccaatacccatgatgacagagggagcacttgagccttgccttccctcctcttaaatcagggtgtgttccgagattacagaacatcacaccttggcgtgatgaaatcatgccaagattctgactctccctttccggtgatactgctcatgatttctcctaatacgcttcaagcaactgttaccacaaaaaatacagtttccgcagggctttaaaggattgagtttagcatgtatatcatgcgttattaaagttcacgtgattcatgtgaaattaactgtcctttttgctagtgccaaaacagtgccttctctgcacactttacttgtttataaagttctcccacatgtccttaaatatcaagggggaaagtatggatattcgcgtagcaataatgccagcaaaggtcattttcattttttagtcatatagatatgaaaataagttcatatagatatgaaattgcttgactttattgttttggggagattttttttccttacatgattatattaaacactttaaaatagttgttggtgtttgtaatattcattattgtttgtatatacacggtttagtcttactgatttcaaatgcattttgttattgctcaacccaactggtaacactgtttgctgggagcattatacttaactttgattcaccatggttgatgccactgccatgatcgctgggtcttaaagagctttccctagccactgacagccccgtggagatcataatcagggccccaggctggttccaggatcaggcagcctatagagtgtgagcatctatgtgtagctacccttgttgggtgggctcttagactgatggggtaggatatgaagtgaaagacttcaaatgcaagtaaggtagtttgggctccttaattccaaacatcccatgagtatatcaagatgaataaggaccaagggacctctgtgactcatagaagggctggctgaatcctgaagtagcatagtgggacctggtctacaatttatgcacatgcactgacagccttgctgtgccacgtgtctcaccaagacccagttgggaaagagcgtcatattgccaacaggttgggtttctctggcctacacctgattaatgggccctttatctttggtgtcccctaggagtgtccagttgttttattgctgtattttgttattgcagtacttaataaaaattgttgatagggcccaaaaccctacagaaattctatgtctgtaaaaaccaacaaaggcattggacttgtgtgaatgtacagggtttttttagtagtaattttaaatttaaatgttttaagtgatcatcagtgttcctttttacttataaagttggattcttttttagaatttgtaataaataaaaactgctgctttaccactgtaaaa

SEQ ID NO: 345554 - DNA, 7512 bp, Homo sapiens
ctccttctgcagcgcggccggcgggcgctcctcttcccgggaccagcgaggcggcggccgctgctccagcgtcccccagccgcgggcccccgacgcgctgcagccggcagcccaccgccgccttcttggcgcgaccccaacccagccccacaggagactctctgaagaccagcaggaaagcagtgagcccttacaggtcgccttcgtcagacgtcagaatgattccttgcagagccgcgctgacctttgcccgatgtctgatccggagaaaaatcgtgaccctggacagtctagaagacaccaaattatgccgctgcttatccaccatggacctcattgccctgggcgttggaagcacccttggggccggggtttatgtcctcgctggggaggtggccaaggcagactcgggccccagcatcgtggtgtccttcctcattgctgccctggcttcagtgatggctggcctctgctatgccgaatttggggcccgtgttcccaagacggggtctgcatatttgtacacctacgtgactgtcggagagctgtgggccttcatcactggctggaatctcattttatcgtatgtgataggtacatcaagtgttgcaagagcctggagtggcacctttgatgaacttcttagcaaacagattggtcagtttttgaggacatacttcagaatgaattacactggtcttgcagaatatcccgatttttttgctgtgtgccttatattacttctagcaggtcttttgtcttttggagtaaaagagtctgcttgggtgaataaagtcttcacagctgttaatattctcgtccttctgtttgtgatggttgctgggtttgtgaaaggaaatgtggcaaactggaagattagtgaagagtttctcaaaaatatatcagcaagtgccagagagccaccttctgaaaacggaacaagtatctatggggctggtggctttatgccttatggctttacgggaacgttggctggtgctgcaacttgcttttatgcctttgtgggatttgactgcattgcaacaactggtgaagaagttcggaatccccagaaagctattcccattggaattgtgacgtctttgcttgtttgctttatggcctattttggggtctctgcagctttaacacttatgatgccgtactacctcctcgatgaaaaaagcccccttcctgtagcgtttgaatatgtgggatggggtcctgccaaatatgtcgtcgcagctggttctctctgcgccttgtcaacaagtcttcttggatccattttcccaatgcctcgtgtaatctatgctatggcggaggatgggttgcttttcaaatgtctagctcaaatcaattccaaaacgaagacaccaataattgctactttatcatcgggtgcagtggcagctttgatggcctttctgtttgacctgaaggcgcttgtggacatgatgtccattggcacactcatggcctactctctggtggcagcctgtgttctcatcctcaggtaccagcctggcttatcttacgaccagcccaaatgttctcctgagaaagatggtctgggatcgtctcccagggtaacctcgaagagtgagtcccaggtcaccatgctgcagagacagggcttcagcatgcggaccctcttctgcccctcccttctgccaacacagcagtcagcttctctcgtgagctttctggtaggattcctagctttcctcgtgttgggcctgagtgtcttgaccacttacggagttcatgccatcaccaggctggaggcctggagcctcgctctcctcgcgctgtttcttgttctcttcgttgccatcgttctcaccatctggaggcagccccagaatcagcaaaaagtagccttcatggttccattcttaccatttttgccagcgttcagcatcttggtgaacatttacttgatggtccagttaagtgcagacacttgggtcagattcagcatttggatggcaattggcttcctgatttacttttcttatggcattagacacagcctggagggtcatctgagagatgaaaacaatgaagaagatgcttatccagacaacgttcatgcagcagcagaagaaaaatctgccattcaagcaaatgaccatcacccaagaaatctcagttcacctttcatattccatgaaaagacaagtgaattctaacacttgcaggagcagagctggtcatcgtcttagcatacatatcctacactgagtaaaccgtaacgggatgtcatcagcatgctgggttgtcatgggtttgctgcatacatagttcaccctaatttatacttactcatctggacagcatctcctcagatggtgaattatgtgcacggggaaacctcctgagtggaagtttcattcatcagtgatgaatagcccccaaacagtgggagtgtgtatgtatgtgtgtatgtatgtatctatgtatatgcttgggaacatgagtgttacaagttagctggtgttttactattattgtgttacatttttccagtgtcgtcattaatcggtggcatatactgcacatactgaaatagagggaaatcactgaatgtaaagaggtttcatctatgccccctgcagttggggaaatactagtagctttaccttgtttgacttcattaatgtcagtttaggggatgccaaaaatgcagttactcatcatggtgtctgtcactggttaggggtaagatgaggggataaggaaagagacttttcaataagttgtgaatgccaacagtgggtttaatgcaaattttttttcctgtgaggtatgacagtttgctcaaacttcagccaacaggggtgtctgcttctgctgcactacacaggccaggagtggcattccatgccactagttggcatccttttgaacttttgtctcctttgcaaacagtggtcctaaaatacgaggtcttcacttgctgtgaatgacgtatccccagtcagggacttaagagaggcactgtgatatacttgggaccctttaaattaaaaagtgaagatagtcaccagggccagaaagctcatggagtggccgtaatgagaatatgtttgaagatcaaagagttagaccaatgcttgaataagtagaccccaagcatccttttctaaaaagtgacttaaaataagccaacagactctcccagaccacacaactagtggaatgattcctcctttttccattacttacttaatcacagtttagtttttttcttaacctcgtcaggcccagagttcacttctttgtttctctgtttcttttgtcttgtcttagagatgagggggctacagcagcatcatgcaaagagggaaagatgaagggatagaagaagagaaaatccccctgttctgataggaacggcctgttccattgttaaatggcaaatggcccaatttaagggctttggatctaatttgcctctgatgtttcctttggaaacatttaggaatatttttctccccctaccccataaattgtgtagcactttttattccatttgctttcaaatgactacactaagcctaataatacaagctccagtgttatacaataacccatcagtgattggggaatcaaacattttggtttaaaaaacatgattatttaaaactggaaactaaaaagaatcaaattgaattaaagctatataaacacagttaacccttgtaaatgagtaaacaaatttttacatgtaagattctctaattgtcatattttactttttaggattccctaatagtggactgtttatttgcagtgtatttgcttctcatgaactatttctcgtacaaatcattaaatagttcattggatgaggctgggtgacatttcccaggacagcatggtgaacattaccaggcatgctagctggcccgtgtaatcccaagacaaggaaaacattcgttttcctcatgggtcttccaagaaatgagctattttattgatgccattaaaaagcaagttgcgatggttttgtatagccaggagtttattgtgattaaacatcaaagaaacaggtagaaagcctgggtttctggctgctagcgttatagcatccatgacacagaactcattacggacattccacaacttccagggtgcacatggtaaaatctgaagcccagaattttctctcaagctgcgtggtttactggagagaaggagttggataagcacaggctcgggtattttggtagggactgtaggcatgctcataaatccttgctgttgtcacagtacgctgaaaacccgtttgattctatacccaatcaagaatagacccttcacacaggaaatgtgaacaattgttatatatgaacactcaaatcttttactgtaacgaaaccaagaaacttgtttagaatgtgataggcagctaaaactgttatgcccactgtgctcaatttgaagcagaattcagtgaaaaattatttttccacattgaaacactttgcagacacaaatatctatgaaaagatgctttgtcagccactgtgcctttttttctgtgaagactcaacggatgtgtgtgtttgtatgtttgttaacagttacatatgtttgtatgagtgtatatatatatctgtgtgtgtgtatctctaacgtcagtgtataagtaagttgggtttatggtgggctttgactatgtcattaggtgggtacaaaacccaactgatgtggagaaaaattgatgtttgatgttgatagatatgcttatacctaatttttagtttttaaactattttaaaatatactatgattttatatgtatatttcctatagactctttaagatgtatttataatgtttctaatatgaaatcactaaactctagtacattatagcaggtgctttgtaatctggaatggagaagaggtaggggcatttggggattcctgtttacttgctgctgccacaccttttccgactgatctgtcctggtaggtgtttattagcaaaagtcagtatcaccagctctttggcacctttctgtttctgcttgtgaattcataatgttttcaactaaattttttttttactttctcagaattacctaaatgttttgtagagttttgactagtaatcaatcaaaattatataaagtcttctccagtaattaagaaatacatatgcaaattcttttgtgattgagtaaaagcagcttaaattacttttcttttctacattaagaaatatattctcaacattttcagtgagaatttcttgtaatggcacctcaaattttatactcttaaaaaaaaacaataatttgtgaattaccaccaaaaggcaatggcagtcctacatttaagaatagagctatgcaaactctgttaaaaactatgaggaaaacttatattagaacttttgatatatactaaaatactgattatcttaatcacattttccccagagataaacattgagagaacgaaagccaaagtgtcatttaagagagatatatatgaaaaagtaacattaatatatagaactttaccatcaccagccgtagttgatagaaaatattagtttcagaattaccctcctttaaaaaataagagactatttgttttcttttaatttctatgaataaaagaaatttttaaaaactttaaaattttaaatattagtcaaaatactttttaagtcctgagtgcttacaggtagttgttaaaaaaattttaaggccaggcatggtggctcgctcacacctataatcctaggatcttgggaggtcgaggcaagctgatcgcttgagcccaggagtttaagaccggcctgagtagcatagcaagaccctgtctctacaaaaaaaacaaaaattagctgggcatggtggcatgcacatgtagtcagagctactgggggtgctgaggtgggaggatcgcttgagcccaggagagtgaggctgcagtgagctgagattacgccactgcactctagcctgggcaacggtgagaccctgcctcaaaaaaaataaaaataaaaataaaacactttaattagaatctatttttacctattttctaaatttatttaaatgcttagcaggaagcataaggaaaagccatcggcctccaatacccatgatgacagagggagcacttgagccttgccttccctcctcttaaatcagggtgtgttccgagattacagaacatcacaccttggcgtgatgaaatcatgccaagattctgactctccctttccggtgatactgctcatgatttctcctaatacgcttcaagcaactgttaccacaaaaaatacagtttccgcagggctttaaaggattgagtttagcatgtatatcatgcgttattaaagttcacgtgattcatgtgaaattaactgtcctttttgctaatgtccttaaatatcaagggggaaagtatggatattcgcgtagcaataatgccagcaaaggtcattttcattttttagtcatatagatatgaaaataagttcatatagatatgaaattgcttgactttattgttttggggagattttttttccttacatgattatattaaacactttaaaatagccttccggtttctggattttgagaagcctgatctgttattgttgtggttgttggtgtttgtaatattcattattgtttgtatatacacggtttagtcttactgatttcaaatgcattttgttattgctcaacccaactggtaacactgtttgctgggagcattatacttaactttgattcaccatggttgatgccactgccatgatcgctgggtcttaaagagctttccctagccactgacagccccgtggagatcataatcagggccccaggctggttccaggatcaggcagcctatagagtgtgagcatctatgtgtagctacccttgttgggtgggctcttagactgatggggtaggatatgaagtgaaagacttcaaatgcaagtaaggtagtttgggctccttaattccaaacatcccatgagtatatcaagatgaataaggaccaagggacctctgtgactcatagaagggctggctgaatcctgaagtagcatagtgggacctggtctacaatttatgcacatgcactgacagccttgctgtgccacgtgtctcaccaagacccagttgggaaagagcgtcatattgccaacaggttgggtttctctggcctacacctgattaatgggccctttatctttggtgtcccctaggagtgtccagttgttttattgctgtattttgttattgcagtacttaataaaaattgttgatagggcccaaaaccctacagaaattctatgtctgtaaaaaccaacaaaggcattggacttgtgtgaatgtacagggtttttttagtagtaattttaaatttaaatgttttaagtgatcatcagtgttcctttttacttataaagttggattcttttttagaatttgtaataaataaaaactgctgctttaccactgtaaaa

SEQ ID NO: 345555 - DNA, 6157 bp, Homo sapiens
actctagaggtccccgcatgtagtgaggacacagatggcacgtgggcagataatgccagtgagtaacactaggaggggcggttggttctaaggaggggagagtaatgagtaaataagcaatggttcttaaatccctgcaactggacatctctctcctcagtgaaaaagaagaaagggcaaggcgaagactctttgtatttagccaagtagatgtgtacagaagtcagtgttttatcagaatatgctgttttgcaccaagcaatctgggtggagcacagtgtgctgactctgttatctacacatccccctgcagctttcctcgtgttgggcctgagtgtcttgaccacttacggagttcatgccatcaccaggctggaggcctggagcctcgctctcctcgcgctgtttcttgttctcttcgttgccatcgttctcaccatctggaggcagccccagaatcagcaaaaagtagccttcatggttccattcttaccatttttgccagcgttcagcatcttggtgaacatttacttgatggtccagttaagtgcagacacttgggtcagattcagcatttggatggcaattggcttcctgatttacttttcttatggcattagacacagcctggagggtcatctgagagatgaaaacaatgaagaagatgcttatccagacaacgttcatgcagcagcagaagaaaaatctgccattcaagcaaatgaccatcacccaagaaatctcagttcacctttcatattccatgaaaagacaagtgaattctaacacttgcaggagcagagctggtcatcgtcttagcatacatatcctacactgagtaaaccgtaacgggatgtcatcagcatgctgggttgtcatgggtttgctgcatacatagttcaccctaatttatacttactcatctggacagcatctcctcagatggtgaattatgtgcacggggaaacctcctgagtggaagtttcattcatcagtgatgaatagcccccaaacagtgggagtgtgtatgtatgtgtgtatgtatgtatctatgtatatgcttgggaacatgagtgttacaagttagctggtgttttactattattgtgttacatttttccagtgtcgtcattaatcggtggcatatactgcacatactgaaatagagggaaatcactgaatgtaaagaggtttcatctatgccccctgcagttggggaaatactagtagctttaccttgtttgacttcattaatgtcagtttaggggatgccaaaaatgcagttactcatcatggtgtctgtcactggttaggggtaagatgaggggataaggaaagagacttttcaataagttgtgaatgccaacagtgggtttaatgcaaattttttttcctgtgaggtatgacagtttgctcaaacttcagccaacaggggtgtctgcttctgctgcactacacaggccaggagtggcattccatgccactagttggcatccttttgaacttttgtctcctttgcaaacagtggtcctaaaatacgaggtcttcacttgctgtgaatgacgtatccccagtcagggacttaagagaggcactgtgatatacttgggaccctttaaattaaaaagtgaagatagtcaccagggccagaaagctcatggagtggccgtaatgagaatatgtttgaagatcaaagagttagaccaatgcttgaataagtagaccccaagcatccttttctaaaaagtgacttaaaataagccaacagactctcccagaccacacaactagtggaatgattcctcctttttccattacttacttaatcacagtttagtttttttcttaacctcgtcaggcccagagttcacttctttgtttctctgtttcttttgtcttgtcttagagatgagggggctacagcagcatcatgcaaagagggaaagatgaagggatagaagaagagaaaatccccctgttctgataggaacggcctgttccattgttaaatggcaaatggcccaatttaagggctttggatctaatttgcctctgatgtttcctttggaaacatttaggaatatttttctccccctaccccataaattgtgtagcactttttattccatttgctttcaaatgactacactaagcctaataatacaagctccagtgttatacaataacccatcagtgattggggaatcaaacattttggtttaaaaaacatgattatttaaaactggaaactaaaaagaatcaaattgaattaaagctatataaacacagttaacccttgtaaatgagtaaacaaatttttacatgtaagattctctaattgtcatattttactttttaggattccctaatagtggactgtttatttgcagtgtatttgcttctcatgaactatttctcgtacaaatcattaaatagttcattggatgaggctgggtgacatttcccaggacagcatggtgaacattaccaggcatgctagctggcccgtgtaatcccaagacaaggaaaacattcgttttcctcatgggtcttccaagaaatgagctattttattgatgccattaaaaagcaagttgcgatggttttgtatagccaggagtttattgtgattaaacatcaaagaaacaggtagaaagcctgggtttctggctgctagcgttatagcatccatgacacagaactcattacggacattccacaacttccagggtgcacatggtaaaatctgaagcccagaattttctctcaagctgcgtggtttactggagagaaggagttggataagcacaggctcgggtattttggtagggactgtaggcatgctcataaatccttgctgttgtcacagtacgctgaaaacccgtttgattctatacccaatcaagaatagacccttcacacaggaaatgtgaacaattgttatatatgaacactcaaatcttttactgtaacgaaaccaagaaacttgtttagaatgtgataggcagctaaaactgttatgcccactgtgctcaatttgaagcagaattcagtgaaaaattatttttccacattgaaacactttgcagacacaaatatctatgaaaagatgctttgtcagccactgtgcctttttttctgtgaagactcaacggatgtgtgtgtttgtatgtttgttaacagttacatatgtttgtatgagtgtatatatatatctgtgtgtgtgtatctctaacgtcagtgtataagtaagttgggtttatggtgggctttgactatgtcattaggtgggtacaaaacccaactgatgtggagaaaaattgatgtttgatgttgatagatatgcttatacctaatttttagtttttaaactattttaaaatatactatgattttatatgtatatttcctatagactctttaagatgtatttataatgtttctaatatgaaatcactaaactctagtacattatagcaggtgctttgtaatctggaatggagaagaggtaggggcatttggggattcctgtttacttgctgctgccacaccttttccgactgatctgtcctggtaggtgtttattagcaaaagtcagtatcaccagctctttggcacctttctgtttctgcttgtgaattcataatgttttcaactaaattttttttttactttctcagaattacctaaatgttttgtagagttttgactagtaatcaatcaaaattatataaagtcttctccagtaattaagaaatacatatgcaaattcttttgtgattgagtaaaagcagcttaaattacttttcttttctacattaagaaatatattctcaacattttcagtgagaatttcttgtaatggcacctcaaattttatactcttaaaaaaaaacaataatttgtgaattaccaccaaaaggcaatggcagtcctacatttaagaatagagctatgcaaactctgttaaaaactatgaggaaaacttatattagaacttttgatatatactaaaatactgattatcttaatcacattttccccagagataaacattgagagaacgaaagccaaagtgtcatttaagagagatatatatgaaaaagtaacattaatatatagaactttaccatcaccagccgtagttgatagaaaatattagtttcagaattaccctcctttaaaaaataagagactatttgttttcttttaatttctatgaataaaagaaatttttaaaaactttaaaattttaaatattagtcaaaatactttttaagtcctgagtgcttacaggtagttgttaaaaaaattttaaggccaggcatggtggctcgctcacacctataatcctaggatcttgggaggtcgaggcaagctgatcgcttgagcccaggagtttaagaccggcctgagtagcatagcaagaccctgtctctacaaaaaaaacaaaaattagctgggcatggtggcatgcacatgtagtcagagctactgggggtgctgaggtgggaggatcgcttgagcccaggagagtgaggctgcagtgagctgagattacgccactgcactctagcctgggcaacggtgagaccctgcctcaaaaaaaataaaaataaaaataaaacactttaattagaatctatttttacctattttctaaatttatttaaatgcttagcaggaagcataaggaaaagccatcggcctccaatacccatgatgacagagggagcacttgagccttgccttccctcctcttaaatcagggtgtgttccgagattacagaacatcacaccttggcgtgatgaaatcatgccaagattctgactctccctttccggtgatactgctcatgatttctcctaatacgcttcaagcaactgttaccacaaaaaatacagtttccgcagggctttaaaggattgagtttagcatgtatatcatgcgttattaaagttcacgtgattcatgtgaaattaactgtcctttttgctagtgccaaaacagtgccttctctgcacactttacttgtttataaagttctcccacatgtccttaaatatcaagggggaaagtatggatattcgcgtagcaataatgccagcaaaggtcattttcattttttagtcatatagatatgaaaataagttcatatagatatgaaattgcttgactttattgttttggggagattttttttccttacatgattatattaaacactttaaaatagccttccggtttctggattttgagaagcctgatctgttattgttgtggttgttggtgtttgtaatattcattattgtttgtatatacacggtttagtcttactgatttcaaatgcattttgttattgctcaacccaactggtaacactgtttgctgggagcattatacttaactttgattcaccatggttgatgccactgccatgatcgctgggtcttaaagagctttccctagccactgacagccccgtggagatcataatcagggccccaggctggttccaggatcaggcagcctatagagtgtgagcatctatgtgtagctacccttgttgggtgggctcttagactgatggggtaggatatgaagtgaaagacttcaaatgcaagtaaggtagtttgggctccttaattccaaacatcccatgagtatatcaagatgaataaggaccaagggacctctgtgactcatagaagggctggctgaatcctgaagtagcatagtgggacctggtctacaatttatgcacatgcactgacagccttgctgtgccacgtgtctcaccaagacccagttgggaaagagcgtcatattgccaacaggttgggtttctctggcctacacctgattaatgggccctttatctttggtgtcccctaggagtgtccagttgttttattgctgtattttgttattgcagtacttaataaaaattgttgatagggcccaaaaccctacagaaattctatgtctgtaaaaaccaacaaaggcattggacttgtgtgaatgtacagggtttttttagtagtaattttaaatttaaatgttttaagtgatcatcagtgttcctttttacttataaagttggattcttttttagaatttgtaataaataaaaactgctgctttaccactgtaaaa

SEQ ID NO: 345556 - DNA, 6109 bp, Homo sapiens
tttcacttgggccaaatgtctatttgagaataaagacatagatgtttgtttggaaataggtaccagcctggcttatcttacgaccagcccaaatgttctcctgagaaagatggtctgggatcgtctcccagggtaacctcgaagagtgagtcccaggtcaccatgctgcagagacagggcttcagcatgcggaccctcttctgcccctcccttctgccaacacagcagtcagcttctctcgtgagctttctggtaggattcctagctttcctcgtgttgggcctgagtgtcttgaccacttacggagttcatgccatcaccaggctggaggcctggagcctcgctctcctcgcgctgtttcttgttctcttcgttgccatcgttctcaccatctggaggcagccccagaatcagcaaaaagtagccttcatggttccattcttaccatttttgccagcgttcagcatcttggtgaacatttacttgatggtccagttaagtgcagacacttgggtcagattcagcatttggatggcaattggcttcctgatttacttttcttatggcattagacacagcctggagggtcatctgagagatgaaaacaatgaagaagatgcttatccagacaacgttcatgcagcagcagaagaaaaatctgccattcaagcaaatgaccatcacccaagaaatctcagttcacctttcatattccatgaaaagacaagtgaattctaacacttgcaggagcagagctggtcatcgtcttagcatacatatcctacactgagtaaaccgtaacgggatgtcatcagcatgctgggttgtcatgggtttgctgcatacatagttcaccctaatttatacttactcatctggacagcatctcctcagatggtgaattatgtgcacggggaaacctcctgagtggaagtttcattcatcagtgatgaatagcccccaaacagtgggagtgtgtatgtatgtgtgtatgtatgtatctatgtatatgcttgggaacatgagtgttacaagttagctggtgttttactattattgtgttacatttttccagtgtcgtcattaatcggtggcatatactgcacatactgaaatagagggaaatcactgaatgtaaagaggtttcatctatgccccctgcagttggggaaatactagtagctttaccttgtttgacttcattaatgtcagtttaggggatgccaaaaatgcagttactcatcatggtgtctgtcactggttaggggtaagatgaggggataaggaaagagacttttcaataagttgtgaatgccaacagtgggtttaatgcaaattttttttcctgtgaggtatgacagtttgctcaaacttcagccaacaggggtgtctgcttctgctgcactacacaggccaggagtggcattccatgccactagttggcatccttttgaacttttgtctcctttgcaaacagtggtcctaaaatacgaggtcttcacttgctgtgaatgacgtatccccagtcagggacttaagagaggcactgtgatatacttgggaccctttaaattaaaaagtgaagatagtcaccagggccagaaagctcatggagtggccgtaatgagaatatgtttgaagatcaaagagttagaccaatgcttgaataagtagaccccaagcatccttttctaaaaagtgacttaaaataagccaacagactctcccagaccacacaactagtggaatgattcctcctttttccattacttacttaatcacagtttagtttttttcttaacctcgtcaggcccagagttcacttctttgtttctctgtttcttttgtcttgtcttagagatgagggggctacagcagcatcatgcaaagagggaaagatgaagggatagaagaagagaaaatccccctgttctgataggaacggcctgttccattgttaaatggcaaatggcccaatttaagggctttggatctaatttgcctctgatgtttcctttggaaacatttaggaatatttttctccccctaccccataaattgtgtagcactttttattccatttgctttcaaatgactacactaagcctaataatacaagctccagtgttatacaataacccatcagtgattggggaatcaaacattttggtttaaaaaacatgattatttaaaactggaaactaaaaagaatcaaattgaattaaagctatataaacacagttaacccttgtaaatgagtaaacaaatttttacatgtaagattctctaattgtcatattttactttttaggattccctaatagtggactgtttatttgcagtgtatttgcttctcatgaactatttctcgtacaaatcattaaatagttcattggatgaggctgggtgacatttcccaggacagcatggtgaacattaccaggcatgctagctggcccgtgtaatcccaagacaaggaaaacattcgttttcctcatgggtcttccaagaaatgagctattttattgatgccattaaaaagcaagttgcgatggttttgtatagccaggagtttattgtgattaaacatcaaagaaacaggtagaaagcctgggtttctggctgctagcgttatagcatccatgacacagaactcattacggacattccacaacttccagggtgcacatggtaaaatctgaagcccagaattttctctcaagctgcgtggtttactggagagaaggagttggataagcacaggctcgggtattttggtagggactgtaggcatgctcataaatccttgctgttgtcacagtacgctgaaaacccgtttgattctatacccaatcaagaatagacccttcacacaggaaatgtgaacaattgttatatatgaacactcaaatcttttactgtaacgaaaccaagaaacttgtttagaatgtgataggcagctaaaactgttatgcccactgtgctcaatttgaagcagaattcagtgaaaaattatttttccacattgaaacactttgcagacacaaatatctatgaaaagatgctttgtcagccactgtgcctttttttctgtgaagactcaacggatgtgtgtgtttgtatgtttgttaacagttacatatgtttgtatgagtgtatatatatatctgtgtgtgtgtatctctaacgtcagtgtataagtaagttgggtttatggtgggctttgactatgtcattaggtgggtacaaaacccaactgatgtggagaaaaattgatgtttgatgttgatagatatgcttatacctaatttttagtttttaaactattttaaaatatactatgattttatatgtatatttcctatagactctttaagatgtatttataatgtttctaatatgaaatcactaaactctagtacattatagcaggtgctttgtaatctggaatggagaagaggtaggggcatttggggattcctgtttacttgctgctgccacaccttttccgactgatctgtcctggtaggtgtttattagcaaaagtcagtatcaccagctctttggcacctttctgtttctgcttgtgaattcataatgttttcaactaaattttttttttactttctcagaattacctaaatgttttgtagagttttgactagtaatcaatcaaaattatataaagtcttctccagtaattaagaaatacatatgcaaattcttttgtgattgagtaaaagcagcttaaattacttttcttttctacattaagaaatatattctcaacattttcagtgagaatttcttgtaatggcacctcaaattttatactcttaaaaaaaaacaataatttgtgaattaccaccaaaaggcaatggcagtcctacatttaagaatagagctatgcaaactctgttaaaaactatgaggaaaacttatattagaacttttgatatatactaaaatactgattatcttaatcacattttccccagagataaacattgagagaacgaaagccaaagtgtcatttaagagagatatatatgaaaaagtaacattaatatatagaactttaccatcaccagccgtagttgatagaaaatattagtttcagaattaccctcctttaaaaaataagagactatttgttttcttttaatttctatgaataaaagaaatttttaaaaactttaaaattttaaatattagtcaaaatactttttaagtcctgagtgcttacaggtagttgttaaaaaaattttaaggccaggcatggtggctcgctcacacctataatcctaggatcttgggaggtcgaggcaagctgatcgcttgagcccaggagtttaagaccggcctgagtagcatagcaagaccctgtctctacaaaaaaaacaaaaattagctgggcatggtggcatgcacatgtagtcagagctactgggggtgctgaggtgggaggatcgcttgagcccaggagagtgaggctgcagtgagctgagattacgccactgcactctagcctgggcaacggtgagaccctgcctcaaaaaaaataaaaataaaaataaaacactttaattagaatctatttttacctattttctaaatttatttaaatgcttagcaggaagcataaggaaaagccatcggcctccaatacccatgatgacagagggagcacttgagccttgccttccctcctcttaaatcagggtgtgttccgagattacagaacatcacaccttggcgtgatgaaatcatgccaagattctgactctccctttccggtgatactgctcatgatttctcctaatacgcttcaagcaactgttaccacaaaaaatacagtttccgcagggctttaaaggattgagtttagcatgtatatcatgcgttattaaagttcacgtgattcatgtgaaattaactgtcctttttgctagtgccaaaacagtgccttctctgcacactttacttgtttataaagttctcccacatgtccttaaatatcaagggggaaagtatggatattcgcgtagcaataatgccagcaaaggtcattttcattttttagtcatatagatatgaaaataagttcatatagatatgaaattgcttgactttattgttttggggagattttttttccttacatgattatattaaacactttaaaatagccttccggtttctggattttgagaagcctgatctgttattgttgtggttgttggtgtttgtaatattcattattgtttgtatatacacggtttagtcttactgatttcaaatgcattttgttattgctcaacccaactggtaacactgtttgctgggagcattatacttaactttgattcaccatggttgatgccactgccatgatcgctgggtcttaaagagctttccctagccactgacagccccgtggagatcataatcagggccccaggctggttccaggatcaggcagcctatagagtgtgagcatctatgtgtagctacccttgttgggtgggctcttagactgatggggtaggatatgaagtgaaagacttcaaatgcaagtaaggtagtttgggctccttaattccaaacatcccatgagtatatcaagatgaataaggaccaagggacctctgtgactcatagaagggctggctgaatcctgaagtagcatagtgggacctggtctacaatttatgcacatgcactgacagccttgctgtgccacgtgtctcaccaagacccagttgggaaagagcgtcatattgccaacaggttgggtttctctggcctacacctgattaatgggccctttatctttggtgtcccctaggagtgtccagttgttttattgctgtattttgttattgcagtacttaataaaaattgttgatagggcccaaaaccctacagaaattctatgtctgtaaaaaccaacaaaggcattggacttgtgtgaatgtacagggtttttttagtagtaattttaaatttaaatgttttaagtgatcatcagtgttcctttttacttataaagttggattcttttttagaatttgtaataaataaaaactgctgctttaccactgtaaaa

SEQ ID NO: 345557 - DNA, 5109 bp, Homo sapiens
aaaacagtgggcagtgtattatgtatctatgtatatgcttgggaacatgagtgtacatactattgatttttccagtgtcgtcattaatcggtggcatatactgcacatactgaaatagagggaaatcactgaatgtaaagaggtttcatctatgccccctgcagttggggaaatactagtagctttaccttgtttgacttcattaatgtcagtttaggggatgccaaaaatgcagttactcatcatggtgtctgtcactggttaggggtaagatgaggggataaggaaagagacttttcaataagttgtgaatgccaacagtgggtttaatgcaaattttttttcctgtgaggtatgacagtttgctcaaacttcagccaacaggggtgtctgcttctgctgcactacacaggccaggagtggcattccatgccactagttggcatccttttgaacttttgtctcctttgcaaacagtggtcctaaaatacgaggtcttcacttgctgtgaatgacgtatccccagtcagggacttaagagaggcactgtgatatacttgggaccctttaaattaaaaagtgaagatagtcaccagggccagaaagctcatggagtggccgtaatgagaatatgtttgaagatcaaagagttagaccaatgcttgaataagtagaccccaagcatccttttctaaaaagtgacttaaaataagccaacagactctcccagaccacacaactagtggaatgattcctcctttttccattacttacttaatcacagtttagtttttttcttaacctcgtcaggcccagagttcacttctttgtttctctgtttcttttgtcttgtcttagagatgagggggctacagcagcatcatgcaaagagggaaagatgaagggatagaagaagagaaaatccccctgttctgataggaacggcctgttccattgttaaatggcaaatggcccaatttaagggctttggatctaatttgcctctgatgtttcctttggaaacatttaggaatatttttctccccctaccccataaattgtgtagcactttttattccatttgctttcaaatgactacactaagcctaataatacaagctccagtgttatacaataacccatcagtgattggggaatcaaacattttggtttaaaaaacatgattatttaaaactggaaactaaaaagaatcaaattgaattaaagctatataaacacagttaacccttgtaaatgagtaaacaaatttttacatgtaagattctctaattgtcatattttactttttaggattccctaatagtggactgtttatttgcagtgtatttgcttctcatgaactatttctcgtacaaatcattaaatagttcattggatgaggctgggtgacatttcccaggacagcatggtgaacattaccaggcatgctagctggcccgtgtaatcccaagacaaggaaaacattcgttttcctcatgggtcttccaagaaatgagctattttattgatgccattaaaaagcaagttgcgatggttttgtatagccaggagtttattgtgattaaacatcaaagaaacaggtagaaagcctgggtttctggctgctagcgttatagcatccatgacacagaactcattacggacattccacaacttccagggtgcacatggtaaaatctgaagcccagaattttctctcaagctgcgtggtttactggagagaaggagttggataagcacaggctcgggtattttggtagggactgtaggcatgctcataaatccttgctgttgtcacagtacgctgaaaacccgtttgattctatacccaatcaagaatagacccttcacacaggaaatgtgaacaattgttatatatgaacactcaaatcttttactgtaacgaaaccaagaaacttgtttagaatgtgataggcagctaaaactgttatgcccactgtgctcaatttgaagcagaattcagtgaaaaattatttttccacattgaaacactttgcagacacaaatatctatgaaaagatgctttgtcagccactgtgcctttttttctgtgaagactcaacggatgtgtgtgtttgtatgtttgttaacagttacatatgtttgtatgagtgtatatatatatctgtgtgtgtgtatctctaacgtcagtgtataagtaagttgggtttatggtgggctttgactatgtcattaggtgggtacaaaacccaactgatgtggagaaaaattgatgtttgatgttgatagatatgcttatacctaatttttagtttttaaactattttaaaatatactatgattttatatgtatatttcctatagactctttaagatgtatttataatgtttctaatatgaaatcactaaactctagtacattatagcaggtgctttgtaatctggaatggagaagaggtaggggcatttggggattcctgtttacttgctgctgccacaccttttccgactgatctgtcctggtaggtgtttattagcaaaagtcagtatcaccagctctttggcacctttctgtttctgcttgtgaattcataatgttttcaactaaattttttttttactttctcagaattacctaaatgttttgtagagttttgactagtaatcaatcaaaattatataaagtcttctccagtaattaagaaatacatatgcaaattcttttgtgattgagtaaaagcagcttaaattacttttcttttctacattaagaaatatattctcaacattttcagtgagaatttcttgtaatggcacctcaaattttatactcttaaaaaaaaacaataatttgtgaattaccaccaaaaggcaatggcagtcctacatttaagaatagagctatgcaaactctgttaaaaactatgaggaaaacttatattagaacttttgatatatactaaaatactgattatcttaatcacattttccccagagataaacattgagagaacgaaagccaaagtgtcatttaagagagatatatatgaaaaagtaacattaatatatagaactttaccatcaccagccgtagttgatagaaaatattagtttcagaattaccctcctttaaaaaataagagactatttgttttcttttaatttctatgaataaaagaaatttttaaaaactttaaaattttaaatattagtcaaaatactttttaagtcctgagtgcttacaggtagttgttaaaaaaattttaaggccaggcatggtggctcgctcacacctataatcctaggatcttgggaggtcgaggcaagctgatcgcttgagcccaggagtttaagaccggcctgagtagcatagcaagaccctgtctctacaaaaaaaacaaaaattagctgggcatggtggcatgcacatgtagtcagagctactgggggtgctgaggtgggaggatcgcttgagcccaggagagtgaggctgcagtgagctgagattacgccactgcactctagcctgggcaacggtgagaccctgcctcaaaaaaaataaaaataaaaataaaacactttaattagaatctatttttacctattttctaaatttatttaaatgcttagcaggaagcataaggaaaagccatcggcctccaatacccatgatgacagagggagcacttgagccttgccttccctcctcttaaatcagggtgtgttccgagattacagaacatcacaccttggcgtgatgaaatcatgccaagattctgactctccctttccggtgatactgctcatgatttctcctaatacgcttcaagcaactgttaccacaaaaaatacagtttccgcagggctttaaaggattgagtttagcatgtatatcatgcgttattaaagttcacgtgattcatgtgaaattaactgtcctttttgctagtgccaaaacagtgccttctctgcacactttacttgtttataaagttctcccacatgtccttaaatatcaagggggaaagtatggatattcgcgtagcaataatgccagcaaaggtcattttcattttttagtcatatagatatgaaaataagttcatatagatatgaaattgcttgactttattgttttggggagattttttttccttacatgattatattaaacactttaaaatagccttccggtttctggattttgagaagcctgatctgttattgttgtggttgttggtgtttgtaatattcattattgtttgtatatacacggtttagtcttactgatttcaaatgcattttgttattgctcaacccaactggtaacactgtttgctgggagcattatacttaactttgattcaccatggttgatgccactgccatgatcgctgggtcttaaagagctttccctagccactgacagccccgtggagatcataatcagggccccaggctggttccaggatcaggcagcctatagagtgtgagcatctatgtgtagctacccttgttgggtgggctcttagactgatggggtaggatatgaagtgaaagacttcaaatgcaagtaaggtagtttgggctccttaattccaaacatcccatgagtatatcaagatgaataaggaccaagggacctctgtgactcatagaagggctggctgaatcctgaagtagcatagtgggacctggtctacaatttatgcacatgcactgacagccttgctgtgccacgtgtctcaccaagacccagttgggaaagagcgtcatattgccaacaggttgggtttctctggcctacacctgattaatgggccctttatctttggtgtcccctaggagtgtccagttgttttattgctgtattttgttattgcagtacttaataaaaattgttgatagggcccaaaaccctacagaaattctatgtctgtaaaaaccaacaaaggcattggacttgtgtgaatgtacagggtttttttagtagtaattttaaatttaaatgttttaagtgatcatcagtgttcctttttacttataaagttggattcttttttagaatttgtaataaataaaaactgctgctttaccactgtaaaa

SEQ ID NO: 345558 - DNA, 7619 bp, Homo sapiens
ctccttctgcagcgcggccggcgggcgctcctcttcccgggaccagcgaggcggcggccgctgctccagcgtcccccagccgcgggcccccgacgcgctgcagccggcagcccaccgccgccttcttggcgcgaccccaacccagccccacaggagactctctgaagaccagcaggaaagcagtgagcccttacaggtcgccttcgtcagacgtcagaatgattccttgcagagccgcgctgacctttgcccgatgtctgatccggagaaaaatcgtgaccctggacagtctagaagacaccaaattatgccgctgcttatccaccatggacctcattgccctgggcgttggaagcacccttggggccggggtttatgtcctcgctggggaggtggccaaggcagactcgggccccagcatcgtggtgtccttcctcattgctgccctggcttcagtgatggctggcctctgctatgccgaatttggggcccgtgttcccaagacggggtctgcatatttgtacacctacgtgactgtcggagagctgtgggccttcatcactggctggaatctcattttatcgtatgtgataggtacatcaagtgttgcaagagcctggagtggcacctttgatgaacttcttagcaaacagattggtcagtttttgaggacatacttcagaatgaattacactggtcttgcagaatatcccgatttttttgctgtgtgccttatattacttctagcaggtcttttgtcttttggagtaaaagagtctgcttgggtgaataaagtcttcacagctgttaatattctcgtccttctgtttgtgatggttgctgggtttgtgaaaggaaatgtggcaaactggaagattagtgaagagtttctcaaaaatatatcagcaagtgccagagagccaccttctgaaaacggaacaagtatctatggggctggtggctttatgccttatggctttacgggaacgttggctggtgctgcaacttgcttttatgcctttgtgggatttgactgcattgcaacaactggtgaagaagttcggaatccccagaaagctattcccattggaattgtgacgtctttgcttgtttgctttatggcctattttggggtctctgcagctttaacacttatgatgccgtactacctcctcgatgaaaaaagcccccttcctgtagcgtttgaatatgtgggatggggtcctgccaaatatgtcgtcgcagctggttctctctgcgccttgtcaacaagtcttcttggatccattttcccaatgcctcgtgtaatctatgctatggcggaggatgggttgcttttcaaatgtctagctcaaatcaattccaaaacgaagacaccaataattgctactttatcatcgggtgcagtggcagctttgatggcctttctgtttgacctgaaggcgcttgtggacatgatgtccattggcacactcatggcctactctctggtggcagcctgtgttctcatcctcaggtaccagcctggcttatcttacgaccagcccaaatgttctcctgagaaagatggtctgggatcgtctcccagggtaacctcgaagagtgagtcccaggtcaccatgctgcagagacagggcttcagcatgcggaccctcttctgcccctcccttctgccaacacagcagtcagcttctctcgtgagctttctggtaggattcctagctttcctcgtgttgggcctgagtgtcttgaccacttacggagttcatgccatcaccaggctggaggcctggagcctcgctctcctcgcgctgtttcttgttctcttcgttgccatcgttctcaccatctggaggcagccccagaatcagcaaaaagtagccttcatggttccattcttaccatttttgccagcgttcagcatcttggtgaacatttacttgatggtccagttaagtgcagacacttgggtcagattcagcatttggatggcaattggcttcctgatttacttttcttatggcattagacacagcctggagggtcatctgagagatgaaaacaatgaagaagatgcttatccagacaacgttcatgcagcagcagaagaaaaatctgccattcaagcaaatgaccatcacccaagaaatctcagttcacctttcatattccatgaaaagacaagtgaattctaacacttgcaggagcagagctggtcatcgtcttagcatacatatcctacactgagtaaaccgtaacgggatgtcatcagcatgctgggttgtcatgggtttgctgcatacatagttcaccctaatttatacttactcatctggacagcatctcctcagatggtgaattatgtgcacggggaaacctcctgagtggaagtttcattcatcagtgatgaatagcccccaaacagtgggagtgtgtatgtatgtgtgtatgtatgtatctatgtatatgcttgggaacatgagtgttacaagttagctggtgttttactattattgtgttacatttttccagtgtcgtcattaatcggtggcatatactgcacatactgaaatagagggaaatcactgaatgtaaagaggtttcatctatgccccctgcagttggggaaatactagtagctttaccttgtttgacttcattaatgtcagtttaggggatgccaaaaatgcagttactcatcatggtgtctgtcactggttaggggtaagatgaggggataaggaaagagacttttcaataagttgtgaatgccaacagtgggtttaatgcaaattttttttcctgtgaggtatgacagtttgctcaaacttcagccaacaggggtgtctgcttctgctgcactacacaggccaggagtggcattccatgccactagttggcatccttttgaacttttgtctcctttgcaaacagtggtcctaaaatacgaggtcttcacttgctgtgaatgacgtatccccagtcagggacttaagagaggcactgtgatatacttgggaccctttaaattaaaaagtgaagatagtcaccagggccagaaagctcatggagtggccgtaatgagaatatgtttgaagatcaaagagttagaccaatgcttgaataagtagaccccaagcatccttttctaaaaagtgacttaaaataagccaacagactctcccagaccacacaactagtggaatgattcctcctttttccattacttacttaatcacagtttagtttttttcttaacctcgtcaggcccagagttcacttctttgtttctctgtttcttttgtcttgtcttagagatgagggggctacagcagcatcatgcaaagagggaaagatgaagggatagaagaagagaaaatccccctgttctgataggaacggcctgttccattgttaaatggcaaatggcccaatttaagggctttggatctaatttgcctctgatgtttcctttggaaacatttaggaatatttttctccccctaccccataaattgtgtagcactttttattccatttgctttcaaatgactacactaagcctaataatacaagctccagtgttatacaataacccatcagtgattggggaatcaaacattttggtttaaaaaacatgattatttaaaactggaaactaaaaagaatcaaattgaattaaagctatataaacacagttaacccttgtaaatgagtaaacaaatttttacatgtaagattctctaattgtcatattttactttttaggattccctaatagtggactgtttatttgcagtgtatttgcttctcatgaactatttctcgtacaaatcattaaatagttcattggatgaggctgggtgacatttcccaggacagcatggtgaacattaccaggcatgctagctggcccgtgtaatcccaagacaaggaaaacattcgttttcctcatgggtcttccaagaaatgagctattttattgatgccattaaaaagcaagttgcgatggttttgtatagccaggagtttattgtgattaaacatcaaagaaacaggtagaaagcctgggtttctggctgctagcgttatagcatccatgacacagaactcattacggacattccacaacttccagggtgcacatggtaaaatctgaagcccagaattttctctcaagctgcgtggtttactggagagaaggagttggataagcacaggctcgggtattttggtagggactgtaggcatgctcataaatccttgctgttgtcacagtacgctgaaaacccgtttgattctatacccaatcaagaatagacccttcacacaggaaatgtgaacaattgttatatatgaacactcaaatcttttactgtaacgaaaccaagaaacttgtttagaatgtgataggcagctaaaactgttatgcccactgtgctcaatttgaagcagaattcagtgaaaaattatttttccacattgaaacactttgcagacacaaatatctatgaaaagatgctttgtcagccactgtgcctttttttctgtgaagactcaacggatgtgtgtgtttgtatgtttgttaacagttacatatgtttgtatgagtgtatatatatatctgtgtgtgtgtatctctaacgtcagtgtataagtaagttgggtttatggtgggctttgactatgtcattaggtgggtacaaaacccaactgatgtggagaaaaattgatgtttgatgttgatagatatgcttatacctaatttttagtttttaaactattttaaaatatactatgattttatatgtatatttcctatagactctttaagatgtatttataatgtttctaatatgaaatcactaaactctagtacattatagcaggtgctttgtaatctggaatggagaagaggtaggggcatttggggattcctgtttacttgctgctgccacaccttttccgactgatctgtcctggtaggtgtttattagcaaaagtcagtatcaccagctctttggcacctttctgtttctgcttgtgaattcataatgttttcaactaaattttttttttactttctcagaattacctaaatgttttgtagagttttgactagtaatcaatcaaaattatataaagtcttctccagtaattaagaaatacatatgcaaattcttttgtgattgagtaaaagcagcttaaattacttttcttttctacattaagaaatatattctcaacattttcagtgagaatttcttgtaatggcacctcaaattttatactcttaaaaaaaaacaataatttgtgaattaccaccaaaaggcaatggcagtcctacatttaagaatagagctatgcaaactctgttaaaaactatgaggaaaacttatattagaacttttgatatatactaaaatactgattatcttaatcacattttccccagagataaacattgagagaacgaaagccaaagtgtcatttaagagagatatatatgaaaaagtaacattaatatatagaactttaccatcaccagccgtagttgatagaaaatattagtttcagaattaccctcctttaaaaaataagagactatttgttttcttttaatttctatgaataaaagaaatttttaaaaactttaaaattttaaatattagtcaaaatactttttaagtcctgagtgcttacaggtagttgttaaaaaaattttaaggccaggcatggtggctcgctcacacctataatcctaggatcttgggaggtcgaggcaagctgatcgcttgagcccaggagtttaagaccggcctgagtagcatagcaagaccctgtctctacaaaaaaaacaaaaattagctgggcatggtggcatgcacatgtagtcagagctactgggggtgctgaggtgggaggatcgcttgagcccaggagagtgaggctgcagtgagctgagattacgccactgcactctagcctgggcaacggtgagaccctgcctcaaaaaaaataaaaataaaaataaaacactttaattagaatctatttttacctattttctaaatttatttaaatgcttagcaggaagcataaggaaaagccatcggcctccaatacccatgatgacagagggagcacttgagccttgccttccctcctcttaaatcagggtgtgttccgagattacagaacatcacaccttggcgtgatgaaatcatgccaagattctgactctccctttccggtgatactgctcatgatttctcctaatacgcttcaagcaactgttaccacaaaaaatacagtttccgcagggctttaaaggattgagtttagcatgtatatcatgcgttattaaagttcacgtgattcatgtgaaattaactgtcctttttgctagtgccaaaacagtgccttctctgcacactttacttgtttataaagttctcccacatgtccttaaatatcaagggggaaagtatggatattcgcgtagcaataatgccagcaaaggtcattttcattttttagtcatatagatatgaaaataagttcatatagatatgaaattgcttgactttattgttttggggagattttttttccttacatgattatattaaacactttaaaatagccttccggtttctggattttgagaagcctgatctgttattgttgtggttgttggtgtttgtaatattcattattgtttgtatatacacggtttagtcttactgatttcaaatgcattttgttattgctcaacccaactggtaacactgtttgctgggagcattatacttaactttgattcaccatggttgatgccactgccatgatcgctgggtcttaaagagctttccctagccactgacagccccgtggagatcataatcagggccccaggctggttccaggatcaggcagcctatagagtgtgagcatctatgtgtagctacccttgttgggtgggctcttagactgatggggtaggatatgaagtgaaagacttcaaatgcaagtaaggtagtttgggctccttaattccaaacatcccatgagtatatcaagatgaataaggaccaagggacctctgtgactcatagaagggctggctgaatcctgaagtagcatagtgggacctggtctacaatttatgcacatgcactgacagccttgctgtgccacgtgtctcaccaagacccagttgggaaagagcgtcatattgccaacaggttgggtttctctggcctacacctgattaatgggccctttatctttggtgtcccctaggagtgtccagttgttttattgctgtattttgttattgcagtacttaataaaaattgttgatagggcccaaaaccctacagaaattctatgtctgtaaaaaccaacaaaggcattggacttgtgtgaatgtacagggtttttttagtagtaattttaaatttaaatgttttaagtgatcatcagtgttcctttttacttataaagttggattcttttttagaatttgtaataaataaaaactgctgctttaccactgtaaaatatgctttctgatgtggtgtatttttaaaataaattttaatatgtaataatat

SEQ ID NO: 345559 - DNA, 7649 bp, Homo sapiens
  misc_feature (7408)..(7408): n is a, c, g, or t
  misc_feature (7443)..(7444): n is a, c, g, or t
  misc_feature (7446)..(7446): n is a, c, g, or t
  misc_feature (7538)..(7538): n is a, c, g, or t
  misc_feature (7577)..(7577): n is a, c, g, or t
  misc_feature (7580)..(7580): n is a, c, g, or t
  misc_feature (7582)..(7583): n is a, c, g, or t
  misc_feature (7585)..(7585): n is a, c, g, or t
  misc_feature (7615)..(7615): n is a, c, g, or t
  misc_feature (7619)..(7619): n is a, c, g, or t
ctccttctgcagcgcggccggcgggcgctcctcttcccgggaccagcgaggcggcggccgctgctccagcgtcccccagccgcgggcccccgacgcgctgcagccggcagcccaccgccgccttcttggcgcgaccccaacccagccccacaggagactctctgaagaccagcaggaaagcagtgagcccttacaggtcgccttcgtcagacgtcagaatgattccttgcagagccgcgctgacctttgcccgatgtctgatccggagaaaaatcgtgaccctggacagtctagaagacaccaaattatgccgctgcttatccaccatggacctcattgccctgggcgttggaagcacccttggggccggggtttatgtcctcgctggggaggtggccaaggcagactcgggccccagcatcgtggtgtccttcctcattgctgccctggcttcagtgatggctggcctctgctatgccgaatttggggcccgtgttcccaagacggggtctgcatatttgtacacctacgtgactgtcggagagctgtgggccttcatcactggctggaatctcattttatcgtatgtgataggtacatcaagtgttgcaagagcctggagtggcacctttgatgaacttcttagcaaacagattggtcagtttttgaggacatacttcagaatgaattacactggtcttgcagaatatcccgatttttttgctgtgtgccttatattacttctagcaggtcttttgtcttttggagtaaaagagtctgcttgggtgaataaagtcttcacagctgttaatattctcgtccttctgtttgtgatggttgctgggtttgtgaaaggaaatgtggcaaactggaagattagtgaagagtttctcaaaaatatatcagcaagtgccagagagccaccttctgaaaacggaacaagtatctatggggctggtggctttatgccttatggctttacgggaacgttggctggtgctgcaacttgcttttatgcctttgtgggatttgactgcattgcaacaactggtgaagaagttcggaatccccagaaagctattcccattggaattgtgacgtctttgcttgtttgctttatggcctattttggggtctctgcagctttaacacttatgatgccgtactacctcctcgatgaaaaaagcccccttcctgtagcgtttgaatatgtgggatggggtcctgccaaatatgtcgtcgcagctggttctctctgcgccttgtcaacaagtcttcttggatccattttcccaatgcctcgtgtaatctatgctatggcggaggatgggttgcttttcaaatgtctagctcaaatcaattccaaaacgaagacaccaataattgctactttatcatcgggtgcagtggcagctttgatggcctttctgtttgacctgaaggcgcttgtggacatgatgtccattggcacactcatggcctactctctggtggcagcctgtgttctcatcctcaggtaccagcctggcttatcttacgaccagcccaaatgttctcctgagaaagatggtctgggatcgtctcccagggtaacctcgaagagtgagtcccaggtcaccatgctgcagagacagggcttcagcatgcggaccctcttctgcccctcccttctgccaacacagcagtcagcttctctcgtgagctttctggtaggattcctagctttcctcgtgttgggcctgagtgtcttgaccacttacggagttcatgccatcaccaggctggaggcctggagcctcgctctcctcgcgctgtttcttgttctcttcgttgccatcgttctcaccatctggaggcagccccagaatcagcaaaaagtagccttcatggttccattcttaccatttttgccagcgttcagcatcttggtgaacatttacttgatggtccagttaagtgcagacacttgggtcagattcagcatttggatggcaattggcttcctgatttacttttcttatggcattagacacagcctggagggtcatctgagagatgaaaacaatgaagaagatgcttatccagacaacgttcatgcagcagcagaagaaaaatctgccattcaagcaaatgaccatcacccaagaaatctcagttcacctttcatattccatgaaaagacaagtgaattctaacacttgcaggagcagagctggtcatcgtcttagcatacatatcctacactgagtaaaccgtaacgggatgtcatcagcatgctgggttgtcatgggtttgctgcatacatagttcaccctaatttatacttactcatctggacagcatctcctcagatggtgaattatgtgcacggggaaacctcctgagtggaagtttcattcatcagtgatgaatagcccccaaacagtgggagtgtgtatgtatgtgtgtatgtatgtatctatgtatatgcttgggaacatgagtgttacaagttagctggtgttttactattattgtgttacatttttccagtgtcgtcattaatcggtggcatatactgcacatactgaaatagagggaaatcactgaatgtaaagaggtttcatctatgccccctgcagttggggaaatactagtagctttaccttgtttgacttcattaatgtcagtttaggggatgccaaaaatgcagttactcatcatggtgtctgtcactggttaggggtaagatgaggggataaggaaagagacttttcaataagttgtgaatgccaacagtgggtttaatgcaaattttttttcctgtgaggtatgacagtttgctcaaacttcagccaacaggggtgtctgcttctgctgcactacacaggccaggagtggcattccatgccactagttggcatccttttgaacttttgtctcctttgcaaacagtggtcctaaaatacgaggtcttcacttgctgtgaatgacgtatccccagtcagggacttaagagaggcactgtgatatacttgggaccctttaaattaaaaagtgaagatagtcaccagggccagaaagctcatggagtggccgtaatgagaatatgtttgaagatcaaagagttagaccaatgcttgaataagtagaccccaagcatccttttctaaaaagtgacttaaaataagccaacagactctcccagaccacacaactagtggaatgattcctcctttttccattacttacttaatcacagtttagtttttttcttaacctcgtcaggcccagagttcacttctttgtttctctgtttcttttgtcttgtcttagagatgagggggctacagcagcatcatgcaaagagggaaagatgaagggatagaagaagagaaaatccccctgttctgataggaacggcctgttccattgttaaatggcaaatggcccaatttaagggctttggatctaatttgcctctgatgtttcctttggaaacatttaggaatatttttctccccctaccccataaattgtgtagcactttttattccatttgctttcaaatgactacactaagcctaataatacaagctccagtgttatacaataacccatcagtgattggggaatcaaacattttggtttaaaaaacatgattatttaaaactggaaactaaaaagaatcaaattgaattaaagctatataaacacagttaacccttgtaaatgagtaaacaaatttttacatgtaagattctctaattgtcatattttactttttaggattccctaatagtggactgtttatttgcagtgtatttgcttctcatgaactatttctcgtacaaatcattaaatagttcattggatgaggctgggtgacatttcccaggacagcatggtgaacattaccaggcatgctagctggcccgtgtaatcccaagacaaggaaaacattcgttttcctcatgggtcttccaagaaatgagctattttattgatgccattaaaaagcaagttgcgatggttttgtatagccaggagtttattgtgattaaacatcaaagaaacaggtagaaagcctgggtttctggctgctagcgttatagcatccatgacacagaactcattacggacattccacaacttccagggtgcacatggtaaaatctgaagcccagaattttctctcaagctgcgtggtttactggagagaaggagttggataagcacaggctcgggtattttggtagggactgtaggcatgctcataaatccttgctgttgtcacagtacgctgaaaacccgtttgattctatacccaatcaagaatagacccttcacacaggaaatgtgaacaattgttatatatgaacactcaaatcttttactgtaacgaaaccaagaaacttgtttagaatgtgataggcagctaaaactgttatgcccactgtgctcaatttgaagcagaattcagtgaaaaattatttttccacattgaaacactttgcagacacaaatatctatgaaaagatgctttgtcagccactgtgcctttttttctgtgaagactcaacggatgtgtgtgtttgtatgtttgttaacagttacatatgtttgtatgagtgtatatatatatctgtgtgtgtgtatctctaacgtcagtgtataagtaagttgggtttatggtgggctttgactatgtcattaggtgggtacaaaacccaactgatgtggagaaaaattgatgtttgatgttgatagatatgcttatacctaatttttagtttttaaactattttaaaatatactatgattttatatgtatatttcctatagactctttaagatgtatttataatgtttctaatatgaaatcactaaactctagtacattatagcaggtgctttgtaatctggaatggagaagaggtaggggcatttggggattcctgtttacttgctgctgccacaccttttccgactgatctgtcctggtaggtgtttattagcaaaagtcagtatcaccagctctttggcacctttctgtttctgcttgtgaattcataatgttttcaactaaattttttttttactttctcagaattacctaaatgttttgtagagttttgactagtaatcaatcaaaattatataaagtcttctccagtaattaagaaatacatatgcaaattcttttgtgattgagtaaaagcagcttaaattacttttcttttctacattaagaaatatattctcaacattttcagtgagaatttcttgtaatggcacctcaaattttatactcttaaaaaaaaacaataatttgtgaattaccaccaaaaggcaatggcagtcctacatttaagaatagagctatgcaaactctgttaaaaactatgaggaaaacttatattagaacttttgatatatactaaaatactgattatcttaatcacattttccccagagataaacattgagagaacgaaagccaaagtgtcatttaagagagatatatatgaaaaagtaacattaatatatagaactttaccatcaccagccgtagttgatagaaaatattagtttcagaattaccctcctttaaaaaataagagactatttgttttcttttaatttctatgaataaaagaaatttttaaaaactttaaaattttaaatattagtcaaaatactttttaagtcctgagtgcttacaggtagttgttaaaaaaattttaaggccaggcatggtggctcgctcacacctataatcctaggatcttgggaggtcgaggcaagctgatcgcttgagcccaggagtttaagaccggcctgagtagcatagcaagaccctgtctctacaaaaaaaacaaaaattagctgggcatggtggcatgcacatgtagtcagagctactgggggtgctgaggtgggaggatcgcttgagcccaggagagtgaggctgcagtgagctgagattacgccactgcactctagcctgggcaacggtgagaccctgcctcaaaaaaaataaaaataaaaataaaacactttaattagaatctatttttacctattttctaaatttatttaaatgcttagcaggaagcataaggaaaagccatcggcctccaatacccatgatgacagagggagcacttgagccttgccttccctcctcttaaatcagggtgtgttccgagattacagaacatcacaccttggcgtgatgaaatcatgccaagattctgactctccctttccggtgatactgctcatgatttctcctaatacgcttcaagcaactgttaccacaaaaaatacagtttccgcagggctttaaaggattgagtttagcatgtatatcatgcgttattaaagttcacgtgattcatgtgaaattaactgtcctttttgctagtgccaaaacagtgccttctctgcacactttacttgtttataaagttctcccacatgtccttaaatatcaagggggaaagtatggatattcgcgtagcaataatgccagcaaaggtcattttcattttttagtcatatagatatgaaaataagttcatatagatatgaaattgcttgactttattgttttggggagattttttttccttacatgattatattaaacactttaaaatagccttccggtttctggattttgagaagcctgatctgttattgttgtggttgttggtgtttgtaatattcattattgtttgtatatacacggtttagtcttactgatttcaaatgcattttgttattgctcaacccaactggtaacactgtttgctgggagcattatacttaactttgattcaccatggttgatgccactgccatgatcgctgggtcttaaagagctttccctagccactgacagccccgtggagatcataatcagggccccaggctggttccaggatcaggcagcctatagagtgtgagcatctatgtgtagctacccttgttgggtgggctcttagactgatggggtaggatatgaagtgaaagacttcaaatgcaagtaaggtagtttgggctccttaattccaaacatcccatgagtatatcaagatgaataaggaccaagggacctctgtgactcatagaagggctggctgaatcctgaagtagcatagtgggacctggtctacaatttatgcacatgcactgacagccttgctgtgccacgtgtctcaccaagacccagttgggaaagagcgtcatattgccaacaggttgggtttctctggcctacacctgattaatgggccctttatctttggtgtcccctaggagtgtccagttgttttattgctgtattttgttattgcagtacttaataaaaattgttgatagggcccaaaaccctacagaaattctatgtctgtacccttgnttaccccactcatttcttcacatacacgttttccnntnccctaataatataaatgttttaagtgatcatcagtgttccttttcaccctccagttgccttcttttctagaataaataataaataatacctntttcttttcctctgtaaatccagtactgttcctatatcnaangnncngttcacatccatgtcaaatcaacccccccncccntctcccgtaatttcccaataccctcaacat

SEQ ID NO: 345560 - DNA, 7013 bp, Homo sapiens
ctccttctgcagcgcggccggcgggcgctcctcttcccgggaccagcgaggcggcggccgctgctccagcgtcccccagccgcgggcccccgacgcgctgcagccggcagcccaccgccgccttcttggcgcgaccccaacccagccccacaggagactctctgaagaccagcaggaaagcagtgagcccttacaggtcgccttcgtcagacgtcagaatgattccttgcagagccgcgctgacctttgcccgatgtctgatccggagaaaaatcgtgaccctggacagtctagaagacaccaaattatgccgctgcttatccaccatggacctcattgccctgggcgttggaagcacccttggggccggggtttatgtcctcgctggggaggtggccaaggcagactcgggccccagcatcgtggtgtccttcctcattgctgccctggcttcagtgatggctggcctctgctatgccgaatttggggcccgtgttcccaagacggggtctgcatatttgtacacctacgtgactgtcggagagctgtgggccttcatcactggctggaatctcattttatcgtatgtgataggtacatcaagtgttgcaagagcctggagtggcacctttgatgaacttcttagcaaacagattggtcagtttttgaggacatacttcagaatgaattacactggtcttgcagaatatcccgatttttttgctgtgtgccttatattacttctagcaggtcttttgtcttttggagtaaaagagtctgcttgggtgaataaagtcttcacagctgttaatattctcgtccttctgtttgtgatggttgctgggtttgtgaaaggaaatgtggcaaactggaagattagtgaagagtttctcaaaaatatatcagcaagtgccagagagccaccttctgaaaacggaacaagtatctatggggctggtggctttatgccttatggctttacgggaacgttggctggtgctgcaacttgcttttatgcctttgtgggatttgactgcattgcaacaactggtgaagaagttcggaatccccagaaagctattcccattggaattgtgacgtctttgcttgtttgctttatggcctattttggggtctctgcagctttaacacttatgatgccgtactacctcctcgatgaaaaaagcccccttcctgtagcgtttgaatatgtgggatggggtcctgccaaatatgtcgtcgcagctggttctctctgcgccttgtcaacaagtcttcttggatccattttcccaatgcctcgtgtaatctatgctatggcggaggatgggttgcttttcaaatgtctagctcaaatcaattccaaaacgaagacaccaataattgctactttatcatcgggtgcagtggcagctttgatggcctttctgtttgacctgaaggcgcttgtggacatgatgtccattggcacactcatggcctactctctggtggcagcctgtgttctcatcctcaggtaccagcctggcttatcttacgaccagcccaaatgttctcctgagaaagatggtctgggatcgtctcccagggtaacctcgaagagtgagtcccaggtcaccatgctgcagagacagggcttcagcatgcggaccctcttctgcccctcccttctgccaacacagcagtcagcttctctcgtgagctttctggtaggattcctagctttcctcgtgttgggcctgagtgtcttgaccacttacggagttcatgccatcaccaggctggaggcctggagcctcgctctcctcgcgctgtttcttgttctcttcgttgccatcgttctcaccatctggaggcagccccagaatcagcaaaaagtagccttcatggttccattcttaccatttttgccagcgttcagcatcttggtgaacatttacttgatggtccagttaagtgcagacacttgggtcagattcagcatttggatggcaattggcttcctgatttacttttcttatggcattagacacagcctggagggtcatctgagagatgaaaacaatgaagaagatgcttatccagacaacgttcatgcagcagcagaagaaaaatctgccattcaagcaaatgaccatcacccaagaaatctcagttcacctttcatattccatgaaaagacaagtgaattctaacacttgcaggagcagagctggtcatcgtcttagcatacatatcctacactgagtaaaccgtaacgggatgtcatcagcatgctgggttgtcatgggtttgctgcatacatagttcaccctaatttatacttactcatctggacagcatctcctcagatggtgaattatgtgcacggggaaacctcctgagtggaagtttcattcatcagtgatgaatagcccccaaacagtgggagtgtgtatgtatgtgtgtatgtatgtatctatgtatatgcttgggaacatgagtgttacaagttagctggtgttttactattattgtgttacatttttccagtgtcgtcattaatcggtggcatatactgcacatactgaaatagagggaaatcactgaatgtaaagaggtttcatctatgccccctgcagttggggaaatactagtagctttaccttgtttgacttcattaatgtcagtttaggggatgccaaaaatgcagttactcatcatggtgtctgtcactggttaggggtaagatgaggggataaggaaagagacttttcaataagttgtgaatgccaacagtgggtttaatgcaaattttttttcctgtgaggtatgacagtttgctcaaacttcagccaacaggggtgtctgcttctgctgcactacacaggccaggagtggcattccatgccactagttggcatccttttgaacttttgtctcctttgcaaacagtggtcctaaaatacgaggtcttcacttgctgtgaatgacgtatccccagtcagggacttaagagaggcactgtgatatacttgggaccctttaaattaaaaagtgaagatagtcaccagggccagaaagctcatggagtggccgtaatgagaatatgtttgaagatcaaagagttagaccaatgcttgaataagtagaccccaagcatccttttctaaaaagtgacttaaaataagccaacagactctcccagaccacacaactagtggaatgattcctcctttttccattacttacttaatcacagtttagtttttttcttaacctcgtcaggcccagagttcacttctttgtttctctgtttcttttgtcttgtcttagagatgagggggctacagcagcatcatgcaaagagggaaagatgaagggatagaagaagagaaaatccccctgttctgataggaacggcctgttccattgttaaatggcaaatggcccaatttaagggctttggatctaatttgcctctgatgtttcctttggaaacatttaggaatatttttctccccctaccccataaattgtgtagcactttttattccatttgctttcaaatgactacactaagcctaataatacaagctccagtgttatacaataacccatcagtgattggggaatcaaacattttggtttaaaaaacatgattatttaaaactggaaactaaaaagaatcaaattgaattaaagctatataaacacagttaacccttgtaaatgagtaaacaaatttttacatgtaagattctctaattgtcatattttactttttaggattccctaatagtggactgtttatttgcagtgtatttgcttctcatgaactatttctcgtacaaatcattaaatagttcattggatgaggctgggtgacatttcccaggacagcatggtgaacattaccaggcatgctagctggcccgtgtaatcccaagacaaggaaaacattcgttttcctcatgggtcttccaagaaatgagctattttattgatgccattaaaaagcaagttgcgatggttttgtatagccaggagtttattgtgattaaacatcaaagaaacaggtagaaagcctgggtttctggctgctagcgttatagcatccatgacacagaactcattacggacattccacaacttccagggtgcacatggtaaaatctgaagcccagaattttctctcaagctgcgtggtttactggagagaaggagttggataagcacaggctcgggtattttggtagggactgtaggcatgctcataaatccttgctgttgtcacagtacgctgaaaacccgtttgattctatacccaatcaagaatagacccttcacacaggaaatgtgaacaattgttatatatgaacactcaaatcttttactgtaacgaaaccaagaaacttgtttagaatgtgataggcagctaaaactgttatgcccactgtgctcaatttgaagcagaattcagtgaaaaattatttttccacattgaaacactttgcagacacaaatatctatgaaaagatgctttgtcagccactgtgcctttttttctgtgaagactcaacggatgtgtgtgtttgtatgtttgttaacagttacatatgtttgtatgagtgtatatatatatctgtgtgtgtgtatctctaacgtcagtgtataagtaagttgggtttatggtgggctttgactatgtcattaggtgggtacaaaacccaactgatgtggagaaaaattgatgtttgatgttgatagatatgcttatacctaatttttagtttttaaactattttaaaatatactatgattttatatgtatatttcctatagactctttaagatgtatttataatgtttctaatatgaaatcactaaactctagtacattatagcaggtgctttgtaatctggaatggagaagaggtaggggcatttggggattcctgtttacttgctgctgccacaccttttccgactgatctgtcctggtaggtgtttattagcaaaagtcagtatcaccagctctttggcacctttctgtttctgcttgtgaattcataatgttttcaactaaattttttttttactttctcagaattacctaaatgttttgtagagttttgactagtaatcaatcaaaattatataaagtcttctccagtaattaagaaatacatatgcaaattcttttgtgattgagtaaaagcagcttaaattacttttcttttctacattaagaaatatattctcaacattttcagtgagaatttcttgtaatggcacctcaaattttatactcttaaaaaaaaacaataatttgtgaattaccaccaaaaggcaatggcagtcctacatttaagaatagagctatgcaaactctgttaaaaactatgaggaaaacttatattagaacttttgatatatactaaaatactgattatcttaatcacattttccccagagataaacattgagagaacgaaagccaaagtgtcatttaagagagatatatatgaaaaagtaacattaatatatagaactttaccatcaccagccgtagttgatagaaaatattagtttcagaattaccctcctttaaaaaataagagactatttgttttcttttaatttctatgaataaaagaaatttttaaaaactttaaaattttaaatattagtcaaaatactttttaagtcctgagtgcttacaggtagttgttaaaaaaattttaaggccaggcatggtggctcgctcacacctataatcctaggatcttgggaggtcgaggcaagctgatcgcttgagcccaggagtttaagaccggcctgagtagcatagcaagaccctgtctctacaaaaaaaacaaaaattagctgggcatggtggcatgcacatgtagtcagagctactgggggtgctgaggtgggaggatcgcttgagcccaggagagtgaggctgcagtgagctgagattacgccactgcactctagcctgggcaacggtgagaccctgcctcaaaaaaaataaaaataaaaataaaacactttaattagaatctatttttacctattttctaaatttatttaaatgcttagcaggaagcataaggaaaagccatcggcctccaatacccatgatgacagagggagcacttgagccttgccttccctcctcttaaatcagggtgtgttccgagattacagaacatcacaccttggcgtgatgaaatcatgccaagattctgactctccctttccggtgatactgctcatgatttctcctaatacgcttcaagcaactgttaccacaaaaaatacagtttccgcagggctttaaaggattgagtttagcatgtatatcatgcgttattaaagttcacgtgattcatgtgaaattaactgtcctttttgctagtgccaaaacagtgccttctctgcacactttacttgtttataaagttctcccacatgtccttaaatatcaagggggaaagtatggatattcgcgtagcaataatgccagcaaaggtcattttcattttttagtcatatagatatgaaaataagttcatatagatatgaaattgcttgactttattgttttggggagattttttttccttacatgattatattaaacactttaaaataggtttctctggcctacacctgattaatgggccctttatctttggtgtcccctaggagtgtccagttgttttattgctgtattttgttattgcagtacttaataaaaattgttgatagggcccaaaaccctacagaaattctatgtctgtaaaaaccaacaaaggcattggacttgtgtgaatgtacagggtttttttagtagtaattttaaatttaaatgttttaagtgatcatcagtgttcctttttacttataaagttggattcttttttagaatttgtaataaataaaaactgctgctttaccactgtaaaatatgctttctgatgtggtgtatttttaaaataaattttaatatgtaataatat

SEQ ID NO: 345561 - DNA, 5974 bp, Homo sapiens
  misc_feature (5922)..(5922): n is a, c, g, or t
ctccttctgcagcgcggccggcgggcgctcctcttcccgggaccagcgaggcggcggccgctgctccagcgtcccccagccgcgggcccccgacgcgctgcagccggcagcccaccgccgccttcttggcgcgaccccaacccagccccacaggagactctctgaagaccagcaggaaagcagtgagcccttacaggtcgccttcgtcagacgtcagaatgattccttgcagagccgcgctgacctttgcccgatgtctgatccggagaaaaatcgtgaccctggacagtctagaagacaccaaattatgccgctgcttatccaccatggacctcattgccctgggcgttggaagcacccttggggccggggtttatgtcctcgctggggaggtggccaaggcagactcgggccccagcatcgtggtgtccttcctcattgctgccctggcttcagtgatggctggcctctgctatgccgaatttggggcccgtgttcccaagacggggtctgcatatttgtacacctacgtgactgtcggagagctgtgggccttcatcactggctggaatctcattttatcgtatgtgataggtacatcaagtgttgcaagagcctggagtggcacctttgatgaacttcttagcaaacagattggtcagtttttgaggacatacttcagaatgaattacactggtcttgcagaatatcccgatttttttgctgtgtgccttatattacttctagcaggtcttttgtcttttggagtaaaagagtctgcttgggtgaataaagtcttcacagctgttaatattctcgtccttctgtttgtgatggttgctgggtttgtgaaaggaaatgtggcaaactggaagattagtgaagagtttctcaaaaatatatcagcaagtgccagagagccaccttctgaaaacggaacaagtatctatggggctggtggctttatgccttatggctttacgggaacgttggctggtgctgcaacttgcttttatgcctttgtgggatttgactgcattgcaacaactggtgaagaagttcggaatccccagaaagctattcccattggaattgtgacgtctttgcttgtttgctttatggcctattttggggtctctgcagctttaacacttatgatgccgtactacctcctcgatgaaaaaagcccccttcctgtagcgtttgaatatgtgggatggggtcctgccaaatatgtcgtcgcagctggttctctctgcgccttgtcaacaagtcttcttggatccattttcccaatgcctcgtgtaatctatgctatggcggaggatgggttgcttttcaaatgtctagctcaaatcaattccaaaacgaagacaccaataattgctactttatcatcgggtgcagtggcagctttgatggcctttctgtttgacctgaaggcgcttgtggacatgatgtccattggcacactcatggcctactctctggtggcagcctgtgttctcatcctcaggtaccagcctggcttatcttacgaccagcccaaatgttctcctgagaaagatggtctgggatcgtctcccagggtaacctcgaagagtgagtcccaggtcaccatgctgcagagacagggcttcagcatgcggaccctcttctgcccctcccttctgccaacacagcagtcagcttctctcgtgagctttctggtaggattcctagctttcctcgtgttgggcctgagtgtcttgaccacttacggagttcatgccatcaccaggctggaggcctggagcctcgctctcctcgcgctgtttcttgttctcttcgttgccatcgttctcaccatctggaggcagccccagaatcagcaaaaagtagccttcatggttccattcttaccatttttgccagcgttcagcatcttggtgaacatttacttgatggtccagttaagtgcagacacttgggtcagattcagcatttggatggcaattggcttcctgatttacttttcttatggcattagacacagcctggagggtcatctgagagatgaaaacaatgaagaagatgcttatccagacaacgttcatgcagcagcagaagaaaaatctgccattcaagcaaatgaccatcacccaagaaatctcagttcacctttcatattccatgaaaagacaagtgaattctaacacttgcaggagcagagctggtcatcgtcttagcatacatatcctacactgagtaaaccgtaacgggatgtcatcagcatgctgggttgtcatgggtttgctgcatacatagttcaccctaatttatacttactcatctggacagcatctcctcagatggtgaattatgtgcacggggaaacctcctgagtggaagtttcattcatcagtgatgaatagcccccaaacagtgggagtgtgtatgtatgtgtgtatgtatgtatctatgtatatgcttgggaacatgagtgttacaagttagctggtgttttactattattgtgttacatttttccagtgtcgtcattaatcggtggcatatactgcacatactgaaatagagggaaatcactgaatgtaaagaggtttcatctatgccccctgcagttggggaaatactagtagctttaccttgtttgacttcattaatgtcagtttaggggatgccaaaaatgcagttactcatcatggtgtctgtcactggttaggggtaagatgaggggataaggaaagagacttttcaataagttgtgaatgccaacagtgggtttaatgcaaattttttttcctgtgaggtatgacagtttgctcaaacttcagccaacaggggtgtctgcttctgctgcactacacaggccaggagtggcattccatgccactagttggcatccttttgaacttttgtctcctttgcaaacagtggtcctaaaatacgaggtcttcacttgctgtgaatgacgtatccccagtcagggacttaagagaggcactgtgatatacttgggaccctttaaattaaaaagtgaagatagtcaccagggccagaaagctcatggagtggccgtaatgagaatatgtttgaagatcaaagagttagaccaatgcttgaataagtagaccccaagcatccttttctaaaaagtgacttaaaataagccaacagactctcccagaccacacaactagtggaatgattcctcctttttccattacttacttaatcacagtttagtttttttcttaacctcgtcaggcccagagttcacttctttgtttctctgtttcttttgtcttgtcttagagatgagggggctacagcagcatcatgcaaagagggaaagatgaagggatagaagaagagaaaatccccctgttctgataggaacggcctgttccattgttaaatggcaaatggcccaatttaagggctttggatctaatttgcctctgatgtttcctttggaaacatttaggaatatttttctccccctaccccataaattgtgtagcactttttattccatttgctttcaaatgactacactaagcctaataatacaagctccagtgttatacaataacccatcagtgattggggaatcaaacattttggtttaaaaaacatgattatttaaaactggaaactaaaaagaatcaaattgaattaaagctatataaacacagttaacccttgtaaatgagtaaacaaatttttacatgtaagattctctaattgtcatattttactttttaggattccctaatagtggactgtttatttgcagtgtatttgcttctcatgaactatttctcgtacaaatcattaaatagttcattggatgaggctgggtgacatttcccaggacagcatggtgaacattaccaggcatgctagctggcccgtgtaatcccaagacaaggaaaacattcgttttcctcatgggtcttccaagaaatgagctattttattgatgccattaaaaagcaagttgcgatggttttgtatagccaggagtttattgtgattaaacatcaaagaaacaggtagaaagcctgggtttctggctgctagcgttatagcatccatgacacagaactcattacggacattccacaacttccagggtgcacatggtaaaatctgaagcccagaattttctctcaagctgcgtggtttactggagagaaggagttggataagcacaggctcgggtattttggtagggactgtaggcatgctcataaatccttgctgttgtcacagtacgctgaaaacccgtttgattctatacccaatcaagaatagacccttcacacaggaaatgtgaacaattgttatatatgaacactcaaatcttttactgtaacgaaaccaagaaacttgtttagaatgtgataggcagctaaaactgttatgcccactgtgctcaatttgaagcagaattcagtgaaaaattatttttccacattgaaacactttgcagacacaaatatctatgaaaagatgctttgtcagccactgtgcctttttttctgtgaagactcaacggatgtgtgtgtttgtatgtttgttaacagttacatatgtttgtatgagtgtatatatatatctgtgtgtgtgtatctctaacgtcagtgtataagtaagttgggtttatggtgggctttgactatgtcattaggtgggtacaaaacccaactgatgtggagaaaaattgatgtttgatgttgatagatatgcttatacctaatttttagtttttaaactattttaaaatatactatgattttatatgtatatttcctatagactctttaagatgtatttataatgtttctaatatgaaatcactaaactctagtacattatagcaggtgctttgtaatctggaatggagaagaggtaggggcatttggggattcctgtttacttgctgctgccacaccttttccgactgatctgtcctggtaggtgtttattagcaaaagtcagtatcaccagctctttggcacctttctgtttctgcttgtgaattcataatgttttcaactaaattttttttttactttctcagaattacctaaatgttttgtagagttttgactagtaatcaatcaaaattatataaagtcttctccagtaattaagaaatacatatgcaaattcttttgtgattgagtaaaagcagcttaaattacttttcttttctacattaagaaatatattctcaacattttcagtgagaatttcttgtaatggcacctcaaattttatactcttaaaaaaaaacaataatttgtgaattaccaccaaaaggcaatggcagtcctacatttaagaatagagctatgcaaactctgttaaaaactatgaggaaaacttatattagaacttttgatatatactaaaatactgattatcttaatcacattttccccagagataaacattgagagaacgaaagccaaagtgtcatttaagagagatatatatgaaaaagtaacattaatatatagaactttaccatcaccagccgtagttgatagaaaatattagtttcagaattaccctcctttaaaaaataagagactatttgttttcttttaatttctatgaataaaagaaatttttaaaaactttaaaattttaaatattagtcaaaatactttttaagtcctgagtgcttacaggtagttgttaaaaaaattttaaggccaggcatggtggctcgctcacacctataatcctaggatcttgggaggtcgaggcaagctgatcgcttgagcccaggagtttaagaccggcctgagtagcatagcaagaccctgtctctacaaaaaaaacaaaaattagctggaggaagagattatgggcttctgaaaaaaaggaaatcaacaaatccttctnaattagggaatctgcatgcacaagtacaggaaaaggacatattccacaaaaa

SEQ ID NO: 345562 - DNA, 1336 bp, Homo sapiens
gacatcgtaaaagataaatcccggtgatactgctcatgatttctcctaatacgcttcaagcaactgttaccacaaaaaatacagtttccgcagggctttaaaggattgagtttagcatgtatatcatgcgttattaaagttcacgtgattcatgtgaaattaactgtcctttttgctagtgccaaaacagtgccttctctgcacactttacttgtttataaagttctcccacatgtccttaaatatcaagggggaaagtatggatattcgcgtagcaataatgccagcaaaggtcattttcattttttagtcatatagatatgaaaataagttcatatagatatgaaattgcttgactttattgttttggggagattttttttccttacatgattatattaaacactttaaaatagccttccggtttctggattttgagaagcctgatctgttattgttgtggttgttggtgtttgtaatattcattattgtttgtatatacacggtttagtcttactgatttcaaatgcattttgttattgctcaacccaactggtaacactgtttgctgggagcattatacttaactttgattcaccatggttgatgccactgccatgatcgctgggtcttaaagagctttccctagccactgacagccccgtggagatcataatcagggccccaggctggttccaggatcaggcagcctatagagtgtgagcatctatgtgtagctacccttgttgggtgggctcttagactgatggggtaggatatgaagtgaaagacttcaaatgcaagtaaggtagtttgggctccttaattccaaacatcccatgagtatatcaagatgaataaggaccaagggacctctgtgactcatagaagggctggctgaatcctgaagtagcatagtgggacctggtctacaatttatgcacatgcactgacagccttgctgtgccacgtgtctcaccaagacccagttgggaaagagcgtcatattgccaacaggttgggtttctctggcctacacctgattaatgggccctttatctttggtgtcccctaggagtgtccagttgttttattgctgtattttgttattgcagtacttaataaaaattgttgatagggcccaaaaccctacagaaattctatgtctgtaaaaaccaacaaaggcattggacttgtgtgaatgtacagggtttttttagtagtaattttaaatttaaatgttttaagtgatcatcagtgttcctttttacttataaagttggattcttttttagaatttgtaataaataaaaactgctgctttaccactgtaaaa

SEQ ID NO: 345563 - DNA, 899 bp, Homo sapiens
acttcggttctgattgagaaccaatctgtatgtgtgttttttggtttgaaaatcatatgttgaaaacacgttaatcttactgatttcaaatgcattttgttattgctcaacccaactggtaacactgtttgctgggagcattatacttaactttgattcaccatggttgatgccactgccatgatcgctgggtcttaaagagctttccctagccactgacagccccgtggagatcataatcagggccccaggctggttccaggatcaggcagcctatagagtgtgagcatctatgtgtagctacccttgttgggtgggctcttagactgatggggtaggatatgaagtgaaagacttcaaatgcaagtaaggtagtttgggctccttaattccaaacatcccatgagtatatcaagatgaataaggaccaagggacctctgtgactcatagaagggctggctgaatcctgaagtagcatagtgggacctggtctacaatttatgcacatgcactgacagccttgctgtgccacgtgtctcaccaagacccagttgggaaagagcgtcatattgccaacaggttgggtttctctggcctacacctgattaatgggccctttatctttggtgtcccctaggagtgtccagttgttttattgctgtattttgttattgcagtacttaataaaaattgttgatagggcccaaaaccctacagaaattctatgtctgtaaaaaccaacaaaggcattggacttgtgtgaatgtacagggtttttttagtagtaattttaaatttaaatgttttaagtgatcatcagtgttcctttttacttataaagttggattcttttttagaatttgtaataaataaaaactgctgctttaccactgtaaaa

SEQ ID NO: 345564 - DNA, 2822 bp, Homo sapiens
ctccttctgcagcgcggccggcgggcgctcctcttcccgggaccagcgaggcggcggccgctgctccagcgtcccccagccgcgggcccccgacgcgctgcagccggcagcccaccgccgccttcttggcgcgaccccaacccagccccacaggagactctctgaagaccagcaggaaagcagtgagcccttacaggtcgccttcgtcagacgtcagaatgattccttgcagagccgcgctgacctttgcccgatgtctgatccggagaaaaatcgtgaccctggacagtctagaagacaccaaattatgccgctgcttatccaccatggacctcattgccctgggcgttggaagcacccttggggccggggtttatgtcctcgctggggaggtggccaaggcagactcgggccccagcatcgtggtgtccttcctcattgctgccctggcttcagtgatggctggcctctgctatgccgaatttggggcccgtgttcccaagacggggtctgcatatttgtacacctacgtgactgtcggagagctgtgggccttcatcactggctggaatctcattttatcgtatgtgataggtacatcaagtgttgcaagagcctggagtggcacctttgatgaacttcttagcaaacagattggtcagtttttgaggacatacttcagaatgaattacactggtcttgcagaatatcccgatttttttgctgtgtgccttatattacttctagcaggtcttttgtcttttggagtaaaagagtctgcttgggtgaataaagtcttcacagctgttaatattctcgtccttctgtttgtgatggttgctgggtttgtgaaaggaaatgtggcaaactggaagattagtgaagagtttctcaaaaatatatcagcaagtgccagagagccaccttctgaaaacggaacaagtatctatggggctggtggctttatgccttatggctttacgggaacgttggctggtgctgcaacttgcttttatgcctttgtgggatttgactgcattgcaacaactggtgaagaagttcggaatccccagaaagctattcccattggaattgtgacgtctttgcttgtttgctttatggcctattttggggtctctgcagctttaacacttatgatgccgtactacctcctcgatgaaaaaagcccccttcctgtagcgtttgaatatgtgggatggggtcctgccaaatatgtcgtcgcagctggttctctctgcgccttgtcaacaagtcttcttggatccattttcccaatgcctcgtgtaatctatgctatggcggaggatgggttgcttttcaaatgtctagctcaaatcaattccaaaacgaagacaccaataattgctactttatcatcgggtgcagtggcagctttgatggcctttctgtttgacctgaaggcgcttgtggacatgatgtccattggcacactcatggcctactctctggtggcagcctgtgttctcatcctcaggtaccagcctggcttatcttacgaccagcccaaatgttctcctgagaaagatggtctgggatcgtctcccagggtaacctcgaagagtgagtcccaggtcaccatgctgcagagacagggcttcagcatgcggaccctcttctgcccctcccttctgccaacacagcagtcagcttctctcgtgagctttctggtaggattcctagctttcctcgtgttgggcctgagtgtcttgaccacttacggagttcatgccatcaccaggctggaggcctggagcctcgctctcctcgcgctgtttcttgttctcttcgttgccatcgttctcaccatctggaggcagccccagaatcagcaaaaagtagccttcatggttccattcttaccatttttgccagcgttcagcatcttggtgaacatttacttgatggtccagttaagtgcagacacttgggtcagattcagcatttggatggcaattggcttcctgatttacttttcttatggcattagacacagcctggagggtcatctgagagatgaaaacaatgaagaagatgcttatccagacaacgttcatgcagcagcagaagaaaaatctgccattcaagcaaatgaccatcacccaagaaatctcagttcacctttcatattccatgaaaagacaagtgaattctaacacttgcaggagcagagctggtcatcgtcttagcatacatatcctacactgagtaaaccgtaacgggatgtcatcagcatgctgggttgtcatgggtttgctgcatacatagttcaccctaatttatacttactcatctggacagcatctcctcagatggtgaattatgtgcacggggaaacctcctgagtggaagtttcattcatcagtgatgaatagcccccaaacagtgggagtgtgtatgtatgtgtgtatgtatgtatctatgtatatgcttgggaacatgagtgttacaagttagctggtgttttactattattgtgttacatttttccagtgtcgtcattaatcggtggcatatactgcacatactgaaatagagggaaatcactgaatgtaaagaggtttcatctatgccccctgcagttggggaaatactagtagctttaccttgtttgacttcattaatgtcagtttaggggatgccaaaaatgcagttactcatcatggtgtctgtcactggttaggggtaagatgaggggataaggaaagagacttttcaataagttgtgaggtccaactcatagggtataacgcgtatcaggtagacctgtgagcaagacaggg

SEQ ID NO: 345565 - DNA, 426 bp, Homo sapiens
cggccgctgctccagcgtcccccagccgcgggcccccgacgcgctgcagccggcagcccaccgccgccttcttggcgcgaccccaacccagccccagtaagttgctaggtctccagccccgccgagagtccgcgggcgaggggcagcccggacgctggggccggcggggaaggagcggggcgagggcgccctggggccggcggggaactagagggtcgagggctcccggggacgagtccagctgcgcgcagctgccctgaggccgcgctccagcgagtcttcgtcagggagtcggggccgtgggctggggctgaagccgtggaccttcgtcctcggggctgcgccccggaatgcgcctcgcctcgtccggtccctgtgcagccggctctgcccggggacttcggggaccgctggaactgggagagg

SEQ ID NO: 345566 - DNA, 7297 bp, Homo sapiens
ctccttctgcagcgcggccggcgggcgctcctcttcccgggaccagcgaggcggcggccgctgctccagcgtcccccagccgcgggcccccgacgcgctgcagccggcagcccaccgccgccttcttggcgcgaccccaacccagccccacaggagactctctgaagaccagcaggaaagcagtgagcccttacaggtcgccttcgtcagacgtcagaatgattccttgcagagccgcgctgacctttgcccgatgtctgatccggagaaaaatcgtgaccctggacagtctagaagacaccaaattatgccgctgcttatccaccatggacctcattgccctgggcgttggaagcacccttggggccggggtttatgtcctcgctggggaggtggccaaggcagactcgggccccagcatcgtggtgtccttcctcattgctgccctggcttcagtgatggctggcctctgctatgccgaatttggggcccgtgttcccaagacggggtctgcatatttgtacacctacgtgactgtcggagagctgtgggccttcatcactggctggaatctcattttatcgtatgtgataggtacatcaagtgttgcaagagcctggagtggcacctttgatgaacttcttagcaaacagattggtcagtttttgaggacatacttcagaatgaattacactggtcttgcagaatatcccgatttttttgctgtgtgccttatattacttctagcaggtcttttgtcttttggagtaaaagagtctgcttgggtgaataaagtcttcacagctgttaatattctcgtccttctgtttgtgatggttgctgggtttgtgaaaggaaatgtggcaaactggaagattagtgaagagtttctcaaaaatatatcagcaagtgccagagagccaccttctgaaaacggaacaagtatctatggggctggtggctttatgccttatggctttacgggaacgttggctggtgctgcaacttgcttttatgcctttgtgggatttgactgcattgcaacaactggtgaagaagttcggaatccccagaaagctattcccattggaattgtgacgtctttgcttgtttgctttatggcctattttggggtctctgcagctttaacacttatgatgccgtactacctcctcgatgaaaaaagcccccttcctgtagcgtttgaatatgtgggatggggtcctgccaaatatgtcgtcgcagctggttctctctgcgccttgtcaacaagtcttcttggatccattttcccaatgcctcgtgtaatctatgctatggcggaggatgggttgcttttcaaatgtctagctcaaatcaattccaaaacgaagacaccaataattgctactttatcatcgggtgcagtggcagctttgatggcctttctgtttgacctgaaggcgcttgtggacatgatgtccattggcacactcatggcctactctctggtggcagcctgtgttctcatcctcaggtaccagcctggcttatcttacgaccagcccaaatgttctcctgagaaagatggtctgggatcgtctcccagggtaacctcgaagagtgagtcccaggtcaccatgctgcagagacagggcttcagcatgcggaccctcttctgcccctcccttctgccaacacagcagtcagcttctctcgtgagctttctggtaggattcctagctttcctcgtgttgggcctgagtgtcttgaccacttacggagttcatgccatcaccaggctggaggcctggagcctcgctctcctcgcgctgtttcttgttctcttcgttgccatcgttctcaccatctggaggcagccccagaatcagcaaaaagtagccttcatggttccattcttaccatttttgccagcgttcagcatcttggtgaacatttacttgatggtccagttaagtgcagacacttgggtcagattcagcatttggatggcaattggcttcctgatttacttttcttatggcattagacacagcctggagggtcatctgagagatgaaaacaatgaagaagatgcttatccagacaacgttcatgcagcagcagaagaaaaatctgccattcaagcaaatgaccatcacccaagaaatctcagttcacctttcatattccatgaaaagacaagtgaattctaacacttgcaggagcagagctggtcatcgtcttagcatacatatcctacactgagtaaaccgtaacgggatgtcatcagcatgctgggttgtcatgggtttgctgcatacatagttcaccctaatttatacttactcatctggacagcatctcctcagatggtgaattatgtgcacggggaaacctcctgagtggaagtttcattcatcagtgatgaatagcccccaaacagtgggagtgtgtatgtatgtgtgtatgtatgtatctatgtatatgcttgggaacatgagtgttacaagttagctggtgttttactattattgtgttacatttttccagtgtcgtcattaatcggtggcatatactgcacatactgaaatagagggaaatcactgaatgtaaagaggtttcatctatgccccctgcagttggggaaatactagtagctttaccttgtttgacttcattaatgtcagtttaggggatgccaaaaatgcagttactcatcatggtgtctgtcactggttaggggtaagatgaggggataaggaaagagacttttcaataagttgtgaatgccaacagtgggtttaatgcaaattttttttcctgtgaggtatgacagtttgctcaaacttcagccaacaggggtgtctgcttctgctgcactacacaggccaggagtggcattccatgccactagttggcatccttttgaacttttgtctcctttgcaaacagtggtcctaaaatacgaggtcttcacttgctgtgaatgacgtatccccagtcagggacttaagagaggcactgtgatatacttgggaccctttaaattaaaaagtgaagatagtcaccagggccagaaagctcatggagtggccgtaatgagaatatgtttgaagatcaaagagttagaccaatgcttgaataagtagaccccaagcatccttttctaaaaagtgacttaaaataagccaacagactctcccagaccacacaactagtggaatgattcctcctttttccattacttacttaatcacagtttagtttttttcttaacctcgtcaggcccagagttcacttctttgtttctctgtttcttttgtcttgtcttagagatgagggggctacagcagcatcatgcaaagagggaaagatgaagggatagaagaagagaaaatccccctgttctgataggaacggcctgttccattgttaaatggcaaatggcccaatttaagggctttggatctaatttgcctctgatgtttcctttggaaacatttaggaatatttttctccccctaccccataaattgtgtagcactttttattccatttgctttcaaatgactacactaagcctaataatacaagctccagtgttatacaataacccatcagtgattggggaatcaaacattttggtttaaaaaacatgattatttaaaactggaaactaaaaagaatcaaattgaattaaagctatataaacacagttaacccttgtaaatgagtaaacaaatttttacatgtaagattctctaattgtcatattttactttttaggattccctaatagtggactgtttatttgcagtgtatttgcttctcatgaactatttctcgtacaaatcattaaatagttcattggatgaggctgggtgacatttcccaggacagcatggtgaacattaccaggcatgctagctggcccgtgtaatcccaagacaaggaaaacattcgttttcctcatgggtcttccaagaaatgagctattttattgatgccattaaaaagcaagttgcgatggttttgtatagccaggagtttattgtgattaaacatcaaagaaacaggtagaaagcctgggtttctggctgctagcgttatagcatccatgacacagaactcattacggacattccacaacttccagggtgcacatggtaaaatctgaagcccagaattttctctcaagctgcgtggtttactggagagaaggagttggataagcacaggctcgggtattttggtagggactgtaggcatgctcataaatccttgctgttgtcacagtacgctgaaaacccgtttgattctatacccaatcaagaatagacccttcacacaggaaatgtgaacaattgttatatatgaacactcaaatcttttactgtaacgaaaccaagaaacttgtttagaatgtgataggcagctaaaactgttatgcccactgtgctcaatttgaagcagaaaaattgatgtttgatgttgatagatatgcttatacctaatttttagtttttaaactattttaaaatatactatgattttatatgtatatttcctatagactctttaagatgtatttataatgtttctaatatgaaatcactaaactctagtacattatagcaggtgctttgtaatctggaatggagaagaggtaggggcatttggggattcctgtttacttgctgctgccacaccttttccgactgatctgtcctggtaggtgtttattagcaaaagtcagtatcaccagctctttggcacctttctgtttctgcttgtgaattcataatgttttcaactaaattttttttttactttctcagaattacctaaatgttttgtagagttttgactagtaatcaatcaaaattatataaagtcttctccagtaattaagaaatacatatgcaaattcttttgtgattgagtaaaagcagcttaaattacttttcttttctacattaagaaatatattctcaacattttcagtgagaatttcttgtaatggcacctcaaattttatactcttaaaaaaaaacaataatttgtgaattaccaccaaaaggcaatggcagtcctacatttaagaatagagctatgcaaactctgttaaaaactatgaggaaaacttatattagaacttttgatatatactaaaatactgattatcttaatcacattttccccagagataaacattgagagaacgaaagccaaagtgtcatttaagagagatatatatgaaaaagtaacattaatatatagaactttaccatcaccagccgtagttgatagaaaatattagtttcagaattaccctcctttaaaaaataagagactatttgttttcttttaatttctatgaataaaagaaatttttaaaaactttaaaattttaaatattagtcaaaatactttttaagtcctgagtgcttacaggtagttgttaaaaaaattttaaggccaggcatggtggctcgctcacacctataatcctaggatcttgggaggtcgaggcaagctgatcgcttgagcccaggagtttaagaccggcctgagtagcatagcaagaccctgtctctacaaaaaaaacaaaaattagctgggcatggtggcatgcacatgtagtcagagctactgggggtgctgaggtgggaggatcgcttgagcccaggagagtgaggctgcagtgagctgagattacgccactgcactctagcctgggcaacggtgagaccctgcctcaaaaaaaataaaaataaaaataaaacactttaattagaatctatttttacctattttctaaatttatttaaatgcttagcaggaagcataaggaaaagccatcggcctccaatacccatgatgacagagggagcacttgagccttgccttccctcctcttaaatcagggtgtgttccgagattacagaacatcacaccttggcgtgatgaaatcatgccaagattctgactctccctttccggtgatactgctcatgatttctcctaatacgcttcaagcaactgttaccacaaaaaatacagtttccgcagggctttaaaggattgagtttagcatgtatatcatgcgttattaaagttcacgtgattcatgtgaaattaactgtcctttttgctagtgccaaaacagtgccttctctgcacactttacttgtttataaagttctcccacatgtccttaaatatcaagggggaaagtatggatattcgcgtagcaataatgccagcaaaggtcattttcattttttagtcatatagatatgaaaataagttcatatagatatgaaattgcttgactttattgttttggggagattttttttccttacatgattatattaaacactttaaaatagccttccggtttctggattttgagaagcctgatctgttattgttgtggttgttggtgtttgtaatattcattattgtttgtatatacacggtttagtcttactgatttcaaatgcattttgttattgctcaacccaactggtaacactgtttgctgggagcattatacttaactttgattcaccatggttgatgccactgccatgatcgctgggtcttaaagagctttccctagccactgacagccccgtggagatcataatcagggccccaggctggttccaggatcaggcagcctatagagtgtgagcatctatgtgtagctacccttgttgggtgggctcttagactgatggggtaggatatgaagtgaaagacttcaaatgcaagtaaggtagtttgggctccttaattccaaacatcccatgagtatatcaagatgaataaggaccaagggacctctgtgactcatagaagggctggctgaatcctgaagtagcatagtgggacctggtctacaatttatgcacatgcactgacagccttgctgtgccacgtgtctcaccaagacccagttgggaaagagcgtcatattgccaacaggttgggtttctctggcctacacctgattaatgggccctttatctttggtgtcccctaggagtgtccagttgttttattgctgtattttgttattgcagtacttaataaaaattgttgatagggcccaaaaccctacagaaattctatgtctgtaaaaaccaacaaaggcattggacttgtgtgaatgtacagggtttttttagtagtaattttaaatttaaatgttttaagtgatcatcagtgttcctttttacttataaagttggattcttttttagaatttgtaataaataaaaactgctgctttaccactgtaaaa

SEQ ID NO: 345567 - DNA, 6960 bp, Homo sapiens
ctccttctgcagcgcggccggcgggcgctcctcttcccgggaccagcgaggcggcggccgctgctccagcgtcccccagccgcgggcccccgacgcgctgcagccggcagcccaccgccgccttcttggcgcgaccccaacccagccccacaggagactctctgaagaccagcaggaaagcagtgagcccttacaggtcgccttcgtcagacgtcagaatgattccttgcagagccgcgctgacctttgcccgatgtctgatccggagaaaaatcgtgaccctggacagtctagaagacaccaaattatgccgctgcttatccaccatggacctcattgccctgggcgttggaagcacccttggggccggggtttatgtcctcgctggggaggtggccaaggcagactcgggccccagcatcgtggtgtccttcctcattgctgccctggcttcagtgatggctggcctctgctatgccgaatttggggcccgtgttcccaagacggggtctgcatatttgtacacctacgtgactgtcggagagctgtgggccttcatcactggctggaatctcattttatcgtatgtgataggtacatcaagtgttgcaagagcctggagtggcacctttgatgaacttcttagcaaacagattggtcagtttttgaggacatacttcagaatgaattacactggtcttgcagaatatcccgatttttttgctgtgtgccttatattacttctagcaggtcttttgtcttttggagtaaaagagtctgcttgggtgaataaagtcttcacagctgttaatattctcgtccttctgtttgtgatggttgctgggtttgtgaaaggaaatgtggcaaactggaagattagtgaagagtttctcaaaaatatatcagcaagtgccagagagccaccttctgaaaacggaacaagtatctatggggctggtggctttatgccttatggctttacgggaacgttggctggtgctgcaacttgcttttatgcctttgtgggatttgactgcattgcaacaactggtgaagaagttcggaatccccagaaagctattcccattggaattgtgacgtctttgcttgtttgctttatggcctattttggggtctctgcagctttaacacttatgatgccgtactacctcctcgatgaaaaaagcccccttcctgtagcgtttgaatatgtgggatggggtcctgccaaatatgtcgtcgcagctggttctctctgcgccttgtcaacaagtcttcttggatccattttcccaatgcctcgtgtaatctatgctatggcggaggatgggttgcttttcaaatgtctagctcaaatcaattccaaaacgaagacaccaataattgctactttatcatcgggtgcagtggcagctttgatggcctttctgtttgacctgaaggcgcttgtggacatgatgtccattggcacactcatggcctactctctggtggcagcctgtgttctcatcctcaggtaccagcctggcttatcttacgaccagcccaaatgttctcctgagaaagatggtctgggatcgtctcccagggtaacctcgaagagtgagtcccaggtcaccatgctgcagagacagggcttcagcatgcggaccctcttctgcccctcccttctgccaacacagcagtcagcttctctcgtgagctttctggtaggattcctagctttcctcgtgttgggcctgagtgtcttgaccacttacggagttcatgccatcaccaggctggaggcctggagcctcgctctcctcgcgctgtttcttgttctcttcgttgccatcgttctcaccatctggaggcagccccagaatcagcaaaaagtagccttcatggttccattcttaccatttttgccagcgttcagcatcttggtgaacatttacttgatggtccagttaagtgcagacacttgggtcagattcagcatttggatggcaattggcttcctgatttacttttcttatggcattagacacagcctggagggtcatctgagagatgaaaacaatgaagaagatgcttatccagacaacgttcatgcagcagcagaagaaaaatctgccattcaagcaaatgaccatcacccaagaaatctcagttcacctttcatattccatgaaaagacaagtgaattctaacacttgcaggagcagagctggtcatcgtcttagcatacatatcctacactgagtaaaccgtaacgggatgtcatcagcatgctgggttgtcatgggtttgctgcatacatagttcaccctaatttatacttactcatctggacagcatctcctcagatggtgaattatgtgcacggggaaacctcctgagtggaagtttcattcatcagtgatgaatagcccccaaacagtgggagtgtgtatgtatgtgtgtatgtatgtatctatgtatatgcttgggaacatgagtgttacaagttagctggtgttttactattattgtgttacatttttccagtgtcgtcattaatcggtggcatatactgcacatactgaaatagagggaaatcactgaatgtaaagaggtttcatctatgccccctgcagttggggaaatactagtagctttaccttgtttgacttcattaatgtcagtttaggggatgccaaaaatgcagttactcatcatggtgtctgtcactggttaggggtaagatgaggggataaggaaagagacttttcaataagttgtgaatgccaacagtgggtttaatgcaaattttttttcctgtgaggtatgacagtttgctcaaacttcagccaacaggggtgtctgcttctgctgcactacacaggccaggagtggcattccatgccactagttggcatccttttgaacttttgtctcctttgcaaacagtggtcctaaaatacgaggtcttcacttgctgtgaatgacgtatccccagtcagggacttaagagaggcactgtgatatacttgggaccctttaaattaaaaagtgaagatagtcaccagggccagaaagctcatggagtggccgtaatgagaatatgtttgaagatcaaagagttagaccaatgcttgaataagtagaccccaagcatccttttctaaaaagtgacttaaaataagccaacagactctcccagaccacacaactagtggaatgattcctcctttttccattacttacttaatcacagtttagtttttttcttaacctcgtcaggcccagagttcacttctttgtttctctgtttcttttgtcttgtcttagagatgagggggctacagcagcatcatgcaaagagggaaagatgaagggatagaagaagagaaaatccccctgttctgataggaacggcctgttccattgttaaatggcaaatggcccaatttaagggctttggatctaatttgcctctgatgtttcctttggaaacatttaggaatatttttctccccctaccccataaattgtgtagcactttttattccatttgctttcaaatgactacactaagcctaataatacaagctccagtgttatacaataacccatcagtgattggggaatcaaacattttggtttaaaaaacatgattatttaaaactggaaactaaaaagaatcaaattgaattaaagctatataaacacagttaacccttgtaaatgagtaaacaaatttttacatgtaagattctctaattgtcatattttactttttaggattccctaatagtggactgtttatttgcagtgtatttgcttctcatgaactatttctcgtacaaatcattaaatagttcattggatgaggctgggtgacatttcccaggacagcatggtgaacattaccaggcatgctagctggcccgtgtaatcccaagacaaggaaaacattcgttttcctcatgggtcttccaagaaatgagctattttattgatgccattaaaaagcaagttgcgatggttttgtatagccaggagtttattgtgattaaacatcaaagaaacaggtagaaagcctgggtttctggctgctagcgttatagcatccatgacacagaactcattacggacattccacaacttccagggtgcacatggtaaaatctgaagcccagaattttctctcaagctgcgtggtttactggagagaaggagttggataagcacaggctcgggtattttggtagggactgtaggcatgctcataaatccttgctgttgtcacagtacgctgaaaacccgtttgattctatacccaatcaagaatagacccttcacacaggaaatgtgaacaattgttatatatgaacactcaaatcttttactgtaacgaaaccaagaaacttgtttagaatgtgataggcagctaaaactgttatgcccactgtgctcaatttgaagcagaattcagtgaaaaattatttttccacattgaaacactttgcagacacaaatatctatgaaaagatgctttgtcagccactgtgcctttttttctgtgaagactcaacggatgtgtgtgtttgtatgtttgttaacagttacatatgtttgtatgagtgtatatatatatctgtgtgtgtgtatctctaacgtcagtgtataagtaagttgggtttatggtgggctttgactatgtcattaggtgggtacaaaacccaactgatgtggagaaaaattgatgtttgatgttgatagatatgcttatacctaatttttagtttttaaactattttaaaatatactatgattttatatgtatatttcctatagactctttaagatgtatttataatgtttctaatatgaaatcactaaactctagtacattatagcaggtgctttgtaatctggaatggagaagaggtaggggcatttggggattcctgtttacttgctgctgccacaccttttccgactgatctgtcctggtaggtgtttattagcaaaagtcagtatcaccagctctttggcacctttctgtttctgcttgtgaattcataatgttttcaactaaattttttttttactttctcagaattacctaaatgttttgtagagttttgactagtaatcaatcaaaattatataaagtcttctccagtaattaagaaatacatatgcaaattcttttgtgattgagtaaaagcagcttaaattacttttcttttctacattaagaaatatattctcaacattttcagtgagaatttcttgtaatggcacctcaaattttatactcttaaaaaaaaacaataatttgtgaattaccaccaaaaggcaatggcagtcctacatttaagaatagagctatgcaaactctgttaaaaactatgaggaaaacttatattagaacttttgatatatactaaaatactgattatcttaatcacattttccccagagataaacattgagagaacgaaagccaaagtgtcatttaagagagatatatatgaaaaagtaacattaatatatagaactttaccatcaccagccgtagttgatagaaaatattagtttcagaattaccctcctttaaaaaataagagactatttgttttcttttaatttctatgaataaaagaaatttttaaaaactttaaaattttaaatattagtcaaaatactttttaagtcctgagtgcttacaggtagttgttaaaaaaattttaaggccaggcatggtggctcgctcacacctataatcctaggatcttgggaggtcgaggcaagctgatcgcttgagcccaggagtttaagaccggcctgagtagcatagcaagaccctgtctctacaaaaaaaacaaaaattagctgggcatggtggcatgcacatgtagtcagagctactgggggtgctgaggtgggaggatcgcttgagcccaggagagtgaggctgcagtgagctgagattacgccactgcactctagcctgggcaacggtgagaccctgcctcaaaaaaaataaaaataaaaataaaacactttaattagaatctatttttacctattttctaaatttatttaaatgcttagcaggaagcataaggaaaagccatcggcctccaatacccatgatgacagagggagcacttgagccttgccttccctcctcttaaatcagggtgtgttccgagattacagaacatcacaccttggcgtgatgaaatcatgccaagattctgactctccctttccggtgatactgctcatgatttctcctaatacgcttcaagcaactgttaccacaaaaaatacagtttccgcagggctttaaaggattgagtttagcatgtatatcatgcgttattaaagttcacgtgattcatgtgaaattaactgtcctttttgctagtgccaaaacagtgccttctctgcacactttacttgtttataaagttctcccacatgtccttaaatatcaagggggaaagtatggatattcgcgtagcaataatgccagcaaaggtcattttcattttttagtcatatagatatgaaaataagttcatatagatatgaaattgcttgactttattgttttggggagattttttttccttacatgattatattaaacactttaaaataggtttctctggcctacacctgattaatgggccctttatctttggtgtcccctaggagtgtccagttgttttattgctgtattttgttattgcagtacttaataaaaattgttgatagggcccaaaaccctacagaaattctatgtctgtaaaaaccaacaaaggcattggacttgtgtgaatgtacagggtttttttagtagtaattttaaatttaaatgttttaagtgatcatcagtgttcctttttacttataaagttggattcttttttagaatttgtaataaataaaaactgctgctttaccactgtaaaa

SEQ ID NO: 345568 - DNA, 6700 bp, Homo sapiens
ctccttctgcagcgcggccggcgggcgctcctcttcccgggaccagcgaggcggcggccgctgctccagcgtcccccagccgcgggcccccgacgcgctgcagccggcagcccaccgccgccttcttggcgcgaccccaacccagccccacaggagactctctgaagaccagcaggaaagcagtgagcccttacaggtcgccttcgtcagacgtcagaatgattccttgcagagccgcgctgacctttgcccgatgtctgatccggagaaaaatcgtgaccctggacagtctagaagacaccaaattatgccgctgcttatccaccatggacctcattgccctgggcgttggaagcacccttggggccggggtttatgtcctcgctggggaggtggccaaggcagactcgggccccagcatcgtggtgtccttcctcattgctgccctggcttcagtgatggctggcctctgctatgccgaatttggggcccgtgttcccaagacggggtctgcatatttgtacacctacgtgactgtcggagagctgtgggccttcatcactggctggaatctcattttatcgtatgtgataggtacatcaagtgttgcaagagcctggagtggcacctttgatgaacttcttagcaaacagattggtcagtttttgaggacatacttcagaatgaattacactggtcttgcagaatatcccgatttttttgctgtgtgccttatattacttctagcaggtcttttgtcttttggagtaaaagagtctgcttgggtgaataaagtcttcacagctgttaatattctcgtccttctgtttgtgatggttgctgggtttgtgaaaggaaatgtggcaaactggaagattagtgaagagtttctcaaaaatatatcagcaagtgccagagagccaccttctgaaaacggaacaagtatctatggggctggtggctttatgccttatggctttacgggaacgttggctggtgctgcaacttgcttttatgcctttgtgggatttgactgcattgcaacaactggtgaagaagttcggaatccccagaaagctattcccattggaattgtgacgtctttgcttgtttgctttatggcctattttggggtctctgcagctttaacacttatgatgccgtactacctcctcgatgaaaaaagcccccttcctgtagcgtttgaatatgtgggatggggtcctgccaaatatgtcgtcgcagctggttctctctgcgccttgtcaacaagtcttcttggatccattttcccaatgcctcgtgtaatctatgctatggcggaggatgggttgcttttcaaatgtctagctcaaatcaattccaaaacgaagacaccaataattgctactttatcatcgggtgcagtggcagctttgatggcctttctgtttgacctgaaggcgcttgtggacatgatgtccattggcacactcatggcctactctctggtggcagcctgtgttctcatcctcaggtaccagcctggcttatcttacgaccagcccaaatgttctcctgagaaagatggtctgggatcgtctcccagggtaacctcgaagagtgagtcccaggtcaccatgctgcagagacagggcttcagcatgcggaccctcttctgcccctcccttctgccaacacagcagtcagcttctctcgtgagctttctggtaggattcctagctttcctcgtgttgggcctgagtgtcttgaccacttacggagttcatgccatcaccaggctggaggcctggagcctcgctctcctcgcgctgtttcttgttctcttcgttgccatcgttctcaccatctggaggcagccccagaatcagcaaaaagtagccttcatggttccattcttaccatttttgccagcgttcagcatcttggtgaacatttacttgatggtccagttaagtgcagacacttgggtcagattcagcatttggatggcaattggcttcctgatttacttttcttatggcattagacacagcctggagggtcatctgagagatgaaaacaatgaagaagatgcttatccagacaacgttcatgcagcagcagaagaaaaatctgccattcaagcaaatgaccatcacccaagaaatctcagttcacctttcatattccatgaaaagacaagtgaattctaacacttgcaggagcagagctggtcatcgtcttagcatacatatcctacactgagtaaaccgtaacgggatgtcatcagcatgctgggttgtcatgggtttgctgcatacatagttcaccctaatttatacttactcatctggacagcatctcctcagatggtgaattatgtgcacggggaaacctcctgagtggaagtttcattcatcagtgatgaatagcccccaaacagtgggagtgtgtatgtatgtgtgtatgtatgtatctatgtatatgcttgggaacatgagtgttacaagttagctggtgttttactattattgtgttacatttttccagtgtcgtcattaatcggtggcatatactgcacatactgaaatagagggaaatcactgaatgtaaagaggtttcatctatgccccctgcagttggggaaatactagtagctttaccttgtttgacttcattaatgtcagtttaggggatgccaaaaatgcagttactcatcatggtgtctgtcactggttaggggtaagatgaggggataaggaaagagacttttcaataagttgtgaatgccaacagtgggtttaatgcaaattttttttcctgtgaggtatgacagtttgctcaaacttcagccaacaggggtgtctgcttctgctgcactacacaggccaggagtggcattccatgccactagttggcatccttttgaacttttgtctcctttgcaaacagtggtcctaaaatacgaggtcttcacttgctgtgaatgacgtatccccagtcagggacttaagagaggcactgtgatatacttgggaccctttaaattaaaaagtgaagatagtcaccagggccagaaagctcatggagtggccgtaatgagaatatgtttgaagatcaaagagttagaccaatgcttgaataagtagaccccaagcatccttttctaaaaagtgacttaaaataagccaacagactctcccagaccacacaactagtggaatgattcctcctttttccattacttacttaatcacagtttagtttttttcttaacctcgtcaggcccagagttcacttctttgtttctctgtttcttttgtcttgtcttagagatgagggggctacagcagcatcatgcaaagagggaaagatgaagggatagaagaagagaaaatccccctgttctgataggaacggcctgttccattgttaaatggcaaatggcccaatttaagggctttggatctaatttgcctctgatgtttcctttggaaacatttaggaatatttttctccccctaccccataaattgtgtagcactttttattccatttgctttcaaatgactacactaagcctaataatacaagctccagtgttatacaataacccatcagtgattggggaatcaaacattttggtttaaaaaacatgattatttaaaactggaaactaaaaagaatcaaattgaattaaagctatataaacacagttaacccttgtaaatgagtaaacaaatttttacatgtaagattctctaattgtcatattttactttttaggattccctaatagtggactgtttatttgcagtgtatttgcttctcatgaactatttctcgtacaaatcattaaatagttcattggatgaggctgggtgacatttcccaggacagcatggtgaacattaccaggcatgctagctggcccgtgtaatcccaagacaaggaaaacattcgttttcctcatgggtcttccaagaaatgagctattttattgatgccattaaaaagcaagttgcgatggttttgtatagccaggagtttattgtgattaaacatcaaagaaacaggtagaaagcctgggtttctggctgctagcgttatagcatccatgacacagaactcattacggacattccacaacttccagggtgcacatggtaaaatctgaagcccagaattttctctcaagctgcgtggtttactggagagaaggagttggataagcacaggctcgggtattttggtagggactgtaggcatgctcataaatccttgctgttgtcacagtacgctgaaaacccgtttgattctatacccaatcaagaatagacccttcacacaggaaatgtgaacaattgttatatatgaacactcaaatcttttactgtaacgaaaccaagaaacttgtttagaatgtgataggcagctaaaactgttatgcccactgtgctcaatttgaagcagaattcagtgaaaaattatttttccacattgaaacactttgcagacacaaatatctatgaaaagatgctttgtcagccactgtgcctttttttctgtgaagactcaacggatgtgtgtgtttgtatgtttgttaacagttacatatgtttgtatgagtgtatatatatatctgtgtgtgtgtatctctaacgtcagtgtataagtaagttgggtttatggtgggctttgactatgtcattaggtgggtacaaaacccaactgatgtggagaaaaattgatgtttgatgttgatagatatgcttatacctaatttttagtttttaaactattttaaaatatactatgattttatatgtatatttcctatagactctttaagatgtatttataatgtttctaatatgaaatcactaaactctagtacattatagcaggtgctttgtaatctggaatggagaagaggtaggggcatttggggattcctgtttacttgctgctgccacaccttttccgactgatctgtcctggtaggtgtttattagcaaaagtcagtatcaccagctctttggcacctttctgtttctgcttgtgaattcataatgttttcaactaaattttttttttactttctcagaattacctaaatgttttgtagagttttgactagtaatcaatcaaaattatataaagtcttctccagtaattaagaaatacatatgcaaattcttttgtgattgagtaaaagcagcttaaattacttttcttttctacattaagaaatatattctcaacattttcagtgagaatttcttgtaatggcacctcaaattttatactcttaaaaaaaaacaataatttgtgaattaccaccaaaaggcaatggcagtcctacatttaagaatagagctatgcaaactctgttaaaaactatgaggaaaacttatattagaacttttgatatatactaaaatactgattatcttaatcacattttccccagagataaacattgagagaacgaaagccaaagtgtcatttaagagagatatatatgaaaaagtaacattaatatatagaactttaccatcaccagccgtagttgatagaaaatattagtttcagaattaccctcctttaaaaaataagagactatttgttttcttttaatttctatgaataaaagaaatttttaaaaactttaaaattttaaatattagtcaaaatactttttaagtcctgagtgcttacaggtagttgttaaaaaaattttaaggccaggcatggtggctcgctcacacctataatcctaggatcttgggaggtcgaggcaagctgatcgcttgagcccaggagtttaagaccggcctgagtagcatagcaagaccctgtctctacaaaaaaaacaaaaattagctgggcatggtggcatgcacatgtagtcagagctactgggggtgctgaggtgggaggatcgcttgagcccaggagagtgaggctgcagtgagctgagattacgccactgcactctagcctgggcaacggtgagaccctgcctcaaaaaaaataaaaataaaaataaaacactttaattagaatctatttttacctattttctaaatttatttaaatgcttagcaggaagcataaggaaaagccatcggcctccaatacccatgatgacagagggagcacttgagccttgccttccctcctcttaaatcagggtgtgttccgagattacagaacatcacaccttggcgtgatgaaatcatgccaagattctgactctccctttccggtgatactgctcatgatttctcctaatacgcttcaagcaactgttaccacaaaaaatacagtttccgcagggctttaaaggattgagtttagcatgtatatcatgcgttattaaagttcacgtgattcatgtgaaattaactgtcctttttgctagtgccaaaacagtgccttctctgcacactttacttgtttataaagttctcccacatgtccttaaatatcaagggggaaagtatggatattcgcgtagcaataatgccagcaaaggtcattttcattaaaaaccaacaaaggcattggacttgtgtgaatgtacagggtttttttagtagtaattttaaatttaaatgttttaagtgatcatcagtgttcctttttacttataaagttggattcttttttagaatttgtaataaataaaaactgctgctttaccactgtaaaa

SEQ ID NO: 345569 - DNA, 467 bp, Homo sapiens
gttagtggcaccaccacattctgtagcacagggtgagagagtaaagttttaattttatgtatatcatcttcaaagagctaataaacacaaccaccttccaaggatatagtctgagaaaagtcaccagaaggagagttttctgtcaaagtgactttccaatgtgtttgttctctttcttagagagccaccttctgaaaacggaacaagtatctatggggctggtggctttatgccttatggctttacgggaacgttggctggtgctgcaacttgcttttatgcctttgtgggatttgactgcattgcaacaactggtaagagcagtgtcttggctcagtgtagaaggagtgttccttgttgtgcacgagtacccgtgtgtggtagcagagggtccaggaaagagagagggatttcgggtaagaagggcactagttccaggcccagctgtgacacgtgctgctgatgat

SEQ ID NO: 345570 - DNA, 696 bp, Homo sapiens
aggactggccgctaaataacttcggtattgagagctgtgtgagcctcaaagggagggcccagaccagctggagtctctacccccagacaggataaagggcaggacttggggtcataggaggaggcggctaacatgaaaacaacttaggttggagagaaggaggggccaatccaatctgcaccctccctgtgtctgtcccgagtaggtgctgtccccctctcccttcctttgcccaccgattggagggacactctggaaaactcagttgaagaaagcggagagtctgcgtgtacacagtgcaatgatgtcagttaatgcactagtgagggcatgtgttgttcacggtacacagaagaaggaaccaccagcccttgggacacttaggcattggtgtagacaagggaacatttgagtcctggacgatggataggtccacggagcggagggaggagaaaaggattccagtcttagcgatcagcatcagcaaaggctccgaggtgccagaggcatagtgagttctccgatccctggctggtggagggaagctgggaagggcctggctgtccagggtggtgggaggaggctagagtagccagaccagatattttgggttgtctctgatgggcagtggggtgtgggggggaggtagataggtatttaggatggaattctgctagacaggaaaatatagttcag

SEQ ID NO: 345571 - DNA, 739 bp, Homo sapiens
aggactggccgctaaataacttcggtattgagagctgtgtgagcctcaaagggagggcccagaccagctggagtctctacccccagacaggataaagggcaggacttggggtcataggaggaggcggctaacatgaaaacaacttaggttggagagaaggaggggccaatccaatctgcaccctccctgtgtctgtcccgagtaggtgctgtccccctctcccttcctttgcccaccgattggagggacactctggaaaactcagttgaagaaagcggagagtctgcgtgtacacagtgcaatgatgtcagttaatgcactagtgagggcatgtgttgttcacggtacacagaagaaggaaccaccagcccttgggacacttaggcattggtgtagacaagggaacatttgagtcctggacgatggataggtccacggagcggagggaggagaaaaggattccagtcttagcgatcagcatcagcaaaggctccgaggtgccagaggcatagtgagttctccgatccctggctggtggagggaagctgggaagggcctggctgtccagggtggtgggaggaggctagaggagccaggtgggtcagcagagagacagtcacattaggagttagggcttcagtagggagacaggtgggtctcaggtgatgtcaagagatcttggtcagagctaggcctgaagaagattctggtatctctgctcaggaatcaggggaccagg

SEQ ID NO: 345572 - DNA, 335 bp, Homo sapiens
gatggaattctgctagacaggaaaatatagttcagttcctcatagttcaggctggagcaagtaagattccagttttaccactgaatctctgagcctgtctcctcatctgtaaaatgggaacagcaatcctagcccagagggttgtcaaagtcactgtgctatcgggcctggcagaatgggagtgagaggggctcagagggactgttacaggacatgaggtgacgatggtggggtggcaaggcaggagctgatggagactcactgagaagtggagaagcaagattcatcacatacgggacataaagggagatggaggggcagggggtagtcctggt

SEQ ID NO: 345573 - DNA, 775 bp, Homo sapiens
gtaaatagtgactgtttgttccagcaattttttggtggtgaagtaaccatcaagtgattcaggttcctcttggaaccctccaagaaaaacttcagggtcctagtgtaatacatctgtccccatctctcactggcgtatatatttaactggactcactctcccaccctcagctaatgctacaatcctggagtcacctcttgactcatctttcccattgccaccacaatccattctaatatgtcagaaaatctgtcagttttaatctacgaaatctcttaaaatatttccgtctaaccattccttgttttccttctatttctatagccacccttctggttcacaaaccttttacttcttgcctcaactagtgtaatagcttcctaacccatttctctctatttcagacagatggcaaggttattttccttaaaaagactcttattatgttgttccttagctcaaaatccttcaatggctgaactttcactgcctgaaagataaatcccaagattttagccatgcattcaagagcagctataaccataatgactccagccttcacacttccagcttcaccttccaaaccacctccatattccagcaaattagcctacttactgggtcctagtcacatcttaccacttcctaccctcccagttttatttataccaagcctcctcctgaaatttctcttcctttctttctacctacccaagacataccacgtgcttcaataaccagtcccttcctcctacaaacactacaacctggaaag

SEQ ID NO: 345574 - DNA, 505 bp, Homo sapiens
cagtactgttttctacagaaactgggggaaatactgagcacagaagaataaccaaagtgcttcccaccaataacttctgtgaaactacgttctctgaattcttctccaaattcttttctgattttgtaagtaatgatgttacaactaatttttttgctcatatattattaatattttctagcattaacaagacataggtaacagcattcattagctcagagtttttaagggttttgtttgcttgcttgctctgtttttttttgttgttttttggttttggagacggagtctccctccgtcgcccaggctagagtgcaggggcgcgatctgggctcactggaagcttcgcctccggggttcaagcgattctccggcctcagcctcccgagcagctaggactacaggcgcccgctaccaggcccggctaatttctggcatttttagtagagacgggatttcaccgtatgggccaggctggtctagaactcctgacctcgtgatccgc

SEQ ID NO: 345575 - DNA, 314 bp, Homo sapiens
cagtactgttttctacagaaactgggggaaatactgagcacagaagaataaccaaagtgcttcccaccaataacttctgtgaaactacgttctctgaattcttctccaaattcttttctgattttgtaagtaatgatgttacaactaatttttttgctcatatattattaatattttctagcattaacaagacataggtaacagcattcattagctcagagtttttaagggttttgtttgcttgcttgctctgtttttttttgttgtttttttatgccagaaaaaaaattaaagtcatctactttaaagttata

SEQ ID NO: 345576 - DNA, 160 bp, Homo sapiens
gtacgatttgatagtgttggtggcctgtctaatcatatagcagctctaaaagagatggtggtgtttccattactttatccagaagtctttgaaaaatttaaaattcaacccccaagagtgtggttgttttatgggccacctggaactggtaatactctgg

SEQ ID NO: 345577 - DNA, 379 bp, Homo sapiens
tgcactccagcctcagcggcagagtaaaactcagtctcaaaaaaaaaaaaacagaaagaaaaagaaaaaatcaaggtaaaaggagaagcttctgccaaccaagaggcagtagacaagttcccagatgctattaagaaaatcattagcagccggacgcagtggctcatgcctgtaatcccaggcatgcctcccactttgggaggcagaggcatgtaaatcatctgaggtcaggagttcaagagcagcctggcaaacatggtgaaaccccgcttctactaaaaatacaaaaattagcagaccctggtggcccggaggttgcagtgaggcgagatcatgccattgcactccagcctgggctacaagagcaagatgccatctc

SEQ ID NO: 345578 - DNA, 403 bp, Homo sapiens
tggggtcttactatagtaatgttaatggaacaaggcaaggggagggcgggatggccgtcatctcatgagcctcaccttgcaggatgtgcagcaggaagaagctgcgtcttgccgtttgaccatgcgagcatctagcgtgatcagcactgtgctcactgccatcatcaatgctaacagaaacgtgcagacaacacaaaacctcagaactcccatctcaatcaactgctcggaaacttcaatctgagagtaaactgtcatgtttttcccactctaaaacaggatgactaatgacagaggaacctcaacacaatccatggggctcaagccagatccctctcaacagagcacaaaagccacccagtcccaaaaaatgtgagccgacgccgggcccctcaacggattc

SEQ ID NO: 345579 - DNA, 798 bp, Homo sapiens
tgggccaaagatatgaagtttacaaaagaggaaaccccaagacaaacccatcataggaagagccactcaaatctcgcaatcagagaaaagcaaatgaaaaacaagatgtcaccttatacacatgagactggcagcggttgggaggctggacgagtcccagtgtggcaaggacggggagcctcctgtccaggtggtggaagatgcccggtgctgccagtcagggtcacagaaccagaaccatcaatgccacttctggatgtacaccctaaagaaaccctcgtgcagacccatcaggggacatgtttggatgtcaccattcacacgtgtgttggttaggggtagtgtgagtgtctgtccccagaaggatggatgagtaaaagtgttagatctcttcccagaaccaaggtgacaattagaagaaaagatgaaaggtacacagctagcaatacagatgtgtctggaaactacagccctgagtgaaaaaggaagaatgggatgcggaacacagtacccctaggtacactttacaagagtcctacagataagaagtacagattaaaagcattcgtaggaggtagggcaagaggtgttctagagcatacaagagcactgaacagtcccagcactctgggaggccaaggtgggtggatcacctgaggtcaggagttcgagaccagcctggccaacatcgcaaaaccctgtctctactaaacatacaaaaattagccgggcatggtggcaggtgcctgtaatcccagctactcaggaggctgaggcaagataatcacttgaacctgg

SEQ ID NO: 345580 - DNA, 695 bp, Homo sapiens
gaaggaccaagcagtactggagaatctgttaaatttattagcataaatgcttagacaaaacgagatataaatcattcagatgtattaagccataaagtatcccaatgaagtcagtcccttgccagggtcctggtgtataaatgttcatataaaacaaggtatcagtattatctttcaaactgaatatatgttgtaaaaatatccaaggttgagttaggaatatggggggagggtgcagcagggcaggaaggggatattctttagaccagtttgttaacatagtggtggctcagaaagtatggtggaaaggaaaaatttcaaccgtttacatttggagtcttcttagataatatgtttttaaataacggtatgcaggatatatttgagagcaaaggaataagagaaaaaaaagatgactagagggagaaaggcattgatttctgtagaatgcatttgtcccccaaagatcagtttagcttcacaaaaatccacccagaggaggcactggctcttcacacagataacggattatccagtagagaagagctacctgggccttcgtctggcaactgggatatgcagccgctggtcagcagagggatgtgtattcattagcggtggaagacgaggaaagcgcccgggagtgaggaagaggaatggacagaattcctggcagaagcttaccaagacaaaaa

SEQ ID NO: 345581 - DNA, 491 bp, Homo sapiens
aatcttgcacatgtaccccagaacttaaaaaaaaaaagttgaagggaaaaaaaaagcaaacttctgaattaataaagtgatggattatctaactataaagttgatgtgaaaaagaaaaaaaagcactgcagcaattccacttctgggtatatatccaaaaacactgaacacaaggactcaaacagatgtctgtactccagaattcacacagcattactcacaacagtcaaaagacaacccagtagtcaaaaagccacccaagtgtctaatacatgaatagataaaatgtggtatatccatacaatggaatattattcagccttaaaaaggaataaaactctaatacatgctacaacacagatgaaccttgaggacttatgctaagtgaaataagccacttgaaggacaaatactgcatgattccattcatctgagttatctagagtagccagattaatgaaagcagaatagaggttaccaggagctaaggg

SEQ ID NO: 345582 - DNA, 271 bp, Homo sapiens
attgtatgcctgtatcaaatatcttatgtaactcagaaatataaacatctactatgacccacaaaaattaaaaataatttttttaaaaaattggaaatacttgtagactgtagaattgttgcactgttttgtgtatagagaattatacaggaattatgggggtgcttgacaagtctctactccaaaaaacagagttaaacgatccaaatgaacaaaggcatcagactacaatagccatactcttaaccttggaaacaaccactcccctatg

SEQ ID NO: 345583 - DNA, 137 bp, Homo sapiens
tctggattcactatccttcattccaaagtacttcttgcatctgtcctttgagcaaggatctaagttccaagaagaacctgaaacggattaaagtcctaaatgtgaaaagcaaacttataaaaatgcataggagatac

SEQ ID NO: 345584 - DNA, 428 bp, Homo sapiens
gcggcctcttcaatatggcggggcctttgtctcctagcttccgggctctgatcctagttcgcgtctccactgttccatctcctccgttcctggagttcctcggtgactctactatagcttctgttatcctgtgacctgcaggtactgggagatccatagggaggacggcggaacatctggaggctgggaaatgggagtgttgacattcagggatgtggctgtagaattctccccagaagagtgggaatgcctggactctgctcagcagcgtttgtatagggatgtgatgttagagaactacggaaacctggtctccttgggtgagaataacttcaatatacaactcatattctacattaaatattttattttcttctgatttttttggaggctctgctttgcataaatgagtttcagaatcctgcttc

SEQ ID NO: 345585 - DNA, 660 bp, Homo sapiens
gcggcctcttcaatatggcggggcctttgtctcctagcttccgggctctgatcctagttcgcgtctccactgttccatctcctccgttcctggagttcctcggtgactctactatagcttctgttatcctgtgacctgcaggtactgggagatccatagggaggacggcggaacatctggaggctgggaaatgggagtgttgacattcagggatgtggctgtagaattctccccagaagagtgggaatgcctggactctgctcagcagcgtttgtatagggatgtgatgttagagaactacggaaacctggtctccttgggtcttgctatctttaagccagacttgatgacctgtctggagcaaagaaaagagccttggaaagtgaagagacaggaggcagtagccaaacacccaggtaggtgggagtgaatgaagcagatgacacaaatgacggatcccaatgtcaaggaggaagccaaacctttaaacatgcttccagaagctctgctccagtggaaatggtttctgagaaaccttcatttctttctcttgctttaacatagggacattttttgtcccattcttgtgaattttccaagcactgtacttccccttcagtaatgtgtgtgtgtgtgttgtgtgtgtgttttgttttgttt

SEQ ID NO: 345586 - DNA, 488 bp, Homo sapiens
ctggcttctaaataccattctccaataaaaatagccagggccccttggagaattggtaaattaccagacgagaaaaggaagacaagtctggaacatcttgaggtgccagaaaataaaggagtactaaacaatgatggcagcatattaaaaaggcacaagaaacaaccagaaagagctcccagtggccaaaactgaaacaattttagcaaaaaaaaaaaaaaaatgtatataagtattagattatagctcatggaataaaataattatgagtccacactgatttaaatatatacttgaataaataaataatttggggagaagagattactctttttaacagaattccagtccataaacaaaacaatattattgttgtagacaagatacaccaacagaggctaaaatcagtgagtgaaagtttgaagagaaacaggatattgcatagtctcatagtatgtccctaaatatatttattaactaccaaaaaa

SEQ ID NO: 345587 - DNA, 470 bp, Homo sapiens
gggattcaaaggtttgtgatttcaaaccttagcatttctagaggtaagtgtttttgttgtagaaatactgtatcgttttttaaaatgtgattttagagaacaaaatcttccctcattcagtttgtattcttgaagtattgaaaaatggatgacttctgaagtgagtcattttcagactgcataaaagtcttcgaaataaaatgactgtttattcatgctgtattgtgcttgactagtttgcttggttggccagagctgcatgctcagagggtcaggttttggcttcacacaggagtgatctcgacaagacacgtagggcagtgtgaacccacccttgctcctggaatagtccttccaaatgtgtagctcataaaatcacggtacttattttctctgaatctcctttgtcactagtcactgaacattgtggaatagagttatttgtgaactcagtcaagtagcacttgggg

SEQ ID NO: 345588 - DNA, 125 bp, Homo sapiens
ttgctcaatgatgaactcctgaaaactggatgataaactcacattttaaggcatttttcttctataattttgaggggtaacctgatcctggcagtaaagataaattaatggtagatactcactga

SEQ ID NO: 345589 - DNA, 1612 bp, Homo sapiens
gcgctaggtacgaggctgggtgttgcttccctgcttgatctgtgtaccctgctctttctccttcattccgcagcctcctttgccctgtgacctgcaggtactggacggtccctagagaggataccgggacgctcctgaagccgcgagatggatgggtcttccatgatactgaagggagagccacatgttgatgcccaggaccagctgcctccttggtctgaaaggcctgatcgaggccaggattggctatgagagctgggaaatgggaccatctttgaagccatgggagagggtgagagccaccatcactcatgttcttgaatgggaactgcctggagaccctgaagaagaaggagcctgaaggaggaaggaggaggctgagccatcccgggaacatgggctggatgaggccaagccaggagacgacaccaccagatagaagtcaccattcaggatttggacttttctgtggagatcctggccccgagatcgaacccttctccctgtgggtgttcccgcaggagatggtgctggagatccaccagctgttcatggaccatgaatacccatgtcaccacatcacttctcactgcacctgggtggcagcacactggaccacgtctcagagctgcgcagcatggcagggctgcaggcgggcttgctgctccacgtggtggaagagccctgcacaatgcacaaggcccacggtgatgagtgccacatttgagactgctcaggagcctggacccagctgatgcagctccttgtccttcctgagcgtcttcactgacagtggcctgagagacggcaggagcagaaagacttggagatggaccccaccgactgcacaccacccaagtacatcctgctagggaccctggaacagccactgtgtcccctgcaaccccagaacggtgactaaaagcccctgaaagtgctcaccgtgagcggctggtacctgtcccctgggaactgcaagatgcacaggaccttgtgtacctgtttgtgatcacagccgaggaccagcgaggtagcattaccacatccacacagggcttttaccataaccgccccagtactggaacgaggagctgcagatgatgagggacctacccaacaagaaccaacctgagcagctgcttcaagaaaaagccatgttcaaggtgcctgaatcccctggtaagtgagtgacagcctcacagcctcaggcccacctggctcctgctggaaggttttcttgtgctcgggagagaagtgagggaagccggcagtcccagccctgtcaggtgccctgaaggcccgtcaggtttgccctgcaaggccttctagcattctgcttcctgggagaccatcccccacctttctccggcctctgagactttgagtccttgggaggagaaggccctccttgctatctgggctgagtggccagggccatccagcttcccaccctccactgactgccatggggccctcccctgagcacatggtgcccaactgtagcccttctagggcaggggctcattggcagcacttgcagcttgctggcacttaaaagtcattagtgcggttactgagagaaatgaggaaaaaataattgttaaaaaaaaaa

SEQ ID NO: 345590 - DNA, 1813 bp, Homo sapiens
ctgggctggccttttcctctcccaggtgcgcttccctgcttgatctgtgtaccctgctctttctccttcattccgcagcctcctttgccctgtgacctgcaggtactggacggtccctagagaggataccgggacgctcctgaagccgcgagatgatttcaagcagatgcagcctgaccattagggccaaggccaaattgcaaaaaaaaaaagaagtttgcctttattctactccatccacatctaaactttggaggtcaaggctgtggacagatcagaagacatagttccctccttctggggctccacatccttcattcactgatctctgggaaggaggatgggtggcaggatgggtcttccatgatactgaagggagagccacatgttgatgcccaggaccagctgcctccttggtctgaaaggcctgatcgaggccaggattggctatgagagctgggaaatgggaccatctttgaagccatgggagagggtgagagccaccatcactcatgttcttgaatgggaactgcctggagaccctgaagaagaaggagcctgaaggaggaaggaggaggctgagccatcccgggaacatgggctggatgaggccaagccaggagacgacaccaccagatagaagtcaccattcaggatttggacttttctgtggagatcctggccccgagatcgaacccttctccctgtgggtgttcccgcaggagatggtgctggagatccaccagctgttcatggaccatgaatacccatgtcaccacatcacttctcactgcacctgggtggcagcacactggaccacgtctcagagctgcgcagcatggcagggctgcaggcgggcttgctgctccacgtggtggaagagccctgcacaatgcacaaggcccacggtgatgagtgccacatttgagactgctcaggagcctggacccagctgatgcagctccttgtccttcctgagcgtcttcactgacagtggcctgagagacggcaggagcagaaagacttggagatggaccccaccgactgcacaccacccaagtacatcctgctagggaccctggaacagccactgtgtcccctgcaaccccagaacggtgactaaaagcccctgaaagtgctcaccgtgagcggctggtacctgtcccctgggaactgcaagatgcacaggaccttgtgtacctgtttgtgatcacagccgaggaccagcgaggtagcattaccacatccacacagggcttttaccataaccgccccagtactggaacgaggagctgcagatgatgagggacctacccaacaagaaccaacctgagcagctgcttcaagaaaaagccatgttcaaggtgcctgaatcccctggtaagtgagtgacagcctcacagcctcaggcccacctggctcctgctggaaggttttcttgtgctcgggagagaagtgagggaagccggcagtcccagccctgtcaggtgccctgaaggcccgtcaggtttgccctgcaaggccttctagcattctgcttcctgggagaccatcccccacctttctccggcctctgagactttgagtccttgggaggagaaggccctccttgctatctgggctgagtggccagggccatccagcttcccaccctccactgactgccatggggccctcccctgagcacatggtgcccaactgtagcccttctagggcaggggctcattggcagcacttgcagcttgctggcacttaaaagtcattagtgcggttactgagagaaatgaggaaaaaataattgttaaaaaaaaaa

SEQ ID NO: 345591 - DNA, 214 bp, Homo sapiens
attgttgttttggggggttttttttgagatggagtctcactctgtcgaccaggctggatccgtctcaaaaaataaataaataaataaatggatgcttgcacactctctgacccagtatttattttacttatttttaccacaatttgttctagaaaagatatagtgataggtaaaatacaatcaaatgacataaattagaagtaggtgaaaagga

SEQ ID NO: 345592 - DNA, 262 bp, Homo sapiens
aacctgcaatattttacattcctaccagcaatgtacacatgtcaatttctctacctccttgcccacacttgctattttctttcttttcttatcccatcttagttggtgtccttttggtttgtatttctctaaccagtaatgatattaagcatcttttcatgtgcttattggccatttgtatgtctttatagaaatgtctattcaaattcattgcccctttttaaattagttatttatttatttatttgagatgaagtcttgc

SEQ ID NO: 345593 - DNA, 345 bp, Homo sapiens
tgacagtgtctcactttgttacccagagcgagacgcgagactccggctcaaaaaaaaaaaatttatttgcctgcaaatggatttactttatcctcgttcttaaaggactttttttcccttaggtgtgtaagattttaggttgacagtattttgtctctgcactttgcaaacaacgttctgtctctgggcatgggcagccgtagggtctgagcaggagccttggtttttggtgcttgtgctctgatgggctgacatgtatcctcagcctgtttagagtttgaggcctcttggatctgtggcttgaggccttcatcatgtttcttccagtgttgtttctgccccgtt

SEQ ID NO: 345594 - DNA, 795 bp, Homo sapiens
actccctcagtacattttaaacccagaaagacatcatttctaatgcctggtaacaccaacatttgcttagttttatttatatatttatcctttttgttgggcttcctgcattttttctactttttacttgggataatttgccttctgcctgaagaatatgagtgtgggtctgctggtgctgaattctgtcaatttttatttgccttggccaggcgcggtggctcacgcctgtaatcccagcactttgggaggccgagacaggcggatcacgaggtcaggagatcgagaccatcctggctaacacggtgaaaccctgtctctactaaacaaaatacaaaaaaattagctgggcgtggtgcgggcgcctgcagtcccagctactcgggaggctgaaaggcaggagaatggcgtgaacctgggaggcggagcttgcagtgagccaagatcccaccactgcactccagcctgggagacagagcgagacgcgagactccggctcaaaaaaaaaaaatttatttgcctgcaaatggatttactttatcctcgttcttaaaggactttttttcccttaggtgtgtaagattttaggttgacagtattttgtctctgcactttgcaaacaacgttctgtctctgggcatgggcagccgtagggtctgagcaggagccttggtttttggtgcttgtgctctgatgggctgacatgtatcctcagcctgtttagagtttgaggcctcttggatctgtggcttgaggccttcatcatgtttcttccagtgttgtttctgccccgtt

SEQ ID NO: 345595 - DNA, 610 bp, Homo sapiens
atgccgcatcctcgaaggtaccactcctcagagcgaggcagccgggggagttaccgtgaacactatcggagccgaaagcataagcgacgaagaagtcgctcctggtcaagtagtagtgaccggacacgacggcgtcggcgagaggacagctaccatgtccgttctcgaaggtgaggcctcaggaagagatactcaaacacagggtcactcgctcattcctttgttcaacaaatacttattggttatatgctaaaaccattgccttaagtagctggctgaaggtaatgtcgggatagataaccaaagaagccatttgggctgcagtgttaagtgttagaatacataatgaggaactgaggacgtacccagtgcgtttggttggagtggggcaggatgttaattcagataaaacattgcagagaaagcaacatctgtatatgtctggaggacaagtagagtcaggtgggggaagtgtctttgggcagagggaaagcatgtgcaaaggactgggagctacaggtaactaataagctaacagataagacaaagttagatctttgtgtttttaattttttaaaaattttaaaatatcatttatttatttttgaga

SEQ ID NO: 345596 - DNA, 435 bp, Homo sapiens
catcctcctttcttcagtgaacgaattaaaaaagagatgcagtgaagacacatttgcttcttatccacacatcacttcctctcactattagtcaatgtaggtagagctgagaatagcagtttcctgggaggacaaccacttcttagcgataaacaacacactgaaaaaaagtataaatcattcattaaaagctaacatattttaagaaaaataagcatatgcctgaataaaatgcttgtggaaaaataaagattcattttgttgatttctattgagctcagataacatttgactaaaagcttgcaaatatacagcagaaaaaacaatattatttgaaataagaattttgtgaataaagttattctgtcaatagaagtaaaaatattatgacctcatactaatagtctcatctatacttgtacaacattaaatgct

SEQ ID NO: 345597 - DNA, 241 bp, Homo sapiens
tcttctaagcacattatatatattaacttattaaattctcacaaaaatcctatgaggtaaatactattatcatccctatgttacagatgaggaaaatgttaaataacttacctagtgagtgtagcataggctctggtgtaaaaagctgattcaaacacctgccttgccactgtgaatcacggccctcagtcctttcctgtgaaaaattgatttttattttttttgagacaaggtcttaccc

SEQ ID NO: 345598 - DNA, 869 bp, Homo sapiens
tgtgcccagcctcactgttaaaattttaatcctagccacagtcctctcccacctggatagcttcctgcatcactgtggctgcccctagtcccacacaccacctcacaggtagagagaccttttggagccaggtagaaaggtttagactgaagagaataacctggaggagcaggaggcccctgtgctgcttggcagtggttggttaggccagaacatcgtgccattagcagtttgctcaaaccatgcagccctctaagctgtatatgatgtgccccacagcaaggcaccccaccagaaccaggaaataggggcgccttctgagagctgaacacgtggaagatcagaacagagacattcactgtcttacagggactaatgggctcccaacccagcaaatcttatctgtaaacccatcgaaagatacaatgtgtcagaaagcagactatcaatctgagagactcattcatttctgtgcatcccagtcctgtccaagagaccggaggcctgagtgcgctagctaaaacaagtgacaagaaagctaactaaccttgaaaaagtgggtctttattggcttatgctgaaaagtccaggggtagtttggcttcaggtgcagctggatccaggaacccaaacagtgtcattaagaccttgcccttgggccgggcatggtggctcatcacacttgtaatcccaacactttgggaggccgaggtgggtggatcatctgcagtcaggagttcaagaccagcctggccaacatggtgaaaccccgtctctactaaaaatacaaaaagtagctgggtgttgtggtgcacacctgtagtcccagctacttgggaggctgaggcaggagaattgtttgaacccag

SEQ ID NO: 345599 - DNA, 606 bp, Homo sapiens
tgaagtgaaagattaaaaggcactacaagagagttgagattatataataagctgtttcagcagtgagctgtgagaagaaaagtagtctcagtagctcctatgctaaaagacctatagctgctaacaatcgtcctccttccatctctagccatcaagtgtatgctaacaaaacagactaaaaaagttgttaacaaaccactgagaaggacaacatttaagcaggatgacatacaaaggaacaaatgcataaaaactaatcttggaatgaatcagtacagcttttagggaagtaccttatagcacactcagtttacttttgtaattgttgtatggcaatattttaagtagagaatttattttactgttacctataattatgtttaagttcaaccttttctctgatccaagtactaaccaggcctgaccctgcttcgctcccgagatcgggcgcgttaggtggtatggctgtagacaaggtaaaccttttctgagagaggaaaacgtctctagcagatgaagaggaattccaaagtcttgtttaggtcacatatttgtcactagagcatcaacgccacctatggataatttccatattactggtttgga

SEQ ID NO: 345600 - DNA, 1531 bp, Homo sapiens
cttcaatacaataatagttggggacttcaacaatctgctctcagcatttttaacagatcacctagacggaagaatcaacatagaaacattggattttaactggattttagtaagaacagaaaataaataagctggactttagatcaaatttgacttaacatttacaaaacattttattttatccaaaagctgcagaatacacattcttctcatcagcacatggaacattctccaggataggccatatgttaggccacaaaataaatctcaacacattttaaaattaagatcaaatcaagcatctttttaaactacaatggaataaaagtagaaataacaggagctttggaaactgtacaaatacatggaaattaaacaatatgctcctgaatgaccactgggtcgatgaagaaattgagaggaaatttttaaaaatatgtttttaaatatttaatatgaaaatagaaatgcaacatacccacacctatgggatacagaaaagcagtgctaaaagggaagtatatagcactaaatgcctatatcacaaaagcagaaatattttaaataaacagcctagtgatacacctcaaggaactagaaaaccaatgacaaaccaaacccaaaattagtagaaggaaaagtatagtaaatatcagaacaaaaacaaaatagagactaaaaaacaatacaaaggatcaagagacaaaaagtgcgtgttttaaaaaaaagatacacaaaattgataaacctcctagctagactaaccatgaaaaaaggaagaagagtcaaataaaatcagaaatgagaaagaagatattataactgataccacagaaacacaaaggatcatcagagattactatgaacaactatagccaacaaaatggaaaacctagaagagaaaatttttaatgttcctagcacaagaaaaagataaatgactgaggtgagagctatcctaaataccctggtttgatcattacaccttgcataattgtctcaaaatatgacatataccccataaatgcatataattgttatatgtctattaacaaaattttaaaaataaggactggatgtgggtgatgaataaatgaggatttggtatactattttctctacttcttatgttcaaaatattttataataagttaaaatgaataataaaataaccaaaaaagatctcaaaaactactatattttgtacattcatattacaggcacactttattgtacttcgctttattgctctttgtaggtattgagttttttacaaattgaaggtttgtgacaaccctgtatcaaggaagtctatcagtgccatttttttccaacagcatgtgctcactttttatctctatgtctcatttggtaattcacataatatttcaaactttttcattaataaataactgttatggtgatctgtgatcagtgatatttgatgttagtgttgtactatagggtgccaataactctgcctatacaagatggtgtacttaatcaataaacgtgtattctgactgcctta

SEQ ID NO: 345601 - DNA, 1008 bp, Homo sapiens
ggatttggtttgccagtattttattaagaatttttgcattgatgttcatcagggatattggcctgaaattttctttttttgttgtgtctctgccaggttttggtatcaggatgatgctggcttcataaaatgagttagggaggattccctctttttctattgttggaatagtttcagaaggaatgttcccagctcctctttgtacctctggtagaattcggctgtgaatctctctggtcctggacttttattggttggtaggctattaattgctgcctcagtttcagaacttgttataggtctattcagggatttgacctctttctggtttagtcttgggagggtgtatgtgtccagaaatttatccatttagaagagaaaatttttaatgttcctagcacaagaaaaagataaatgactgaggtgagagctatcctaaataccctggtttgatcattacaccttgcataattgtctcaaaatatgacatataccccataaatgcatataattgttatatgtctattaacaaaattttaaaaataaggactggatgtgggtgatgaataaatgaggatttggtatactattttctctacttcttatgttcaaaatattttataataagttaaaatgaataataaaataaccaaaaaagatctcaaaaactactatattttgtacattcatattacaggcacactttattgtacttcgctttattgctctttgtaggtattgagttttttacaaattgaaggtttgtgacaaccctgtatcaaggaagtctatcagtgccatttttttccaacagcatgtgctcactttttatctctatgtctcatttggtaattcacataatatttcaaactttttcattaataaataactgttatggtgatctgtgatcagtgatatttgatgttagtgttgtactatagggtgccaataactctgcctatacaagatggtgtacttaatcaataaacgtgtattctgactgcctta

SEQ ID NO: 345602 - DNA, 2911 bp, Homo sapiens
cttcaatacaataatagttggggacttcaacaatctgctctcagcatttttaacagatcacctagacggaagaatcaacatagaaacattggattttaactggattttagtaagaacagaaaataaataagctggactttagatcaaatttgacttaacatttacaaaacattttattttatccaaaagctgcagaatacacattcttctcatcagcacatggaacattctccaggataggccatatgttaggccacaaaataaatctcaacacattttaaaattaagatcaaatcaagcatctttttaaactacaatggaataaaagtagaaataacaggagctttggaaactgtacaaatacatggaaattaaacaatatgctcctgaatgaccactgggtcgatgaagaaattgagaggaaatttttaaaaatatgtttttaaatatttaatatgaaaatagaaatgcaacatacccacacctatgggatacagaaaagcagtgctaaaagggaagtatatagcactaaatgcctatatcacaaaagcagaaatattttaaataaacagcctagtgatacacctcaaggaactagaaaaccaatgacaaaccaaacccaaaattagtagaaggaaaagtatagtaaatatcagaacaaaaacaaaatagagactaaaaaacaatacaaaggatcaagagacaaaaagtgcgtgttttaaaaaaaagatacacaaaattgataaacctcctagctagactaaccatgaaaaaaggaagaagagtcaaataaaatcagaaatgagaaagaagatattataactgataccacagaaacacaaaggatcatcagagattactatgaacaactatagccaacaaaatggaaaacctagaggaaatgggtaaattcctggacacatacaaccttccaagattgaacctggaagaaatagaaaacctgaacagaccaataactggtaatgagattgaatcagtaataagtctcccaacaaagagaagcccagtagtggatgactttattgctgaaccctaccaaacctatagagaaaaactaacaccaattcttcacaaactgtttaaaaacaattgaagaggagggaatttttcctaactcattctacaaggccagcacaaccctgacaccaaaaccagagaaggacacaacgaaaaagaaagctacaggccaatatccctgatgaacacaggcataaaaatcatcaacaaaatgctagcaagctgaattcaacagtacaccaaaaagataatatactatggtcaagtgtgatttacccaaagatgcaaggatggtttaacacatgcaaatcaataaatgtgatgacatcagtggaatgaaggaaaaaactttatgattatctcaatagatgcagaaaattgtttgataaattcagtatcccttcatgataaaaaaaaaactctcaacaaattagacatacaaggaacatacctcaacataataaaggccatatatgacagattcacagctgacatcatactaaatggggaaaagctgaaagaccttcttctaaaaactggaaccagagcaggatgcccacattcaccactcttattcaacatagcactagaagttctagccagagcaatcaggcaagagaaataaataaaaagcatctaaattggaaaagagtaagtcaaattgtctctttctgtagatagcatgatcttatatatagacaacctaaagactttaccaagaaaaacccttacaactgataaattcagtaaaatatcagaatataatattagtagtattttgatgcatcaatgatgaaaaagctgaaaaagaaatcaggaagacaatcccatttacaataattaaaagataaaatacctcggatctaaccaaaaaggtgaaaggtctctacaagggaaactacaaaacactaatgaaagaaataaacaaatggaaagacattccatgtgcatgaatcagaagaattaatatcattaaaatgtttacccaaagtaaacttgattcaaagcaatctctatcaaaatactattgtcatttgtcacagaaattgaaaacaaaaataccaaagttcatatgaaatcaaaaaagaatcagaatagccaaagcaaccctgagcaaaaaagaaaaagctggaagcatcacactacttaacttcaaaacattacagggctatggtaacccaaagagcatggtattgatataaacagacacacagaccaatggaacagaatagaaaacccagaaataaatacatatatttaccaccaactgattttcaccaaaggtgccaagaatgtgtatcagggaagggataccctcttcgataaagggtactgagaaaactgaatattcatctgcaaaataatgaaactagacccctaatgtctcaccatacacaaaaattaaaatgattaaagacataaatataagacctgaaattatgaaactactggaagaaaccacaggggaaatgtttcaggacataggtcaaggcaaaaattttgtggctaagatctcaaaaacaaaaatagacaaatgggactatattaagctaaaaagattctgcaaaacaaaggaaacagtcaacagagtgaagagacaatctgtagaacaggaaaatatgtgcaaactatttatccaacaagggactaatattgagaatatacaaggaattcaacagcaaaaaaaaaatcccttttaaaaagtaggcaaaggacatgaagagacatttctcaaaagaagacatacaaatggccaagtatatgaaaaaatgtttaacatcactagccatcagggaaatgcatatcaaaaccacaatgagatatcaccttaccccacttagaatgactattattaaaaagaccaaaaaaaaaa

SEQ ID NO: 345603 - DNA, 463 bp, Homo sapiens
tctgctgtcctgaattgtacacgtgggaactgaaggagaccccggaatctggagacacagaggtctctagggccttagaaaagctgatagatggggcgtgctgcgaagtccaggccgagccttagacttgggaggtgggcgtgggaaggaggtcagggaaggaggctgttaaacctctgggaaatatggaccctccttaatacttcctattcaacaactattaataacagttgtgataaattaaggaacaggagccatgtgacaggcttgtctgaagcactttacatacatttccttatttcatcctcatagtacccttatgagctctgagttagattcagaggggaaaaaaacttgcccaaaatgcacagctaacaagttagcaaggaataaagacagggttggtgtccagggctgtctggctccagggcctgagaacttagctcttcttctaggccactcc

SEQ ID NO: 345604 - DNA, 431 bp, Homo sapiens
tgaagacattccttggatcatttagatgccggcaaggtccagtaattgtttcttattgctctctatgattccatgaagattaacatgtaaaatattttgagcatatggattttttattccacatataaagaaaatattcagtgatcatagagtgactgaaagcttggatggagcttcaatatctcttattagctgagctgtcttgcacaagttatttaacttgttaacagtctccatttcttatctttgtaaaatagggataatgataatacttcctcctagggttgttaggatggacaaaggagataatgatgggccaggcacttaccacattgcctgcattaaatactgggggaggttggctcttaatcactatgttggccctttaaggggacaaatacttttaaatttccctaataatttggaaggta

SEQ ID NO: 345605 - DNA, 603 bp, Homo sapiens
aagctgctggaggctagattgaccagaaaaatggggccaatatcatgattcctcagcagtgcctggagaagaccaggagaggaagcagaagaccctcctcaaagaagcagccttcacctccagacctcccagcgggacttagacaatggggttaggcagtcacatgtctgcacgtggaaactttctgggactgtgcttggatcctggctctgccttttactagccatgtgaccttgggaaaatcacttgacttctccgtgcaggattcctcatctgtaaaaatggtctaagattaggagccacctcaaggttgttgtaggaattaaattaattcatgtttataaagtgctttgaacagcgtttggcacatggtaagtgctatgtggtaagtgctgtctattgattacataaataaaagtgatcaccattagactttccatgcagatgatattatgcatatacatatctcccgcatatgacgtcattggatcgttttgcaatggtggggggtttattcttttcctttttgttttcttcttttttttgtcagatgaagaaactgatgggaagtgaattggtttgtattaaacattaggtttgcta

SEQ ID NO: 345606 - DNA, 1380 bp, Homo sapiens
taatttctcccctagcaagaatgaggaagatgaagagctcgggtatctgagggctggtgtgtctgcatgcgtgtgtgttttgggggccgactgaaggaagagaaggctggagagagggaacatgggtctgagggcacatcgctaaggggtcaagaggcctaaagggggagtctaaggctctccatcgaacttggacttggtctacattagactttaacctccatgaggcttggactttcaggcttcctccctcacaccgcgggcaggtgaggcgtctgctacaggcctggtctcgcagagggggcccagcgccccccgccgccgccttctcctggagtctgtgtgacagaatgggacctgtgggaaagcagcacgtcagcacccagccccgcttgcgcgccagcagctaattaaagccaggaaggtgatggcgattttcaactcattcccgttacaaacagccgaccttcctaccgagttcaagtaccttctgcctggcctggaagaacaatatctctctgtctccctcttccactggccctcacctgccttcccctgaacatgcattttgcctgacaggagacagaggcagttgatgcttgcagcttggtccaggaggccagcaggaccagagagaagaccacagcgacacatggggatggctgtcccacaggcagaaatgagcagccgggaggaagcccaggcagccagccacccagctccctccacatcgtggccctagaacggagtcttgaagaataagaagccacagcttgtcagggaatcaggctggaaaaatgttatgagactgagtaagaccagagattcctcagcagtgcctggagaagaccaggagaggaagcagaagaccctcctcaaagaagcagccttcacctccagacctcccagcgggacttagacaatggggttaggcagtcacatgtctgcacgtggaaactttctgggactgtgcttggatcctggctctgccttttactagccatgtgaccttgggaaaatcacttgacttctccgtgcaggattcctcatctgtaaaaatggtctaagattaggagccacctcaaggttgttgtaggaattaaattaattcatgtttataaagtgctttgaacagcgtttggcacatggtaagtgctatgtggtaagtgctgtctattgattacataaataaaagtgatcaccattagactttccatgcagatgatattatgcatatacatatctcccgcatatgacgtcattggatcgttttgcaatggtggggggtttattcttttcctttttgttttcttcttttttttgtcagatgaagaaactgatgggaagtgaattggtttgtattaaacattaggtttgcta

SEQ ID NO: 345607 - DNA, 1597 bp, Homo sapiens
taatttctcccctagcaagaatgaggaagatgaagagctcgggtatctgagggctggtgtgtctgcatgcgtgtgtgttttgggggccgactgaaggaagagaaggctggagagagggaacatgggtctgagggcacatcgctaaggggtcaagaggcctaaagggggagtctaaggctctccatcgaacttggacttggtctacattagactttaacctccatgaggcttggactttcaggcttcctccctcacaccgcgggcaggtgaggcgtctgctacaggcctggtctcgcagagggggcccagcgccccccgccgccgccttctcctggagtctgtgtgacagaatgggacctgtgggaaagcagcacgtcagcacccagccccgcttgcgcgccagcagctaattaaagccaggaaggtgatggcgattttcaactcattcccgttacaaacagccgaccttcctaccgagttcaagtaccttctgcctggcctggaagaacaatatctctctgtctccctcttccactggccctcacctgccttcccctgaacatgcattttgcctgacaggagacagaggcagttgagatggagtcttgctatatggcccagctggtaatgcctagattcttgagtccctccctggctcatccctgggagcagcactgaaccccttgtctgacacctgtctggaaatggagcctgcacattgaccctagccatgtgtggtcttgttactaagtgttagccagtgagagaacatacaagaggaggcccatgttgattcagaggatgaatgagagatgcttgcagcttggtccaggaggccagcaggaccagagagaagaccacagcgacacatggggatggctgtcccacaggcagaaatgagcagccgggaggaagcccaggcagccagccacccagctccctccacatcgtggccctagaacggagtcttgaagaataagaagccacagcttgtcagggaatcaggctggaaaaatgttatgagactgagtaagaccagagattcctcagcagtgcctggagaagaccaggagaggaagcagaagaccctcctcaaagaagcagccttcacctccagacctcccagcgggacttagacaatggggttaggcagtcacatgtctgcacgtggaaactttctgggactgtgcttggatcctggctctgccttttactagccatgtgaccttgggaaaatcacttgacttctccgtgcaggattcctcatctgtaaaaatggtctaagattaggagccacctcaaggttgttgtaggaattaaattaattcatgtttataaagtgctttgaacagcgtttggcacatggtaagtgctatgtggtaagtgctgtctattgattacataaataaaagtgatcaccattagactttccatgcagatgatattatgcatatacatatctcccgcatatgacgtcattggatcgttttgcaatggtggggggtttattcttttcctttttgttttcttcttttttttgtcagatgaagaaactgatgggaagtgaattggtttgtattaaacattaggtttgcta

SEQ ID NO: 345608 - DNA, 693 bp, Homo sapiens
aggatggggtaaaccactcccatgattcaattatctcccactgggtccctcccatgtcacatggggattatgggagctacaattcaagatgagctttgggtggggacacagccaaaccatatcaccatctgtggaaccctcatcatctgctttgagaaaggacccagagtcagcttcattttacagctaaagtctgaagcttggaaagttttcataattagcccaagctcattgggccacggaacggtgaggagatctgactatctctgacaccacagattttctctgaactgctcttgtgagccaacttccagctgactgcctaagagggcagcaatagtttagctaagatttagagtcagtacttaaacaatagcttcatatttcattatgggaagtaagccatgcaaaagtgctttattgttgtagtatgtatacacacacacacacacacacacgcacacacacacgcacagcaggcagacaatgcaaaggaaatataccctccagccgcttcctactaaaaatatgctgtgatttgtggacctgcaacacggggtccctagaacgtctagtcccatcctagtcctgctgccccagcgtctgcatttaacaagtttatgcagattccagaagccctgctaggagcagcatctttgcctgccttccatgttctgcttgctacaacccctc

SEQ ID NO: 345609 - DNA, 570 bp, Homo sapiens
  misc_feature (514)..(514): n is a, c, g, or t
aggatggggtaaaccactcccatgattcaattatctcccactgggtccctcccatgtcacatggggattatgggagctacaattcaagatgagctttgggtggggacacagccaaaccatatcaccatctgtggaaccctcatcatctgctttgagaaaggacccagagtcagcttcattttacagctaaagtctgaagcttggaaagttttcataattagcccaagctcattgggccacggaacggtgaggagatctgactatctctgacaccacagattttctctgaactgctcttgtgagccaacttccagctgactgcctaagagggcagcaatagtttagctaagatttagagtcagtacttaaacaatagcttcatatttcattatgggaagtaagccatgcaaaagtgctttattgttgtagtatgtatacacacacacacacacacacacgcacacacacacgcacagcaggcagacaatgcaaaggaaatataccctcttgccgncgtcctcatcctaaacctgacttccctaattccccccatccttaccaccctcgttt

SEQ ID NO: 345610 - DNA, 820 bp, Homo sapiens
cgccgcgcccattcagggactgcgttcgccggagcgcgacccggggactcccaggcctgtgggcgggccctgcccaggactgggcggtgccataacccctagtttaaaaactcgcgggtaccggacccaagatcggggacccggcggcggctccgcgggggaaacagcgaggctggcgcagcgccgaggccgcggccctgggggcccgcaatccacgccacggaatccccgagtgagcaggggtgagcgcagccactgcccaacgcaaaccgtgaagaagcttctggaagagcagaggcgccgccagcagcagcagcccgacgctggcggggtgcagggacaatttctccctcccccagagcagcccctgaccccatctgtgaatgaggctgtgactggccaccctcccttcccagcacactcggagactgtgggttctggacctagcagcctgggctttccagactgggaccccaacacgcatgctgcctacactgacagcccctactcttgccctgcttctgctgccgaaaatttcctgcctcctgacttctacccaccctcggacccagggcagccgtgcccatttccccagggcatggaggtgagatacagagtgggtacaggatgctgaagggcccctaaaaattcgcagttgcactcctgcagtattctgagatgtctggagctcagttacgattcccttttccaggccgggcgtggtggctcacacctgtaatcccagcactttgggaggctgaggcaggcggatcacttgaggtcaggcgtttgagaccagcttggccaacatggtgaaacc

SEQ ID NO: 345611 - DNA, 668 bp, Homo sapiens
ttcgaatagtatgctgcttgggcacgctggatcatccagtgtgcagaacaatgaagatagaccgttacctcttgccatatatcagcagcacgtcacaatgaatcacagatttaaactctcgcatacctcgaagctagtgagactactagtggcaacatggtgaatcctggtaatcctgtctagtagtcaacctgccggggtgccagatggtacagtggtccgccgcctgacaacgtcgggactgtgatagagtcagtgcactttcggacagactgctctctgattcagagctcagctgggcccccagttccagaccccagcattcccggtcactccctccctaatctgagcatcactcaagctctttattaaactcaatttgggccagatttggtggctcatgcctgtaatcctaacactctgggaggccgaggcgggcggatcacttgaggtgaggagtttgagaccagcctggccaacatggtgaaaccctgtctccactaaaaatacaaaaacaattggctggacatggtggcatgcgcctgtagtcccagctacttgggaggctgaggcagaagaattgattgaacccaggaggcggaggttgcagtgagccgagattgtgccactgcactccagcctaggtgacaaagagagactctgtctca

SEQ ID NO: 345612 - DNA, 2626 bp, Homo sapiens
cgccgcgcccattcagggactgcgttcgccggagcgcgacccggggactcccaggcctgtgggcgggccctgcccaggactgggcggtgccataacccctagtttaaaaactcgcgggtaccggacccaagatcggggacccggcggcggctccgcgggggaaacagcgaggctggcgcagcgccgaggccgcggccctgggggcccgcaatccacgccacggaatccccgagtgagcaggggtgagcgcagccactgcccaacgcaaaccgtgaagaagcttctggaagagcagaggcgccgccagcagcagcagcccgacgctggcggggtgcagggacaatttctccctcccccagagcagcccctgaccccatctgtgaatgaggctgtgactggccaccctcccttcccagcacactcggagactgtgggttctggacctagcagcctgggctttccagactgggaccccaacacgcatgctgcctacactgacagcccctactcttgccctgcttctgctgccgaaaatttcctgcctcctgacttctacccaccctcggacccagggcagccgtgcccatttccccagggcatggaggctggaccctggagagtttctgcacccccttcaggacccccacagttccccgctgtggtccctggaccatcgctggaggtggcccgagctcacatgctggctttggggccacagcagctgctggcccaggatgaggagggggacacgtgagtataagggatagggttgtctgcagactcttggcttggtgggggctgttctcacggctgtcccccacctgtcctcaggctccttcacctgtttgcggctcgggggctgcgctgggcggcatatgctgcggctgaggtgctccaggtgtaccggcgtcttgacattcgtgagcataagggcaagacccctctcctggtggcggctgctgccaaccagcccctgattgtggaggatctgttgaacctgggagcagagcccaatgccgctgaccatcagggacgttcggtcttgcacgtggccgctacctacgggctcccaggagttctcttggctgtgcttaactctggggtccaggttgacctggaagccagagacttcgagggcctcaccccgctccacacggccatcctggcccttaacgttgctatgcgcccttccgacctctgtccccgggtgctgagcacacaggcccgagacaggctggattgtgtccacatgttgctgcaaatgggtgctaatcacaccagccagagatgaggtcttgctgtgttgtccaggctggtctgcagctcctggcctcaagtgatcctccttcttcagcttcccaaagtgctaggattacaggcgtgaaccaccgcactccgccaagggagatcaagagcaacaagacagttctgcacttggccgtgcaggctgccaaccccactctggttcagctgctgctggagctgccccggggagacctgcggacctttgtcaacatgaaggcccacgggaacacagccctccacatggcggctgccctgccccctgggccggcccaggaggccatcgtgcggcacctgttggcagctggggcggaccccacactgcgcaacctggagaatgagcagcccgttcacctgctgcggcccgggccgggccctgaggggctccggcagctgttgaagaggagccgtgtggcgccgccaggcctgtcctcttaggactcaaacccagaccctggactgattttccagtccccaccgtcctgcgggacagccagcgtatgctaatgttgcaaacccatgataatgtatgtggaatatcctgccattggggttttacattaaaaccccagaatggctgcagaggggtgaacaggccccaatatttggggtgctgtgatacccctcttctacccacaaggagccctcttgatgatttctgtgaaatcgaggccccttgattgtttctgtgaaacaccctgcacccctagtcctttccccactgagatctttcgggttctctcccctaactcagctcttcgttcccagaaacccagatgtaatccccctacgtggtgcttggggcatcccgataccatctcagtaaatctcctacaatggcctcctcaccctccccgggacccacacccttcaggtcctcaccctgagacaggagggaccctctgagatcagggacccttaggtctcactgctctctgattcagagctcagctgggcccccagttccagaccccagcattcccggtcactccctccctaatctgagcatcactcaagctctttattaaactcaatttgggccagatttggtggctcatgcctgtaatcctaacactctgggaggccgaggcgggcggatcacttgaggtgaggagtttgagaccagcctggccaacatggtgaaaccctgtctccactaaaaatacaaaaacaattggctggacatggtggcatgcgcctgtagtcccagctacttgggaggctgaggcagaagaattgattgaacccaggaggcggaggttgcagtgagccgagattgtgccactgcactccagcctaggtgacaaagagagactctgtctca

SEQ ID NO: 345613 - DNA, 2542 bp, Homo sapiens
cgccgcgcccattcagggactgcgttcgccggagcgcgacccggggactcccaggcctgtgggcgggccctgcccaggactgggcggtgccataacccctagtttaaaaactcgcgggtaccggacccaagatcggggacccggcggcggctccgcgggggaaacagcgaggctggcgcagcgccgaggccgcggccctgggggcccgcaatccacgccacggaatccccgagtgagcaggggtgagcgcagccactgcccaacgcaaaccgtgaagaagcttctggaagagcagaggcgccgccagcagcagcagcccgacgctggcggggtgcagggacaatttctccctcccccagagcagcccctgaccccatctgtgaatgaggctgtgactggctggaccctggagagtttctgcacccccttcaggacccccacagttccccgctgtggtccctggaccatcgctggaggtggcccgagctcacatgctggctttggggccacagcagctgctggcccaggatgaggagggggacacgtgagtataagggatagggttgtctgcagactcttggcttggtgggggctgttctcacggctgtcccccacctgtcctcaggctccttcacctgtttgcggctcgggggctgcgctgggcggcatatgctgcggctgaggtgctccaggtgtaccggcgtcttgacattcgtgagcataagggcaagacccctctcctggtggcggctgctgccaaccagcccctgattgtggaggatctgttgaacctgggagcagagcccaatgccgctgaccatcagggacgttcggtcttgcacgtggccgctacctacgggctcccaggagttctcttggtatggccagctggcaggcaggggtttgtctggggggtagactggttgcccagattttggcttccagggccaggaggccaggggatacccttacccagcagtctgccttctcttcctcccaggctgtgcttaactctggggtccaggttgacctggaagccagagacttcgagggcctcaccccgctccacacggccatcctggcccttaacgttgctatgcgcccttccgacctctgtccccgggtgctgagcacacaggcccgagacaggctggattgtgtccacatgttgctgcaaatgggtgctaatcacaccagccagagatgaggtcttgctgtgttgtccaggctggtctgcagctcctggcctcaagtgatcctccttcttcagcttcccaaagtgctaggattacaggcgtgaaccaccgcactccgccaagggagatcaagagcaacaagacagttctgcacttggccgtgcaggctgccaaccccactctggttcagctgctgctggagctgccccggggagacctgcggacctttgtcaacatgaaggcccacgggaacacagccctccacatggcggctgccctgccccctgggccggcccaggaggccatcgtgcggcacctgttggcagctggggcggaccccacactgcgcaacctggagaatgagcagcccgttcacctgctgcggcccgggccgggccctgaggggctccggcagctgttgaagaggagccgtgtggcgccgccaggcctgtcctcttaggactcaaacccagaccctggactgattttccagtccccaccgtcctgcgggacagccagcgtatgctaatgttgcaaacccatgataatgtatgtggaatatcctgccattggggttttacattaaaaccccagaatggctgcagaggggtgaacaggccccaatatttggggtgctgtgatacccctcttctacccacaaggagccctcttgatgatttctgtgaaatcgaggccccttgattgtttctgtgaaacaccctgcacccctagtcctttccccactgagatctttcgggttctctcccctaactcagctcttcgttcccagaaacccagatgtaatccccctacgtggtgcttggggcatcccgataccatctcagtaaatctcctacaatggcctcctcaccctccccgggacccacacccttcaggtcctcaccctgagacaggagggaccctctgagatcagggacccttaggtctcactgctctctgattcagagctcagctgggcccccagttccagaccccagcattcccggtcactccctccctaatctgagcatcactcaagctctttattaaactcaatttgggccagatttggtggctcatgcctgtaatcctaacactctgggaggccgaggcgggcggatcacttgaggtgaggagtttgagaccagcctggccaacatggtgaaaccctgtctccactaaaaatacaaaaacaattggctggacatggtggcatgcgcctgtagtcccagctacttgggaggctgaggcagaagaattgattgaacccaggaggcggaggttgcagtgagccgagattgtgccactgcactccagcctaggtgacaaagagagactctgtctca

SEQ ID NO: 345614 - DNA, 2436 bp, Homo sapiens
cgccgcgcccattcagggactgcgttcgccggagcgcgacccggggactcccaggcctgtgggcgggccctgcccaggactgggcggtgccataacccctagtttaaaaactcgcgggtaccggacccaagatcggggacccggcggcggctccgcgggggaaacagcgaggctggcgcagcgccgaggccgcggccctgggggcccgcaatccacgccacggaatccccgagtgagcaggggtgagcgcagccactgcccaacgcaaaccgtgaagaagcttctggaagagcagaggcgccgccagcagcagcagcccgacgctggcggggtgcagggacaatttctccctcccccagagcagcccctgaccccatctgtgaatgaggctgtgactggccaccctcccttcccagcacactcggagactgtgggttctggacctagcagcctgggctttccagactgggaccccaacacgcatgctgcctacactgacagcccctactcttgccctgcttctgctgccgaaaatttcctgcctcctgacttctacccaccctcggacccagggcagccgtgcccatttccccagggcatggaggctggaccctggagagtttctgcacccccttcaggacccccacagttccccgctgtggtccctggaccatcgctggaggtggcccgagctcacatgctggctttggggccacagcagctgctggcccaggatgaggagggggacacgtgagtataagggatagggttgtctgcagactcttggcttggtgggggctgttctcacggctgtcccccacctgtcctcaggctccttcacctgtttgcggctcgggggctgcgctgggcggcatatgctgcggctgaggtgctccaggtgtaccggcgtcttgacattcgtgagcataagggcaagacccctctcctggtggcggctgctgccaaccagcccctgattgtggaggatctgttgaacctgggagcagagcccaatgccgctgaccatcagggacgttcggtcttgcacgtggccgctacctacgggctcccaggagttctcttggctgtgcttaactctggggtccaggttgacctggaagccagagacttcgagggtaagttgggtgtgggcagggctggtgtggttggtgtggctgggcgaggtgggtgcagatgcgggtccctcactgtctccattctgcaggcctcaccccgctccacacggccatcctggcccttaacgttgctatgcgcccttccgacctctgtccccgggtgctgagcacacaggcccgagacaggctggattgtgtccacatgttgctgcaaatgggtgctaatcacaccagccagagatgaggtcttgctgtgttgtccaggctggtctgcagctcctggcctcaagtgatcctccttcttcagcttcccaaagtgctaggattacaggcgtgaaccaccgcactccgccaagggagatcaagagcaacaagacagttctgcacttggccgtgcaggctgccaaccccactctggttcagctgctgctggagctgccccggggagacctgcggacctttgtcaacatgaaggcccacgggaacacagccctccacatggcggctgccctgccccctgggccggcccaggaggccatcgtgcggcacctgttggcagctggggcggaccccacactgcgcaacctggagaatgagcagcccgttcacctgctgcggcccgggccgggccctgaggggctccggcagctgttgaagaggagccgtgtggcgccgccaggcctgtcctcttaggactcaaacccagaccctggactgattttccagtccccaccgtcctgcgggacagccagcgtatgctaatgttgcaaacccatgataatgtatgtggaatatcctgccattggggttttacattaaaaccccagaatggctgcagaggggtgaacaggccccaatatttggggtgctgtgatacccctcttctacccacaaggagccctcttgatgatttctgtgaaatcgaggccccttgattgtttctgtgaaacaccctgcacccctagtcctttccccactgagatctttcgggttctctcccctaactcagctcttcgttcccagaaacccagatgtaatccccctacgtggtgcttggggcatcccgataccatctcagtaaatctcctacaatggcctcctcaccctccccgggacccacacccttcaggtcctcaccctgagacaggagggaccctctgagatcagggacccttaggtctcactgctctctgattcagagctcagctgggcccccagttccagaccccagcattcccggtcactccctccctaatctgagcatcactcaagctctttattaaactcaatttgggccaga

SEQ ID NO: 345615 - DNA, 2191 bp, Homo sapiens
cgccgcgcccattcagggactgcgttcgccggagcgcgacccggggactcccaggcctgtgggcgggccctgcccaggactgggcggtgccataacccctagtttaaaaactcgcgggtaccggacccaagatcggggacccggcggcggctccgcgggggaaacagcgaggctggcgcagcgccgaggccgcggccctgggggcccgcaatccacgccacggaatccccgagtgagcaggggtgagcgcagccactgcccaacgcaaaccgtgaagaagcttctggaagagcagaggcgccgccagcagcagcagcccgacgctggcggggtgcagggacaatttctccctcccccagagcagcccctgaccccatctgtgaatgaggctgtgactggccaccctcccttcccagcacactcggagactgtgggttctggacctagcagcctgggctttccagactgggaccccaacacgcatgctgcctacactgacagcccctactcttgccctgcttctgctgccgaaaatttcctgcctcctgacttctacccaccctcggacccagggcagccgtgcccatttccccagggcatggaggaccccccagacacccagttctatgtaggatcttctctgccacagctggaccctggagagtttctgcacccccttcaggacccccacagttccccgctgtggtccctggaccatcgctggaggtggcccgagctcacatgctggctttggggccacagcagctgctggcccaggatgaggagggggacacgctccttcacctgtttgcggctcgggggctgcgctgggcggcatatgctgcggctgaggtgctccaggtgtaccggcgtcttgacattcgtgagcataagggcaagacccctctcctggtggcggctgctgccaaccagcccctgattgtggaggatctgttgaacctgggagcagagcccaatgccgctgaccatcagggacgttcggtcttgcacgtggccgctacctacgggctcccaggagttctcttggctgtgcttaactctggggtccaggttgacctggaagccagagacttcgagggcctcaccccgctccacacggccatcctggcccttaacgttgctatgcgcccttccgacctctgtccccgggtgctgagcacacaggcccgagacaggctggattgtgtccacatgttgctgcaaatgggtgctaatcacaccagccaggagatcaagagcaacaagacagttctgcacttggccgtgcaggctgccaaccccactctggttcagctgctgctggagctgccccggggagacctgcggacctttgtcaacatgaaggcccacgggaacacagccctccacatggcggctgccctgccccctgggccggcccaggaggccatcgtgcggcacctgttggcagctggggcggaccccacactgcgcaacctggagaatgagcagcccgttcacctgctgcggcccgggccgggccctgaggggctccggcagctgttgaagaggagccgtgtggcgccgccaggcctgtcctcttaggactcaaacccagaccctggactgattttccagtccccaccgtcctgcgggacagccagcgtatgctaatgttgcaaacccatgataatgtatgtggaatatcctgccattggggttttacattaaaaccccagaatggctgcagaggggtgaacaggccccaatatttggggtgctgtgatacccctcttctacccacaaggagccctcttgatgatttctgtgaaatcgaggccccttgattgtttctgtgaaacaccctgcacccctagtcctttccccactgagatctttcgggttctctcccctaactcagctcttcgttcccagaaacccagatgtaatccccctacgtggtgcttggggcatcccgataccatctcagtaaatctcctacaatggcctcctcaccctccccgggacccacacccttcaggtcctcaccctgagacaggagggaccctctgagatcagggacccttaggtctcactgctctctgattcagagctcagctgggcccccagttccagaccccagcattcccggtcactccctccctaatctgagcatcactcaagctctttattaaactcaatttgggccaga

SEQ ID NO: 345616 - DNA, 2352 bp, Homo sapiens
cgccgcgcccattcagggactgcgttcgccggagcgcgacccggggactcccaggcctgtgggcgggccctgcccaggactgggcggtgccataacccctagtttaaaaactcgcgggtaccggacccaagatcggggacccggcggcggctccgcgggggaaacagcgaggctggcgcagcgccgaggccgcggccctgggggcccgcaatccacgccacggaatccccgagtgagcaggggtgagcgcagccactgcccaacgcaaaccgtgaagaagcttctggaagagcagaggcgccgccagcagcagcagcccgacgctggcggggtgcagggacaatttctccctcccccagagcagcccctgaccccatctgtgaatgaggctgtgactggctggaccctggagagtttctgcacccccttcaggacccccacagttccccgctgtggtccctggaccatcgctggaggtggcccgagctcacatgctggctttggggccacagcagctgctggcccaggatgaggagggggacacgtgagtataagggatagggttgtctgcagactcttggcttggtgggggctgttctcacggctgtcccccacctgtcctcaggctccttcacctgtttgcggctcgggggctgcgctgggcggcatatgctgcggctgaggtgctccaggtgtaccggcgtcttgacattcgtgagcataagggcaagacccctctcctggtggcggctgctgccaaccagcccctgattgtggaggatctgttgaacctgggagcagagcccaatgccgctgaccatcagggacgttcggtcttgcacgtggccgctacctacgggctcccaggagttctcttggtatggccagctggcaggcaggggtttgtctggggggtagactggttgcccagattttggcttccagggccaggaggccaggggatacccttacccagcagtctgccttctcttcctcccaggctgtgcttaactctggggtccaggttgacctggaagccagagacttcgagggtaagttgggtgtgggcagggctggtgtggttggtgtggctgggcgaggtgggtgcagatgcgggtccctcactgtctccattctgcaggcctcaccccgctccacacggccatcctggcccttaacgttgctatgcgcccttccgacctctgtccccgggtgctgagcacacaggcccgagacaggctggattgtgtccacatgttgctgcaaatgggtgctaatcacaccagccagagatgaggtcttgctgtgttgtccaggctggtctgcagctcctggcctcaagtgatcctccttcttcagcttcccaaagtgctaggattacaggcgtgaaccaccgcactccgccaagggagatcaagagcaacaagacagttctgcacttggccgtgcaggctgccaaccccactctggttcagctgctgctggagctgccccggggagacctgcggacctttgtcaacatgaaggcccacgggaacacagccctccacatggcggctgccctgccccctgggccggcccaggaggccatcgtgcggcacctgttggcagctggggcggaccccacactgcgcaacctggagaatgagcagcccgttcacctgctgcggcccgggccgggccctgaggggctccggcagctgttgaagaggagccgtgtggcgccgccaggcctgtcctcttaggactcaaacccagaccctggactgattttccagtccccaccgtcctgcgggacagccagcgtatgctaatgttgcaaacccatgataatgtatgtggaatatcctgccattggggttttacattaaaaccccagaatggctgcagaggggtgaacaggccccaatatttggggtgctgtgatacccctcttctacccacaaggagccctcttgatgatttctgtgaaatcgaggccccttgattgtttctgtgaaacaccctgcacccctagtcctttccccactgagatctttcgggttctctcccctaactcagctcttcgttcccagaaacccagatgtaatccccctacgtggtgcttggggcatcccgataccatctcagtaaatctcctacaatggcctcctcaccctccccgggacccacacccttcaggtcctcaccctgagacaggagggaccctctgagatcagggacccttaggtctcactgctctctgattcagagctcagctgggcccccagttccagaccccagcattcccggtcactccctccctaatctgagcatcactcaagctctttattaaactcaatttgggccaga

SEQ ID NO: 345617 - DNA, 2202 bp, Homo sapiens
cgccgcgcccattcagggactgcgttcgccggagcgcgacccggggactcccaggcctgtgggcgggccctgcccaggactgggcggtgccataacccctagtttaaaaactcgcgggtaccggacccaagatcggggacccggcggcggctccgcgggggaaacagcgaggctggcgcagcgccgaggccgcggccctgggggcccgcaatccacgccacggaatccccgagtgagcaggggtgagcgcagccactgcccaacgcaaaccgtgaagaagcttctggaagagcagaggcgccgccagcagcagcagcccgacgctggcggggtgcagggacaatttctccctcccccagagcagcccctgaccccatctgtgaatgaggctgtgactggccaccctcccttcccagcacactcggagactgtgggttctggacctagcagcctgggctttccagactgggaccccaacacgcatgctgcctacactgacagcccctactcttgccctgcttctgctgccgaaaatttcctgcctcctgacttctacccaccctcggacccagggcagccgtgcccatttccccagggcatggaggctggaccctggagagtttctgcacccccttcaggacccccacagttccccgctgtggtccctggaccatcgctggaggtggcccgagctcacatgctggctttggggccacagcagctgctggcccaggatgaggagggggacacgtgagtataagggatagggttgtctgcagactcttggcttggtgggggctgttctcacggctgtcccccacctgtcctcaggctccttcacctgtttgcggctcgggggctgcgctgggcggcatatgctgcggctgaggtgctccaggtgtaccggcgtcttgacattcgtgagcataagggcaagacccctctcctggtggcggctgctgccaaccagcccctgattgtggaggatctgttgaacctgggagcagagcccaatgccgctgaccatcagggacgttcggtcttgcacgtggccgctacctacgggctcccaggagttctcttggctgtgcttaactctggggtccaggttgacctggaagccagagacttcgagggcctcaccccgctccacacggccatcctggcccttaacgttgctatgcgcccttccgacctctgtccccgggtgctgagcacacaggcccgagacaggctggattgtgtccacatgttgctgcaaatgggtgctaatcacaccagccagagatgaggtcttgctgtgttgtccaggctggtctgcagctcctggcctcaagtgatcctccttcttcagcttcccaaagtgctaggattacaggcgtgaaccaccgcactccgccaagggagatcaagagcaacaagacagttctgcacttggccgtgcaggctgccaaccccactctggttcagctgctgctggagctgccccggggagacctgcggacctttgtcaacatgaaggcccacgggaacacagccctccacatggcggctgccctgccccctgggccggcccaggaggccatcgtgcggcacctgttggcagctggggcggaccccacactgcgcaacctggagaatgagcagcccgttcacctgctgcggcccgggccgggccctgaggggctccggcagctgttgaagaggagccgtgtggcgccgccaggcctgtcctcttaggactcaaacccagaccctggactgattttccagtccccaccgtcctgcgggacagccagcgtatgctaatgttgcaaacccatgataatgtatgtggaatatcctgccattggggttttacattaaaaccccagaatggctgcagaggggtgaacaggccccaatatttggggtgctgtgatacccctcttctacccacaaggagccctcttgatgatttctgtgaaatcgaggccccttgattgtttctgtgaaacaccctgcacccctagtcctttccccactgagatctttcgggttctctcccctaactcagctcttcgttcccagaaacccagatgtaatccccctacgtgtccggccaccacgtatggctcggacacgtgtgggaagaaagcttagatttacgccgatgaatatgatagtgaaatggattttggcgtaggtttggtctaggtgtag

SEQ ID NO: 345618 - DNA, 1885 bp, Homo sapiens
cgccgcgcccattcagggactgcgttcgccggagcgcgacccggggactcccaggcctgtgggcgggccctgcccaggactgggcggtgccataacccctagtttaaaaactcgcgggtaccggacccaagatcggggacccggcggcggctccgcgggggaaacagcgaggctggcgcagcgccgaggccgcggccctgggggcccgcaatccacgccacggaatccccgagtgagcaggggtgagcgcagccactgcccaacgcaaaccgtgaagaagcttctggaagagcagaggcgccgccagcagcagcagcccgacgctggcggggtgcagggacaatttctccctcccccagagcagcccctgaccccatctgtgaatgaggctgtgactggccaccctcccttcccagcacactcggagactgtgggttctggacctagcagcctgggctttccagactgggaccccaacacgcatgctgcctacactgacagcccctactcttgccctgcttctgctgccgaaaatttcctgcctcctgacttctacccaccctcggacccagggcagccgtgcccatttccccagggcatggaggctggaccctggagagtttctgcacccccttcaggacccccacagttccccgctgtggtccctggaccatcgctggaggtggcccgagctcacatgctggctttggggccacagcagctgctggcccaggatgaggagggggacacgtgagtataagggatagggttgtctgcagactcttggcttggtgggggctgttctcacggctgtcccccacctgtcctcaggctccttcacctgtttgcggctcgggggctgcgctgggcggcatatgctgcggctgaggtgctccaggtgtaccggcgtcttgacattcgtgagcataagggcaagacccctctcctggtggcggctgctgccaaccagcccctgattgtggaggatctgttgaacctgggagcagagcccaatgccgctgaccatcagggacgttcggtcttgcacgtggccgctacctacgggctcccaggagttctcttggctgtgcttaactctggggtccaggttgacctggaagccagagacttcgagggtaagttgggtgtgggcagggctggtgtggttggtgtggctgggcgaggtgggtgcagatgcgggtccctcactgtctccattctgcaggcctcaccccgctccacacggccatcctggcccttaacgttgctatgcgcccttccgacctctgtccccgggtgctgagcacacaggcccgagacaggctggattgtgtccacatgttgctgcaaatgggtgctaatcacaccagccagagatgaggtcttgctgtgttgtccaggctggtctgcagctcctggcctcaagtgatcctccttcttcagcttcccaaagtgctaggattacaggcgtgaaccaccgcactccgccaagggagatcaagagcaacaagacagttctgcacttggccgtgcaggctgccaaccccactctggttcagctgctgctggagctgccccggggagacctgcggacctttgtcaacatgaaggcccacgggaacacagccctccacatggcggctgccctgccccctgggccggcccaggaggccatcgtgcggcacctgttggcagctggggcggaccccacactgcgcaacctggagaatgagcagcccgttcacctgctgcggcccgggccgggccctgagggggtaagtaagcactgagcctgcctgtagagtggcctctgagctcgcgggcgcgggatgacctccctgccccacccaatgctcgctttcagagaatgacttctaatctcgga

SEQ ID NO: 345619 - DNA, 313 bp, Homo sapiens
gtgaagaagcttctggaagagcagaggcgccgccagcagcagcagcccgacgctggcggggtgcaggtgaggccagggagccacagctctccggaggccccgtgctgtcccgtagggactcagcggcttgccgggccctcggggctgatgagaggggtggtcctgaccgaaatgtcttatagatccgagacagacccggaggaatctgccagataaagtcacctgggttcctttttgcttttgtctctacagggacaatttctccctcccccagagcagcccctgaccccatctgtgaatgaggctgtgactg

SEQ ID NO: 345620 - DNA, 743 bp, Homo sapiens
gcccctccctctgcatggcgtgccttccccacctctccttccaacctgacagacttctctccctcctttgccttgtctacagctccggcagctgttgaagaggagccgtgtggcgccgccaggcctgtcctcttaggactcaaacccagaccctggactgattttccagtccccaccgtcctgcgggacagccagcgtatgctaatgttgcaaacccatgataatgtatgtggaatatcctgccattggggttttacattaaaaccccagaatggctgcagaggggtgaacaggccccaatatttggggtgctgtgatacccctcttctacccacaaggagccctcttgatgatttctgtgaaatcgaggccccttgattgtttctgtgaaacaccctgcacccctagtcctttccccactgagatctttcgggttctctcccctaactcagctcttcgttcccagaaacccagatgtaatccccctacgtggtgcttggggcatcccgataccatctcagtaaatctcctacaatggcctcctcaccctccccgggacccacacccttcaggtcctcaccctgagacaggagggaccctctgagatcagggacccttaggtctcactgctctctgattcagagctcagctgggcccccagttccagaccccagcattcccggtcactccctccctaatctgagcatcactcaagctctttattaaactcaatttgggccaga

SEQ ID NO: 345621 - DNA, 2711 bp, Homo sapiens
cgccgcgcccattcagggactgcgttcgccggagcgcgacccggggactcccaggcctgtgggcgggccctgcccaggactgggcggtgccataacccctagtttaaaaactcgcgggtaccggacccaagatcggggacccggcggcggctccgcgggggaaacagcgaggctggcgcagcgccgaggccgcggccctgggggcccgcaatccacgccacggaatccccgagtgagcaggggtgagcgcagccactgcccaacgcaaaccgtgaagaagcttctggaagagcagaggcgccgccagcagcagcagcccgacgctggcggggtgcagggacaatttctccctcccccagagcagcccctgaccccatctgtgaatgaggctgtgactggccaccctcccttcccagcacactcggagactgtgggttctggacctagcagcctgggctttccagactgggaccccaacacgcatgctgcctacactgacagcccctactcttgccctgcttctgctgccgaaaatttcctgcctcctgacttctacccaccctcggacccagggcagccgtgcccatttccccagggcatggaggaccccccagacacccagttctatgtaggatcttctctgccacagctggaccctggagagtttctgcacccccttcaggacccccacagttccccgctgtggtccctggaccatcgctggaggtggcccgagctcacatgctggctttggggccacagcagctgctggcccaggatgaggagggggacacgctccttcacctgtttgcggctcgggggctgcgctgggcggcatatgctgcggctgaggtgctccaggtgtaccggcgtcttgacattcgtgagcataagggcaagacccctctcctggtggcggctgctgccaaccagcccctgattgtggaggatctgttgaacctgggagcagagcccaatgccgctgaccatcagggacgttcggtcttgcacgtggccgctacctacgggctcccaggagttctcttggtatggccagctggcaggcaggggtttgtctggggggtagactggttgcccagattttggcttccagggccaggaggccaggggatacccttacccagcagtctgccttctcttcctcccaggctgtgcttaactctggggtccaggttgacctggaagccagagacttcgagggcctcaccccgctccacacggccatcctggcccttaacgttgctatgcgcccttccgacctctgtccccgggtgctgagcacacaggcccgagacaggctggattgtgtccacatgttgctgcaaatgggtgctaatcacaccagccagagatgaggtcttgctgtgttgtccaggctggtctgcagctcctggcctcaagtgatcctccttcttcagcttcccaaagtgctaggattacaggcgtgaaccaccgcactccgccaagggagatcaagagcaacaagacagttctgcacttggccgtgcaggctgccaaccccactctggttcagctgctgctggagctgccccggggagacctgcggacctttgtcaacatgaaggcccacgggaacacagccctccacatggcggctgccctgccccctgggccggcccaggaggccatcgtgcggcacctgttggcagctggggcggaccccacactgcgcaacctggagaatgagcagcccgttcacctgctgcggcccgggccgggccctgaggggctccggcagctgttgaagaggagccgtgtggcgccgccaggcctgtcctcttaggactcaaacccagaccctggactgattttccagtccccaccgtcctgcgggacagccagcgtatgctaatgttgcaaacccatgataatgtatgtggaatatcctgccattggggttttacattaaaaccccagaatggctgcagaggggtgaacaggccccaatatttggggtgctgtgatacccctcttctacccacaaggagccctcttgatgatttctgtgaaatcgaggccccttgattgtttctgtgaaacaccctgcacccctagtcctttccccactgagatctttcgggttctctcccctaactcagctcttcgttcccagaaacccagatgtaatccccctacgtggtgcttggggcatcccgataccatctcagtaaatctcctacaatggcctcctcaccctccccgggacccacacccttcaggtcctcaccctgagacaggagggaccctctgagatcagggacccttaggtctcactgctctctgattcagagctcagctgggcccccagttccagaccccagcattcccggtcactccctccctaatctgagcatcactcaagctctttattaaactcaatttgggccagatttggtggctcatgcctgtaatcctaacactctgggaggccgaggcgggcggatcacttgaggtgaggagtttgagaccagcctggccaacatggtgaaaccctgtctccactaaaaatacaaaaacaattggctggacatggtggcatgcgcctgtagtcccagctacttgggaggctgaggcagaagaattgattgaacccaggaggcggaggttgcagtgagccgagattgtgccactgcactccagcctaggtgacaaagagagactctgtctca

SEQ ID NO: 345622 - DNA, 2347 bp, Homo sapiens
cgccgcgcccattcagggactgcgttcgccggagcgcgacccggggactcccaggcctgtgggcgggccctgcccaggactgggcggtgccataacccctagtttaaaaactcgcgggtaccggacccaagatcggggacccggcggcggctccgcgggggaaacagcgaggctggcgcagcgccgaggccgcggccctgggggcccgcaatccacgccacggaatccccgagtgagcaggggtgagcgcagccactgcccaacgcaaaccgtgaagaagcttctggaagagcagaggcgccgccagcagcagcagcccgacgctggcggggtgcagggacaatttctccctcccccagagcagcccctgaccccatctgtgaatgaggctgtgactggccaccctcccttcccagcacactcggagactgtgggttctggacctagcagcctgggctttccagactgggaccccaacacgcatgctgcctacactgacagcccctactcttgccctgcttctgctgccgaaaatttcctgcctcctgacttctacccaccctcggacccagggcagccgtgcccatttccccagggcatggaggctggaccctggagagtttctgcacccccttcaggacccccacagttccccgctgtggtccctggaccatcgctggaggtggcccgagctcacatgctggctttggggccacagcagctgctggcccaggatgaggagggggacacgtgagtataagggatagggttgtctgcagactcttggcttggtgggggctgttctcacggctgtcccccacctgtcctcaggctccttcacctgtttgcggctcgggggctgcgctgggcggcatatgctgcggctgaggtgctccaggtgtaccggcgtcttgacattcgtgagcataagggcaagacccctctcctggtggcggctgctgccaaccagcccctgattgtggaggatctgttgaacctgggagcagagcccaatgccgctgaccatcagggacgttcggtcttgcacgtggccgctacctacgggctcccaggagttctcttggctgtgcttaactctggggtccaggttgacctggaagccagagacttcgagggcctcaccccgctccacacggccatcctggcccttaacgttgctatgcgcccttccgacctctgtccccgggtgctgagcacacaggcccgagacaggctggattgtgtccacatgttgctgcaaatgggtgctaatcacaccagccagagatgaggtcttgctgtgttgtccaggctggtctgcagctcctggcctcaagtgatcctccttcttcagcttcccaaagtgctaggattacaggcgtgaaccaccgcactccgccaagggagatcaagagcaacaagacagttctgcacttggccgtgcaggctgccaaccccactctggttcagctgctgctggagctgccccggggagacctgcggacctttgtcaacatgaaggcccacgggaacacagccctccacatggcggctgccctgccccctgggccggcccaggaggccatcgtgcggcacctgttggcagctggggcggaccccacactgcgcaacctggagaatgagcagcccgttcacctgctgcggcccgggccgggccctgaggggctccggcagctgttgaagaggagccgtgtggcgccgccaggcctgtcctcttaggactcaaacccagaccctggactgattttccagtccccaccgtcctgcgggacagccagcgtatgctaatgttgcaaacccatgataatgtatgtggaatatcctgccattggggttttacattaaaaccccagaatggctgcagaggggtgaacaggccccaatatttggggtgctgtgatacccctcttctacccacaaggagccctcttgatgatttctgtgaaatcgaggccccttgattgtttctgtgaaacaccctgcacccctagtcctttccccactgagatctttcgggttctctcccctaactcagctcttcgttcccagaaacccagatgtaatccccctacgtggtgcttggggcatcccgataccatctcagtaaatctcctacaatggcctcctcaccctccccgggacccacacccttcaggtcctcaccctgagacaggagggaccctctgagatcagggacccttaggtctcactgctctctgattcagagctcagctgggcccccagttccagaccccagcattcccggtcactccctccctaatctgagcatcactcaagctctttattaaactcaatttgggccaga

SEQ ID NO: 345623 - DNA, 2228 bp, Homo sapiens
cgccgcgcccattcagggactgcgttcgccggagcgcgacccggggactcccaggcctgtgggcgggccctgcccaggactgggcggtgccataacccctagtttaaaaactcgcgggtaccggacccaagatcggggacccggcggcggctccgcgggggaaacagcgaggctggcgcagcgccgaggccgcggccctgggggcccgcaatccacgccacggaatccccgagtgagcaggggtgagcgcagccactgcccaacgcaaaccgtgaagaagcttctggaagagcagaggcgccgccagcagcagcagcccgacgctggcggggtgcagggacaatttctccctcccccagagcagcccctgaccccatctgtgaatgaggctgtgactggccaccctcccttcccagcacactcggagactgtgggttctggacctagcagcctgggctttccagactgggaccccaacacgcatgctgcctacactgacagcccctactcttgccctgcttctgctgccgaaaatttcctgcctcctgacttctacccaccctcggacccagggcagccgtgcccatttccccagggcatggaggctggaccctggagagtttctgcacccccttcaggacccccacagttccccgctgtggtccctggaccatcgctggaggtggcccgagctcacatgctggctttggggccacagcagctgctggcccaggatgaggagggggacacgtgagtataagggatagggttgtctgcagactcttggcttggtgggggctgttctcacggctgtcccccacctgtcctcaggctccttcacctgtttgcggctcgggggctgcgctgggcggcatatgctgcggctgaggtgctccaggtgtaccggcgtcttgacattcgtgagcataagggcaagacccctctcctggtggcggctgctgccaaccagcccctgattgtggaggatctgttgaacctgggagcagagcccaatgccgctgaccatcagggacgttcggtcttgcacgtggccgctacctacgggctcccaggagttctcttggctgtgcttaactctggggtccaggttgacctggaagccagagacttcgagggcctcaccccgctccacacggccatcctggcccttaacgttgctatgcgcccttccgacctctgtccccgggtgctgagcacacaggcccgagacaggctggattgtgtccacatgttgctgcaaatgggtgctaatcacaccagccaggagatcaagagcaacaagacagttctgcacttggccgtgcaggctgccaaccccactctggttcagctgctgctggagctgccccggggagacctgcggacctttgtcaacatgaaggcccacgggaacacagccctccacatggcggctgccctgccccctgggccggcccaggaggccatcgtgcggcacctgttggcagctggggcggaccccacactgcgcaacctggagaatgagcagcccgttcacctgctgcggcccgggccgggccctgaggggctccggcagctgttgaagaggagccgtgtggcgccgccaggcctgtcctcttaggactcaaacccagaccctggactgattttccagtccccaccgtcctgcgggacagccagcgtatgctaatgttgcaaacccatgataatgtatgtggaatatcctgccattggggttttacattaaaaccccagaatggctgcagaggggtgaacaggccccaatatttggggtgctgtgatacccctcttctacccacaaggagccctcttgatgatttctgtgaaatcgaggccccttgattgtttctgtgaaacaccctgcacccctagtcctttccccactgagatctttcgggttctctcccctaactcagctcttcgttcccagaaacccagatgtaatccccctacgtggtgcttggggcatcccgataccatctcagtaaatctcctacaatggcctcctcaccctccccgggacccacacccttcaggtcctcaccctgagacaggagggaccctctgagatcagggacccttaggtctcactgctctctgattcagagctcagctgggcccccagttccagaccccagcattcccggtcactccctccctaatctgagcatcactcaagctctttattaaactcaatttgggccaga

SEQ ID NO: 345624 - DNA, 2477 bp, Homo sapiens
cgccgcgcccattcagggactgcgttcgccggagcgcgacccggggactcccaggcctgtgggcgggccctgcccaggactgggcggtgccataacccctagtttaaaaactcgcgggtaccggacccaagatcggggacccggcggcggctccgcgggggaaacagcgaggctggcgcagcgccgaggccgcggccctgggggcccgcaatccacgccacggaatccccgagtgagcaggggtgagcgcagccactgcccaacgcaaaccgtgaagaagcttctggaagagcagaggcgccgccagcagcagcagcccgacgctggcggggtgcagggacaatttctccctcccccagagcagcccctgaccccatctgtgaatgaggctgtgactggccaccctcccttcccagcacactcggagactgtgggttctggacctagcagcctgggctttccagactgggaccccaacacgcatgctgcctacactgacagcccctactcttgccctgcttctgctgccgaaaatttcctgcctcctgacttctacccaccctcggacccagggcagccgtgcccatttccccagggcatggaggctggaccctggagagtttctgcacccccttcaggacccccacagttccccgctgtggtccctggaccatcgctggaggtggcccgagctcacatgctggctttggggccacagcagctgctggcccaggatgaggagggggacacgctccttcacctgtttgcggctcgggggctgcgctgggcggcatatgctgcggctgaggtgctccaggtgtaccggcgtcttgacattcgtgagcataagggcaagacccctctcctggtggcggctgctgccaaccagcccctgattgtggaggatctgttgaacctgggagcagagcccaatgccgctgaccatcagggacgttcggtcttgcacgtggccgctacctacgggctcccaggagttctcttggtatggccagctggcaggcaggggtttgtctggggggtagactggttgcccagattttggcttccagggccaggaggccaggggatacccttacccagcagtctgccttctcttcctcccaggctgtgcttaactctggggtccaggttgacctggaagccagagacttcgagggtaagttgggtgtgggcagggctggtgtggttggtgtggctgggcgaggtgggtgcagatgcgggtccctcactgtctccattctgcaggcctcaccccgctccacacggccatcctggcccttaacgttgctatgcgcccttccgacctctgtccccgggtgctgagcacacaggcccgagacaggctggattgtgtccacatgttgctgcaaatgggtgctaatcacaccagccagagatgaggtcttgctgtgttgtccaggctggtctgcagctcctggcctcaagtgatcctccttcttcagcttcccaaagtgctaggattacaggcgtgaaccaccgcactccgccaagggagatcaagagcaacaagacagttctgcacttggccgtgcaggctgccaaccccactctggttcagctgctgctggagctgccccggggagacctgcggacctttgtcaacatgaaggcccacgggaacacagccctccacatggcggctgccctgccccctgggccggcccaggaggccatcgtgcggcacctgttggcagctggggcggaccccacactgcgcaacctggagaatgagcagcccgttcacctgctgcggcccgggccgggccctgaggggctccggcagctgttgaagaggagccgtgtggcgccgccaggcctgtcctcttaggactcaaacccagaccctggactgattttccagtccccaccgtcctgcgggacagccagcgtatgctaatgttgcaaacccatgataatgtatgtggaatatcctgccattggggttttacattaaaaccccagaatggctgcagaggggtgaacaggccccaatatttggggtgctgtgatacccctcttctacccacaaggagccctcttgatgatttctgtgaaatcgaggccccttgattgtttctgtgaaacaccctgcacccctagtcctttccccactgagatctttcgggttctctcccctaactcagctcttcgttcccagaaacccagatgtaatccccctacgtggtgcttggggcatcccgataccatctcagtaaatctcctacaatggcctcctcaccctccccgggacccacacccttcaggtcctcaccctgagacaggagggaccctctgagatcagggacccttaggtctcactgctctctgattcagagctcagctgggcccccagttccagaccccagcattcccggtcactccctccctaatctgagcatcactcaagctctttattaaactcaatttgggccaga

SEQ ID NO: 345625 - DNA, 1755 bp, Homo sapiens
  misc_feature (1725)..(1725): n is a, c, g, or t
cgccgcgcccattcagggactgcgttcgccggagcgcgacccggggactcccaggcctgtgggcgggccctgcccaggactgggcggtgccataacccctagtttaaaaactcgcgggtaccggacccaagatcggggacccggcggcggctccgcgggggaaacagcgaggctggcgcagcgccgaggccgcggccctgggggcccgcaatccacgccacggaatccccgagtgagcaggggtgagcgcagccactgcccaacgcaaaccgtgaagaagcttctggaagagcagaggcgccgccagcagcagcagcccgacgctggcggggtgcagggacaatttctccctcccccagagcagcccctgaccccatctgtgaatgaggctgtgactggccaccctcccttcccagcacactcggagactgtgggttctggacctagcagcctgggctttccagactgggaccccaacacgcatgctgcctacactgacagcccctactcttgccctgcttctgctgccgaaaatttcctgcctcctgacttctacccaccctcggacccagggcagccgtgcccatttccccagggcatggaggctggaccctggagagtttctgcacccccttcaggacccccacagttccccgctgtggtccctggaccatcgctggaggtggcccgagctcacatgctggctttggggccacagcagctgctggcccaggatgaggagggggacacgtgagtataagggatagggttgtctgcagactcttggcttggtgggggctgttctcacggctgtcccccacctgtcctcaggctccttcacctgtttgcggctcgggggctgcgctgggcggcatatgctgcggctgaggtgctccaggtgtaccggcgtcttgacattcgtgagcataagggcaagacccctctcctggtggcggctgctgccaaccagcccctgattgtggaggatctgttgaacctgggagcagagcccaatgccgctgaccatcagggacgttcggtcttgcacgtggccgctacctacgggctcccaggagttctcttggctgtgcttaactctggggtccaggttgacctggaagccagagacttcgagggtaagttgggtgtgggcagggctggtgtggttggtgtggctgggcgaggtgggtgcagatgcgggtccctcactgtctccattctgcaggcctcaccccgctccacacggccatcctggcccttaacgttgctatgcgcccttccgacctctgtccccgggtgctgagcacacaggcccgagacaggctggattgtgtccacatgttgctgcaaatgggtgctaatcacaccagccagaggtgagcggggatgtgggcggtcagaccctgggagattgtgtggaatggggccacttggatgtccgggagctccaggcaaatgctgactttgcctcttccttgctgcgtgcccttgaacatgttacttcacttctctgtgccttaggggttttttgtttgtttctttgtttgttttgagatggagttttgctcttgttgccctggctggagtgcaatggtgtgatcttggctcaccgcaacctctgcatcccgggttcaagtgattctcctgcctcagcctcctgagtagctgggattacaggcatgagtcaccacgcctggctaatttttttgtattgtagtagtagcngcagcggggacctctagatcaccacacgat

SEQ ID NO: 345626 - DNA, 1366 bp, Homo sapiens
cgccgcgcccattcagggactgcgttcgccggagcgcgacccggggactcccaggcctgtgggcgggccctgcccaggactgggcggtgccataacccctagtttaaaaactcgcgggtaccggacccaagatcggggacccggcggcggctccgcgggggaaacagcgaggctggcgcagcgccgaggccgcggccctgggggcccgcaatccacgccacggaatccccgagtgagcaggggtgagcgcagccactgcccaacgcaaaccgtgaagaagcttctggaagagcagaggcgccgccagcagcagcagcccgacgctggcggggtgcagggacaatttctccctcccccagagcagcccctgaccccatctgtgaatgaggctgtgactggccaccctcccttcccagcacactcggagactgtgggttctggacctagcagcctgggctttccagactgggaccccaacacgcatgctgcctacactgacagcccctactcttgccctgcttctgctgccgaaaatttcctgcctcctgacttctacccaccctcggacccagggcagccgtgcccatttccccagggcatggaggctggaccctggagagtttctgcacccccttcaggacccccacagttccccgctgtggtccctggaccatcgctggaggtggcccgagctcacatgctggctttggggccacagcagctgctggcccaggatgaggagggggacacgtgagtataagggatagggttgtctgcagactcttggcttggtgggggctgttctcacggctgtcccccacctgtcctcaggctccttcacctgtttgcggctcgggggctgcgctgggcggcatatgctgcggctgaggtgctccaggtgtaccggcgtcttgacattcgtgagcataagggcaagacccctctcctggtggcggctgctgccaaccagcccctgattgtggaggatctgttgaacctgggagcagagcccaatgccgctgaccatcagggacgttcggtcttgcacgtggccgctacctacgggctcccaggagttctcttggctgtgcttaactctggggtccaggttgacctggaagccagagacttcgagggcctcaccccgctccacacggccatcctggcccttaacgttgctatgcgcccttccgacctctgtccccgggtgctgagcacacaggcccgagacaggctggattgtgtccacatgttgctgcaaatgggtgctaatcacaccagccagcaaggagatcaagtgcttctagacagatatgaactaggtctttcaggtaaaaaccccacgggggttcccccactaagatta

SEQ ID NO: 345627 - DNA, 302 bp, Homo sapiens
gtttgtcaaaagaagccagatgactccacagtctttacatcaccactccatcaccatagccactaagtcccatagccactggatgttcccacacctctccctccatctgcacttcatggcttgataccttgcagtgatgatatgagtaatcatgatgccaccatgtaccaagaattacccacatcctattttccccttacccctctgaaggaaataacctctgtgttcttgaacatatacacaacccaatcccaaaatcctgctttgagattctgttttcggagcataaattgaaccaactt

SEQ ID NO: 345628 - DNA, 520 bp, Homo sapiens
cttgatggggttgggactttgttcactaggtatgaacccattgcctagaaatctgaagaagggtatattgcaggttcttacgggtattcctaggaagaagaaatgatttccaaacagaattagcatgtagaggagaaacgcacaaagaaaaggagatttgatttccacaatgtaaggaaatgtaaaatttcattagaagaaagggaaagaggacattgccagcaaagatggagagaaagaaggcgtgtttaaataagctggtttccaatttagctgaaacatttgaaagtaaacagaagtagagctagatttaggggtgtaagatgtgggcaattaatacatttatatggctcaaaatttgaagagttggaaagcatctacagtgaaaagccccttttcctgccccatttcctcagccactcaggctattccccagagtcactgtgcataattacatatataatacaaacatgtatactatttctcttccctcttttatttttccaaaatggtatcaaac

SEQ ID NO: 345629 - DNA, 303 bp, Homo sapiens
agacaggatctcatcatcttgcacacactggtctcaaactcctgggctcaagtgatcctcttgccttggcctcccaaaatattgggattacaggtgtgagccacaggtcccagccaaaatggtctctcttaagaatgcttttcttaccatcttaaaaaagttgaacaagaaaaggcattttctcgttgcctctgggccactgatatgaacattactgagcgatgacacaataaggggactacaggatgttcagtggtgtctgttctgtaggacgcaggtctggaggtaagcctggcgtgggtt

SEQ ID NO: 345630 - DNA, 540 bp, Homo sapiens
ctaccaaacagtgagatcaaaaatgggtactgctttaagatgccaagtttgtggcaacgggttatggtggcaacaggaaatgaatatgctcccattctgcagatgaggcacctgaggctctgaaaggttaggaacttgcccaaggaccacagatgggtcctcacaatgcagaggggagtccgagctccagctctctgactccagagcctgtgctcgtactcacagccctctccaggccacacactcagggtcgcatcttatcaggaatcgcactcagaaagggctgacttgccagtgccatgagccaactttggctatgcagttgtatgcagggattaagaatggcttgattgggcttacaccaaaacacatttcttcctgcttttctcaactactctcggtggctaaaaccaacttatcaaccgtctatccatccaacgttccacagataattcacatggcgcctgcgagctgctatgccaactgatttaccccttcttactgtcctttcccaagtgagaatttaaagtcttttagtga

SEQ ID NO: 345631 - DNA, 929 bp, Homo sapiens
ctccacaggaggtacagctgcttacacatctctcctcagagctgtcccttgacttgggggtgaatttcaggccaacagggcttcctgggatacaagagcgttctccatggatctgccttactaccatggacgtctgaccaagcaagactgtgagaccttgctgctcaaggaaggggtggatggcaactttcttttaagagacagcgagtcgataccaggagtcctgtgcctctgtgtctcgtttaaaaatattgtctacacataccgaatcttcagagagaaacacgggtattacaggatacagactgcagaaggttctccaaaacaggtctttccaagcctaaaggaactgatctccaaatttgaaaaaccaaatcaggggatggtggttcaccttttaaagccaataaagagaaccagccccagcttgagatggagaggattgaaattagagttggaaacatttgtgaacagtaacagcgattatgtggatgtcttgccttgaagataaggctgccggacaaagcaagttgaagagatgagtaacagttctcactgatgacccacttctgcaggcataggtccagagcaccaaactctagtggacaattcagactctcctggttgtgtaactgaagatgttctgcccaccagcaccagaggtcactctccacatccccgcctcccagacatataccaggagcaatttcaaaaccctctccagtttcactcttctttcttggaatgggacagcctgaacattttccctttgacttgttaaaggtaccaccctacatcatggttgacaccctcctttggaccatgcagtcagaggggcagctttatacagaggaggggcacacttgtctgtgagtttgaagccctgagttccagtcctgtggctgtgtgactttgaacacgtttctgcc

SEQ ID NO: 345632 - DNA, 790 bp, Homo sapiens
aaactgccaaactgttttccaaagtgatcatgcgatctcactattcccatgggcattacatgagttctgattgctctacatccttaccaacatgtggaacggtttaaaaatattgtctacacataccgaatcttcagagagaaacacgggtattacaggatacagactgcagaaggttctccaaaacaggtctttccaagcctaaaggaactgatctccaaatttgaaaaaccaaatcaggggatggtggttcaccttttaaagccaataaagagaaccagccccagcttgagatggagaggattgaaattagagttggaaacatttgtgaacagtaacagcgattatgtggatgtcttgccttgaagataaggctgccggacaaagcaagttgaagagatgagtaacagttctcactgatgacccacttctgcaggcataggtccagagcaccaaactctagtggacaattcagactctcctggttgtgtaactgaagatgttctgcccaccagcaccagaggtcactctccacatccccgcctcccagacatataccaggagcaatttcaaaaccctctccagtttcactcttctttcttggaatgggacagcctgaacattttccctttgacttgttaaaggtaccaccctacatcatggttgacaccctcctttggaccatgcagtcagaggggcagctttatacagaggaggggcacacttgtctgtgagtttgaagccctgagttccagtcctgtggctgtgtgactttgaacacgtttctgcc

SEQ ID NO: 345633 - DNA, 208 bp, Homo sapiens
ctgttactgctcttatcttcattcttgtctacaatacacatggctataactgcaggacatgcaagttctgaataggtgatatatttctgtatcatgtccagactgaggaaaacaataagctcttacagttgtgtgctgttcataccatgtctggaatactgttttcagttcagatcaacaattacaacacatatagtaacagtgacag

SEQ ID NO: 345634 - DNA, 395 bp, Homo sapiens
tcccgcctcgggctcccaaaatgctgggattacaggtgtgagccaccatgcccagcttagttgtattttaaatgggcctgtttgcagcattccctactccccttagtttacctggctcacaacctgtctttccatatcaaggcttctgtcacccctggcccatgtcagtgcatttgggcagcccacccagcatcatcacctcatgtcccagggaacttcctgttcctctcttccagctatttccttccctggcagttgagatagtctctacctttgacctactgttaagctcagaccttctgctctctagttacagcctctgtgctgccagattccctcgctcagttgctttctctagtttgggttttctcctttattcagatttccagctgttt

SEQ ID NO: 345635 - DNA, 383 bp, Homo sapiens
cctcccaaagtgctgggattacaggcataagccactgtgcccagcccagtgtccttatatctaactgtccactgaacacttggatgtgtcacaggcagctccaactctacatacctaagatatttccctctctcttcctgtgtctcccatctcagacaatggttctgccacccaccccatattcaaatctgaaacctgggattcacaggggactcctctcagagccctgatgatttctctgcacctctatgcctccatcactggcctaaagccaccagaatttctttcccgattactgcaccatcctcctccctggccccaaagcctccaaacctgccctactcaaaccccttctccaaaaccagactgatttctcaaattga

SEQ ID NO: 345636 - DNA, 742 bp, Homo sapiens
attgtgtatttttgctttcaattttttctttattacagtagtttattgtttactaatttattttttccctaagaaacagtttagctttatctgtttttgaactttataatgatggaattactcagcgtgtgttttttttcttttggtatctagctcttgttcaacattaagtttttaagatttatttgggagctaaatggtgagaacacatggacagatagaggggaacaacatacactggggcctttcagagggcagaggatgggaagagagagaggatcaggaaaaataactaatgggcactaggattaataactgggtaatgaagtaatccatacaacaaactcccacgacacaagttaaaaaaaaagcttcccatttatagattgctacttagaaggcagggatttgaactgggaggaatttaaaatgatcttgacctgttgtgttgtgaaaaggtttacaaatttcaggaaaatatacctcttctcaaatggattgggaattatgaggtcacagacatttctcaggattccgtaaaacatgtacctgtagcagagtattagaggagattgaagcaaaggggcaagcggtaacttcttgggggcgattaagtcattgtattatcatggtgggggcaggttatacagttgtttatatttgtcgaaagtcatcagcctgtatatttaaatcatgtgtatgtaaattacaatttaataaagttttaaaaatgaaaaaaaaa

SEQ ID NO: 345637 - DNA, 791 bp, Homo sapiens
aaatgcctcttattgtttacattatgaagtctcaacttggatggaagcccaactgcaacacggcctcctaaaatgagacgcaactgttcaactgaactgttctcaggactaaaaggctgtgtcaataagatacggggaatatttgttcttctgtgtgttccgatccttgtttttctttcccttcgttgatctcttgtttcacaacttccaacccaaatctgctcacagctactaacttggcttttaacatatgaaactttctaaaagtaaagtttcaaatggggaatgaagaggctcagaatacactaccccaaaacatgtcactcagaacacatcatccccaaatatgccactttggcatcagaattattttaaactaaaggcacataaaaacaggagatgcaagaagatcactctgaccttcactgttctttaaaagccagagatgaaattcccatgtgaaaggtgttctccctaaaccaagaagaaagtaacattctcatcacaaaggataggaagttgaggctgataggaatctatacaagcatcccttatgttcctaattacttatttacccagttatttaccctagcataagcccctttgccttgttacattttcacaattcagggcataaatgtttgactctagctgctgctttgtgtcttcacttccttatgaatgctctcctgccattaaaaaacttgcattaaataatttatatacttttctcctgttgatttgtcttatgtctatttaattctccaggcccaggcaacaaacaaacaaac

SEQ ID NO: 345638 - DNA, 1257 bp, Homo sapiens
gctcctccgtggctgccgtggtcggctggccgggcggctaggagttcccggaagtgcccgcgcagccggtttccggtgcaggtggggaaaatggcggtgtctacagtgttctcgacttcgtcgctgatgcttgctctgtcaaggcacagcctattgtctcctttgctcagtgtgacatcattcagacgcttctacagaggtgacagcccaacagattcccaaaaggacatgattgaaatccctttgcctccatggcaggagagaactgatgaatccatagaaaccaaaagagcccgcctgctctatgagagcagaaagaggggaatgttggaaaactgcattcttcttagtctttttgctaaagaacatctgcagcacatgacagaaaagcagctgaacctctatgaccgcctgattaacgagcctagtaatgactgggatatttactactgggccacagaagctaaaccagccccagaaatatttgaaaatgaagtcatggccctgctgagagactttgctaaaaacaaaaacaaagagcagagactgcgtgccccagatcttgagtacctctttgaaaagccacgttgagctgtgctccacggcctggcatgggggttcagtctgtggatggtaactacttatgatggacgttagccttgcttccggcttcttagatgcccagctgccctaccccagaccactggtcctgcctcaagtgatggacataaccctctcctaggacatacatgtaaatgcacaatgtgactcattctcatacttttttgttcagctctgagcctcaaaagtgatttgtcagcagcgctggcatgcaggctttgcctggctgctatctctagaggcaagtctgccacgagagggcactgcaggcgaagcagttgtgcttgctcattgcctcagcccaagtgtactcaaagaaaagaggcagccagctgtgcgtgctgtacggaaagcctcccgccctccctgcagctccccgccctcagtggcccagggctttgttgaagtggaactccccacttccaacctggtatggctccttctgcgaagggaagctgatcccagcctcctgagctgaatccttcaaaggcacagcaggcagaatgagggccacaggcaggagtggtgtgggcacactgcttaggagtcaacatcttcatcattgggctttctttaaaacgtgcactttgtaatttgaaagagaattattaaagcatactgaaaaaaggaaattta

SEQ ID NO: 345639 - DNA, 1824 bp, Homo sapiens
gctcctccgtggctgccgtggtcggctggccgggcggctaggagttcccggaagtgcccgcgcagccggtttccggtgcaggtggggaaaatggcggtgtctacagtgttctcgacttcgtcgctgatgcttgctctgtcaaggcacagcctattgtctcctttgctcagtgtgacatcattcagacgcttctacagaggtgacagcccaacagattcccaaaaggacatgattgaaatccctttgcctccatggcaggagagaactgatgaatccatagaaaccaaaagagcccgcctgctctatgagagcagaaagaggggaatgttggaaaactgcattcttcttagtctttttgctaaagaacatctgcagcacatgacagaaaagcagctgaacctctatgaccgcctgattaacgagcctagtaatgactgggatatttactactgggccacagaagctaaaccagccccagaaatatttgaaaatgaagtcatggccctgctgagagactttgctaaaaacaaaaacaaagagcagagactgcgtgccccagatcttgagtacctctttgaaaagccacgttgagctgtgctccacggcctggcatgggggttcagtctgtggatggtaactacttatgatggacgttagccttgcttccggcttcttagatgcccagctgccctaccccagaccactggtcctgcctcaagtgatggacataaccctctcctaggacatacatgtaaatgcacaatgtgactcattctcatacttttttgttcagctctgagcctcaaaagtgatttgtcagcagcgctggcatgcaggctttgcctggctgctatctctagaggcaagtctgccacgagagggcactgcaggcgaagcagttgtgcttgctcattgcctcagcccaagtgtactcaaagaaaagaggcagccagctgtgcgtgctgtacggaaagcctcccgccctccctgcagctccccgccctcagtggcccagggctttgttgaagtggaactccccacttccaacctggtatggctccttctgcgaagggaagctgatcccagcctcctgagctgaatccttcaaaggcacagcaggcagaatgagggccacaggcaggagtggtgtgggcacactgcttaggagtcaacatcttcatcattgggctttctttaaaacgtgcactttgtaatttgaaagagaattattaaagcatactgaaaaaaggaaatttaaaaaaaaaaaaaaaaaaaaaaaaaaagaaaaaaaaaaaaaaaaaacaaaaaaaaaacacaaaaaaaaaagaaaaaaacaaaaaacgaagagagagaagagaaagagaagagaaagaacatgaaaataagagcgacgagcacatcatcagacgacaatagaaacgacgcacggcgcgcgagcgcggcggcggcggcgggaggcgactcaggaattgaaagcgcgggcgcgaaggagcattgagacagaataagcagacggcaagacaaagggagaaagcgataaatcgaactcagcctgagatcgacggcgtagagacgcgtgtgacacacaagcgagagaacaaagaagctaagacagagcagaacgagcgaaacaggaagaagaagagagcagcaacgcgacacaaaggagatcagagacagaagttaatgcgacgagagatgagcaacaacgggtggcagaagcaagcaaaggcacgtggggacagcaagagcacgacgaagcgaaagggacaagtaacaagtcggattcacaggaagagagcggagacaggagtaggagaggag

SEQ ID NO: 345640 - DNA, 1207 bp, Homo sapiens
  misc_feature (1206)..(1206): n is a, c, g, or t
gctcctccgtggctgccgtggtcggctggccgggcggctaggagttcccggaagtgcccgcgcagccggtttccggtgcaggtggggaaaatggcggtgtctacagtgttctcgacttcgtcgctgatgcttgctctgtcaaggcacagcctattgtctcctttgctcagtgtgacatcattcagacgcttctacagaggtgacagcccaacagattcccaaaaggacatgattgaaatccctttgcctccatggcaggagagaactgatgaatccatagaaaccaaaagagcccgcctgctctatgagagcagaaagaggggaatgttggaaaactgcattcttcttagtctttttgctaaagaacatctgcagcacatgacagaaaagcagctgaacctctatgaccgcctgattaacgagcctagtaatgactgggatatttactactgggccacagaagctaaaccagccccagaaatatttgaaaatgaagtcatggccctgctgagagactttgctaaaaacaaaaacaaagagcagagactgcgtgccccagatcttgagtacctctttgaaaagccacgttgagctgtgctccacggcctggcatgggggttcagtctgtggatggtaactacttatgatggacgttagccttgcttccggcttcttagatgcccagctgccctaccccagaccactggtcctgcctcaagtgatggacataaccctctcctaggacatacatgtaaatgcacaatgtgactcattctcatacttttttgttcagctctgagcctcaaaagtgatttgtcagcagcgctggcatgcaggctttgcctggctgctatctctagaggcaagtctgccacgagagggcactgcaggcgaagcagttgtgcttgctcattgcctcagcccaagtgtactcaaagaaaagaggcagccagctgtgcgtgctgtacggaaagcctcccgccctccctgcagctccccgccctcagtggcccagggctttgttgaagtggaactccccacttccaacctggtatggctccttctgcgaagggaagctgatcccagcctcctgagctgaatccttcaaaggcacagcaggcagaatgagggccacaggcaggagggggggggggggggggggggggagtcgagggcggcggcaggggggggggggtaagacgtgcnc

SEQ ID NO: 345641 - DNA, 923 bp, Homo sapiens
gctcctccgtggctgccgtggtcggctggccgggcggctaggagttcccggaagtgcccgcgcagccggtttccggtgcaggtggggaaaatggcggtgtctacagtgttctcgacttcgtcgctgaagctaaaccagccccagaaatatttgaaaatgaagtcatggccctgctgagagactttgctaaaaacaaaaacaaagagcagagactgcgtgccccagatcttgagtacctctttgaaaagccacgttgagctgtgctccacggcctggcatgggggttcagtctgtggatggtaactacttatgatggacgttagccttgcttccggcttcttagatgcccagctgccctaccccagaccactggtcctgcctcaagtgatggacataaccctctcctaggacatacatgtaaatgcacaatgtgactcattctcatacttttttgttcagctctgagcctcaaaagtgatttgtcagcagcgctggcatgcaggctttgcctggctgctatctctagaggcaagtctgccacgagagggcactgcaggcgaagcagttgtgcttgctcattgcctcagcccaagtgtactcaaagaaaagaggcagccagctgtgcgtgctgtacggaaagcctcccgccctccctgcagctccccgccctcagtggcccagggctttgttgaagtggaactccccacttccaacctggtatggctccttctgcgaagggaagctgatcccagcctcctgagctgaatccttcaaaggcacagcaggcagaatgagggccacaggcaggagtggtgtgggcacactgcttaggagtcaacatcttcatcattgggctttctttaaaacgtgcactttgtaatttgaaagagaattattaaagcatactgaaaaaaggaaattta

SEQ ID NO: 345642 - DNA, 1225 bp, Homo sapiens
gctcctccgtggctgccgtggtcggctggccgggcggctaggagttcccggaagtgcccgcgcagccggtttccggtgcaggtggggaaaatggcggtgtctacagtgttctcgacttcgtcgctgatgcttgctctgtcaaggcacagcctattgtctcctttgctcagtgtgacatcattcagacgcttctacagaggtgacagcccaacagattcccaaaaggacatgattgaaatccctttgcctccatggcaggagagaactgatgaatccatagaaaccaaaagagcccgcctgctctatgagagcagaaagaggggaatgttggaaaactgcattcttcttagtctttttgctaaagaacatctgcagcacatgacagaaaagcagctgaacctctatgaccgcctgattaacgagcctagaagctaaaccagccccagaaatatttgaaaatgaagtcatggccctgctgagagactttgctaaaaacaaaaacaaagagcagagactgcgtgccccagatcttgagtacctctttgaaaagccacgttgagctgtgctccacggcctggcatgggggttcagtctgtggatggtaactacttatgatggacgttagccttgcttccggcttcttagatgcccagctgccctaccccagaccactggtcctgcctcaagtgatggacataaccctctcctaggacatacatgtaaatgcacaatgtgactcattctcatacttttttgttcagctctgagcctcaaaagtgatttgtcagcagcgctggcatgcaggctttgcctggctgctatctctagaggcaagtctgccacgagagggcactgcaggcgaagcagttgtgcttgctcattgcctcagcccaagtgtactcaaagaaaagaggcagccagctgtgcgtgctgtacggaaagcctcccgccctccctgcagctccccgccctcagtggcccagggctttgttgaagtggaactccccacttccaacctggtatggctccttctgcgaagggaagctgatcccagcctcctgagctgaatccttcaaaggcacagcaggcagaatgagggccacaggcaggagtggtgtgggcacactgcttaggagtcaacatcttcatcattgggctttctttaaaacgtgcactttgtaatttgaaagagaattattaaagcatactgaaaaaaggaaattta

SEQ ID NO: 345643 - DNA, 1027 bp, Homo sapiens
gctcctccgtggctgccgtggtcggctggccgggcggctaggagttcccggaagtgcccgcgcagccggtttccggtgcaggtggggaaaatggcggtgtctacagtgttctcgacttcgtcgctgatgcttgctctgtcaaggcacagcctattgtctcctttgctcagtgtgacatcattcagacgcttctacagaggtgacagcccaacagattcccaaaaggacatgattgaaatccctttgcctccatggcaggagagaactgatgaatccatagaaaccaaaagagcccgcctgctctatgagagcagaaagaggggaatgttggaaaactgcattcttcttagtctttttgctaaagaacatctgcagcacatgacagaaaagcagctgaacctctatgaccgcctgattaacgagcctagtaatgactgggatatttactactgggccacagaagctaaaccagccccagaaatatttgaaaatgaagtcatggccctgctgagagactttgctaaaaacaaaaacaaagagcagagactgcgtgccccagatcttgagtacctctttgaaaagccacgttgagctgtgctccacggcctggcatgggggttcagtctgtggatggtaactacttatgatggacgttagccttgcttccggcttcttagatgcccagctgccctaccccagaccactggtcctgcctcaagtgatggacataaccctctcctaggacatacatgtaaatgcacaatgtgactcattctcatacttttttgttcagctctgagcctcaaaagtgatttgtcagcagcgctggcatgcaggctttgcctggctgctatctctagaggcaagtctgccacgagagggcactgcaggcgaagcagttgtgcttgctcattgcctcagcccaagtgtactcaaagaaaagaggcagccagctgtgcgtgctgtacggaaagcctcccgccctcccgtgcatctgtatccatcctaagacaggtagggaccgacc

SEQ ID NO: 345644 - DNA, 1147 bp, Homo sapiens
gggccaggggtcagcaaacttgttcataaaggaccagatagtaagtattttacttgtagtcatatggtctctgttgcaagtacccaattctgctgtcataacacaaaaggagcatgggtaatatgtaaaccattgggagcagctgttccaataaaacgacttgcaaatataggctcacacagtttgccaccccctggtataggctaacatcgtgtatatttagaagaaggatggagacagtctatatatccatctgtggttcttggccagtgtttcgagttttaagattctcatacctgagcattgactgactatggcataattttttctgcccactcttctcttgcaggaagctaaaccagccccagaaatatttgaaaatgaagtcatggccctgctgagagactttgctaaaaacaaaaacaaagagcagagactgcgtgccccagatcttgagtacctctttgaaaagccacgttgagctgtgctccacggcctggcatgggggttcagtctgtggatggtaactacttatgatggacgttagccttgcttccggcttcttagatgcccagctgccctaccccagaccactggtcctgcctcaagtgatggacataaccctctcctaggacatacatgtaaatgcacaatgtgactcattctcatacttttttgttcagctctgagcctcaaaagtgatttgtcagcagcgctggcatgcaggctttgcctggctgctatctctagaggcaagtctgccacgagagggcactgcaggcgaagcagttgtgcttgctcattgcctcagcccaagtgtactcaaagaaaagaggcagccagctgtgcgtgctgtacggaaagcctcccgccctccctgcagctccccgccctcagtggcccagggctttgttgaagtggaactccccacttccaacctggtatggctccttctgcgaagggaagctgatcccagcctcctgagctgaatccttcaaaggcacagcaggcagaatgagggccacaggcaggagtggtgtgggcacactgcttaggagtcaacatcttcatcattgggctttctttaaaacgtgcactttgtaatttgaaagagaattattaaagcatactgaaaaaaggaaattta

SEQ ID NO: 345645 - DNA, 1059 bp, Homo sapiens
  misc_feature (771)..(771): n is a, c, g, or t
  misc_feature (874)..(874): n is a, c, g, or t
  misc_feature (948)..(948): n is a, c, g, or t
gctcctccgtggctgccgtggtcggctggccgggcggctaggagttcccggaagtgcccgcgcagccggtttccggtgcaggtggggaaaatggcggtgtctacagtgttctcgacttcgtcgctgatgcttgctctgtcaaggcacagcctattgtctcctttgctcagtgtgacatcattcagacgcttctacagaggtgacagcccaacagattcccaaaaggacatgattgaaatccctttgcctccatggcaggagagaactgatgaatccatagaaaccaaaagagcccgcctgctctatgagagcagaaagaggggaatgttggaaaactgcattcttcttagtctttttgctaaagaacatctgcagcacatgacagaaaagcagctgaacctctatgaccgcctgattaacgagcctagtaatgactgggatatttactactgggccacagaagctaaaccagccccagaaatatttgaaaatgaagtcatggccctgctgagagactttgctaaaaacaaaaacaaagagcagagactgcgtgccccagatcttgagtacctctttgaaaagccacgttgagctgtgctccacggcctggcatgggggttcagtctgtggatggtaactacttatgatggacgttagccttgcttccggcttcttagatgcccagctgccctaccccagaccactggtcctgcctcaagtgatggacataaccctctcctaggacatacatgccccctggggccctgcccnacagcatcatgatggggaaactccccctgggggtcgtctccccttatgtgaagatgagttcggggggctacacggacccctgaaattctacgccaccagctantgcacagcctacggtcgggaggatttcaagccccgtgtgggcagtcacgtaggcaccggctacaaatcaaattnccagcccgtggtctcatgccaaagccagtctggaggccttagacaacccggacaggcaggaaaacaagcccaggaccatttacagactgtggccagcagagactatcgccc

SEQ ID NO: 345646 - DNA, 766 bp, Homo sapiens
  misc_feature (478)..(478): n is a, c, g, or t
  misc_feature (581)..(581): n is a, c, g, or t
  misc_feature (655)..(655): n is a, c, g, or t
gctcctccgtggctgccgtggtcggctggccgggcggctaggagttcccggaagtgcccgcgcagccggtttccggtgcaggtggggaaaatggcggtgtctacagtgttctcgacttcgtcgctgatgcttgctctgtcaaggcacagcctattgtctcctttgctcagtgtgacatcattcagacgcttctacagaggtgacagcccaacagattcccaaaaggacatgattgaaatccctttgcctccatggcaggagagaactgatgaatccatagaaaccaaaagagcccgcctgctctatgagagcagaaagaggggaatgttggaaaactgcattcttcttagtctttttgctaaagaacatctgcagcacatgacagaaaagcagctgaacctctatgaccgcctgattaacgagcctagtaatgactgggatatttactactgggccacaccccctggggccctgcccnacagcatcatgatggggaaactccccctgggggtcgtctccccttatgtgaagatgagttcggggggctacacggacccctgaaattctacgccaccagctantgcacagcctacggtcgggaggatttcaagccccgtgtgggcagtcacgtaggcaccggctacaaatcaaattnccagcccgtggtctcatgccaaagccagtctggaggccttagacaacccggacaggcaggaaaacaagcccaggaccatttacagactgtggccagcagagactatcgccc

SEQ ID NO: 345647 - DNA, 877 bp, Homo sapiens
gctcctccgtggctgccgtggtcggctggccgggcggctaggagttcccggaagtgcccgcgcagccggtttccggtgcaggtggggaaaatggcggtgtctacagtgttctcgacttcgtcgctgggaattggtttgtttgttgctgttggctcagtgtctccatcggggaaggaggatctggggtttcctactccaccatcttcacctcttgctgaggtcaccaccttgacatcatatcttgataagttgtccacttctctggattgggagcctttgggggattagggatcatgctgtctctgtgtgctcaggatttgacacagatgcttgctctgtcaaggcacagcctattgtctcctttgctcagtgtgacatcattcagacgcttctacagaggtgacagcccaacagattcccaaaaggacatgattgaaatccctttgcctccatggcaggagagaactgatgaatccatagaaaccaaaagagcccgcctgctctatgagagcagaaagaggggaatgttggaaaactgcattcttcttagtctttttgctaaagaacatctgcagcacatgacagaaaagcagctgaacctctatgaccgcctgattaacgagcctagtaatgactgggatatttactactgggccacagaagctaacccagccaaaaaaaaaaaaaaaaaaaaaaaaaaattttgggggcgcccggcccggaaattttaacctctcttggcgccggccccgggaggaacggccacggtccaggaacccggccggctgggggtttcccaaaaacccggggccgggtcgcaccccggggtcgggccggttccggccgctatccccccccccgcgggggggacgcaacc

SEQ ID NO: 345648 - DNA, 819 bp, Homo sapiens
gctcctccgtggctgccgtggtcggctggccgggcggctaggagttcccggaagtgcccgcgcagccggtttccggtgcaggtggggaaaatggcggtgtctacagtgttctcgacttcgtcgctgatgcttgctctgtcaaggcacagcctattgtctcctttgctcagtgtgacatcattcagacgcttctacagaggtgacagcccaacagattcccaaaaggacatgattgaaatccctttgcctccatggcaggagagaactgatgaatccacttctctaggcacttaactttccttccatttcatttccatttccttccatttcactgagcacagccaggtccagagggtgcaaagacaagtaagaagggggtcccacccttgaacttatgaagagggggtgcagacagatcaatgcaggaatcagtgatgacaatcccggggctctgcgcgcaccaggaagcaccagcaagcgtgcctgacagccagcaggagctcaggacacaacaggacacgacaggctggaaggacccagcagacaggactggagctggtctctgccagagccacaggaggaggtgtttgcctaagaaggggtcagaacatcgttgcccctcccccacctccgtgggaactggagcggccactgtgctgagtctgctgtgcgggcggaagctctgctcctcccctctgagcctcagggtttaggccagaggacaacaaacggcccttccagctcagactctctgttgctcctccaggacaccgccctcccctcttttcagtctcagttcaaacgtcacctgctcaaggc

SEQ ID NO: 345649 - DNA, 383 bp, Homo sapiens
aggagtcttggtgtcacttctcttttattagacacagccttctcaacctctttttctttttttctttcttgtttttagtctttttgctaaagaacatctgcagcacatgacagaaaagcagctgaacctctatgaccgcctgattaacgagcctagtaatgactgggatatttactactgggccacaggtactgggtatgataagcagcataatgtgaaaataggacagtttaggctgatttgagtctagaattgtatcctagataatttttttctttcttttttttttttgagactgagtttcactctcgttgcccaggctggagtgcaatggcatgatctcggctcactgcaacctctaccttccaggttcaagcgattct

SEQ ID NO: 345650 - DNA, 2023 bp, Homo sapiens
gctcctccgtggctgccgtggtcggctggccgggcggctaggagttcccggaagtgcccgcgcagccggtttccggtgcaggtggggaaaatggcggtgtctacagtgttctcgacttcgtcgctgatgcttgctctgtcaaggcacagcctattgtctcctttgctcagtgtgacatcattcagacgcttctacagaggtgacagcccaacagattcccaaaaggacatgattgaaatccctttgcctccatggcaggagagaactgatgaatccatagaaaccaaaagagcccgcctgctctatgagagcagaaagaggggaatgttggaaaactgcattcttcttagtctttttgctaaagaacatctgcagcacatgacagaaaagcagctgaacctctatgaccgcctgattaacgagcctagtaatgactgggatatttactactgggccacagaagctaaaccagccccagaaatatttgaaaatgaagtcatggccctgctgagagactttgctaaaaacaaaaacaaagagcagagactgcgtgccccagatcttgagtacctctttgaaaagccacgttgagctgtgctccacggcctggcatgggggttcagtctgtggatggtaactacttatgatggacgttagccttgcttccggcttcttagatgcccagctgccctaccccagaccactggtcctgcctcaagtgatggacataaccctctcctaggacatacatgtaaatgcacaatgtgactcattctcatacttttttgttcagctctgagcctcaaaagtgatttgtcagcagcgctggcatgcaggctttgcctggctgctatctctagaggcaagtctgccacgagagggcactgcaggcgaagcagttgtgcttgctcattgcctcagcccaagtgtactcaaagaaaagaggcagccagctgtgcgtgctgtacggaaagcctcccgccctccctgcagctccccgccctcagtggcccagggctttgttgaagtggaactccccacttccaacctggtatggctccttctgcgaagggaagctgatcccagcctcctgagctgaatccttcaaaggcacagcaggcagaatgagggccacaggcaggagtggtgtgggcacactgcttaggagtcaacatcttcatcattgggctttctttaaaacgtgcactttgtaatttgaaagagaattattaaagcatactgaaaaaaggaaatttacaatttcccagccctcacaattaattttaattttgtctattttcatataacccatagtcatgtttatagagttttacaagttcacaattacaggttttattttcatgtagcactatagaaaactttccccctcattcctacagtcttcacaattagttgactaaataataatacataagaaataatatattagaatgaattagttagaagtgtttttaaaagctctagggctgtgtgacttctgtgttgctagtggtgccctccctggaggggttttgccctcagagctgtaatctaggcagtagaatcagtcacccagactggaccaggtgcatctaaaggtgttgactagaagaaggtcggccagatttgatgagcaggtggttggtgattataggagccgcacacagggactacacacgcacatgtttccagcattgttgagctccagggttcctacagagccacctcatggttcctgcctgctcttcagtatccctggtggctcaggagggaagggaagagatctagcctttacgtaatcacagttaagcctcacagcactctagactagtggtgttacctgtattttatacataagaaagtgggctcagagagaggaagtaatttgtccaaggtcaggtagctattgagtcgaaaaagcagaatttagtatagctcagtctgcctccaaagctcttgaactttctactagaacacactgccttactgctggaaatttaatagaagtctctgtttgggaaag

SEQ ID NO: 345651 - DNA, 1457 bp, Homo sapiens
gctcctccgtggctgccgtggtcggctggccgggcggctaggagttcccggaagtgcccgcgcagccggtttccggtgcaggtggggaaaatggcggtgtctacagtgttctcgacttcgtcgctgggaattggtttgtttgttgctgttggctcagtgtctccatcggggaaggaggatctggggtttcctactccaccatcttcacctcttgctgaggtcaccaccttgacatcatatcttgataagttgtccacttctctggattgggagcctttgggggattagggatcatgctgtctctgtgtgctcaggatttgacacagatgcttgctctgtcaaggcacagcctattgtctcctttgctcagtgtgacatcattcagacgcttctacagaggtgacagcccaacagattcccaaaaggacatgattgaaatccctttgcctccatggcaggagagaactgatgaatccatagaaaccaaaagagcccgcctgctctatgagagcagaaagaggggaatgttggaaaactgcattcttcttagtctttttgctaaagaacatctgcagcacatgacagaaaagcagctgaacctctatgaccgcctgattaacgagcctagtaatgactgggatatttactactgggccacagaagctaaaccagccccagaaatatttgaaaatgaagtcatggccctgctgagagactttgctaaaaacaaaaacaaagagcagagactgcgtgccccagatcttgagtacctctttgaaaagccacgttgagctgtgctccacggcctggcatgggggttcagtctgtggatggtaactacttatgatggacgttagccttgcttccggcttcttagatgcccagctgccctaccccagaccactggtcctgcctcaagtgatggacataaccctctcctaggacatacatgtaaatgcacaatgtgactcattctcatacttttttgttcagctctgagcctcaaaagtgatttgtcagcagcgctggcatgcaggctttgcctggctgctatctctagaggcaagtctgccacgagagggcactgcaggcgaagcagttgtgcttgctcattgcctcagcccaagtgtactcaaagaaaagaggcagccagctgtgcgtgctgtacggaaagcctcccgccctccctgcagctccccgccctcagtggcccagggctttgttgaagtggaactccccacttccaacctggtatggctccttctgcgaagggaagctgatcccagcctcctgagctgaatccttcaaaggcacagcaggcagaatgagggccacaggcaggagtggtgtgggcacactgcttaggagtcaacatcttcatcattgggctttctttaaaacgtgcactttgtaatttgaaagagaattattaaagcatactgaaaaaaggaaattta

SEQ ID NO: 345652 - DNA, 1614 bp, Homo sapiens
gctcctccgtggctgccgtggtcggctggccgggcggctaggagttcccggaagtgcccgcgcagccggtttccggtgcaggtggggaaaatggcggtgtctacagtgttctcgacttcgtcgctgatgcttgctctgtcaaggcacagcctattgtctcctttgctcagtgtgacatcattcagacgcttctacagaggtgacagcccaacagattcccaaaaggacatgattgaaatccctttgcctccatggcaggagagaactgatgaatccatagaaaccaaaagagcccgcctgctctatgagagcagaaagaggggaatgttggaaaactgcattcttcttagtctttttgctaaagaacatctgcagcacatgacagaaaagcagctgaacctctatgaccgcctgattaacgagcctagtaatgactgggatatttactactgggccacagaagctaaaccagccccagaaatatttgaaaatgaagtcatggccctgctgagagactttgctaaaaacaaaaacaaagagcagagactgcgtgccccagatcttgagtacctctttgaaaagccacgttgagctgtgctccacggcctggcatgggggttcagtctgtggatggtaactacttatgatggacgttagccttgcttccggcttcttagatgcccagctgccctaccccagaccactggtcctgcctcaagtgatggacataaccctctcctaggacatacatgtaaatgcacaatgtgactcattctcatacttttttgttcagctctgagcctcaaaagtgatttgtcagcagcgctggcatgcaggctttgcctggctgctatctctagaggcaagtctgccacgagagggcactgcaggcgaagcagttgtgcttgctcattgcctcagcccaagtgtactcaaagaaaagaggcagccagctgtgcgtgctgtacggaaagcctcccgccctccctgcagctccccgccctcagtggcccagggctttgttgaagtggaactccccacttccaacctggtatggctccttctgcgaagggaagctgatcccagcctcctgagctgaatccttcaaaggcacagcaggcagaatgagggccacaggcaggagtggtgtgggcacactgcttaggagtcaacatcttcatcattgggctttctttaaaacgtgcactttgtaatttgaaagagaattattaaagcatactgaaaaaaggaaatttaaaaaaaaaaaaaaaaaaaaaaaaaaaactttttgggccgcggccttggggccccgaggaagaaggctttttaaaaccacttcgcgttgtggggggccgcgcggccccagtaggtgtaaggtggcaactgggggtcatgagagcgtggtcccctcaaggaaatcctggcgccaggaacttaagtggtgggtttctctccaccaattaaaaaaacgcgccgcggggggaacaccggaggtttttggaacaaattccccagaagggagtctcgagaggcccaataacgggctttcatacccaccgggagaccccagagggaagccgaataacaaattaacacggccgccggagaaaaagg

SEQ ID NO: 345653 - DNA, 1149 bp, Homo sapiens
gctcctccgtggctgccgtggtcggctggccgggcggctaggagttcccggaagtgcccgcgcagccggtttccggtgcaggtggggaaaatggcggtgtctacagtgttctcgacttcgtcgctgatgcttgctctgtcaaggcacagcctattgtctcctttgctcagtgtgacatcattcagacgcttctacagaggtgacagcccaacagattcccaaaaggacatgattgaaatccctttgcctccatggcaggagagaactgatgaatccatagaaaccaaaagagcccgcctgctctatgagagcagaaagaggggaatgttggaaaactgcattcttcttagtctttttgctaaagaacatctgcagcacatgacagaaaagcagctgaacctctatgaccgcctgattaacgagcctagtaatgactgggatatttactactgggccacagaagctaaaccagccccagaaatatttgaaaatgaagtcatggccctgctgagagactttgctaaaaacaaaaacaaagagcagagactgcgtgccccagatcttgagtacctctttgaaaagccacgttgagctgtgctccacggcctggcatgggggttcagtctgtggatggtaactacttatgatggacgttagccttgcttccggcttcttagatgcccagctgccctaccccagaccactggtcctgcctcaagtgatggacataaccctctcctaggacatacatgtaaatgcacaatgtgactcattctcatacttttttgttcagctctgagcctcaaaagtgatttgtcagcagcgctggcatgcaggctttgcctggctgctatctctagaggcaagtctgccacgagagggcactgcaggcgaagcagttgtgcttgctcattgcctcagcccaagtgtactcaaagaaaagaggcagccagctgtgcgtgctgtacggaaagcctcccgccctccctgaatccttcaaaggcacagcaggcagaatgagggccacaggcaggagtggtgtgggcacactgcttaggagtcaacatcttcatcattgggctttctttaaaacgtgcactttgtaatttgaaagagaattattaaagcatactgaaaaaaggaaattta

SEQ ID NO: 345654 - DNA, 1144 bp, Homo sapiens
gctcctccgtggctgccgtggtcggctggccgggcggctaggagttcccggaagtgcccgcgcagccggtttccggtgcaggtggggaaaatggcggtgtctacagtgttctcgacttcgtcgctgatgcttgctctgtcaaggcacagcctattgtctcctttgctcagtgtgacatcattcagacgcttctacagaggtgacagcccaacagattcccaaaaggacatgattgaaatccctttgcctccatggcaggagagaactgatgaatccatagaaaccaaaagagcccgcctgctctatgagagcagaaagaggggaatgttggaaaactgcattcttcgaagctaaaccagccccagaaatatttgaaaatgaagtcatggccctgctgagagactttgctaaaaacaaaaacaaagagcagagactgcgtgccccagatcttgagtacctctttgaaaagccacgttgagctgtgctccacggcctggcatgggggttcagtctgtggatggtaactacttatgatggacgttagccttgcttccggcttcttagatgcccagctgccctaccccagaccactggtcctgcctcaagtgatggacataaccctctcctaggacatacatgtaaatgcacaatgtgactcattctcatacttttttgttcagctctgagcctcaaaagtgatttgtcagcagcgctggcatgcaggctttgcctggctgctatctctagaggcaagtctgccacgagagggcactgcaggcgaagcagttgtgcttgctcattgcctcagcccaagtgtactcaaagaaaagaggcagccagctgtgcgtgctgtacggaaagcctcccgccctccctgcagctccccgccctcagtggcccagggctttgttgaagtggaactccccacttccaacctggtatggctccttctgcgaagggaagctgatcccagcctcctgagctgaatccttcaaaggcacagcaggcagaatgagggccacaggcaggagtggtgtgggcacactgcttaggagtcaacatcttcatcattgggctttctttaaaacgtgcactttgtaatttgaaagagaattattaaagcatactgaaaaaaggaaattta

SEQ ID NO: 345655 - DNA, 1160 bp, Homo sapiens
  misc_feature (1102)..(1102): n is a, c, g, or t
gctcctccgtggctgccgtggtcggctggccgggcggctaggagttcccggaagtgcccgcgcagccggtttccggtgcaggtggggaaaatggcggtgtctacagtgttctcgacttcgtcgctgatgcttgctctgtcaaggcacagcctattgtctcctttgctcagtgtgacatcattcagacgcttctacagaggtgacagcccaacagattcccaaaaggacatgattgaaatccctttgcctccatggcaggagagaactgatgaatccatagaaaccaaaagagcccgcctgctctatgagagcagaaagaggggaatgttggaaaactgcattcttcttagtctttttgctaaagaacatctgcagcacatgacagaaaagcagctgaacctctatgaccgcctgattaacgagcctagtaatgactgggatatttactactgggccacaggtgactgggtacctggatatgtgatcgagtattcttctgggtgtttctatgaggatgtttttggatgaaattggcatttaaattggtaaactgagtaaagcagtctgtccccctaaccggggtgggcttcatgtaatcagctcaaggtttgaatacaacaaaaagacttacactctcgcaagtgaaaggcaattctttctgcctggtagccttcaaactgagacacaggcttttatcctgccttcagattcgcctgggaacactggctcttcctgagtctcaagcctgctggccttgagacaagaactacatcagctctctcagttctcaagcctttggacttactctggaactaagcatcagtctcttgggtcgtcagcttgcaaccaatcatcctgaagatcttgggacttgccagccttcatagtcacgtgggccaatcccttttttttttttttttttgagatggagtcttgctctgtcgcccagtctggagtgaaatggcacaatatcagctcactgcaaacttcacctcccaggctcaagcgatcctcccacctcagcctcccaagtagctgggactgcaggcgtgcgccaccatgcctggctaattaaaaaaaaaatttttttttgtagagacgnagtttcactgtgttgctcaggctggtcttgaactcctgagctcaagcaaccctccact

SEQ ID NO: 345656 - DNA, 656 bp, Homo sapiens
  misc_feature (628)..(629): n is a, c, g, or t
  misc_feature (631)..(631): n is a, c, g, or t
  misc_feature (633)..(633): n is a, c, g, or t
  misc_feature (636)..(638): n is a, c, g, or t
aactagcgcttatgtattaacccctacactcatctcaacccctgacaaacacatacctaccccttcctgtactatccctatgaggcataattattacaagctccatctgcctacgacaaacagacctaaaatcgctcattgcatactcttcaatcagccacatagccctcgtagtaacagccattctcatccaaaccccctgaagcttcaccggcgcagtcattctcataatcgcccacggacctcgtgatcctcgaggatcagagcagttagccgagagcatcctccacgagggcagcacaggctgccgggtggtggagaagtttctgaagatcctgcaggtggtggtccaggagccaggccaggtgttcaagcccttcctccccagcatcatcgccctgtgcatggagcaagtgtatcccatcattgccgagcgtccctcccctgatgtgaaggccgagctgtttgagctccttttccggacgctccatcacaactggaggtacttcttcaagtccaccgtgctggccagtgtccagagggggatcgctgaggagcagatggagaatgagccccagttcagtgccatcatgcagctttcggacagtcctttctctagcccgacagnncncnctnnnacaggacatcgtgatcct

SEQ ID NO: 345657 - DNA, 309 bp, Homo sapiens
aacgggtgatgcggttgggtctggatgaattgtctcgttgtctcggggtcccccgatgaggcgacccgggcggccctgccctttttagagggtcccctcggggcccggtggggaaggggttgtctttgcatgggtgggggacttcccgagtctgccgggaccatgacctgaactgtgcgagcgggacgtgtccgaagcccaagaaccagctcatctgagccgccccctccccggccagcatgggtagctcatgtaagtggagtcatgaagtatttggcctgttgtgactgccttatttcacatggcaca

SEQ ID NO: 345658 - DNA, 4576 bp, Homo sapiens
gcggccgcgcggtactagcgggcggctccagggcgggcgcgcgcaaggatgctctagggggcggcggcagtggccgtgtgggttgaggctgcgaggacagcgcgggcccccgggcctctcccctgagccggccgcctgggccgcgcggtcgaggcctgtcagcctccgcccgttcagcctcggggccggggccgccgccacctctgcccgcggaggccggggagcccctgcctgggcccgcagcctcccccgcgggggtcgggcccgggcgggggtcccgagcagctgccctcctcgccggcatccgagcctcatttcctgctttttcagtttccttggggaggggcgggtgggtctggatgaattgtctcggggtcccccgatgaggcgacccgggcggccctgccctttttagagggtcccctcggggcccggtggggaaggggttgtctttgcatgggtgggggacttcccgagtctgccgggaccatgacctgaactgtgcgagcgggacgtgtccgaagcccaagaaccagctcatctgagccgccccctccccggccagcatggtgttctcaagcttcatccgtgtggtggcgtgtgtcagagcttccttccttttgaaagctgaattccattgcatctgaagaagcctctctcagggcattggaaagtctgatgacagaattttttcacgattgtacaaccaatgaaagaaaacgtgagatagaggagcttcttaataactttgcccagcaaataggagcctggagattctgcctgtactttctctccagcactaggaatgactatgtaatgatgtacagtttaacagtttttgagaatctgatcaataaaatgtggcttggggtcccatctcaggataagatggaaatccgtagctgtctgcccaaactccttttggctcaccataaaaccttaccttactttatccggaacaagctctgcaaagttattgttgatattggacgtcaggattggcccatgttctaccacgacttttttactaacattttacagttgatccagtcccctgtgacaaccccccttgggctgatcatgttgaagacaacttcagaagagctggcttgtccccgtgaggacctcagtgtggctcggaaggaggagttgcggaagctgctactggaccaggtgcagacagtgcttgggctactgacaggtatcttggagactgtctgggacaaacacagtgttactgctgccactccaccaccatccccgacctcaggagaaagtggtgacttactgagtaacctgttgcagagtcccagttcagccaaactgttgaatcagccaattcccatccttgatgtggagagtgagtatatctgttccctggctttggagtgcctggcccatctcttcagttggattcctctgtctgccagcatcaccccatccctccttaccaccatcttccactttgcacgatttggctgtgacatccgggccagaaagatggcgtcagttaacggcagcagccagaactgtgtctcgggtcaggagcgcggccggctgggggtcctggccatgtcctgcatcaatgaactcatgtccaagaactgtgtgcctatggaatttgaggagtatttactgcgtatgttccagcagactttctacctcctgcagaaaatcaccaaggataacaatgcccacacagtgaagagcaggctagaagagctcgatgagagctatatcgagaagtttactgactttcttcggctctttgtgagtgttcacctaagaagaatcgagtcttactcccagttccctgtggtggagtttttgacacttttgttcaagtacacatttcatcagcctactcatgaaggttacttctcttgtttggatatctggacgctgtttttggactatctgacaagtaaaattaaaagtcgtcttggagacaaggaagcagttctcaacaggtacgaagatgccctggtgctcctgctcacagaggtgttgaatcgaatccagttcagatacaaccaagcccagctggaggagttggatgatgagactctggatgacgatcagcagacggagtggcagcggtacttacggcagagcttggaggtggtggccaaagtgatggagctcctgcccacgcacgccttctccacactgttccctgttcttcaggacaatttagaagtttatttgggattacaacagtttatagtcacttcagggtcaggacacaggttgaacatcacggcggagaacgactgccggcggctgcactgctccctgagagacttgagctccctgctgcaggccgtgggccgcctggccgagtactttatcggggatgtgtttgctgcacggttcaatgatgccctcacagtcgtggaaaggttggtcaaagtcactctgtacggatctcagataaaattgtacaacattgaaactgctgtgccatcagtattgaaacctgacctcattgatgtgcatgctcagtccctggctgcgctgcaggcttactctcactggttagcacagtattgcagtgaagttcaccggcagaacacgcagcagttcgtgacactcatctctactaccatggatgcaatcacacctctaatcagcaccaaggtccaagacaagctgctgctatctgcgtgccacttactggtctcactggccaccaccgtgcggcccgtctttctgatcagcatccctgcagtgcagaaagtattcaacagaatcactgatgcctctgccctgcgacttgtcgataaggcccaggtgttggtgtgccgagccctctctaacatcttgctgcttccgtggccaaaccttccagagaatgagcagcagtggcccgtgcgctccatcaaccacgccagcctcatctctgcactctcccgggactatcgcaacctgaagcccagtgctgttgccccacagagaaagatgccactggatgacaccaaactgattatccaccagacactcagcgtcttagaagatattgtggagaatatctcgggggagtccaccaagtctcgacagatttgctaccagtcgctgcaggaatctgttcaggtctccctggccctctttccagcttttatccatcagtcagatgtgactgatgagatgctgagcttcttcctcactctgtttcgaggccttagagtacagatgggtgtgcctttcactgagcaaatcatacagactttcctcaacatgtttaccagagagcagttagccgagagcatcctccacgagggcagcacaggctgccgggtggtggagaagtttctgaagatcctgcaggtggtggtccaggagccaggccaggtgttcaagcccttcctccccagcatcatcgccctgtgcatggagcaagtgtatcccatcattgccgagcgtccctcccctgatgtgaaggccgagctgtttgagctccttttccggacgctccatcacaactggaggtacttcttcaagtccaccgtgctggccagtgtccagagggggatcgctgaggagcagatggagaatgagccccagttcagtgccatcatgcaggctttcggacagtcctttctccagcccgacatccacctttttaaacaaaatctcttctacttggagactctcaacaccaagcagaagctgtaccacaagaagatcttccggactgccatgctgttccagtttgtgaacgtgctgctccaggtcctggtccacaagtcccatgatcttctgcaggaggagattggcatcgccatctacaacatggcctcagtcgactttgatggcttctttgccgccttcctcccagagttcctgaccagctgtgatggtgtggatgccaaccagaaaagtgtgctggggcggaatttcaagatggatcgggacctgccctcattcacccagaatgtgcacaggctggtcaacgacctgcgctactacagactctgcaacgacagcctgccccctggcactgtgaagctctaggcctgctactgcctggggacacggacttctgctgctgccacctgcgccagccctaccttccaccacagatgtctcccagatgggccttggtcacactccttggcttctcccaccgcaagcaacgctgcctgcctctgccgctcctccacatcttgccgctgcccagcagagctggcttctgggtccacctgagcactggacggtgctcccagggcgttggagcaggcggaggggtgtgtggccaggtactaggaggcaccaggaaatcccgcggggtggcccatgcagaccaggcgcacgtggctcatggggcagaattgccaaggacagctcacgacagtgccaccttctcaccattccagccaaggagagatgtgacgttggaactgctctggcacttctgtcaagcctcccccgccccaattgccttgagatctctgctctttgtcagagatttgcaaagactcacgtttttgttgttttctcatcattccattgtgatactaagaaactaagaagcttaatgaaaagaaataaaatgcctatgttgttgttctagaaa

SEQ ID NO: 345659 - DNA, 3400 bp, Homo sapiens
gtcagctgggttgaaatcggcgagggtatcttggagactgtctgggacaaacacagtgttactgctgccactccaccaccatccccgacctcaggagaaagtggtgacttactgagtaacctgttgcagagtcccagttcagccaaactgttgaatcagccaattcccatccttgatgtggagagtgagtatatctgttccctggctttggagtgcctggcccatctcttcagttggattcctctgtctgccagcatcaccccatccctccttaccaccatcttccactttgcacgatttggctgtgacatccgggccagaaagatggcgtcagttaacggcagcagccagaactgtgtctcgggtcaggagcgcggccggctgggggtcctggccatgtcctgcatcaatgaactcatgtccaagaactgtgtgcctatggaatttgaggagtatttactgcgtatgttccagcagactttctacctcctgcagaaaatcaccaaggataacaatgcccacacagtgaagagcaggctagaagagctcgatgagagctatatcgagaagtttactgactttcttcggctctttgtgagtgttcacctaagaagaatcgagtcttactcccagttccctgtggtggagtttttgacacttttgttcaagtacacatttcatcagcctactcatgaaggttacttctcttgtttggatatctggacgctgtttttggactatctgacaagtaaaattaaaagtcgtcttggagacaaggaagcagttctcaacaggtacgaagatgccctggtgctcctgctcacagaggtgttgaatcgaatccagttcagatacaaccaagcccagctggaggagttggatgatgagactctggatgacgatcagcagacggagtggcagcggtacttacggcagagcttggaggtggtggccaaagtgatggagctcctgcccacgcacgccttctccacactgttccctgttcttcaggacaatttagaagtttatttgggattacaacagtttatagtcacttcagggtcaggacacaggttgaacatcacggcggagaacgactgccggcggctgcactgctccctgagagacttgagctccctgctgcaggccgtgggccgcctggccgagtactttatcggggatgtgtttgctgcacggttcaatgatgccctcacagtcgtggaaaggttggtcaaagtcactctgtacggatctcagataaaattgtacaacattgaaactgctgtgccatcagtattgaaacctgacctcattgatgtgcatgctcagtccctggctgcgctgcaggcttactctcactggttagcacagtattgcagtgaagttcaccggcagaacacgcagcagttcgtgacactcatctctactaccatggatgcaatcacacctctaatcagcaccaaggtccaagacaagctgctgctatctgcgtgccacttactggtctcactggccaccaccgtgcggcccgtctttctgatcagcatccctgcagtgcagaaagtattcaacagaatcactgatgcctctgccctgcgacttgtcgataaggcccaggtgttggtgtgccgagccctctctaacatcttgctgcttccgtggccaaaccttccagagaatgagcagcagtggcccgtgcgctccatcaaccacgccagcctcatctctgcactctcccgggactatcgcaacctgaagcccagtgctgttgccccacagagaaagatgccactggatgacaccaaactgattatccaccagacactcagcgtcttagaagatattgtggagaatatctcgggggagtccaccaagtctcgacagatttgctaccagtcgctgcaggaatctgttcaggtctccctggccctctttccagcttttatccatcagtcagatgtgactgatgagatgctgagcttcttcctcactctgtttcgaggccttagagtacagatgggtgtgcctttcactgagcaaatcatacagactttcctcaacatgtttaccagagagcagttagccgagagcatcctccacgagggcagcacaggctgccgggtggtggagaagtttctgaagatcctgcaggtggtggtccaggagccaggccaggtgttcaagcccttcctccccagcatcatcgccctgtgcatggagcaagtgtatcccatcattgccgagcgtccctcccctgatgtgaaggccgagctgtttgagctccttttccggacgctccatcacaactggaggtacttcttcaagtccaccgtgctggccagtgtccagagggggatcgctgaggagcagatggagaatgagccccagttcagtgccatcatgcaggctttcggacagtcctttctccagcccgacatccacctttttaaacaaaatctcttctacttggagactctcaacaccaagcagaagctgtaccacaagaagatcttccggactgccatgctgttccagtttgtgaacgtgctgctccaggtcctggtccacaagtcccatgatcttctgcaggaggagattggcatcgccatctacaacatggcctcagtcgactttgatggcttctttgccgccttcctcccagagttcctgaccagctgtgatggtgtggatgccaaccagaaaagtgtgctggggcggaatttcaagatggatcgggacctgccctcattcacccagaatgtgcacaggctggtcaacgacctgcgctactacagactctgcaacgacagcctgccccctggcactgtgaagctctaggcctgctactgcctggggacacggacttctgctgctgccacctgcgccagccctaccttccaccacagatgtctcccagatgggccttggtcacactccttggcttctcccaccgcaagcaacgctgcctgcctctgccgctcctccacatcttgccgctgcccagcagagctggcttctgggtccacctgagcactggacggtgctcccagggcgttggagcaggcggaggggtgtgtggccaggtactaggaggcaccaggaaatcccgcggggtggcccatgcagaccaggcgcacgtggctcatggggcagaattgccaaggacagctcacgacagtgccaccttctcaccattccagccaaggagagatgtgacgttggaactgctctggcacttctgtcaagcctcccccgccccaattgccttgagatctctgctctttgtcagagatttgcaaagactcacgtttttgttgttttctcatcattccattgtgatactaagaaactaagaagcttaatgaaaagaaataaaatgcctatgttgttgttctagaaa

SEQ ID NO: 345660 - DNA, 4541 bp, Homo sapiens
gcggccgcgcggtactagcgggcggctccagggcgggcgcgcgcaaggatgctctagggggcggcggcagtggccgtgtgggttgaggctgcgaggacagcgcgggcccccgggcctctcccctgagccggccgcctgggccgcgcggtcgaggcctgtcagcctccgcccgttcagcctcggggccggggccgccgccacctctgcccgcggaggccggggagcccctgcctgggcccgcagcctcccccgcgggggtcgggcccgggcgggggtcccgagcagctgccctcctcgccggcatccgagcctcatttcctgctttttcagtttccttggggaggggcgggtgggtctggatgaattgtctcggggtcccccgatgaggcgacccgggcggccctgccctttttagagggtcccctcggggcccggtggggaaggggttgtctttgcatgggtgggggacttcccgagtctgccgggaccatgacctgaactgtgcgagcgggacgtgtccgaagcccaagaaccagctcatctgagccgccccctccccggccagcatggcatctgaagaagcctctctcagggcattggaaagtctgatgacagaattttttcacgattgtacaaccaatgaaagaaaacgtgagatagaggagcttcttaataactttgcccagcaaataggagcctggagattctgcctgtactttctctccagcactaggaatgactatgtaatgatgtacagtttaacagtttttgagaatctgatcaataaaatgtggcttggggtcccatctcaggataagatggaaatccgtagctgtctgcccaaactccttttggctcaccataaaaccttaccttactttatccggaacaagctctgcaaagttattgttgatattggacgtcaggattggcccatgttctaccacgacttttttactaacattttacagttgatccagtcccctgtgacaaccccccttgggctgatcatgttgaagacaacttcagaagagctggcttgtccccgtgaggacctcagtgtggctcggaaggaggagttgcggaagctgctactggaccaggtgcagacagtgcttgggctactgacaggtatcttggagactgtctgggacaaacacagtgttactgctgccactccaccaccatccccgacctcaggagaaagtggtgacttactgagtaacctgttgcagagtcccagttcagccaaactgttgaatcagccaattcccatccttgatgtggagagtgagtatatctgttccctggctttggagtgcctggcccatctcttcagttggattcctctgtctgccagcatcaccccatccctccttaccaccatcttccactttgcacgatttggctgtgacatccgggccagaaagatggcgtcagttaacggcagcagccagaactgtgtctcgggtcaggagcgcggccggctgggggtcctggccatgtcctgcatcaatgaactcatgtccaagaactgtgtgcctatggaatttgaggagtatttactgcgtatgttccagcagactttctacctcctgcagaaaatcaccaaggataacaatgcccacacagtgaagagcaggctagaagagctcgatgagaggtggttaatggaatgaagggttgcctgtcctgtagctatatcgagaagtttactgactttcttcggctctttgtgagtgttcacctaagaagaatcgagtcttactcccagttccctgtggtggagtttttgacacttttgttcaagtacacatttcatcagcctactcatgaaggttacttctcttgtttggatatctggacgctgtttttggactatctgacaagtaaaattaaaagtcgtcttggagacaaggaagcagttctcaacaggtacgaagatgccctggtgctcctgctcacagaggtgttgaatcgaatccagttcagatacaaccaagcccagctggaggagttggatgatgagactctggatgacgatcagcagacggagtggcagcggtacttacggcagagcttggaggtggtggccaaagtgatggagctcctgcccacgcacgccttctccacactgttccctgttcttcaggacaatttagaagtttatttgggattacaacagtttatagtcacttcagggtcaggacacaggttgaacatcacggcggagaacgactgccggcggctgcactgctccctgagagacttgagctccctgctgcaggccgtgggccgcctggccgagtactttatcggggatgtgtttgctgcacggttcaatgatgccctcacagtcgtggaaaggttggtcaaagtcactctgtacggatctcagataaaattgtacaacattgaaactgctgtgccatcagtattgaaacctgacctcattgatgtgcatgctcagtccctggctgcgctgcaggcttactctcactggttagcacagtattgcagtgaagttcaccggcagaacacgcagcagttcgtgacactcatctctactaccatggatgcaatcacacctctaatcagcaccaaggtccaagacaagctgctgctatctgcgtgccacttactggtctcactggccaccaccgtgcggcccgtctttctgatcagcatccctgcagtgcagaaagtattcaacagaatcactgatgcctctgccctgcgacttgtcgataaggcccaggtgttggtgtgccgagccctctctaacatcttgctgcttccgtggccaaaccttccagagaatgagcagcagtggcccgtgcgctccatcaaccacgccagcctcatctctgcactctcccgggactatcgcaacctgaagcccagtgctgttgccccacagagaaagatgccactggatgacaccaaactgattatccaccagacactcagcgtcttagaagatattgtggagaatatctcgggggagtccaccaagtctcgacagatttgctaccagtcgctgcaggaatctgttcaggtctccctggccctctttccagcttttatccatcagtcagatgtgactgatgagatgctgagcttcttcctcactctgtttcgaggccttagagtacagatgggtgtgcctttcactgagcaaatcatacagactttcctcaacatgtttaccagagagcagttagccgagagcatcctccacgagggcagcacaggctgccgggtggtggagaagtttctgaagatcctgcaggtggtggtccaggagccaggccaggtgttcaagcccttcctccccagcatcatcgccctgtgcatggagcaagtgtatcccatcattgccgagcgtccctcccctgatgtgaaggccgagctgtttgagctccttttccggacgctccatcacaactggaggtacttcttcaagtccaccgtgctggccagtgtccagagggggatcgctgaggagcagatggagaatgagccccagttcagtgccatcatgcaggctttcggacagtcctttctccagcccgacatccacctttttaaacaaaatctcttctacttggagactctcaacaccaagcagaagctgtaccacaagaagatcttccggactgccatgctgttccagtttgtgaacgtgctgctccaggtcctggtccacaagtcccatgatcttctgcaggaggagattggcatcgccatctacaacatggcctcagtcgactttgatggcttctttgccgccttcctcccagagttcctgaccagctgtgatggtgtggatgccaaccagaaaagtgtgctggggcggaatttcaagatggatcgggacctgccctcattcacccagaatgtgcacaggctggtcaacgacctgcgctactacagactctgcaacgacagcctgccccctggcactgtgaagctctaggcctgctactgcctggggacacggacttctgctgctgccacctgcgccagccctaccttccaccacagatgtctcccagatgggccttggtcacactccttggcttctcccaccgcaagcaacgctgcctgcctctgccgctcctccacatcttgccgctgcccagcagagctggcttctgggtccacctgagcactggacggtgctcccagggcgttggagcaggcggaggggtgtgtggccaggtactaggaggcaccaggaaatcccgcggggtggcccatgcagaccaggcgcacgtggctcatggggcagaattgccaaggacagctcacgacagtgccaccttctcaccattccagccaaggagagatgtgacgttggaactgctctggcacttctgtcaagcctcccccgccccaattgccttgagatctctgctctttgtcagagatttgcaaagactcacgtttttgttgttttctcatcattccattgtgatactaagaaactaagaagcttaatgaaaagaaataaaatgcctatgttgttgttctagaaa

SEQ ID NO: 345661 - DNA, 3056 bp, Homo sapiens
cgagctcggtacccctccaagacgactgttaattttacttgtcagatagtccaaacacagcgtccagatatccaaacaagagaagtaaccttcatgagtaggctgatgaaatgtgaacttgaactaaagtgtcaaaaactccaccacagggaactgggagtaagactcgattcttcttaggtgaacactcaccaagagccgaagaaagtcagtaaacttctcgatatagctctcatcgagctcttctagcctgctcttcactgtgtgggcattgttatccttggtgattttctgcaggaggtagaaagtctgctggaacatacgcagtaaatactcctcccattccataggcacacagttcttggacatgagttcattgatgctgtttttggactatctgacaagtaaaattaaaagtcgtcttggagacaaggaagcagttctcaacaggtacgaagatgccctggtgctcctgctcacagaggtgttgaatcgaatccagttcagatacaaccaagcccagctggaggagttggatgatgagactctggatgacgatcagcagacggagtggcagcggtacttacggcagagcttggaggtggtggccaaagtgatggagctcctgcccacgcacgccttctccacactgttccctgttcttcaggacaatttagaagtttatttgggattacaacagtttatagtcacttcagggtcaggacacaggttgaacatcacggcggagaacgactgccggcggctgcactgctccctgagagacttgagctccctgctgcaggccgtgggccgcctggccgagtactttatcggggatgtgtttgctgcacggttcaatgatgccctcacagtcgtggaaaggttggtcaaagtcactctgtacggatctcagataaaattgtacaacattgaaactgctgtgccatcagtattgaaacctgacctcattgatgtgcatgctcagtccctggctgcgctgcaggcttactctcactggttagcacagtattgcagtgaagttcaccggcagaacacgcagcagttcgtgacactcatctctactaccatggatgcaatcacacctctaatcagcaccaaggtccaagacaagctgctgctatctgcgtgccacttactggtctcactggccaccaccgtgcggcccgtctttctgatcagcatccctgcagtgcagaaagtattcaacagaatcactgatgcctctgccctgcgacttgtcgataaggcccaggtgttggtgtgccgagccctctctaacatcttgctgcttccgtggccaaaccttccagagaatgagcagcagtggcccgtgcgctccatcaaccacgccagcctcatctctgcactctcccgggactatcgcaacctgaagcccagtgctgttgccccacagagaaagatgccactggatgacaccaaactgattatccaccagacactcagcgtcttagaagatattgtggagaatatctcgggggagtccaccaagtctcgacagatttgctaccagtcgctgcaggaatctgttcaggtctccctggccctctttccagcttttatccatcagtcagatgtgactgatgagatgctgagcttcttcctcactctgtttcgaggccttagagtacagatgggtgtgcctttcactgagcaaatcatacagactttcctcaacatgtttaccagagagcagttagccgagagcatcctccacgagggcagcacaggctgccgggtggtggagaagtttctgaagatcctgcaggtggtggtccaggagccaggccaggtgttcaagcccttcctccccagcatcatcgccctgtgcatggagcaagtgtatcccatcattgccgagcgtccctcccctgatgtgaaggccgagctgtttgagctccttttccggacgctccatcacaactggaggtacttcttcaagtccaccgtgctggccagtgtccagagggggatcgctgaggagcagatggagaatgagccccagttcagtgccatcatgcaggctttcggacagtcctttctccagcccgacatccacctttttaaacaaaatctcttctacttggagactctcaacaccaagcagaagctgtaccacaagaagatcttccggactgccatgctgttccagtttgtgaacgtgctgctccaggtcctggtccacaagtcccatgatcttctgcaggaggagattggcatcgccatctacaacatggcctcagtcgactttgatggcttctttgccgccttcctcccagagttcctgaccagctgtgatggtgtggatgccaaccagaaaagtgtgctggggcggaatttcaagatggatcgggacctgccctcattcacccagaatgtgcacaggctggtcaacgacctgcgctactacagactctgcaacgacagcctgccccctggcactgtgaagctctaggcctgctactgcctggggacacggacttctgctgctgccacctgcgccagccctaccttccaccacagatgtctcccagatgggccttggtcacactccttggcttctcccaccgcaagcaacgctgcctgcctctgccgctcctccacatcttgccgctgcccagcagagctggcttctgggtccacctgagcactggacggtgctcccagggcgttggagcaggcggaggggtgtgtggccaggtactaggaggcaccaggaaatcccgcggggtggcccatgcagaccaggcgcacgtggctcatggggcagaattgccaaggacagctcacgacagtgccaccttctcaccattccagccaaggagagatgtgacgttggaactgctctggcacttctgtcaagcctcccccgccccaattgccttgagatctctgctctttgtcagagatttgcaaagactcacgtttttgttgttttctcatcattccattgtgatactaagaaactaagaagcttaatgaaaagaaataaaatgcctatgttgttgttctagaaa

SEQ ID NO: 345662 - DNA, 3327 bp, Homo sapiens
gcggccgcgcggtactagcgggcggctccagggcgggcgcgcgcaaggatgctctagggggcggcggcagtggccgtgtgggttgaggctgcgaggacagcgcgggcccccgggcctctcccctgagccggccgcctgggccgcgcggtcgaggcctgtcagcctccgcccgttcagcctcggggccggggccgccgccacctctgcccgcggaggccggggagcccctgcctgggcccgcagcctcccccgcgggggtcgggcccgggcgggggtcccgagcagctgccctcctcgccggcatccgagcctcatttcctgctttttcagtttccttggggaggggcgggtgggtctggatgaattgtctcggggtcccccgatgaggcgacccgggcggccctgccctttttagagggtcccctcggggcccggtggggaaggggttgtctttgcatgggtgggggacttcccgagtctgccgggaccatgacctgaactgtgcgagcgggacgtgtccgaagcccaagaaccagctcatctgagccgccccctccccggccagcatggcatctgaagaagcctctctcagggcattggaaagtctgatgacagaattttttcacgattgtacaaccaatgaaagaaaacgtgagatagaggagcttcttaataactttgcccagcaaataggagcctggagattctgcctgtactttctctccagcactaggaatgactatgtaatgatgtacagtttaacagtttttgagaatctgatcaataaaatgtggcttggggtcccatctcaggataagatggaaatccgtcagcagacggagtggcagcggtacttacggcagagcttggaggtggtggccaaagtgatggagctcctgcccacgcacgccttctccacactgttccctgttcttcaggacaatttagaagtttatttgggattacaacagtttatagtcacttcagggtcaggacacaggttgaacatcacggcggagaacgactgccggcggctgcactgctccctgagagacttgagctccctgctgcaggccgtgggccgcctggccgagtactttatcggggatgtgtttgctgcacggttcaatgatgccctcacagtcgtggaaaggttggtcaaagtcactctgtacggatctcagataaaattgtacaacattgaaactgctgtgccatcagtattgaaacctgacctcattgatgtgcatgctcagtccctggctgcgctgcaggcttactctcactggttagcacagtattgcagtgaagttcaccggcagaacacgcagcagttcgtgacactcatctctactaccatggatgcaatcacacctctaatcagcaccaaggtccaagacaagctgctgctatctgcgtgccacttactggtctcactggccaccaccgtgcggcccgtctttctgatcagcatccctgcagtgcagaaagtattcaacagaatcactgatgcctctgccctgcgacttgtcgataaggcccaggtgttggtgtgccgagccctctctaacatcttgctgcttccgtggccaaaccttccagagaatgagcagcagtggcccgtgcgctccatcaaccacgccagcctcatctctgcactctcccgggactatcgcaacctgaagcccagtgctgttgccccacagagaaagatgccactggatgacaccaaactgattatccaccagacactcagcgtcttagaagatattgtggagaatatctcgggggagtccaccaagtctcgacagatttgctaccagtcgctgcaggaatctgttcaggtctccctggccctctttccagcttttatccatcagtcagatgtgactgatgagatgctgagcttcttcctcactctgtttcgaggccttagagtacagatgggtgtgcctttcactgagcaaatcatacagactttcctcaacatgtttaccagagagcagttagccgagagcatcctccacgagggcagcacaggctgccgggtggtggagaagtttctgaagatcctgcaggtggtggtccaggagccaggccaggtgttcaagcccttcctccccagcatcatcgccctgtgcatggagcaagtgtatcccatcattgccgagcgtccctcccctgatgtgaaggccgagctgtttgagctccttttccggacgctccatcacaactggaggtacttcttcaagtccaccgtgctggccagtgtccagagggggatcgctgaggagcagatggagaatgagccccagttcagtgccatcatgcaggctttcggacagtcctttctccagcccgacatccacctttttaaacaaaatctcttctacttggagactctcaacaccaagcagaagctgtaccacaagaagatcttccggactgccatgctgttccagtttgtgaacgtgctgctccaggtcctggtccacaagtcccatgatcttctgcaggaggagattggcatcgccatctacaacatggcctcagtcgactttgatggcttctttgccgccttcctcccagagttcctgaccagctgtgatggtgtggatgccaaccagaaaagtgtgctggggcggaatttcaagatggatcgggacctgccctcattcacccagaatgtgcacaggctggtcaacgacctgcgctactacagactctgcaacgacagcctgccccctggcactgtgaagctctaggcctgctactgcctggggacacggacttctgctgctgccacctgcgccagccctaccttccaccacagatgtctcccagatgggccttggtcacactccttggcttctcccaccgcaagcaacgctgcctgcctctgccgctcctccacatcttgccgctgcccagcagagctggcttctgggtccacctgagcactggacggtgctcccagggcgttggagcaggcggaggggtgtgtggccaggtactaggaggcaccaggaaatcccgcggggtggcccatgcagaccaggcgcacgtggctcatggggcagaattgccaaggacagctcacgacagtgccaccttctcaccattccagccaaggagagatgtgacgttggaactgctctggcacttctgtcaagcctcccccgccccaattgccttgagatctctgctctttgtcagagatttgcaaagactcacgtttttgttgttttctcatcattccattgtgatactaagaaactaagaagcttaatgaaaagaaataaaatgcctatgttgttgttctagaaa

SEQ ID NO: 345663 - DNA, 2468 bp, Homo sapiens
ccccccgtgttgattcggccgagggtgatggagctcctgtcccacgcacgccttctccacactgttccctgttcttcaggacaatttagaagtttatttgggattacaacagtttatagtcacttcagggtcaggacacaggttgaacatcacggcggagaacgactgccggcggctgcactgctccctgagagacttgagctccctgctgcaggccgtgggccgcctggccgagtactttatcggggatgtgtttgctgcacggttcaatgatgccctcacagtcgtggaaaggttggtcaaagtcactctgtacggatctcagataaaattgtacaacattgaaactgctgtgccatcagtattgaaacctgacctcattgatgtgcatgctcagtccctggctgcgctgcaggcttactctcactggttagcacagtattgcagtgaagttcaccggcagaacacgcagcagttcgtgacactcatctctactaccatggatgcaatcacacctctaatcagcaccaaggtccaagacaagctgctgctatctgcgtgccacttactggtctcactggccaccaccgtgcggcccgtctttctgatcagcatccctgcagtgcagaaagtattcaacagaatcactgatgcctctgccctgcgacttgtcgataaggcccaggtgttggtgtgccgagccctctctaacatcttgctgcttccgtggccaaaccttccagagaatgagcagcagtggcccgtgcgctccatcaaccacgccagcctcatctctgcactctcccgggactatcgcaacctgaagcccagtgctgttgccccacagagaaagatgccactggatgacaccaaactgattatccaccagacactcagcgtcttagaagatattgtggagaatatctcgggggagtccaccaagtctcgacagatttgctaccagtcgctgcaggaatctgttcaggtctccctggccctctttccagcttttatccatcagtcagatgtgactgatgagatgctgagcttcttcctcactctgtttcgaggccttagagtacagatgggtgtgcctttcactgagcaaatcatacagactttcctcaacatgtttaccagagagcagttagccgagagcatcctccacgagggcagcacaggctgccgggtggtggagaagtttctgaagatcctgcaggtggtggtccaggagccaggccaggtgttcaagcccttcctccccagcatcatcgccctgtgcatggagcaagtgtatcccatcattgccgagcgtccctcccctgatgtgaaggccgagctgtttgagctccttttccggacgctccatcacaactggaggtacttcttcaagtccaccgtgctggccagtgtccagagggggatcgctgaggagcagatggagaatgagccccagttcagtgccatcatgcaggctttcggacagtcctttctccagcccgacatccacctttttaaacaaaatctcttctacttggagactctcaacaccaagcagaagctgtaccacaagaagatcttccggactgccatgctgttccagtttgtgaacgtgctgctccaggtcctggtccacaagtcccatgatcttctgcaggaggagattggcatcgccatctacaacatggcctcagtcgactttgatggcttctttgccgccttcctcccagagttcctgaccagctgtgatggtgtggatgccaaccagaaaagtgtgctggggcggaatttcaagatggatcgggacctgccctcattcacccagaatgtgcacaggctggtcaacgacctgcgctactacagactctgcaacgacagcctgccccctggcactgtgaagctctaggcctgctactgcctggggacacggacttctgctgctgccacctgcgccagccctaccttccaccacagatgtctcccagatgggccttggtcacactccttggcttctcccaccgcaagcaacgctgcctgcctctgccgctcctccacatcttgccgctgcccagcagagctggcttctgggtccacctgagcactggacggtgctcccagggcgttggagcaggcggaggggtgtgtggccaggtactaggaggcaccaggaaatcccgcggggtggcccatgcagaccaggcgcacgtggctcatggggcagaattgccaaggacagctcacgacagtgccaccttctcaccattccagccaaggagagatgtgacgttggaactgctctggcacttctgtcaagcctcccccgccccaattgccttgagatctctgctctttgtcagagatttgcaaagactcacgtttttgttgttttctcatcattccattgtgatactaagaaactaagaagcttaatgaaaagaaataaaatgcctatgttgttgttctagaaa

SEQ ID NO: 345664 - DNA, 4683 bp, Homo sapiens
gcggccgcgcggtactagcgggcggctccagggcgggcgcgcgcaaggatgctctagggggcggcggcagtggccgtgtgggttgaggctgcgaggacagcgcgggcccccgggcctctcccctgagccggccgcctgggccgcgcggtcgaggcctgtcagcctccgcccgttcagcctcggggccggggccgccgccacctctgcccgcggaggccggggagcccctgcctgggcccgcagcctcccccgcgggggtcgggcccgggcgggggtcccgagcagctgccctcctcgccggcatccgagcctcatttcctgctttttcagtttccttggggaggggcgggtgggtctggatgaattgtctcggggtcccccgatgaggcgacccgggcggccctgccctttttagagggtcccctcggggcccggtggggaaggggttgtctttgcatgggtgggggacttcccgagtctgccgggaccatgacctgaactgtgcgagcgggacgtgtccgaagcccaagaaccagctcatctgagccgccccctccccggccagcatggcatctgaagaagcctctctcagggcattggaaagtctgatgacagaattttttcacgattgtacaaccaatgaaagaaaacgtgagatagaggagcttcttaataactttgcccagcaaataggagcctggagattctgcctgtactttctctccagcactaggaatgactatgtaatgatgtacagtttaacagtttttgagaatctgatcaataaaatgtggcttggggtcccatctcaggataagatggaaatccgtagctgtctgcccaaactccttttggctcaccataaaaccttaccttactttatccggaacaagctctgcaaagttattgttgatattggacgtcaggattggcccatgttctaccacgacttttttactaacattttacagttgatccagtcccctgtgacaaccccccttgggctgatcatgttgaagacaacttcagaagagctggcttgtccccgtgaggacctcagtgtggctcggaaggaggagttgcggaagctgctactggaccaggtgcagacagtgcttgggctactgacaggtatcttggagactgtctgggacaaacacagtgttactgctgccactccaccaccatccccgacctcaggagaaagtggtgacttactgagtaacctgttgcagagtcccagttcagccaaactgttgaatcagccaattcccatccttgatgtggagagtgagtatatctgttccctggctttggagtgcctggcccatctcttcagttggattcctctgtctgccagcatcaccccatccctccttaccaccatcttccactttgcacgatttggctgtgacatccgggccagaaagatggcgtcagttaacggcagcagccagaactgtgtctcgggtcaggagcgcggccggctgggggtcctggccatgtcctgcatcaatgaactcatgtccaagaactgtgtgcctatggaatttgaggagtatttactgcgtatgttccagcagactttctacctcctgcagaaaatcaccaaggataacaatgcccacacagtgaagagcaggctagaagagctcgatgagagctatatcgagaagtttactgactttcttcggctctttgtgagtgttcacctaagaagaatcgagtcttactcccagttccctgtggtggagtttttgacacttttgttcaagtacacatttcatcagcctactcatgaaggttacttctcttgtttggatatctggacgctgtttttggactatctgacaagtaaaattaaaagtcgtcttggagacaaggaagcagttctcaacaggtacgaagatgccctggtgctcctgctcacagaggtgttgaatcgaatccagttcagatacaaccaagcccagctggaggagttggatgatgagactctggatgacgatcagcagacggagtggcagcggtacttacggcagagcttggaggtggtggccaaagtgatggagctcctgcccacgcacgccttctccacactgttccctgttcttcaggacaatttagaagtttatttgggattacaacagtttatagtcacttcagggtcaggacacaggttgaacatcacggcggagaacgactgccggcggctgcactgctccctgagagacttgagctccctgctgcaggccgtgggccgcctggccgagtactttatcggggatgtgtttgctgcacggttcaatgatgccctcacagtcgtggaaaggttggtcaaagtcactctgtacggatctcagataaaattgtacaacattgaaactgctgtgccatcagtattgaaacctgacctcattgatgtgcatgctcagtccctggctgcgctgcaggcttactctcactggttagcacagtattgcagtgaagttcaccggcagaacacgcagcagttcgtgacactcatctctactaccatggatgcaatcacacctctaatcagcaccaaggtccaagacaagctgctgctatctgcgtgccacttactggtctcactggccaccaccgtgcggcccgtctttctgatcagcatccctgcagtgcagaaagtattcaacagaatcactgatgcctctgccctgcgacttgtcgataaggcccaggtgttggtgtgccgagccctctctaacatcttgctgcttccgtggccaaaccttccagagaatgagcagcagtggcccgtgcgctccatcaaccacgccagcctcatctctgcactctcccgggactatcgcaacctgaagcccagtgctgttgccccacagagaaagatgccactggatgacaccaaactgattatccaccagacactcagcgtcttagaagatattgtggagaatatctcgggggagtccaccaagtctcgacagatttgctaccagtcgctgcaggaatctgttcaggtctccctggccctctttccagcttttatccatcagtcagatgtgactgatgagatgctgagcttcttcctcactctgtttcgaggccttagagtacagatgggtgtgcctttcactgagcaaatcatacagactttcctcaacatgtttaccagagagcagttagccgagagcatcctccacgagggcagcacaggctgccgggtggtggagaagtttctgaagatcctgcaggtggtggtccaggagccaggccaggtgttcaagcccttcctccccagcatcatcgccctgtgcatggagcaagtgtatcccatcattgccgagcgtccctcccctgatgtgaaggccgagctgtttgagctccttttccggacgctccatcacaactggaggtacttcttcaagtccaccgtgctggccagtgtccagagggggatcgctgaggagcagatggagaatgagccccagttcagtgccatcatgcaggctttcggacagtcctttctccagcccgacatccacctttttaaacaaaatctcttctacttggagactctcaacaccaagcagaagctgtaccacaagaagatcttccggactgccatgctgttccagtttgtgaacgtgctgctccaggtcctggtccacaagtcccatgatcttctgcaggaggagattggcatcgccatctacaacatggcctcagtcgactttgatggcttctttgccgccttcctcccagagttcctgaccagctgtgatggtgtggatgccaaccagaaaagtgtgctggggcggaatttcaagatggatcgggacctgccctcattcacccagaatgtgcacaggctggtcaacgacctgcgctactacagactctgcaacgacagcctgccccctggcactgtgaagctctaggcctgctactgcctggggacacggacttctgctgctgccacctgcgccagccctaccttccaccacagatgtctcccagatgggccttggtcacactccttggcttctcccaccgcaagcaacgctgcctgcctctgccgctcctccacatcttgccgctgcccagcagagctggcttctgggtccacctgagcactggacggtgctcccagggcgttggagcaggcggaggggtgtgtggccaggtactaggaggcaccaggaaatcccgcggggtggcccatgcagaccaggcgcacgtggctcatggggcagaattgccaaggacagctcacgacagtgccaccttctcaccattccagccaaggagagatgtgacgttggaactgctctggcacttctgtcaagcctcccccgccccaattgccttgagatctctgctctttgtcagagatttgcaaagactcacgtttttgttgttttctcatcattccattgtgatactaagaaactaagaagcttaatgaaaagaaataaaatgcctatgttgttgttctagaaaaaaaaaaaaaaaaattgggggaataaatggggagggcggacaaagacgtactgaaatgggcacagggcctataactgttaccggaccaagtttttggtacaacggggtaaatcggcgggtcccctatagtgagtcgaataattccaatagcccggtaacctggttagagtcgaaaag

SEQ ID NO: 345665 - DNA, 2341 bp, Homo sapiens
aaatgtctactgttcacgaaatcctgtgcaagctcagcttggagggtgatcactctacacccccaagtgcatatgggtctgtcaaagcctatactaactttgatgctgagcgggatgctttgaacattgaaacagccatcaagaccaaaggtgtggatgaggtcaccgttggtcaaagtcactctgtacggatctcagataaaattgtacaacattgaaactgctgtgccatcagtattgaaacctgacctcattgatgtgcatgctcagtccctggctgcgctgcaggcttactctcactggttagcacagtattgcagtgaagttcaccggcagaacacgcagcagttcgtgacactcatctctactaccatggatgcaatcacacctctaatcagcaccaaggtccaagacaagctgctgctatctgcgtgccacttactggtctcactggccaccaccgtgcggcccgtctttctgatcagcatccctgcagtgcagaaagtattcaacagaatcactgatgcctctgccctgcgacttgtcgataaggcccaggtgttggtgtgccgagccctctctaacatcttgctgcttccgtggccaaaccttccagagaatgagcagcagtggcccgtgcgctccatcaaccacgccagcctcatctctgcactctcccgggactatcgcaacctgaagcccagtgctgttgccccacagagaaagatgccactggatgacaccaaactgattatccaccagacactcagcgtcttagaagatattgtggagaatatctcgggggagtccaccaagtctcgacagatttgctaccagtcgctgcaggaatctgttcaggtctccctggccctctttccagcttttatccatcagtcagatgtgactgatgagatgctgagcttcttcctcactctgtttcgaggccttagagtacagatgggtgtgcctttcactgagcaaatcatacagactttcctcaacatgtttaccagagagcagttagccgagagcatcctccacgagggcagcacaggctgccgggtggtggagaagtttctgaagatcctgcaggtggtggtccaggagccaggccaggtgttcaagcccttcctccccagcatcatcgccctgtgcatggagcaagtgtatcccatcattgccgagcgtccctcccctgatgtgaaggccgagctgtttgagctccttttccggacgctccatcacaactggaggtacttcttcaagtccaccgtgctggccagtgtccagagggggatcgctgaggagcagatggagaatgagccccagttcagtgccatcatgcaggctttcggacagtcctttctccagcccgacatccacctttttaaacaaaatctcttctacttggagactctcaacaccaagcagaagctgtaccacaagaagatcttccggactgccatgctgttccagtttgtgaacgtgctgctccaggtcctggtccacaagtcccatgatcttctgcaggaggagattggcatcgccatctacaacatggcctcagtcgactttgatggcttctttgccgccttcctcccagagttcctgaccagctgtgatggtgtggatgccaaccagaaaagtgtgctggggcggaatttcaagatggatcgggacctgccctcattcacccagaatgtgcacaggctggtcaacgacctgcgctactacagactctgcaacgacagcctgccccctggcactgtgaagctctaggcctgctactgcctggggacacggacttctgctgctgccacctgcgccagccctaccttccaccacagatgtctcccagatgggccttggtcacactccttggcttctcccaccgcaagcaacgctgcctgcctctgccgctcctccacatcttgccgctgcccagcagagctggcttctgggtccacctgagcactggacggtgctcccagggcgttggagcaggcggaggggtgtgtggccaggtactaggaggcaccaggaaatcccgcggggtggcccatgcagaccaggcgcacgtggctcatggggcagaattgccaaggacagctcacgacagtgccaccttctcaccattccagccaaggagagatgtgacgttggaactgctctggcacttctgtcaagcctcccccgccccaattgccttgagatctctgctctttgtcagagatttgcaaagactcacgtttttgttgttttctcatcattccattgtgatactaagaaactaagaagcttaatgaaaagaaataaaatgcctatgttgttgttctagaaa

SEQ ID NO: 345666 - DNA, 7128 bp, Homo sapiens
gcggccgcgcggtactagcgggcggctccagggcgggcgcgcgcaaggatgctctagggggcggcggcagtggccgtgtgggttgaggctgcgaggacagcgcgggcccccgggcctctcccctgagccggccgcctgggccgcgcggtcgaggcctgtcagcctccgcccgttcagcctcggggccggggccgccgccacctctgcccgcggaggccggggagcccctgcctgggcccgcagcctcccccgcgggggtcgggcccgggcgggggtcccgagcagctgccctcctcgccggcatccgagcctcatttcctgctttttcagtttccttggggaggggcgggtgggtctggatgaattgtctcggggtcccccgatgaggcgacccgggcggccctgccctttttagagggtcccctcggggcccggtggggaaggggttgtctttgcatgggtgggggacttcccgagtctgccgggaccatgacctgaactgtgcgagcgggacgtgtccgaagcccaagaaccagctcatctgagccgccccctccccggccagcatggcatctgaagaagcctctctcagggcattggaaagtctgatgacagaattttttcacgattgtacaaccaatgaaagaaaacgtgagatagaggagcttcttaataactttgcccagcaaataggagcctggagattctgcctgtactttctctccagcactaggaatgactatgtaatgatgtacagtttaacagtttttgagaatctgatcaataaaatgtggcttggggtcccatctcaggataagatggaaatccgtagctgtctgcccaaactccttttggctcaccataaaaccttaccttactttatccggaacaagctctgcaaagttattgttgatattggacgtcaggattggcccatgttctaccacgacttttttactaacattttacagttgatccagtcccctgtgacaaccccccttgggctgatcatgttgaagacaacttcagaagagctggcttgtccccgtgaggacctcagtgtggctcggaaggaggagttgcggaagctgctactggaccaggtgcagacagtgcttgggctactgacaggtatcttggagactgtctgggacaaacacagtgttactgctgccactccaccaccatccccgacctcaggagaaagtggtgacttactgagtaacctgttgcagagtcccagttcagccaaactgttgaatcagccaattcccatccttgatgtggagagtgagtatatctgttccctggctttggagtgcctggcccatctcttcagttggattcctctgtctgccagcatcaccccatccctccttaccaccatcttccactttgcacgatttggctgtgacatccgggccagaaagatggcgtcagttaacggcagcagccagaactgtgtctcgggtcaggagcgcggccggctgggggtcctggccatgtcctgcatcaatgaactcatgtccaagaactgtgtgcctatggaatttgaggagtatttactgcgtatgttccagcagactttctacctcctgcagaaaatcaccaaggataacaatgcccacacagtgaagagcaggctagaagagctcgatgagagctatatcgagaagtttactgactttcttcggctctttgtgagtgttcacctaagaagaatcgagtcttactcccagttccctgtggtggagtttttgacacttttgttcaagtacacatttcatcagcctactcatgaaggttacttctcttgtttggatatctggacgctgtttttggactatctgacaagtaaaattaaaagtcgtcttggagacaaggaagcagttctcaacaggtacgaagatgccctggtgctcctgctcacagaggtgttgaatcgaatccagttcagatacaaccaagcccagctggaggagttggatgatgagactctggatgacgatcagcagacggagtggcagcggtacttacggcagagcttggaggtggtggccaaagtgatggagctcctgcccacgcacgccttctccacactgttccctgttcttcaggacaatttagaagtttatttgggattacaacagtttatagtcacttcagggtcaggacacaggttgaacatcacggcggagaacgactgccggcggctgcactgctccctgagagacttgagctccctgctgcaggccgtgggccgcctggccgagtactttatcggggatgtgtttgctgcacggttcaatgatgccctcacagtcgtggaaaggttggtcaaagtcactctgtacggatctcagataaaattgtacaacattgaaactgctgtgccatcagtattgaaacctgacctcattgatgtgcatgctcagtccctggctgcgctgcaggcttactctcactggttagcacagtattgcagtgaagttcaccggcagaacacgcagcagttcgtgacactcatctctactaccatggatgcaatcacacctctaatcagcaccaaggtccaagacaagctgctgctatctgcgtgccacttactggtctcactggccaccaccgtgcggcccgtctttctgatcagcatccctgcagtgcagaaagtattcaacagaatcactgatgcctctgccctgcgacttgtcgataaggcccaggtgttggtgtgccgagccctctctaacatcttgctgcttccgtggccaaaccttccagagaatgagcagcagtggcccgtgcgctccatcaaccacgccagcctcatctctgcactctcccgggactatcgcaacctgaagcccagtgctgttgccccacagagaaagatgccactggatgacaccaaactgattatccaccagacactcagcgtcttagaagatattgtggagaatatctcgggggagtccaccaagtctcgacagatttgctaccagtcgctgcaggaatctgttcaggtctccctggccctctttccagcttttatccatcagtcagatgtgactgatgagatgctgagcttcttcctcactctgtttcgaggccttagagtacagatgggtgtgcctttcactgagcaaatcatacagactttcctcaacatgtttaccagagagcagttagccgagagcatcctccacgagggcagcacaggctgccgggtggtggagaagtttctgaagatcctgcaggtggtggtccaggagccaggccaggtgttcaagcccttcctccccagcatcatcgccctgtgcatggagcaagtgtatcccatcattgccgagcgtccctcccctgatgtgaaggccgagctgtttgagctccttttccggacgctccatcacaactggaggtacttcttcaagtccaccgtgctggccagtgtccagagggggatcgctgaggagcagatggagaatgagccccagttcagtgccatcatgcaggctttcggacagtcctttctccagcccgacatccacctttttaaacaaaatctcttctacttggagactctcaacaccaagcagaagctgtaccacaagaagatcttccggactgccatgctgttccagtttgtgaacgtgctgctccaggtcctggtccacaagtcccatgatcttctgcaggaggagattggcatcgccatctacaacatggcctcagtcgactttgatggcttctttgccgccttcctcccagagttcctgaccagctgtgatggtgtggatgccaaccagaaaagtgtgctggggcggaatttcaagatggatcgggtgaggagagaaagaggccgggctaagaggagggcagagtgggcacgcaagcctggcacctgtgcagcaaggagggggcacattgaggcctctgggcgtggtctgtgcccaccctgcagcttggcggcagctcacgagatgcctgctgacctggtgctgtagcctgattgaggggcacagccttttccccagtcttggtgtctgtagcacgtatgttcttagtctcagccatggaggtcccgagttcctggctctgcagcccctccatttgtcttggcatctttgttcatacccaggaccctgccgttctccctcctgggtgatgagccccggtggggccagcattggagtgtgcccaggcttgcattcaggctgagatggttggtgcttgggagctgcacttctgggtccccagggttagaggtgggacccaggttccccggctgtcttgggctctttccagaccagccccagctcagcttgggctgagttgctgccaggtcctgggaggagccctcctagtactcaccctcttgtcccactgctgccacctgtgcagggactgtcaggtgggctgtccccacccgtgcagcacctcggtgggagctgggtgctgctggctcttggtgtccatgaggccatcttgttggagcctgacagtgcctgggacctccttccccatggggctcacctgttctcttcttcctgtgtcaggtgaccaggcctctctcttgcctgataggaacttctgggaacttttccttgtaccgttttatacttgatgaaattaggaaaagaaatcgctttctccctggtcctcttggggttcttgacctgagtcctctgtgaagcagcttgtccacggctccaccgtagtgctcagatgcacacactgctctcactggtacaaacctggccgcctgctttcctcatttgccacgtgtggcagggaagcttttgcttagactcatcctgttctcctttgtcttggggtcttccttttcttgggacttgttctctcctaagcctcttccagttcacttcagcccctggatatgttttttcctttttctagaggccagatcctaatacttaatgatcagcttctaacgacatcaatatcagtcaactttttgatttaaagctgtggtttcaaaatctagttataggccaggcgcggtgtctcacacctgtaatctcagcactttgggaggccaaggcgggcggatcacttgaggttagggggtttgagaccagcctggccaacatggcgaaaccctgtctctactaaaaataaaaaaaattagtcaggtgtggtggcacacgcctgtaatcccagctgcttgggaggctgaggcacaagaatctcttgaacccgggaggcagaggttgcagtgagcggaggttgtgccactgcactccagcctgggcggcagagtgggactttgtctcaaaaaaaaaaatctagttatatcagaagcacctggggtacttattaaaaatggagaaacagacttctgtgttctacccaggaaattctggtttggcatttgggagccactgatttaaaagacatcccttagttggttttttgagggtaaaataaaagaatcaccaccttccattcagtcacgcactgtgtgtttgaagccagctgcttctcaagccccgggccaggaactggggcaccagtcccagccttcaccaagtctttcatggtagacaggccaatacagcaccctctgtggaccacatagtgccaagcatgtgacatgtcttggctcgagtaagccttctaacaagcctctgaagtgtgggtcctgttactcccccatttcacagatggtgggggctcagaaggtgagcagttcacagaacttggaagtggtagagctgcgaagcaggaggcagacctgggtgttctggccccagagcctgcacacactccccagaagcagattgctcaggacagaggcgctgagctggctgctggggccaggaaataggaggcatctgtgcagactttgggaagaggcaggctttgaatggagttctggaagaggaatagtggttgggcaggaaaatgaacttggtcctgctcatggctctgctggggcttgctgggcctgtttgagtcctcaccgggacctacactgaaaaaaaaagcagggtctcaccgtgtgcatgatggcggaggtcagggcctcacttctggcccagggccttccatggcccacgctgcgcccagtgggacaggccttgggactgtgtttgctgctgctcgggtggctctcgaggggcaggggcggcctggagccccgtgggtaaaggttctgcagacattgctcggtgtgcgcgtcacctcaaggggccatggtgaagaagagggctgtcaccacagccatgtctgcgtttgaggggccggactcaggagcaagtgtgctggtctcttcagtgtgagctggggccagcttcttcatggtgcagcgctttggtctttctgtccttagactagtggttctggtagggcttggtggcagccttgtggtgaggactcagtgagttgatgtctgtatgttgattgcagcagtgtctggcacccgagaggccctagggacgtattcctcttgttctttttctcccacagcgcctggcacagagtctctgtgacacgcagtgcaacagtgaatagaagttttgagttttagaaagtgctcccctatcttcagtgcacactctgggatggaagtagctgttggggtctggtgggtgggtgacctggtgtgttgttggctgcagctatgcccctgccttccaggacctgccctcattcacccagaatgtgcacaggctggtcaacgacctgcgctactacagactctgcaacgacagcctgccccctggcactgtgaagctctaggcctgctactgcctggggacacggacttctgctgctgccacctgcgccagccctaccttccaccaggaaatcccgcggggtggcccatgcagaccaggcgcacgtggctcatggggcagaattgccaaggacagctcacgacagtgccaccttctcaccattccagccaaggagagatgtgacgttggaactgctctggcacttctgtcaagcctcccccgccccaattgccttgagatctctgctctttgtcagagatttgcaaagactcacgtttttgttgttttctcatcattccattgtgatactaagaaactaagaagcttaatgaaaagaaataaaatgcctatgttgttgttctagaaa

SEQ ID NO: 345667 - DNA, 1388 bp, Homo sapiens
aggaacaactggctaagtacgaggctgggtgtttaatcggccgaggaacatgtataccagagagcagttagccgagagcatcctccacgagggcagcacaggctgccgggtggtggagaagtttctgaagatcctgcaggtggtggtccaggagccaggccaggtgttcaagcccttcctccccagcatcatcgccctgtgcatggagcaagtgtatcccatcattgccgagcgtccctcccctgatgtgaaggccgagctgtttgagctccttttccggacgctccatcacaactggaggtacttcttcaagtccaccgtgctggccagtgtccagagggggatcgctgaggagcagatggagaatgagccccagttcagtgccatcatgcaggctttcggacagtcctttctccagcccgacatccacctttttaaacaaaatctcttctacttggagactctcaacaccaagcagaagctgtaccacaagaagatcttccggactgccatgctgttccagtttgtgaacgtgctgctccaggtcctggtccacaagtcccatgatcttctgcaggaggagattggcatcgccatctacaacatggcctcagtcgactttgatggcttctttgccgccttcctcccagagttcctgaccagctgtgatggtgtggatgccaaccagaaaagtgtgctggggcggaatttcaagatggatcgggacctgccctcattcacccagaatgtgcacaggctggtcaacgacctgcgctactacagactctgcaacgacagcctgccccctggcactgtgaagctctaggcctgctactgcctggggacacggacttctgctgctgccacctgcgccagccctaccttccaccacagatgtctcccagatgggccttggtcacactccttggcttctcccaccgcaagcaacgctgcctgcctctgccgctcctccacatcttgccgctgcccagcagagctggcttctgggtccacctgagcactggacggtgctcccagggcgttggagcaggcggaggggtgtgtggccaggtactaggaggcaccaggaaatcccgcggggtggcccatgcagaccaggcgcacgtggctcatggggcagaattgccaaggacagctcacgacagtgccaccttctcaccattccagccaaggagagatgtgacgttggaactgctctggcacttctgtcaagcctcccccgccccaattgccttgagatctctgctctttgtcagagatttgcaaagactcacgtttttgttgttttctcatcattccattgtgatactaagaaactaagaagcttaatgaaaagaaataaaatgcctatgttgttgttctagaaa

SEQ ID NO: 345668 - DNA, 2873 bp, Homo sapiens
gcggccgcgcggtactagcgggcggctccagggcgggcgcgcgcaaggatgctctagggggcggcggcagtggccgtgtgggttgaggctgcgaggacagcgcgggcccccgggcctctcccctgagccggccgcctgggccgcgcggtcgaggcctgtcagcctccgcccgttcagcctcggggccggggccgccgccacctctgcccgcggaggccggggagcccctgcctgggcccgcagcctcccccgcgggggtcgggcccgggcgggggtcccgagcagctgccctcctcgccggcatccgagcctcatttcctgctttttcagtttccttggggaggggcgggtgggtctggatgaattgtctcggggtcccccgatgaggcgacccgggcggccctgccctttttagagggtcccctcggggcccggtggggaaggggttgtctttgcatgggtgggggacttcccgagtctgccgggaccatgacctgaactgtgcgagcgggacgtgtccgaagcccaagaaccagctcatctgagccgccccctccccggccagcatggcatctgaagaagcctctctcagggcattggaaagtctgatgacagaattttttcacgattgtacaaccaatgaaagaaaacgtgagatagaggagcttcttaataactttgcccagcaaataggagcctggagattctgcctgtactttctctccagcactaggaatgactatgtaatgatgtacagtttaacagtttttgagaatctgatcaataaaatgtggcttggggtcccatctcaggataagatggaaatccgtagctgtctgcccaaactccttttggctcaccataaaaccttaccttactttatccggaacaagctctgcaaagttattgttgatattggacgtcaggattggcccatgttctaccacgacttttttactaacattttacagttgatccagtcccctgtgacaaccccccttgggctgatcatgttgaagacaacttcagaagagctggcttgtccccgtgaggacctcagtgtggctcggaaggaggagttgcggaagctgctactggaccaggtgcagacagtgcttgggctactgacaggtatcttggagactgtctgggacaaacacagtgttactgctgccactccaccaccatccccgacctcaggagaaagtggtgacttactgagtaacctgttgcagagtcccagttcagccaaactgttgaatcagccaattcccatccttgatgtggagagtgagtatatctgttccctggctttggagtgcctggcccatctcttcagttggattcctctgtctgccagcatcaccccatccctccttaccaccatcttccactttgcacgatttggctgtgacatccgggccagaaagatggcgtcagttaacggcagcagccagaactgtgtctcgggtcaggagcgcggccggctgggggtcctggccatgtcctgcatcaatgaactcatgtccaagaactgtgtgcctatggaatttgaggagtatttactgcgtatgttccagcagactttctacctcctgcagaaaatcaccaaggataacaatgcccacacagtgaagagcaggctagaagagctcgatgagagctatatcgagaagtttactgactttcttcggctctttgtgagtgttcacctaagaagaatcgagtcttactcccagttccctgtggtggagtttttgacacttttgttcaagtacacatttcatcagcctactcatgaaggttacttctcttgtttggatatctggacgctgtttttggactatctgacaagtaaaattaaaagtcgtcttggagagctttcggacagtcctttctccagcccgacatccacctttttaaacaaaatctcttctacttggagactctcaacaccaagcagaagctgtaccacaagaagatcttccggactgccatgctgttccagtttgtgaacgtgctgctccaggtcctggtccacaagtcccatgatcttctgcaggaggagattggcatcgccatctacaacatggcctcagtcgactttgatggcttctttgccgccttcctcccagagttcctgaccagctgtgatggtgtggatgccaaccagaaaagtgtgctggggcggaatttcaagatggatcgggacctgccctcattcacccagaatgtgcacaggctggtcaacgacctgcgctactacagactctgcaacgacagcctgccccctggcactgtgaagctctaggcctgctactgcctggggacacggacttctgctgctgccacctgcgccagccctaccttccaccacagatgtctcccagatgggccttggtcacactccttggcttctcccaccgcaagcaacgctgcctgcctctgccgctcctccacatcttgccgctgcccagcagagctggcttctgggtccacctgagcactggacggtgctcccagggcgttggagcaggcggaggggtgtgtggccaggtactaggaggcaccaggaaatcccgcggggtggcccatgcagaccaggcgcacgtggctcatggggcagaattgccaaggacagctcacgacagtgccaccttctcaccattccagccaaggagagatgtgacgttggaactgctctggcacttctgtcaagcctcccccgccccaattgccttgagatctctgctctttgtcagagatttgcaaagactcacgtttttgttgttttctcatcattccattgtgatactaagaaactaagaagcttaatgaaaagaaataaaatgcctatgttgttgttctagaaa

SEQ ID NO: 345669 - DNA, 1015 bp, Homo sapiens
ggaacccaaggagtgtgaccaaggcccatctgggagacatctgtggtggaaggtagggctggcttggtggcagccttgtggtgaggactcagtgagttgatgtctgtatgttgattgcagcagtgtctggcacccgagaggccctagggacgtattcctcttgttctttttctcccacagcgcctggcacagagtctctgtgacacgcagtgcaacagtgaatagaagttttgagttttagaaagtgctcccctatcttcagtgcacactctgggatggaagtagctgttggggtctggtgggtgggtgacctggtgtgttgttggctgcagctatgcccctgccttccaggacctgccctcattcacccagaatgtgcacaggctggtcaacgacctgcgctactacagactctgcaacgacagcctgccccctggcactgtgaagctctaggcctgctactgcctggggacacggacttctgctgctgccacctgcgccagccctaccttccaccacagatgtctcccagatgggccttggtcacactccttggcttctcccaccgcaagcaacgctgcctgcctctgccgctcctccacatcttgccgctgcccagcagagctggcttctgggtccacctgagcactggacggtgctcccagggcgttggagcaggcggaggggtgtgtggccaggtactaggaggcaccaggaaatcccgcggggtggcccatgcagaccaggcgcacgtggctcatggggcagaattgccaaggacagctcacgacagtgccaccttctcaccattccagccaaggagagatgtgacgttggaactgctctggcacttctgtcaagcctcccccgccccaattgccttgagatctctgctctttgtcagagatttgcaaagactcacgtttttgttgttttctcatcattccattgtgatactaagaaactaagaagcttaatgaaaagaaataaaatgcctatgttgttgttctagaaa

SEQ ID NO: 345670 - DNA, 2763 bp, Homo sapiens
gcggccgcgcggtactagcgggcggctccagggcgggcgcgcgcaaggatgctctagggggcggcggcagtggccgtgtgggttgaggctgcgaggacagcgcgggcccccgggcctctcccctgagccggccgcctgggccgcgcggtcgaggcctgtcagcctccgcccgttcagcctcggggccggggccgccgccacctctgcccgcggaggccggggagcccctgcctgggcccgcagcctcccccgcgggggtcgggcccgggcgggggtcccgagcagctgccctcctcgccggcatccgagcctcatttcctgctttttcagtttccttggggaggggcgggtgggtctggatgaattgtctcggggtcccccgatgaggcgacccgggcggccctgccctttttagagggtcccctcggggcccggtggggaaggggttgtctttgcatgggtgggggacttcccgagtctgccgggaccatgacctgaactgtgcgagcgggacgtgtccgaagcccaagaaccagctcatctgagccgccccctccccggccagcatggcatctgaagaagcctctctcagggcattggaaagtctgatgacagaattttttcacgattgtacaaccaatgaaagaaaacgtgagatagaggagcttcttaataactttgcccagcaaataggagcctggagattctgcctgtactttctctccagcactaggaatgactatgtaatgatgtacagtttaacagtttttgagaatctgatcaataaaatgtggcttggggtcccatctcaggataagatggaaatccgtagctgtctgcccaaactccttttggctcaccataaaaccttaccttactttatccggaacaagctctgcaaagttattgttgatattggacgtcaggattggcccatgttctaccacgacttttttactaacattttacagttgatccagtcccctgtgacaaccccccttgggctgatcatgttgaagacaacttcagaagagctggcttgtccccgtgaggacctcagtgtggctcggaaggaggagttgcggaagctgctactggaccaggtgcagacagtgcttgggctactgacaggtatcttggagactgtctgggacaaacacagtgttactgctgccactccaccaccatccccgacctcaggagaaagtggtgacttactgagtaacctgttgcagagtcccagttcagccaaactgttgaatcagccaattcccatccttgatgtggagagtgagtatatctgttccctggctttggagtgcctggcccatctcttcagttggattcctctgtctgccagcatcaccccatccctccttaccaccatcttccactttgcacgatttggctgtgacatccgggccagaaagatggcgtcagttaacggcagcagccagaactgtgtctcgggtcaggagcgcggccggctgggggtcctggccatgtcctgcatcaatgaactcatgtccaagaactgtgtgcctatggaatttgaggagtatttactgcgtatgttccagcagactttctacctcctgcagaaaatcaccaaggataacaatgcccacacagtgaagagcaggctagaagagctcgatgagagctatatcgagaagtttactgactttcttcggctctttgtgagtgttcacctaagaagaatcgagtcttactcccagttccctgtggtggagtttttgacacttttgttcaagtacacatttcatcagcctactcatgaaggttacttctcttgtttggatatctggacgctgtttttggactatctgacaagtaaaattaaaagtcgtcttggagacaaggaagcagttctcaacaggtacgaagatgccctggtgctcctgctcacagaggtgttgaatcgaatccagttcagatacaaccaagcccagctggaggagttggatgatgagactctggatgacgatcagcagacggagtggcagcggtacttacggcagagcttggaggtggtggccaaagtgatggagctcctgcccacgcacgccttctccacactgttccctgttcttcaggacaatttagaagtttatttgggattacaacagtttatagtcacttcagggtcaggacacaggttgaacatcacggcggagaacgactgccggcggctgcactgctccctgagagacttgagctccctgctgcaggccgtgggccgcctggccgagtactttatcggggatgtgtttgctgcacggttcaatgatgccctcacagtcgtggaaaggttggtcaaagtcactctgtacggatctcagataaaattgtacaacattgaaactgctgtgccatcagtattgaaacctgacctcattgatgtgtaagtctagagtttgatgtttgtgcatttttaggaaagaccttgcccccaatctccaaataatttgattgagaaaaaggaacagtagtggctgccatgaatcagggaaaaactcttaaactgcaaacctagaaagagagagagatttttttgactatatgtctggggcagaggcggttggagaaagtggaattaggtaagtgagagctgggatggagattctatggagtaggcatttcaggaggaaagaacagtacaggctgagacagtcacacaggcaggaggtggctactccatgtagtgcaagaagagactggataggtgtgttgggactaatg

SEQ ID NO: 345671 - DNA, 2456 bp, Homo sapiens
gcggccgcgcggtactagcgggcggctccagggcgggcgcgcgcaaggatgctctagggggcggcggcagtggccgtgtgggttgaggctgcgaggacagcgcgggcccccgggcctctcccctgagccggccgcctgggccgcgcggtcgaggcctgtcagcctccgcccgttcagcctcggggccggggccgccgccacctctgcccgcggaggccggggagcccctgcctgggcccgcagcctcccccgcgggggtcgggcccgggcgggggtcccgagcagctgccctcctcgccggcatccgagcctcatttcctgctttttcagtttccttggggaggggcgggtgggtctggatgaattgtctcggggtcccccgatgaggcgacccgggcggccctgccctttttagagggtcccctcggggcccggtggggaaggggttgtctttgcatgggtgggggacttcccgagtctgccgggaccatgacctgaactgtgcgagcgggacgtgtccgaagcccaagaaccagctcatctgagccgccccctccccggccagcatggcatctgaagaagcctctctcagggcattggaaagtctgatgacagaattttttcacgattgtacaaccaatgaaagaaaacgtgagatagaggagcttcttaataactttgcccagcaaataggagcctggagattctgcctgtactttctctccagcactaggaatgactatgtaatgatgtacagtttaacagtttttgagaatctgatcaataaaatgtggcttggggtcccatctcaggataagatggaaatccgtagctgtctgcccaaactccttttggctcaccataaaaccttaccttactttatccggaacaagctctgcaaagttattgttgatattggacgtcaggattggcccatgttctaccacgacttttttactaacattttacagttgatccagtcccctgtgacaaccccccttgggctgatcatgttgaagacaacttcagaagagctggcttgtccccgtgaggacctcagtgtggctcggaaggaggagttgcggaagctgctactggaccaggtgcagacagtgcttgggctactgacaggtatcttggagactgtctgggacaaacacagtgttactgctgccactccaccaccatccccgacctcaggagaaagtggtgacttactgagtaacctgttgcagagtcccagttcagccaaactgttgaatcagccaattcccatccttgatgtggagagtgagtatatctgttccctggctttggagtgcctggcccatctcttcagttggattcctctgtctgccagcatcaccccatccctccttaccaccatcttccactttgcacgatttggctgtgacatccgggccagaaagatggcgtcagttaacggcagcagccagaactgtgtctcgggtcaggagcgcggccggctgggggtcctggccatgtcctgcatcaatgaactcatgtccaagaactgtgtgcctatggaatttgaggagtatttactgcgtatgttccagcagactttctacctcctgcagaaaatcaccaaggataacaatgcccacacagtgaagagcaggctagaagagctcgatgagagctatatcgagaagtttactgactttcttcggctctttgtgagtgttcacctaagaagaatcgagtcttactcccagttccctgtggtggagtttttgacacttttgttcaagtacacatttcatcagcctactcatgaaggttacttctcttgtttggatatctggacgctgtttttggactatctgacaagtaaaattaaaagtcgtcttggagacaaggaagcagttctcaacaggtacgaagatgccctggtgctcctgctcacagaggtgttgaatcgaatccagttcagatacaaccaagcccagctggaggagttggatgatgagactctggatgacgatcagcagacggagtggcagcggtacttacggcagagcttggaggtggtggccaaagtgatggagctcctgcccacgcacgccttctccacactgttccctgttcttcaggacaatttagaagtttatttgggattacaacagtttatagtcacttcagggtcaggacacaggttgaacatcacggcggagaacgactgccggcggctgcactgctccctgagagacttgagctccctgctgcaggccgtgggccgcctggccgagtactttatcggggatgtgtttgctgcacggttcaatgatgccctcacagtcgtggaaaggttggtcaaagtcactctgtacggatctcagataaaattgtacaacattgaaactgctgtgccatcagtattgaaacctgacctcattgatgtgcatgctcatcactaggatgggccgagctcg

SEQ ID NO: 345672 - DNA, 1893 bp, Homo sapiens
gcggccgcgcggtactagcgggcggctccagggcgggcgcgcgcaaggatgctctagggggcggcggcagtggccgtgtgggttgaggctgcgaggacagcgcgggcccccgggcctctcccctgagccggccgcctgggccgcgcggtcgaggcctgtcagcctccgcccgttcagcctcggggccggggccgccgccacctctgcccgcggaggccggggagcccctgcctgggcccgcagcctcccccgcgggggtcgggcccgggcgggggtcccgagcagctgccctcctcgccggcatccgagcctcatttcctgctttttcagtttccttggggaggggcgggtgggtctggatgaattgtctcggggtcccccgatgaggcgacccgggcggccctgccctttttagagggtcccctcggggcccggtggggaaggggttgtctttgcatgggtgggggacttcccgagtctgccgggaccatgacctgaactgtgcgagcgggacgtgtccgaagcccaagaaccagctcatctgagccgccccctccccggccagcatggcatctgaagaagcctctctcagggcattggaaagtctgatgacagaattttttcacgattgtacaaccaatgaaagaaaacgtgagatagaggagcttcttaataactttgcccagcaaataggagcctggagattctgcctgtactttctctccagcactaggaatgactatgtaatgatgtacagtttaacagtttttgagaatctgatcaataaaatgtggcttggggtcccatctcaggataagatggaaatccgtagctgtctgcccaaactccttttggctcaccataaaaccttaccttactttatccggaacaagctctgcaaagttattgttgatattggacgtcaggattggcccatgttctaccacgacttttttactaacattttacagttgatccagtcccctgtgacaaccccccttgggctgatcatgttgaagacaacttcagaagagctggcttgtccccgtgaggacctcagtgtggctcggaaggaggagttgcggaagctgctactggaccaggtgcagacagtgcttgggctactgacaggtatcttggagactgtctgggacaaacacagtgttactgctgccactccaccaccatccccgacctcaggagaaagtggtgacttactgagtaacctgttgcagagtcccagttcagccaaactgttgaatcagccaattcccatccttgatgtggagagtgagtatatctgttccctggctttggagtgcctggcccatctcttcagttggattcctctgtctgccagcatcaccccatccctccttaccaccatcttccactttgcacgatttggctgtgacatccgggccagaaagatggcgtcagttaacggcagcagccagaactgtgtctcgggtcaggagcgcggccggctgggggtcctggccatgtcctgcatcaatgaactcatgtccaagaactgtgtgcctatggaatttgaggagtatttactgcgtatgttccagcagactttctacctcctgcagaaaatcaccaaggataacaatgcccacacagtgaagagcaggctagaagagctcgatgagagctatatcgagaagtttactgactttcttcggctctttgtgagtgttcacctaagaagaatcgagtcttactcccagttccctgtggtggagtttttgacacttttgttcaagtacacatttcatcagcctactcatgaaggttactaaaatgagtcagtgcaccagctccaccattcctagctcaagtcaagagaaagaccctcaaatttagacagagacaacgcgattg

SEQ ID NO: 345673 - DNA, 1301 bp, Homo sapiens
  misc_feature (1184)..(1184): n is a, c, g, or t
gcggccgcgcggtactagcgggcggctccagggcgggcgcgcgcaaggatgctctagggggcggcggcagtggccgtgtgggttgaggctgcgaggacagcgcgggcccccgggcctctcccctgagccggccgcctgggccgcgcggtcgaggcctgtcagcctccgcccgttcagcctcggggccggggccgccgccacctctgcccgcggaggccggggagcccctgcctgggcccgcagcctcccccgcgggggtcgggcccgggcgggggtcccgagcagctgccctcctcgccggcatccgagcctcatttcctgctttttcagtttccttggggaggggcgggtgggtctggatgaattgtctcggggtcccccgatgaggcgacccgggcggccctgccctttttagagggtcccctcggggcccggtggggaaggggttgtctttgcatgggtgggggacttcccgagtctgccgggaccatgacctgaactgtgcgagcgggacgtgtccgaagcccaagaaccagctcatctgagccgccccctccccggccagcatggcatctgaagaagcctctctcagggcattggaaagtctgatgacagaattttttcacgattgtacaaccaatgaaagaaaacgtgagatagaggagcttcttaataactttgcccagcaaataggagcctggagattctgcctgtactttctctccagcactaggaatgactatgtaatgatgtacagtttaacagtttttgagaatctgatcaataaaatgtggcttggggtcccatctcaggataagatggaaatccgtagctgtctgcccaaactccttttggctcaccataaaaccttaccttactttatccggaacaagctctgcaaagttattgttgatattggacgtcaggattggcccatgttctaccacgacttttttactaacattttacagttgatccagtcccctgtgacaaccccccttgggctgatcatgttgaagacaacttcagaagagctggcttgtccccgtgaggacctcagtgtggctcggaaggaggagttgcggaagctgctactggaccaggtgcagacagtgcttgggctactgacagagatgggccaggcactccaaagccagggaacagatatactcactctccacatncaaggatgggaattgctgattcaacagtttggctgaactgggactctgcaacaggttactcagtaagtcaccactttctcctgagtcgggatggtgtggagtgcagcagtaacctgt

SEQ ID NO: 345674 - DNA, 195 bp, Homo sapiens
atgacctgaactgtgcgagcgggacgtgtccgaagcccaagaaccagctcatctgagccgccccctccccggccagcatgggtaagtggaattggagcccccttccctcctggggtgccctaccggaagggtgggaatgggccccggggctgctgagccatcgctgctctccccatggcggggagaggcgcgtgc

SEQ ID NO: 345675 - DNA, 664 bp, Homo sapiens
agaggtgttgaatcgaatccagttcagatacaaccaagcccagctggaggagttggatgatgagactctggatgacgatgtaagcggcatgccctgattgattttttgtcgctgtcatgttgtgacatcaatcagaatggggacctggaacccagagccctctgctccgaagactgttctgaaaccagagtagtcttctggtttgagtcgtacatttgaaatttttaatctcctgctggtcccttttggcttattaaccataaaaaatgttttacaggcttttttatctatgtggactagagatgtaagtagagaaaccatatgcacaatgaaaaacggtttagtgagaactctgtatcctctctgtctcccctgccttgcaccctcacctctgctccccaacctgggcagcagtaacagctagctggatgcttgtggagaccgttagcaagatactgaaccgataaggctagaatgaaaggaagtctgtttggagtacattatgcaaacttctgcttcttaaaatcagccttgaatttattgatgctgatgtgcccaacattaataaggaaaatgtctttaaggaaacaattccagtgtttttttttaaaccattaggcactttaaaatttttcaaataactgctgctcttctcaaagtaaga

SEQ ID NO: 345676 - DNA, 5727 bp, Homo sapiens
attgaatttaagttctaaggaggtggctgggtttcttattgtcaccttttgtcttgtctcatttagctatatcgagaagtttactgactttcttcggctctttgtgagtgttcacctaagaagaatcgagtcttactcccagttccctgtggtggagtttttgacacttttgttcaagtacacatttcatcagcctactcatgaaggttacttctcttgtttggatatctggacgctgtttttggactatctgacaagtaaaattaaaagtcgtcttggagacaaggaagcagttctcaacaggtacgaagatgccctggtgctcctgctcacagaggtgttgaatcgaatccagttcagatacaaccaagcccagctggaggagttggatgatgagactctggatgacgatcagcagacggagtggcagcggtacttacggcagagcttggaggtggtggccaaagtgatggagctcctgcccacgcacgccttctccacactgttccctgttcttcaggacaatttagaagtttatttgggattacaacagtttatagtcacttcagggtcaggacacaggttgaacatcacggcggagaacgactgccggcggctgcactgctccctgagagacttgagctccctgctgcaggccgtgggccgcctggccgagtactttatcggggatgtgtttgctgcacggttcaatgatgccctcacagtcgtggaaaggttggtcaaagtcactctgtacggatctcagataaaattgtacaacattgaaactgctgtgccatcagtattgaaacctgacctcattgatgtgcatgctcagtccctggctgcgctgcaggcttactctcactggttagcacagtattgcagtgaagttcaccggcagaacacgcagcagttcgtgacactcatctctactaccatggatgcaatcacacctctaatcagcaccaaggtccaagacaagctgctgctatctgcgtgccacttactggtctcactggccaccaccgtgcggcccgtctttctgatcagcatccctgcagtgcagaaagtattcaacagaatcactgatgcctctgccctgcgacttgtcgataaggcccaggtgttggtgtgccgagccctctctaacatcttgctgcttccgtggccaaaccttccagagaatgagcagcagtggcccgtgcgctccatcaaccacgccagcctcatctctgcactctcccgggactatcgcaacctgaagcccagtgctgttgccccacagagaaagatgccactggatgacaccaaactgattatccaccagacactcagcgtcttagaagatattgtggagaatatctcgggggagtccaccaagtctcgacagatttgctaccagtcgctgcaggaatctgttcaggtctccctggccctctttccagcttttatccatcagtcagatgtgactgatgagatgctgagcttcttcctcactctgtttcgaggccttagagtacagatgggtgtgcctttcactgagcaaatcatacagactttcctcaacatgtttaccagagagcagttagccgagagcatcctccacgagggcagcacaggctgccgggtggtggagaagtttctgaagatcctgcaggtggtggtccaggagccaggccaggtgttcaagcccttcctccccagcatcatcgccctgtgcatggagcaagtgtatcccatcattgccgagcgtccctcccctgatgtgaaggccgagctgtttgagctccttttccggacgctccatcacaactggaggtacttcttcaagtccaccgtgctggccagtgtccagagggggatcgctgaggagcagatggagaatgagccccagttcagtgccatcatgcaggctttcggacagtcctttctccagcccgacatccacctttttaaacaaaatctcttctacttggagactctcaacaccaagcagaagctgtaccacaagaagatcttccggactgccatgctgttccagtttgtgaacgtgctgctccaggtcctggtccacaagtcccatgatcttctgcaggaggagattggcatcgccatctacaacatggcctcagtcgactttgatggcttctttgccgccttcctcccagagttcctgaccagctgtgatggtgtggatgccaaccagaaaagtgtgctggggcggaatttcaagatggatcgggtgaggagagaaagaggccgggctaagaggagggcagagtgggcacgcaagcctggcacctgtgcagcaaggagggggcacattgaggcctctgggcgtggtctgtgcccaccctgcagcttggcggcagctcacgagatgcctgctgacctggtgctgtagcctgattgaggggcacagccttttccccagtcttggtgtctgtagcacgtatgttcttagtctcagccatggaggtcccgagttcctggctctgcagcccctccatttgtcttggcatctttgttcatacccaggaccctgccgttctccctcctgggtgatgagccccggtggggccagcattggagtgtgcccaggcttgcattcaggctgagatggttggtgcttgggagctgcacttctgggtccccagggttagaggtgggacccaggttccccggctgtcttgggctctttccagaccagccccagctcagcttgggctgagttgctgccaggtcctgggaggagccctcctagtactcaccctcttgtcccactgctgccacctgtgcagggactgtcaggtgggctgtccccacccgtgcagcacctcggtgggagctgggtgctgctggctcttggtgtccatgaggccatcttgttggagcctgacagtgcctgggacctccttccccatggggctcacctgttctcttcttcctgtgtcaggtgaccaggcctctctcttgcctgataggaacttctgggaacttttccttgtaccgttttatacttgatgaaattaggaaaagaaatcgctttctccctggtcctcttggggttcttgacctgagtcctctgtgaagcagcttgtccacggctccaccgtagtgctcagatgcacacactgctctcactggtacaaacctggccgcctgctttcctcatttgccacgtgtggcagggaagcttttgcttagactcatcctgttctcctttgtcttggggtcttccttttcttgggacttgttctctcctaagcctcttccagttcacttcagcccctggatatgttttttcctttttctagaggccagatcctaatacttaatgatcagcttctaacgacatcaatatcagtcaactttttgatttaaagctgtggtttcaaaatctagttataggccaggcgcggtgtctcacacctgtaatctcagcactttgggaggccaaggcgggcggatcacttgaggttagggggtttgagaccagcctggccaacatggcgaaaccctgtctctactaaaaataaaaaaaattagtcaggtgtggtggcacacgcctgtaatcccagctgcttgggaggctgaggcacaagaatctcttgaacccgggaggcagaggttgcagtgagcggaggttgtgccactgcactccagcctgggcggcagagtgggactttgtctcaaaaaaaaaaatctagttatatcagaagcacctggggtacttattaaaaatggagaaacagacttctgtgttctacccaggaaattctggtttggcatttgggagccactgatttaaaagacatcccttagttggttttttgagggtaaaataaaagaatcaccaccttccattcagtcacgcactgtgtgtttgaagccagctgcttctcaagccccgggccaggaactggggcaccagtcccagccttcaccaagtctttcatggtagacaggccaatacagcaccctctgtggaccacatagtgccaagcatgtgacatgtcttggctcgagtaagccttctaacaagcctctgaagtgtgggtcctgttactcccccatttcacagatggtgggggctcagaaggtgagcagttcacagaacttggaagtggtagagctgcgaagcaggaggcagacctgggtgttctggccccagagcctgcacacactccccagaagcagattgctcaggacagaggcgctgagctggctgctggggccaggaaataggaggcatctgtgcagactttgggaagaggcaggctttgaatggagttctggaagaggaatagtggttgggcaggaaaatgaacttggtcctgctcatggctctgctggggcttgctgggcctgtttgagtcctcaccgggacctacactgaaaaaaaaagcagggtctcaccgtgtgcatgatggcggaggtcagggcctcacttctggcccagggccttccatggcccacgctgcgcccagtgggacaggccttgggactgtgtttgctgctgctcgggtggctctcgaggggcaggggcggcctggagccccgtgggtaaaggttctgcagacattgctcggtgtgcgcgtcacctcaaggggccatggtgaagaagagggctgtcaccacagccatgtctgcgtttgaggggccggactcaggagcaagtgtgctggtctcttcagtgtgagctggggccagcttcttcatggtgcagcgctttggtctttctgtccttagactagtggttctggtagggcttggtggcagccttgtggtgaggactcagtgagttgatgtctgtatgttgattgcagcagtgtctggcacccgagaggccctagggacgtattcctcttgttctttttctcccacagcgcctggcacagagtctctgtgacacgcagtgcaacagtgaatagaagttttgagttttagaaagtgctcccctatcttcagtgcacactctgggatggaagtagctgttggggtctggtgggtgggtgacctggtgtgttgttggctgcagctatgcccctgccttccaggacctgccctcattcacccagaatgtgcacaggctggtcaacgacctgcgctactacagactctgcaacgacagcctgccccctggcactgtgaagctctaggcctgctactgcctggggacacggacttctgctgctgccacctgcgccagccctaccttccaccacagatgtctcccagatgggccttggtcacactccttggcttctcccaccgcaagcaacgctgcctgcctctgccgctcctccacatcttgccgctgcccagcagagctggcttctgggtccacctgagcactggacggtgctcccagggcgttggagcaggcggaggggtgtgtggccaggtactaggaggcaccaggaaatcccgcggggtggcccatgcagaccaggcgcacgtggctcatggggcagaattgccaaggacagctcacgacagtgccaccttctcaccattccagccaaggagagatgtgacgttggaactgctctggcacttctgtcaagcctcccccgccccaattgccttgagatctctgctctttgtcagagatttgcaaagactcacgtttttgttgttttctcatcattccattgtgatactaagaaactaagaagcttaatgaaaagaaataaaatgcctatgttgttgttctagaaa

SEQ ID NO: 345677 - DNA, 4506 bp, Homo sapiens
gcggccgcgcggtactagcgggcggctccagggcgggcgcgcgcaaggatgctctagggggcggcggcagtggccgtgtgggttgaggctgcgaggacagcgcgggcccccgggcctctcccctgagccggccgcctgggccgcgcggtcgaggcctgtcagcctccgcccgttcagcctcggggccggggccgccgccacctctgcccgcggaggccggggagcccctgcctgggcccgcagcctcccccgcgggggtcgggcccgggcgggggtcccgagcagctgccctcctcgccggcatccgagcctcatttcctgctttttcagtttccttggggaggggcgggtgggtctggatgaattgtctcggggtcccccgatgaggcgacccgggcggccctgccctttttagagggtcccctcggggcccggtggggaaggggttgtctttgcatgggtgggggacttcccgagtctgccgggaccatgacctgaactgtgcgagcgggacgtgtccgaagcccaagaaccagctcatctgagccgccccctccccggccagcatggcatctgaagaagcctctctcagggcattggaaagtctgatgacagaattttttcacgattgtacaaccaatgaaagaaaacgtgagatagaggagcttcttaataactttgcccagcaaataggagcctggagattctgcctgtactttctctccagcactaggaatgactatgtaatgatgtacagtttaacagtttttgagaatctgatcaataaaatgtggcttggggtcccatctcaggataagatggaaatccgtagctgtctgcccaaactccttttggctcaccataaaaccttaccttactttatccggaacaagctctgcaaagttattgttgatattggacgtcaggattggcccatgttctaccacgacttttttactaacattttacagttgatccagtcccctgtgacaaccccccttgggctgatcatgttgaagacaacttcagaagagctggcttgtccccgtgaggacctcagtgtggctcggaaggaggagttgcggaagctgctactggaccaggtgcagacagtgcttgggctactgacaggtatcttggagactgtctgggacaaacacagtgttactgctgccactccaccaccatccccgacctcaggagaaagtggtgacttactgagtaacctgttgcagagtcccagttcagccaaactgttgaatcagccaattcccatccttgatgtggagagtgagtatatctgttccctggctttggagtgcctggcccatctcttcagttggattcctctgtctgccagcatcaccccatccctccttaccaccatcttccactttgcacgatttggctgtgacatccgggccagaaagatggcgtcagttaacggcagcagccagaactgtgtctcgggtcaggagcgcggccggctgggggtcctggccatgtcctgcatcaatgaactcatgtccaagaactgtgtgcctatggaatttgaggagtatttactgcgtatgttccagcagactttctacctcctgcagaaaatcaccaaggataacaatgcccacacagtgaagagcaggctagaagagctcgatgagagctatatcgagaagtttactgactttcttcggctctttgtgagtgttcacctaagaagaatcgagtcttactcccagttccctgtggtggagtttttgacacttttgttcaagtacacatttcatcagcctactcatgaaggttacttctcttgtttggatatctggacgctgtttttggactatctgacaagtaaaattaaaagtcgtcttggagacaaggaagcagttctcaacaggtacgaagatgccctggtgctcctgctcacagaggtgttgaatcgaatccagttcagatacaaccaagcccagctggaggagttggatgatgagactctggatgacgatcagcagacggagtggcagcggtacttacggcagagcttggaggtggtggccaaagtgatggagctcctgcccacgcacgccttctccacactgttccctgttcttcaggacaatttagaagtttatttgggattacaacagtttatagtcacttcagggtcaggacacaggttgaacatcacggcggagaacgactgccggcggctgcactgctccctgagagacttgagctccctgctgcaggccgtgggccgcctggccgagtactttatcggggatgtgtttgctgcacggttcaatgatgccctcacagtcgtggaaaggttggtcaaagtcactctgtacggatctcagataaaattgtacaacattgaaactgctgtgccatcagtattgaaacctgacctcattgatgtgcatgctcagtccctggctgcgctgcaggcttactctcactggttagcacagtattgcagtgaagttcaccggcagaacacgcagcagttcgtgacactcatctctactaccatggatgcaatcacacctctaatcagcaccaaggtccaagacaagctgctgctatctgcgtgccacttactggtctcactggccaccaccgtgcggcccgtctttctgatcagcatccctgcagtgcagaaagtattcaacagaatcactgatgcctctgccctgcgacttgtcgataaggcccaggtgttggtgtgccgagccctctctaacatcttgctgcttccgtggccaaaccttccagagaatgagcagcagtggcccgtgcgctccatcaaccacgccagcctcatctctgcactctcccgggactatcgcaacctgaagcccagtgctgttgccccacagagaaagatgccactggatgacaccaaactgattatccaccagacactcagcgtcttagaagatattgtggagaatatctcgggggagtccaccaagtctcgacagatttgctaccagtcgctgcaggaatctgttcaggtctccctggccctctttccagcttttatccatcagtcagatgtgactgatgagatgctgagcttcttcctcactctgtttcgaggccttagagtacagatgggtgtgcctttcactgagcaaatcatacagactttcctcaacatgtttaccagagagcagttagccgagagcatcctccacgagggcagcacaggctgccgggtggtggagaagtttctgaagatcctgcaggtggtggtccaggagccaggccaggtgttcaagcccttcctccccagcatcatcgccctgtgcatggagcaagtgtatcccatcattgccgagcgtccctcccctgatgtgaaggccgagctgtttgagctccttttccggacgctccatcacaactggaggtacttcttcaagtccaccgtgctggccagtgtccagagggggatcgctgaggagcagatggagaatgagccccagttcagtgccatcatgcaggctttcggacagtcctttctccagcccgacatccacctttttaaacaaaatctcttctacttggagactctcaacaccaagcagaagctgtaccacaagaagatcttccggactgccatgctgttccagtttgtgaacgtgctgctccaggtcctggtccacaagtcccatgatcttctgcaggaggagattggcatcgccatctacaacatggcctcagtcgactttgatggcttctttgccgccttcctcccagagttcctgaccagctgtgatggtgtggatgccaaccagaaaagtgtgctggggcggaatttcaagatggatcgggacctgccctcattcacccagaatgtgcacaggctggtcaacgacctgcgctactacagactctgcaacgacagcctgccccctggcactgtgaagctctaggcctgctactgcctggggacacggacttctgctgctgccacctgcgccagccctaccttccaccacagatgtctcccagatgggccttggtcacactccttggcttctcccaccgcaagcaacgctgcctgcctctgccgctcctccacatcttgccgctgcccagcagagctggcttctgggtccacctgagcactggacggtgctcccagggcgttggagcaggcggaggggtgtgtggccaggtactaggaggcaccaggaaatcccgcggggtggcccatgcagaccaggcgcacgtggctcatggggcagaattgccaaggacagctcacgacagtgccaccttctcaccattccagccaaggagagatgtgacgttggaactgctctggcacttctgtcaagcctcccccgccccaattgccttgagatctctgctctttgtcagagatttgcaaagactcacgtttttgttgttttctcatcattccattgtgatactaagaaactaagaagcttaatgaaaagaaataaaatgcctatgttgttgttctagaaa

SEQ ID NO: 345678 - DNA, 3239 bp, Homo sapiens
gtacggggctggcgttaattgttatgaatttgtcgttcgctttacatggacatgcctggcccatctcttcagttggattcctctgtctgccagcatcaccccatccctccttaccaccatcttccactttgcacgatttggctgtgacatccgggccagaaagatggcgtcagttaacggcagcagccagaactgtgtctcgggtcaggagcgcggccggctgggggtcctggccatgtcctgcatcaatgaactcatgtccaagaactgtgtgcctatggaatttgaggagtatttactgcgtatgttccagcagactttctacctcctgcagaaaatcaccaaggataacaatgcccacacagtgaagagcaggctagaagagctcgatgagagctatatcgagaagtttactgactttcttcggctctttgtgagtgttcacctaagaagaatcgagtcttactcccagttccctgtggtggagtttttgacacttttgttcaagtacacatttcatcagcctactcatgaaggttacttctcttgtttggatatctggacgctgtttttggactatctgacaagtaaaattaaaagtcgtcttggagacaaggaagcagttctcaacaggtacgaagatgccctggtgctcctgctcacagaggtgttgaatcgaatccagttcagatacaaccaagcccagctggaggagttggatgatgagactctggatgacgatcagcagacggagtggcagcggtacttacggcagagcttggaggtggtggccaaagtgatggagctcctgcccacgcacgccttctccacactgttccctgttcttcaggacaatttagaagtttatttgggattacaacagtttatagtcacttcagggtcaggacacaggttgaacatcacggcggagaacgactgccggcggctgcactgctccctgagagacttgagctccctgctgcaggccgtgggccgcctggccgagtactttatcggggatgtgtttgctgcacggttcaatgatgccctcacagtcgtggaaaggttggtcaaagtcactctgtacggatctcagataaaattgtacaacattgaaactgctgtgccatcagtattgaaacctgacctcattgatgtgcatgctcagtccctggctgcgctgcaggcttactctcactggttagcacagtattgcagtgaagttcaccggcagaacacgcagcagttcgtgacactcatctctactaccatggatgcaatcacacctctaatcagcaccaaggtccaagacaagctgctgctatctgcgtgccacttactggtctcactggccaccaccgtgcggcccgtctttctgatcagcatccctgcagtgcagaaagtattcaacagaatcactgatgcctctgccctgcgacttgtcgataaggcccaggtgttggtgtgccgagccctctctaacatcttgctgcttccgtggccaaaccttccagagaatgagcagcagtggcccgtgcgctccatcaaccacgccagcctcatctctgcactctcccgggactatcgcaacctgaagcccagtgctgttgccccacagagaaagatgccactggatgacaccaaactgattatccaccagacactcagcgtcttagaagatattgtggagaatatctcgggggagtccaccaagtctcgacagatttgctaccagtcgctgcaggaatctgttcaggtctccctggccctctttccagcttttatccatcagtcagatgtgactgatgagatgctgagcttcttcctcactctgtttcgaggccttagagtacagatgggtgtgcctttcactgagcaaatcatacagactttcctcaacatgtttaccagagagcagttagccgagagcatcctccacgagggcagcacaggctgccgggtggtggagaagtttctgaagatcctgcaggtggtggtccaggagccaggccaggtgttcaagcccttcctccccagcatcatcgccctgtgcatggagcaagtgtatcccatcattgccgagcgtccctcccctgatgtgaaggccgagctgtttgagctccttttccggacgctccatcacaactggaggtacttcttcaagtccaccgtgctggccagtgtccagagggggatcgctgaggagcagatggagaatgagccccagttcagtgccatcatgcaggctttcggacagtcctttctccagcccgacatccacctttttaaacaaaatctcttctacttggagactctcaacaccaagcagaagctgtaccacaagaagatcttccggactgccatgctgttccagtttgtgaacgtgctgctccaggtcctggtccacaagtcccatgatcttctgcaggaggagattggcatcgccatctacaacatggcctcagtcgactttgatggcttctttgccgccttcctcccagagttcctgaccagctgtgatggtgtggatgccaaccagaaaagtgtgctggggcggaatttcaagatggatcgggacctgccctcattcacccagaatgtgcacaggctggtcaacgacctgcgctactacagactctgcaacgacagcctgccccctggcactgtgaagctctaggcctgctactgcctggggacacggacttctgctgctgccacctgcgccagccctaccttccaccacagatgtctcccagatgggccttggtcacactccttggcttctcccaccgcaagcaacgctgcctgcctctgccgctcctccacatcttgccgctgcccagcagagctggcttctgggtccacctgagcactggacggtgctcccagggcgttggagcaggcggaggggtgtgtggccaggtactaggaggcaccaggaaatcccgcggggtggcccatgcagaccaggcgcacgtggctcatggggcagaattgccaaggacagctcacgacagtgccaccttctcaccattccagccaaggagagatgtgacgttggaactgctctggcacttctgtcaagcctcccccgccccaattgccttgagatctctgctctttgtcagagatttgcaaagactcacgtttttgttgttttctcatcattccattgtgatactaagaaactaagaagcttaatgaaaagaaataaaatgcctatgttgttgttctagaaa

SEQ ID NO: 345679 - DNA, 4761 bp, Homo sapiens
gtctcatgtctatctcttcatatgttaatttaaaaatctagctgcttgtatcaactatcaaatatcagttgttttgactttaatcataatgtagtcacagacaactttgttgtggcttccatttggatggtatagaaatgtcattatggattgtctatgtactgatgttgttacgtgtaacttttgtgctcttggttttacattttaatcctgtgcttcctattgccctgtgaaagctgagaggtgcctgggagcagaaaggtgacataaataatgctgtgtgcttgcttcctggctctgggtcccctaccactaattctaaacagctcagtccattctcagttgtttaggagctgctaaccagatccttggcttctctttccctctactgccttttcccctaactttctactgttcattagcacctgtaccagaaggtgggcaagggaaagaaaatgaggtgaaataaaatctgtagttttagctactgaacagccttgtttgtatttttaaaaaattgggttagatactaaagtaaaattgagattgttctgtatttagcccatggctttttttttttttttttttttttttaaatgggtagtagggaattgagtgcaccttcctaaagaacagtcagctgggtggtgactttgaatatccatgtaaaactatcatgcggtacataagtgagtgaggaaggagttcctactcttgagtattagtgattgatgacaccagagagaagtgtctttgtatgttcctgtctctaaaaacagttgattttagtgccttactgtttttcgagtacttggccccatgatccacagagacagccattctctttatcaaaacaaattaatatgtattttttaaaaagctgcaaataagctcggccgcatagaggtcaggcaggcaggctggccaccctcagggagataggtcccaggagcaacatgggacattttatttccgggccagttttgcttttctgagtagtagttttctctgcttttattatttcacatatctctgttttgaaaaatagcttttgcagtaatgagcttcagaattgcttttagccattatttcattttcagctaaggcctagtatgtctttacctttttgtgttggtctctgaaatgtgatttatgaaggtatggccatctcattttctaatcaccttttggtatttaggggcttaaaatgacagtttctgaaatgtgagagtgatgatgtgctgtgtatttaataacagagatctcttatccttgcagctgtgacccatactcttctgtgaaatgattttgtgaatacaaatgagttggggattcactgtgaagtgaaaagaaagagcactggattgggagtggatgatagtcctgttctgccatgagttggctgagtgactttgggctggtcactttacctctctgggcttcatctgcaaaacggaagcatcagactaaagtccctgaggcttgcccagttctaatagccttcctcccttatatttgaaatcacttttagagtattgggttgtgctgtgtttaattagcaccaggaaccaaagggggaaaaatggccattatgttgcaagcctgagtacatcttacctggatgccatgcccttcgtagcctggttttgtttttgtgtcttagcaccattcactttagtatttggcctcccggaaagaaaaccagccttctagacttgccagattgaaatgacacagtgatctgcccatcaactttttatcatttcccttcactttaattgggtcacaacacaaatgacttagaaaatgtgagcgcactagattataagaagccttagcagacagtgtctgaggattaaagttgcttttctgctatgtttcaggtggttaatggaatgaagggttgcctgtcctgtagctatatcgagaagtttactgactttcttcggctctttgtgagtgttcacctaagaagaatcgagtcttactcccagttccctgtggtggagtttttgacacttttgttcaagtacacatttcatcagcctactcatgaaggttacttctcttgtttggatatctggacgctgtttttggactatctgacaagtaaaattaaaagtcgtcttggagacaaggaagcagttctcaacaggtacgaagatgccctggtgctcctgctcacagaggtgttgaatcgaatccagttcagatacaaccaagcccagctggaggagttggatgatgagactctggatgacgatcagcagacggagtggcagcggtacttacggcagagcttggaggtggtggccaaagtgatggagctcctgcccacgcacgccttctccacactgttccctgttcttcaggacaatttagaagtttatttgggattacaacagtttatagtcacttcagggtcaggacacaggttgaacatcacggcggagaacgactgccggcggctgcactgctccctgagagacttgagctccctgctgcaggccgtgggccgcctggccgagtactttatcggggatgtgtttgctgcacggttcaatgatgccctcacagtcgtggaaaggttggtcaaagtcactctgtacggatctcagataaaattgtacaacattgaaactgctgtgccatcagtattgaaacctgacctcattgatgtgcatgctcagtccctggctgcgctgcaggcttactctcactggttagcacagtattgcagtgaagttcaccggcagaacacgcagcagttcgtgacactcatctctactaccatggatgcaatcacacctctaatcagcaccaaggtccaagacaagctgctgctatctgcgtgccacttactggtctcactggccaccaccgtgcggcccgtctttctgatcagcatccctgcagtgcagaaagtattcaacagaatcactgatgcctctgccctgcgacttgtcgataaggcccaggtgttggtgtgccgagccctctctaacatcttgctgcttccgtggccaaaccttccagagaatgagcagcagtggcccgtgcgctccatcaaccacgccagcctcatctctgcactctcccgggactatcgcaacctgaagcccagtgctgttgccccacagagaaagatgccactggatgacaccaaactgattatccaccagacactcagcgtcttagaagatattgtggagaatatctcgggggagtccaccaagtctcgacagatttgctaccagtcgctgcaggaatctgttcaggtctccctggccctctttccagcttttatccatcagtcagatgtgactgatgagatgctgagcttcttcctcactctgtttcgaggccttagagtacagatgggtgtgcctttcactgagcaaatcatacagactttcctcaacatgtttaccagagagcagttagccgagagcatcctccacgagggcagcacaggctgccgggtggtggagaagtttctgaagatcctgcaggtggtggtccaggagccaggccaggtgttcaagcccttcctccccagcatcatcgccctgtgcatggagcaagtgtatcccatcattgccgagcgtccctcccctgatgtgaaggccgagctgtttgagctccttttccggacgctccatcacaactggaggtacttcttcaagtccaccgtgctggccagtgtccagagggggatcgctgaggagcagatggagaatgagccccagttcagtgccatcatgcaggctttcggacagtcctttctccagcccgacatccacctttttaaacaaaatctcttctacttggagactctcaacaccaagcagaagctgtaccacaagaagatcttccggactgccatgctgttccagtttgtgaacgtgctgctccaggtcctggtccacaagtcccatgatcttctgcaggaggagattggcatcgccatctacaacatggcctcagtcgactttgatggcttctttgccgccttcctcccagagttcctgaccagctgtgatggtgtggatgccaaccagaaaagtgtgctggggcggaatttcaagatggatcgggacctgccctcattcacccagaatgtgcacaggctggtcaacgacctgcgctactacagactctgcaacgacagcctgccccctggcactgtgaagctctaggcctgctactgcctggggacacggacttctgctgctgccacctgcgccagccctaccttccaccacagatgtctcccagatgggccttggtcacactccttggcttctcccaccgcaagcaacgctgcctgcctctgccgctcctccacatcttgccgctgcccagcagagctggcttctgggtccacctgagcactggacggtgctcccagggcgttggagcaggcggaggggtgtgtggccaggtactaggaggcaccaggaaatcccgcggggtggcccatgcagaccaggcgcacgtggctcatggggcagaattgccaaggacagctcacgacagtgccaccttctcaccattccagccaaggagagatgtgacgttggaactgctctggcacttctgtcaagcctcccccgccccaattgccttgagatctctgctctttgtcagagatttgcaaagactcacgtttttgttgttttctcatcattccattgtgatactaagaaactaagaagcttaatgaaaagaaataaaatgcctatgttgttgttctagaaa

SEQ ID NO: 345680 - DNA, 4442 bp, Homo sapiens
gcggccgcgcggtactagcgggcggctccagggcgggcgcgcgcaaggatgctctagggggcggcggcagtggccgtgtgggttgaggctgcgaggacagcgcgggcccccgggcctctcccctgagccggccgcctgggccgcgcggtcgaggcctgtcagcctccgcccgttcagcctcggggccggggccgccgccacctctgcccgcggaggccggggagcccctgcctgggcccgcagcctcccccgcgggggtcgggcccgggcgggggtcccgagcagctgccctcctcgccggcatccgagcctcatttcctgctttttcagtttccttggggaggggcgggtgggtctggatgaattgtctcggggtcccccgatgaggcgacccgggcggccctgccctttttagagggtcccctcggggcccggtggggaaggggttgtctttgcatgggtgggggacttcccgagtctgccgggaccatgacctgaactgtgcgagcgggacgtgtccgaagcccaagaaccagctcatctgagccgccccctccccggccagcatggcatctgaagaagcctctctcagggcattggaaagtctgatgacagaattttttcacgattgtacaaccaatgaaagaaaacgtgagatagaggagcttcttaataactttgcccagcaaataggagcctggagattctgcctgtactttctctccagcactaggaatgactatgtaatgatgtacagtttaacagtttttgagaatctgatcaataaaatgtggcttggggtcccatctcaggataagatggaaatccgtagctgtctgcccaaactccttttggctcaccataaaaccttaccttactttatccggaacaagctctgcaaagttattgttgatattggacgtcaggattggcccatgttctaccacgacttttttactaacattttacagttgatccagtcccctgtgacaaccccccttgggctgatcatgttgaagacaacttcagaagagctggcttgtccccgtgaggacctcagtgtggctcggaaggaggagttgcggaagctgctactggaccaggtgcagacagtgcttgggctactgacaggtatcttggagactgtctgggacaaacacagtgttactgctgccactccaccaccatccccgacctcaggagaaagtggtgacttactgagtaacctgttgcagagtcccagttcagccaaactgttgaatcagccaattcccatccttgatgtggagagtgagtatatctgttccctggctttggagtgcctggcccatctcttcagttggattcctctgtctgccagcatcaccccatccctccttaccaccatcttccactttgcacgatttggctgtgacatccgggccagaaagatggcgtcagttaacggcagcagccagaactgtgtctcgggtcaggagcgcggccggctgggggtcctggccatgtcctgcatcaatgaactcatgtccaagaactgtgtgcctatggaatttgaggagtatttactgcgtatgttccagcagactttctacctcctgcagaaaatcaccaaggataacaatgcccacacagtgaagagcaggctagaagagctcgatgagagctatatcgagaagtttactgactttcttcggctctttgtgagtgttcacctaagaagaatcgagtcttactcccagttccctgtggtggagtttttgacacttttgttcaagtacacatttcatcagcctactcatgaaggttacttctcttgtttggatatctggacgctgtttttggactatctgacaagtaaaattaaaagtcgtcttggagacaaggaagcagttctcaacaggtacgaagatgccctggtgctcctgctcacagaggtgttgaatcgaatccagttcagatacaaccaagcccagctggaggagttggatgatgagactctggatgacgatcagcagacggagtggcagcggtacttacggcagagcttggaggtggtggccaaagtgatggagctcctgcccacgcacgccttctccacactgttccctgttcttcaggacaatttagaagtttatttgggattacaacagtttatagtcacttcagggtcaggacacaggttgaacatcacggcggagaacgactgccggcggctgcactgctccctgagagacttgagctccctgctgcaggccgtgggccgcctggccgagtactttatcggggatgtgtttgctgcacggttcaatgatgccctcacagtcgtggaaaggttggtcaaagtcactctgtacggatctcagataaaattgtacaacattgaaactgctgtgccatcagtattgaaacctgacctcattgatgtgcatgctcagtccctggctgcgctgcaggcttactctcactggttagcacagtattgcagtgaagttcaccggcagaacacgcagcagttcgtgacactcatctctactaccatggatgcaatcacacctctaatcagcaccaaggtccaagacaagctgctgctatctgcgtgccacttactggtctcactggccaccaccgtgcggcccgtctttctgatcagcatccctgcagtgcagaaagtattcaacagaatcactgatgcctctgccctgcgacttgtcgataagagaatgagcagcagtggcccgtgcgctccatcaaccacgccagcctcatctctgcactctcccgggactatcgcaacctgaagcccagtgctgttgccccacagagaaagatgccactggatgacaccaaactgattatccaccagacactcagcgtcttagaagatattgtggagaatatctcgggggagtccaccaagtctcgacagatttgctaccagtcgctgcaggaatctgttcaggtctccctggccctctttccagcttttatccatcagtcagatgtgactgatgagatgctgagcttcttcctcactctgtttcgaggccttagagtacagatgggtgtgcctttcactgagcaaatcatacagactttcctcaacatgtttaccagagagcagttagccgagagcatcctccacgagggcagcacaggctgccgggtggtggagaagtttctgaagatcctgcaggtggtggtccaggagccaggccaggtgttcaagcccttcctccccagcatcatcgccctgtgcatggagcaagtgtatcccatcattgccgagcgtccctcccctgatgtgaaggccgagctgtttgagctccttttccggacgctccatcacaactggaggtacttcttcaagtccaccgtgctggccagtgtccagagggggatcgctgaggagcagatggagaatgagccccagttcagtgccatcatgcaggctttcggacagtcctttctccagcccgacatccacctttttaaacaaaatctcttctacttggagactctcaacaccaagcagaagctgtaccacaagaagatcttccggactgccatgctgttccagtttgtgaacgtgctgctccaggtcctggtccacaagtcccatgatcttctgcaggaggagattggcatcgccatctacaacatggcctcagtcgactttgatggcttctttgccgccttcctcccagagttcctgaccagctgtgatggtgtggatgccaaccagaaaagtgtgctggggcggaatttcaagatggatcgggacctgccctcattcacccagaatgtgcacaggctggtcaacgacctgcgctactacagactctgcaacgacagcctgccccctggcactgtgaagctctaggcctgctactgcctggggacacggacttctgctgctgccacctgcgccagccctaccttccaccacagatgtctcccagatgggccttggtcacactccttggcttctcccaccgcaagcaacgctgcctgcctctgccgctcctccacatcttgccgctgcccagcagagctggcttctgggtccacctgagcactggacggtgctcccagggcgttggagcaggcggaggggtgtgtggccaggtactaggaggcaccaggaaatcccgcggggtggcccatgcagaccaggcgcacgtggctcatggggcagaattgccaaggacagctcacgacagtgccaccttctcaccattccagccaaggagagatgtgacgttggaactgctctggcacttctgtcaagcctcccccgccccaattgccttgagatctctgctctttgtcagagatttgcaaagactcacgtttttgttgttttctcatcattccattgtgatactaagaaactaagaagcttaatgaaaagaaataaaatgcctatgttgttgttctagaaa

SEQ ID NO: 345681 - DNA, 4485 bp, Homo sapiens
gcggccgcgcggtactagcgggcggctccagggcgggcgcgcgcaaggatgctctagggggcggcggcagtggccgtgtgggttgaggctgcgaggacagcgcgggcccccgggcctctcccctgagccggccgcctgggccgcgcggtcgaggcctgtcagcctccgcccgttcagcctcggggccggggccgccgccacctctgcccgcggaggccggggagcccctgcctgggcccgcagcctcccccgcgggggtcgggcccgggcgggggtcccgagcagctgccctcctcgccggcatccgagcctcatttcctgctttttcagtttccttggggaggggcgggtgggtctggatgaattgtctcggggtcccccgatgaggcgacccgggcggccctgccctttttagagggtcccctcggggcccggtggggaaggggttgtctttgcatgggtgggggacttcccgagtctgccgggaccatgacctgaactgtgcgagcgggacgtgtccgaagcccaagaaccagctcatctgagccgccccctccccggccagcatggcatctgaagaagcctctctcagggcattggaaagtctgatgacagaattttttcacgattgtacaaccaatgaaagaaaacgtgagatagaggagcttcttaataactttgcccagcaaataggagcctggagattctgcctgtactttctctccagcactaggaatgactatgtaatgatgtacagtttaacagtttttgagaatctgatcaataaaatgtggcttggggtcccatctcaggataagatggaaatccgtagctgtctgcccaaactccttttggctcaccataaaaccttaccttactttatccggaacaagctctgcaaagttattgttgatattggacgtcaggattggcccatgttctaccacgacttttttactaacattttacagttgatccagtcccctgtgacaaccccccttgggctgatcatgttgaagacaacttcagaagagctggcttgtccccgtgaggacctcagtgtggctcggaaggaggagttgcggaagctgctactggaccaggtgcagacagtgcttgggctactgacaggtatcttggagactgtctgggacaaacacagtgttactgctgccactccaccaccatccccgacctcaggagaaagtggtgacttactgagtaacctgttgcagagtcccagttcagccaaactgttgaatcagccaattcccatccttgatgtggagagtgagtatatctgttccctggctttggagtgcctggcccatctcttcagttggattcctctgtctgccagcatcaccccatccctccttaccaccatcttccactttgcacgatttggctgtgacatccgggccagaaagatggcgtcagttaacggcagcagccagaactgtgtctcgggtcaggagcgcggccggctgggggtcctggccatgtcctgcatcaatgaactcatgtccaagaactgtgtgcctatggaatttgaggagtatttactgcgtatgttccagcagactttctacctcctgcagaaaatcaccaaggataacaatgcccacacagtgaagagcaggctagaagagctcgatgagagctatatcgagaagtttactgactttcttcggctctttgtgagtgttcacctaagaagaatcgagtcttactcccagttccctgtggtggagtttttgacacttttgttcaagtacacatttcatcagcctactcatgaaggttacttctcttgtttggatatctggacgctgtttttggactatctgacaagtaaaattaaaagtcgtcttggagacaaggaagcagttctcaacaggtacgaagatgccctggtgctcctgctcacagaggtgttgaatcgaatccagttcagatacaaccaagcccagctggaggagttggatgatgagactctggatgacgatcagcagacggagtggcagcggtacttacggcagagcttggaggtggtggccaaagtgatggagctcctgcccacgcacgccttctccacactgttccctgttcttcaggacaatttagaagtttatttgggattacaacagtttatagtcacttcagggtcaggacacaggttgaacatcacggcggagaacgactgccggcggctgcactgctccctgagagacttgagctccctgctgcaggccgtgggccgcctggccgagtactttatcggggatgtgtttgctgcacggttcaatgatgccctcacagtcgtggaaaggttggtcaaagtcactctgtacggatctcagataaaattgtacaacattgaaactgctgtgccatcagtattgaaacctgacctcattgatgtgcatgctcagtccctggctgcgctgcaggcttactctcactggttagcacagtattgcagtgaagttcaccggcagaacacgcagcagttcgtgacactcatctctactaccatggatgcaatcacacctctaatcagcaccaaggtccaagacaagctgctgctatctgcgtgccacttactggtctcactggccaccaccgtgcggcccgtctttctgatcagcatccctgcagtgcagaaagtattcaacagaatcactgatgcctctgccctgcgacttgtcgataaggcccaggtgttggtgtgccgagccctctctaacatcttgctgcttccgtggccaaaccttccagagaatgagcagcagtggcccgtgcgctccatcaaccacgccagcctcatctctgcactctcccgggactatcgcaacctgaagcccagtgctgttgccccacagagaaagatgccactggatgacaccaaactgattatccaccagacactcagcgtcttagaagatattgtggagaatatctcgggggagtccaccaagtctcgacagatttgctaccagtcgctgcaggaatctgttcaggtctccctggccctctttccagcttttatccatcagtcagatgtgactgatgagatgctgagcttcttcctcactctgtttcgaggccttagagtacagatgggtgtgcctttcactgagcaaatcatacagactttcctcaacatgtttaccagagagcagttagccgagagcatcctccacgagggcagcacaggctgccgggtggtggagaagtttctgaagatcctgcaggtggtggtccaggagccaggccaggtgttcaagcccttcctccccagcatcatcgccctgtgcatggagcaagtgtatcccatcattgccgagcgtccctcccctgatgtgaaggccgagctgtttgagctccttttccggacgctccatcacaactggaggtacttcttcaagtccaccgtgctggccagtgtccagagggggatcgctgaggagcagatggagaatgagccccagttcagtgccatcatgcaggctttcggacagtcctttctccagcccgacatccacctttttaaacaaaatctcttctacttggagactctcaacaccaagcagaagctgtaccacaagaagatcttccggactgccatgctgttccagtttgtgaacgtgctgctccaggtcctggtccacaagtcccatgatcttctgcaggaggagattggcatcgccatctacaacatggcctcagtcgactttgatggcttctttgccgccttcctcccagagttcctgaccagctgtgatggtgtggatgccaaccagaaaagtgtgctggggcggaatttcaagatggatcggaatgtgcacaggctggtcaacgacctgcgctactacagactctgcaacgacagcctgccccctggcactgtgaagctctaggcctgctactgcctggggacacggacttctgctgctgccacctgcgccagccctaccttccaccacagatgtctcccagatgggccttggtcacactccttggcttctcccaccgcaagcaacgctgcctgcctctgccgctcctccacatcttgccgctgcccagcagagctggcttctgggtccacctgagcactggacggtgctcccagggcgttggagcaggcggaggggtgtgtggccaggtactaggaggcaccaggaaatcccgcggggtggcccatgcagaccaggcgcacgtggctcatggggcagaattgccaaggacagctcacgacagtgccaccttctcaccattccagccaaggagagatgtgacgttggaactgctctggcacttctgtcaagcctcccccgccccaattgccttgagatctctgctctttgtcagagatttgcaaagactcacgtttttgttgttttctcatcattccattgtgatactaagaaactaagaagcttaatgaaaagaaataaaatgcctatgttgttgttctagaaa

SEQ ID NO: 345682 - DNA, 2372 bp, Homo sapiens
taaggggggccggggccgagcggccgaggacgtaagcaccggcagggcggtgacaccggcggagaacgactgccggcggctgcactgctccctgagagacttgagctccctgctgcaggccgtgggccgcctggccgagtactttatcggggatgtgtttgctgcacggttcaatgatgccctcacagtcgtggaaaggttggtcaaagtcactctgtacggatctcagataaaattgtacaacattgaaactgctgtgccatcagtattgaaacctgacctcattgatgtgcatgctcagtccctggctgcgctgcaggcttactctcactggttagcacagtattgcagtgaagttcaccggcagaacacgcagcagttcgtgacactcatctctactaccatggatgcaatcacacctctaatcagcaccaaggtccaagacaagctgctgctatctgcgtgccacttactggtctcactggccaccaccgtgcggcccgtctttctgatcagcatccctgcagtgcagaaagtattcaacagaatcactgatgcctctgccctgcgacttgtcgataaggcccaggtgttggtgtgccgagccctctctaacatcttgctgcttccgtggccaaaccttccagagaatgagcagcagtggcccgtgcgctccatcaaccacgccagcctcatctctgcactctcccgggactatcgcaacctgaagcccagtgctgttgccccacagagaaagatgccactggatgacaccaaactgattatccaccagacactcagcgtcttagaagatattgtggagaatatctcgggggagtccaccaagtctcgacagatttgctaccagtcgctgcaggaatctgttcaggtctccctggccctctttccagcttttatccatcagtcagatgtgactgatgagatgctgagcttcttcctcactctgtttcgaggccttagagtacagatgggtgtgcctttcactgagcaaatcatacagactttcctcaacatgtttaccagagagcagttagccgagagcatcctccacgagggcagcacaggctgccgggtggtggagaagtttctgaagatcctgcaggtggtggtccaggagccaggccaggtgttcaagcccttcctccccagcatcatcgccctgtgcatggagcaagtgtatcccatcattgccgagcgtccctcccctgatgtgaaggccgagctgtttgagctccttttccggacgctccatcacaactggaggtacttcttcaagtccaccgtgctggccagtgtccagagggggatcgctgaggagcagatggagaatgagccccagttcagtgccatcatgcaggctttcggacagtcctttctccagcccgacatccacctttttaaacaaaatctcttctacttggagactctcaacaccaagcagaagctgtaccacaagaagatcttccggactgccatgctgttccagtttgtgaacgtgctgctccaggtcctggtccacaagtcccatgatcttctgcaggaggagattggcatcgccatctacaacatggcctcagtcgactttgatggcttctttgccgccttcctcccagagttcctgaccagctgtgatggtgtggatgccaaccagaaaagtgtgctggggcggaatttcaagatggatcgggacctgccctcattcacccagaatgtgcacaggctggtcaacgacctgcgctactacagactctgcaacgacagcctgccccctggcactgtgaagctctaggcctgctactgcctggggacacggacttctgctgctgccacctgcgccagccctaccttccaccacagatgtctcccagatgggccttggtcacactccttggcttctcccaccgcaagcaacgctgcctgcctctgccgctcctccacatcttgccgctgcccagcagagctggcttctgggtccacctgagcactggacggtgctcccagggcgttggagcaggcggaggggtgtgtggccaggtactaggaggcaccaggaaatcccgcggggtggcccatgcagaccaggcgcacgtggctcatggggcagaattgccaaggacagctcacgacagtgccaccttctcaccattccagccaaggagagatgtgacgttggaactgctctggcacttctgtcaagcctcccccgccccaattgccttgagatctctgctctttgtcagagatttgcaaagactcacgtttttgttgttttctcatcattccattgtgatactaagaaactaagaagcttaatgaaaagaaataaaatgcctatgttgttgttctagaaa

SEQ ID NO: 345683 - DNA, 1757 bp, Homo sapiens
atgttgtgctcccgcggtgttgcgctcccgccggtgtgcgctcccgcccgttgtgcgctccatcaaccacgccagcctcatctctgcactctcccgggactatcgcaacctgaagcccagtgctgttgccccacagagaaagatgccactggatgacaccaaactgattatccaccagacactcagcgtcttagaagatattgtggagaatatctcgggggagtccaccaagtctcgacagatttgctaccagtcgctgcaggaatctgttcaggtctccctggccctctttccagcttttatccatcagtcagatgtgactgatgagatgctgagcttcttcctcactctgtttcgaggccttagagtacagatgggtgtgcctttcactgagcaaatcatacagactttcctcaacatgtttaccagagagcagttagccgagagcatcctccacgagggcagcacaggctgccgggtggtggagaagtttctgaagatcctgcaggtggtggtccaggagccaggccaggtgttcaagcccttcctccccagcatcatcgccctgtgcatggagcaagtgtatcccatcattgccgagcgtccctcccctgatgtgaaggccgagctgtttgagctccttttccggacgctccatcacaactggaggtacttcttcaagtccaccgtgctggccagtgtccagagggggatcgctgaggagcagatggagaatgagccccagttcagtgccatcatgcaggctttcggacagtcctttctccagcccgacatccacctttttaaacaaaatctcttctacttggagactctcaacaccaagcagaagctgtaccacaagaagatcttccggactgccatgctgttccagtttgtgaacgtgctgctccaggtcctggtccacaagtcccatgatcttctgcaggaggagattggcatcgccatctacaacatggcctcagtcgactttgatggcttctttgccgccttcctcccagagttcctgaccagctgtgatggtgtggatgccaaccagaaaagtgtgctggggcggaatttcaagatggatcgggacctgccctcattcacccagaatgtgcacaggctggtcaacgacctgcgctactacagactctgcaacgacagcctgccccctggcactgtgaagctctaggcctgctactgcctggggacacggacttctgctgctgccacctgcgccagccctaccttccaccacagatgtctcccagatgggccttggtcacactccttggcttctcccaccgcaagcaacgctgcctgcctctgccgctcctccacatcttgccgctgcccagcagagctggcttctgggtccacctgagcactggacggtgctcccagggcgttggagcaggcggaggggtgtgtggccaggtactaggaggcaccaggaaatcccgcggggtggcccatgcagaccaggcgcacgtggctcatggggcagaattgccaaggacagctcacgacagtgccaccttctcaccattccagccaaggagagatgtgacgttggaactgctctggcacttctgtcaagcctcccccgccccaattgccttgagatctctgctctttgtcagagatttgcaaagactcacgtttttgttgttttctcatcattccattgtgatactaagaaactaagaagcttaatgaaaagaaataaaatgcctatgttgttgttctagaaa

SEQ ID NO: 345684 - DNA, 6864 bp, Homo sapiens
gcggccgcgcggtactagcgggcggctccagggcgggcgcgcgcaaggatgctctagggggcggcggcagtggccgtgtgggttgaggctgcgaggacagcgcgggcccccgggcctctcccctgagccggccgcctgggccgcgcggtcgaggcctgtcagcctccgcccgttcagcctcggggccggggccgccgccacctctgcccgcggaggccggggagcccctgcctgggcccgcagcctcccccgcgggggtcgggcccgggcgggggtcccgagcagctgccctcctcgccggcatccgagcctcatttcctgctttttcagtttccttggggaggggcgggtgggtctggatgaattgtctcggggtcccccgatgaggcgacccgggcggccctgccctttttagagggtcccctcggggcccggtggggaaggggttgtctttgcatgggtgggggacttcccgagtctgccgggaccatgacctgaactgtgcgagcgggacgtgtccgaagcccaagaaccagctcatctgagccgccccctccccggccagcatggcatctgaagaagcctctctcagggcattggaaagtctgatgacagaattttttcacgattgtacaaccaatgaaagaaaacgtgagatagaggagcttcttaataactttgcccagcaaataggagcctggagattctgcctgtactttctctccagcactaggaatgactatgtaatgatgtacagtttaacagtttttgagaatctgatcaataaaatgtggcttggggtcccatctcaggataagatggaaatccgtagctgtctgcccaaactccttttggctcaccataaaaccttaccttactttatccggaacaagctctgcaaagttattgttgatattggacgtcaggattggcccatgttctaccacgacttttttactaacattttacagttgatccagtcccctgtgacaaccccccttgggctgatcatgttgaagacaacttcagaagagctggcttgtccccgtgaggacctcagtgtggctcggaaggaggagttgcggaagctgctactggaccaggtgcagacagtgcttgggctactgacaggtatcttggagactgtctgggacaaacacagtgttactgctgccactccaccaccatccccgacctcaggagaaagtggtgacttactgagtaacctgttgcagagtcccagttcagccaaactgttgaatcagccaattcccatccttgatgtggagagtgagtatatctgttccctggctttggagtgcctggcccatctcttcagttggattcctctgtctgccagcatcaccccatccctccttaccaccatcttccactttgcacgatttggctgtgacatccgggccagaaagatggcgtcagttaacggcagcagccagaactgtgtctcgggtcaggagcgcggccggctgggggtcctggccatgtcctgcatcaatgaactcatgtccaagaactgtgtgcctatggaatttgaggagtatttactgcgtatgttccagcagactttctacctcctgcagaaaatcaccaaggataacaatgcccacacagtgaagagcaggctagaagagctcgatgagagctatatcgagaagtttactgactttcttcggctctttgtgagtgttcacctaagaagaatcgagtcttactcccagttccctgtggtggagtttttgacacttttgttcaagtacacatttcatcagcctactcatgaaggttacttctcttgtttggatatctggacgctgtttttggactatctgacaagtaaaattaaaagtcgtcttggagacaaggaagcagttctcaacaggtacgaagatgccctggtgctcctgctcacagaggtgttgaatcgaatccagttcagatacaaccaagcccagctggaggagttggatgatgagactctggatgacgatcagcagacggagtggcagcggtacttacggcagagcttggaggtggtggccaaagtgatggagctcctgcccacgcacgccttctccacactgttccctgttcttcaggacaatttagaagtttatttgggattacaacagtttatagtcacttcagggtcaggacacaggttgaacatcacggcggagaacgactgccggcggctgcactgctccctgagagacttgagctccctgctgcaggccgtgggccgcctggccgagtactttatcggggatgtgtttgctgcacggttcaatgatgccctcacagtcgtggaaaggttggtcaaagtcactctgtacggatctcagataaaattgtacaacattgaaactgctgtgccatcagtattgaaacctgacctcattgatgtgcatgctcagtccctggctgcgctgcaggcttactctcactggttagcacagtattgcagtgaagttcaccggcagaacacgcagcagttcgtgacactcatctctactaccatggatgcaatcacacctctaatcagcaccaaggtccaagacaagctgctgctatctgcgtgccacttactggtctcactggccaccaccgtgcggcccgtctttctgatcagcatccctgcagtgcagaaagtattcaacagaatcactgatgcctctgccctgcgacttgtcgataaggcccaggtgttggtgtgccgagccctctctaacatcttgctgcttccgtggccaaaccttccagagaatgagcagcagtggcccgtgcgctccatcaaccacgccagcctcatctctgcactctcccgggactatcgcaacctgaagcccagtgctgttgccccacagagaaagatgccactggatgacaccaaactgattatccaccagacactcagcgtcttagaagatattgtggagaatatctcgggggagtccaccaagtctcgacagatttgctaccagtcgctgcaggaatctgttcaggtctccctggccctctttccagcttttatccatcagtcagatgtgactgatgagatgctgagcttcttcctcactctgtttcgaggccttagagtacagatgggtgtgcctttcactgagcaaatcatacagactttcctcaacatgtttaccagagagcagttagccgagagcatcctccacgagggcagcacaggctgccgggtggtggagaagtttctgaagatcctgcaggtggtggtccaggagccaggccaggtgttcaagcccttcctccccagcatcatcgccctgtgcatggagcaagtgtatcccatcattgccgagcgtccctcccctgatgtgaaggccgagctgtttgagctccttttccggacgctccatcacaactggaggtacttcttcaagtccaccgtgctggccagtgtccagagggggatcgctgaggagcagatggagaatgagccccagttcagtgccatcatgcaggctttcggacagtcctttctccagcccgacatccacctttttaaacaaaatctcttctacttggagactctcaacaccaagcagaagctgtaccacaagaagatcttccggactgccatgctgttccagtttgtgaacgtgctgctccaggtcctggtccacaagtcccatgatcttctgcaggaggagattggcatcgccatctacaacatggcctcagtcgactttgatggcttctttgccgccttcctcccagagttcctgaccagctgtgatggtgtggatgccaaccagaaaagtgtgctggggcggaatttcaagatggatcgggtgaggagagaaagaggccgggctaagaggagggcagagtgggcacgcaagcctggcacctgtgcagcaaggagggggcacattgaggcctctgggcgtggtctgtgcccaccctgcagcttggcggcagctcacgagatgcctgctgacctggtgctgtagcctgattgaggggcacagccttttccccagtcttggtgtctgtagcacgtatgttcttagtctcagccatggaggtcccgagttcctggctctgcagcccctccatttgtcttggcatctttgttcatacccaggaccctgccgttctccctcctgggtgatgagccccggtggggccagcattggagtgtgcccaggcttgcattcaggctgagatggttggtgcttgggagctgcacttctgggtccccagggttagaggtgggacccaggttccccggctgtcttgggctctttccagaccagccccagctcagcttgggctgagttgctgccaggtcctgggaggagccctcctagtactcaccctcttgtcccactgctgccacctgtgcagggactgtcaggtgggctgtccccacccgtgcagcacctcggtgggagctgggtgctgctggctcttggtgtccatgaggccatcttgttggagcctgacagtgcctgggacctccttccccatggggctcacctgttctcttcttcctgtgtcaggtgaccaggcctctctcttgcctgataggaacttctgggaacttttccttgtaccgttttatacttgatgaaattaggaaaagaaatcgctttctccctggtcctcttggggttcttgacctgagtcctctgtgaagcagcttgtccacggctccaccgtagtgctcagatgcacacactgctctcactggtacaaacctggccgcctgctttcctcatttgccacgtgtggcagggaagcttttgcttagactcatcctgttctcctttgtcttggggtcttccttttcttgggacttgttctctcctaagcctcttccagttcacttcagcccctggatatgttttttcctttttctagaggccagatcctaatacttaatgatcagcttctaacgacatcaatatcagtcaactttttgatttaaagctgtggtttcaaaatctagttataggccaggcgcggtgtctcacacctgtaatctcagcactttgggaggccaaggcgggcggatcacttgaggttagggggtttgagaccagcctggccaacatggcgaaaccctgtctctactaaaaataaaaaaaattagtcaggtgtggtggcacacgcctgtaatcccagctgcttgggaggctgaggcacaagaatctcttgaacccgggaggcagaggttgcagtgagcggaggttgtgccactgcactccagcctgggcggcagagtgggactttgtctcaaaaaaaaaaatctagttatatcagaagcacctggggtacttattaaaaatggagaaacagacttctgtgttctacccaggaaattctggtttggcatttgggagccactgatttaaaagacatcccttagttggttttttgagggtaaaataaaagaatcaccaccttccattcagtcacgcactgtgtgtttgaagccagctgcttctcaagccccgggccaggaactggggcaccagtcccagccttcaccaagtctttcatggtagacaggccaatacagcaccctctgtggaccacatagtgccaagcatgtgacatgtcttggctcgagtaagccttctaacaagcctctgaagtgtgggtcctgttactcccccatttcacagatggtgggggctcagaaggtgagcagttcacagaacttggaagtggtagagctgcgaagcaggaggcagacctgggtgttctggccccagagcctgcacacactccccagaagcagattgctcaggacagaggcgctgagctggctgctggggccaggaaataggaggcatctgtgcagactttgggaagaggcaggctttgaatggagttctggaagaggaatagtggttgggcaggaaaatgaacttggtcctgctcatggctctgctggggcttgctgggcctgtttgagtcctcaccgggacctacactgaaaaaaaaagcagggtctcaccgtgtgcatgatggcggaggtcagggcctcacttctggcccagggccttccatggcccacgctgcgcccagtgggacaggccttgggactgtgtttgctgctgctcgggtggctctcgaggggcaggggcggcctggagccccgtgggtaaaggttctgcagacattgctcggtgtgcgcgtcacctcaaggggccatggtgaagaagagggctgtcaccacagccatgtctgcgtttgaggggccggactcaggagcaagtgtgctggtctcttcagtgtgagctggggccagcttcttcatggtgcagcgctttggtctttctgtccttagactagtggttctggtagggcttggtggcagccttgtggtgaggactcagtgagttgatgtctgtatgttgattgcagcagtgtctggcacccgagaggccctagggacgtattcctcttgttctttttctcccacagcgcctggcacagagtctctgtgacacgcagtgcaacagtgaatagaagttttgagttttagaaagtgctcccctatcttcagtgcacactctgggatggaagtagctgttggggtctggtgggtgggtgacctggtgtgttgttggctgcagctatgcccctgccttccaggacctgccctcattcacccagaatgtgcacaggctggtcaacgacctgcgctactacagactctgcaacgacagcctgccccctggcactgtgaagctctaggcctctctcttgcctgataggaacttctgggaacttttccttgtaccgttttatacttgatgaaattaggaaaagaaatcgctttctccctggtcctcttgg

SEQ ID NO: 345685 - DNA, 3392 bp, Homo sapiens
gcggccgcgcggtactagcgggcggctccagggcgggcgcgcgcaaggatgctctagggggcggcggcagtggccgtgtgggttgaggctgcgaggacagcgcgggcccccgggcctctcccctgagccggccgcctgggccgcgcggtcgaggcctgtcagcctccgcccgttcagcctcggggccggggccgccgccacctctgcccgcggaggccggggagcccctgcctgggcccgcagcctcccccgcgggggtcgggcccgggcgggggtcccgagcagctgccctcctcgccggcatccgagcctcatttcctgctttttcagtttccttggggaggggcgggtgggtctggatgaattgtctcggggtcccccgatgaggcgacccgggcggccctgccctttttagagggtcccctcggggcccggtggggaaggggttgtctttgcatgggtgggggacttcccgagtctgccgggaccatgacctgaactgtgcgagcgggacgtgtccgaagcccaagaaccagctcatctgagccgccccctccccggccagcatggcatctgaagaagcctctctcagggcattggaaagtctgatgacagaattttttcacgattgtacaaccaatgaaagaaaacgtgagatagaggagcttcttaataactttgcccagcaaataggagcctggagattctgcctgtactttctctccagcactaggaatgactatgtaatgatgtacagtttaacagtttttgagaatctgatcaataaaatgtggcttggggtcccatctcaggataagatggaaatccgtagctgtctgcccaaactccttttggctcaccataaaaccttaccttactttatccggaacaagctctgcaaagttattgttgatattggacgtcaggattggcccatgttctaccacgacttttttactaacattttacagttgatccagtcccctgtgacaaccccccttgggctgatcatgttgaagacaacttcagaagagctggcttgtccccgtgaggacctcagtgtggctcggaaggaggagttgcggaagctgctactggaccaggtgcagacagtgcttgggctactgacaggtatcttggagactgtctgggacaaacacagtgttactgctgccactccaccaccatccccgacctcaggagaaagtggtgacttactgagtaacctgttgcagagtcccagttcagccaaactgttgaatcagccaattcccatccttgatgtggagagtgagtatatctgttccctggctttggagtgcctggcccatctcttcagttggattcctctgtctgccagcatcaccccatccctccttaccaccatcttccactttgcacgatttggctgtgacatccgggccagaaagatggcgtcagttaacggcagcagccagaactgtgtctcgggtcaggagcgcggccggctgggggtcctggccatgtcctgcatcaatgaactcatgtccaagaactgtgtgcctatggaatttgaggagtatttactgcgtatgttccagcagactttctacctcctgcagaaaatcaccaaggataacaatgcccacacagtgaagagcaggctagaagagctcgatgagagctatatcgagaagtttactgactttcttcggctctttgtgagtgttcacctaagaagaatcgagtcttactcccagttccctgtggtggagtttttgacacttttgttcaagtacacatttcatcagcctactcatgaaggttacttctcttgtttggatatctggacgctgtttttggactatctgacaagtaaaattaaaagtcgtcttggagacaaggaagcagttctcaacaggtacgaagatgccctggtgctcctgctcacagaggtgttgaatcgaatccagttcagatacaaccaagcccagctggaggagttggatgatgagactctggatgacgatcagcagacggagtggcagcggtacttacggcagagcttggaggtggtggccaaagtgatggagctcctgcccacgcacgccttctccacactgttccctgttcttcaggacaatttagaagtttatttgggattacaacagtttatagtcacttcagggtcaggacacaggttgaacatcacggcggagaacgactgccggcggctgcactgctccctgagagacttgagctccctgctgcaggccgtgggccgcctggccgagtactttatcggggatgtgtttgctgcacggttcaatgatgccctcacagtcgtggaaaggttggtcaaagtcactctgtacggatctcagataaaattgtacaacattgaaactgctgtgccatcagtattgaaacctgacctcattgatgtgcatgctcagtccctggctgcgctgcaggcttactctcactggttagcacagtattgcagtgaagttcaccggcagaacacgcagcagttcgtgacactcatctctactaccatggatgcaatcacacctctaatcagcaccaaggtccaagacaagctgctgctatctgcgtgccacttactggtctcactggccaccaccgtgcggcccgtctttctgatcagcatccctgcagtgcagaaagtattcaacagaatcactgatgcctctgccctgcgacttgtcgataaggcccaggtgttggtgtgccgagccctctctaacatcttgctgcttccgtggccaaaccttccagagaatgagcagcagtggcccgtgcgctccatcaaccacgccagcctcatctctgcactctcccgggactatcgcaacctgaagcccagtgctgttgccccacagagaaagatgccactggatgacaccaaactgattatccaccagacactcagcgtcttagaagatattgtggagaatatctcgggggagtccaccaagtctcgacagatttgctaccagtcgctgcaggaatctgttcaggtctccctggccctctttccagcttttatccatcagtcagatgtgactgatgagatgctgagcttcttcctcactctgtttcgaggccttagagtacagatgggtgtgcctttcactgagcaaatcatacagactttcctcaacatgtttaccagagagcagttagccgagagcatcctccacgagggcagcacaggctgccgggtggtggagaagtttctgaagatcctgcaggtggtggtccaggagccaggccaggtgttcaagcccttcctccccagcatcatcgccctgtgcatggagcaagtgtatcccatcattgccgagcgtccctccttgatggaagcgtcgcgcatggtaccgagctac

SEQ ID NO: 345686 - DNA, 2342 bp, Homo sapiens
gcggccgcgcggtactagcgggcggctccagggcgggcgcgcgcaaggatgctctagggggcggcggcagtggccgtgtgggttgaggctgcgaggacagcgcgggcccccgggcctctcccctgagccggccgcctgggccgcgcggtcgaggcctgtcagcctccgcccgttcagcctcggggccggggccgccgccacctctgcccgcggaggccggggagcccctgcctgggcccgcagcctcccccgcgggggtcgggcccgggcgggggtcccgagcagctgccctcctcgccggcatccgagcctcatttcctgctttttcagtttccttggggaggggcgggtgggtctggatgaattgtctcggggtcccccgatgaggcgacccgggcggccctgccctttttagagggtcccctcggggcccggtggggaaggggttgtctttgcatgggtgggggacttcccgagtctgccgggaccatgacctgaactgtgcgagcgggacgtgtccgaagcccaagaaccagctcatctgagccgccccctccccggccagcatggcatctgaagaagcctctctcagggcattggaaagtctgatgacagaattttttcacgattgtacaaccaatgaaagaaaacgtgagatagaggagcttcttaataactttgcccagcaaataggagcctggagattctgcctgtactttctctccagcactaggaatgactatgtaatgatgtacagtttaacagtttttgagaatctgatcaataaaatgtggcttggggtcccatctcaggataagatggaaatccgtagctgtctgcccaaactccttttggctcaccataaaaccttaccttactttatccggaacaagctctgcaaagttattgttgatattggacgtcaggattggcccatgttctaccacgacttttttactaacattttacagttgatccagtcccctgtgacaaccccccttgggctgatcatgttgaagacaacttcagaagagctggcttgtccccgtgaggacctcagtgtggctcggaaggaggagttgcggaagctgctactggaccaggtgcagacagtgcttgggctactgacaggtatcttggagactgtctgggacaaacacagtgttactgctgccactccaccaccatccccgacctcaggagaaagtggtgacttactgagtaacctgttgcagagtcccagttcagccaaactgttgaatcagccaattcccatccttgatgtggagagtgagtatatctgttccctggctttggagtgcctggcccatctcttcagttggattcctctgtctgccagcatcaccccatccctccttaccaccatcttccactttgcacgatttggctgtgacatccgggccagaaagatggcgtcagttaacggcagcagccagaactgtgtctcgggtcaggagcgcggccggctgggggtcctggccatgtcctgcatcaatgaactcatgtccaagaactgtgtgcctatggaatttgaggagtatttactgcgtatgttccagcagactttctacctcctgcagaaaatcaccaaggataacaatgcccacacagtgaagagcaggctagaagagctcgatgagagctatatcgagaagtttactgactttcttcggctctttgtgagtgttcacctaagaagaatcgagtcttactcccagttccctgtggtggagtttttgacacttttgttcaagtacacatttcatcagcctactcatgaaggttacttctcttgtttggatatctggacgctgtttttggactatctgacaagtaaaattaaaagtcgtcttggagacaaggaagcagttctcaacagaacgctgcctgcctctgccgctcctccacatcttgccgctgcccagcagagctggcttctgggtccacctgagcactggacggtgctcccagggcgttggagcaggcggaggggtgtgtggccaggtactaggaggcaccaggaaatcccgcggggtggcccatgcagaccaggcgcacgtggctcatggggcagaattgccaaggacagctcacgacagtgccaccttctcaccattccagccaaggagagatgtgacgttggaactgctctggcacttctgtcaagcctcccccgccccaattgccttgagatctctgctctttgtcagagatttgcaaagactcacgtttttgttgttttctcatcattccattgtgatactaagaaactaagaagcttaatgaaaagaaataaaatgcctatgttgttgttctagaaa

SEQ ID NO: 345687 - DNA, 2915 bp, Homo sapiens
gcggccgcgcggtactagcgggcggctccagggcgggcgcgcgcaaggatgctctagggggcggcggcagtggccgtgtgggttgaggctgcgaggacagcgcgggcccccgggcctctcccctgagccggccgcctgggccgcgcggtcgaggcctgtcagcctccgcccgttcagcctcggggccggggccgccgccacctctgcccgcggaggccggggagcccctgcctgggcccgcagcctcccccgcgggggtcgggcccgggcgggggtcccgagcagctgccctcctcgccggcatccgagcctcatttcctgctttttcagtttccttggggaggggcgggtgggtctggatgaattgtctcggggtcccccgatgaggcgacccgggcggccctgccctttttagagggtcccctcggggcccggtggggaaggggttgtctttgcatgggtgggggacttcccgagtctgccgggaccatgacctgaactgtgcgagcgggacgtgtccgaagcccaagaaccagctcatctgagccgccccctccccggccagcatggcatctgaagaagcctctctcagggcattggaaagtctgatgacagaattttttcacgattgtacaaccaatgaaagaaaacgtgagatagaggagcttcttaataactttgcccagcaaataggagcctggagattctgcctgtactttctctccagcactaggaatgactatgtaatgatgtacagtttaacagtttttgagaatctgatcaataaaatgtggcttggggtcccatctcaggataagatggaaatccgtagctgtctgcccaaactccttttggctcaccataaaaccttaccttactttatccggaacaagctctgcaaagttattgttgatattggacgtcaggattggcccatgttctaccacgacttttttactaacattttacagttgatccagtcccctgtgacaaccccccttgggctgatcatgttgaagacaacttcagaagagctggcttgtccccgtgaggacctcagtgtggctcggaaggaggagttgcggaagctgctactggaccaggtgcagacagtgcttgggctactgacaggtatcttggagactgtctgggacaaacacagtgttactgctgccactccaccaccatccccgacctcaggagaaagtggtgacttactgagtaacctgttgcagagtcccagttcagccaaactgttgaatcagccaattcccatccttgatgtggagagtgagtatatctgttccctggctttggagtgcctggcccatctcttcagttggattcctctgtctgccagcatcaccccatccctccttaccaccatcttccactttgcacgatttggctgtgacatccgggccagaaagatggcgtcagttaacggcagcagccagaactgtgtctcgggtcaggagcgcggccggctgggggtcctggccatgtcctgcatcaatgaactcatgtccaagaactgtgtgcctatggaatttgaggagtatttactgcgtatgttccagcagactttctacctcctgcagaaaatcaccaaggataacaatgcccacacagtgaagagcaggctagaagagctcgatgagagctatatcgagaagtttactgactttcttcggctctttgtgagtgttcacctaagaagaatcgagtcttactcccagttccctgtggtggagtttttgacacttttgttcaagtacacatttcatcagcctactcatgaaggttacttctcttgtttggatatctggacgctgtttttggactatctgacaagtaaaattaaaagtcgtcttggagacaaggaagcagttctcaacaggtacgaagatgccctggtgctcctgctcacagaggtgttgaatcgaatccagttcagatacaaccaagcccagctggaggagttggatgatgagactctggatgacgatcagcagacggagtggcagcggtacttacggcagagcttggaggtggtggccaaagtgatggagctcctgcccacgcacgccttctccacactgttccctgttcttcaggacaatttagaagtttatttgggattacaacagtttatagtcacttcagggtcaggacacaggttgaacatcacggcggagaacgactgccggcggctgcactgctccctgagagacttgagctccctgctgcaggccgtgggccgcctggccgagtactttatcggggatgtgtttgctgcacggttcaatgatgccctcacagtcgtggaaaggttggtcaaagtcactctgtacggatctcagataaaattgtacaacattgaaactgctgtgccatcagtattgaaacctgacctcattgatgtgcatgctcagtccctggctgcgctgcaggcttactctcactggttagcacagtattgcagtgaagttcaccggcagaacacgcagcagttcgtgacactcatctctactaccatggatgcaatcacacctctaatcagcaccaaggtccaagacaagctgctgctatctgcgtgccacttactggtctcactggccaccaccgtgcggcccgtctttctgatcagcatccctgcagtgcagaaagtattcaacagaatcactgatgcctctgccctgcgacttgtcgataagagaatgagcagcagtggcccgtgcgctccatcaaccacgccagcctcatctctgcactctcccgggactatcgcaacctgaagcccagtgctgttgccccacagagaaagatgccactggatgacatctttcactcagcattgtttgtgagtcatcatgtttttaggatagcagtagtagttcattgatttttcagtg

SEQ ID NO: 345688 - DNA, 2645 bp, Homo sapiens
gcggccgcgcggtactagcgggcggctccagggcgggcgcgcgcaaggatgctctagggggcggcggcagtggccgtgtgggttgaggctgcgaggacagcgcgggcccccgggcctctcccctgagccggccgcctgggccgcgcggtcgaggcctgtcagcctccgcccgttcagcctcggggccggggccgccgccacctctgcccgcggaggccggggagcccctgcctgggcccgcagcctcccccgcgggggtcgggcccgggcgggggtcccgagcagctgccctcctcgccggcatccgagcctcatttcctgctttttcagtttccttggggaggggcgggtgggtctggatgaattgtctcggggtcccccgatgaggcgacccgggcggccctgccctttttagagggtcccctcggggcccggtggggaaggggttgtctttgcatgggtgggggacttcccgagtctgccgggaccatgacctgaactgtgcgagcgggacgtgtccgaagcccaagaaccagctcatctgagccgccccctccccggccagcatggcatctgaagaagcctctctcagggcattggaaagtctgatgacagaattttttcacgattgtacaaccaatgaaagaaaacgtgagatagaggagcttcttaataactttgcccagcaaataggagcctggagattctgcctgtactttctctccagcactaggaatgactatgtaatgatgtacagtttaacagtttttgagaatctgatcaataaaatgtggcttggggtcccatctcaggataagatggaaatccgtagctgtctgcccaaactccttttggctcaccataaaaccttaccttactttatccggaacaagctctgcaaagttattgttgatattggacgtcaggattggcccatgttctaccacgacttttttactaacattttacagttgatccagtcccctgtgacaaccccccttgggctgatcatgttgaagacaacttcagaagagctggcttgtccccgtgaggacctcagtgtggctcggaaggaggagttgcggaagctgctactggaccaggtgcagacagtgcttgggctactgacaggtatcttggagactgtctgggacaaacacagtgttactgctgccactccaccaccatccccgacctcaggagaaagtggtgacttactgagtaacctgttgcagagtcccagttcagccaaactgttgaatcagccaattcccatccttgatgtggagagtgagtatatctgttccctggctttggagtgcctggcccatctcttcagttggattcctctgtctgccagcatcaccccatccctccttaccaccatcttccactttgcacgatttggctgtgacatccgggccagaaagatggcgtcagttaacggcagcagccagaactgtgtctcgggtcaggagcgcggccggctgggggtcctggccatgtcctgcatcaatgaactcatgtccaagaactgtgtgcctatggaatttgaggagtatttactgcgtatgttccagcagactttctacctcctgcagaaaatcaccaaggataacaatgcccacacagtgaagagcaggctagaagagctcgatgagagctatatcgagaagtttactgactttcttcggctctttgtgagtgttcacctaagaagaatcgagtcttactcccagttccctgtggtggagtttttgacacttttgttcaagtacacatttcatcagcctactcatgaaggttacttctcttgtttggatatctggacgctgtttttggactatctgacaagtaaaattaaaagtcgtcttggagacaaggaagcagttctcaacaggtacgaagatgccctggtgctcctgctcacagaggtgttgaatcgaatccagttcagatacaaccaagcccagctggaggagttggatgatgagactctggatgacgatcagcagacggagtggcagcggtacttacggcagagcttggaggtggtggccaaagtgatggagctcctgcccacgcacgccttctccacactgttccctgttcttcaggacaatttagaagtttatttgggattacaacagtttatagtcacttcagggtcaggacacaggttgaacatcacggcggagaacgactgccggcggctgcactgctccctgagagacttgagctccctgctgcaggccgtgggccgcctggccgagtactttatcggggatgtgtttgctgcacggttcaatgatgccctcacagtcgtggaaaggttggtcaaagtcactctgtacggatctcagataaaattgtacaacattgaaactgctgtgccatcagtattgaaacctgacctcattgatgtgcatgctcagtccctggctgcgctgcaggcttactctcactggttagcacagtattgcagtgaagttcaccggcagaacacgcagcagttcgtgacactcatctctactaccatggatgcaatcacacctctaatcagcaccaagtccagaaagctgtgatatcggtggcattatggttctggcaccacgtggcggtttggtcagtcggggcaagttcca

SEQ ID NO: 345689 - DNA, 2203 bp, Homo sapiens
gcggccgcgcggtactagcgggcggctccagggcgggcgcgcgcaaggatgctctagggggcggcggcagtggccgtgtgggttgaggctgcgaggacagcgcgggcccccgggcctctcccctgagccggccgcctgggccgcgcggtcgaggcctgtcagcctccgcccgttcagcctcggggccggggccgccgccacctctgcccgcggaggccggggagcccctgcctgggcccgcagcctcccccgcgggggtcgggcccgggcgggggtcccgagcagctgccctcctcgccggcatccgagcctcatttcctgctttttcagtttccttggggaggggcgggtgggtctggatgaattgtctcggggtcccccgatgaggcgacccgggcggccctgccctttttagagggtcccctcggggcccggtggggaaggggttgtctttgcatgggtgggggacttcccgagtctgccgggaccatgacctgaactgtgcgagcgggacgtgtccgaagcccaagaaccagctcatctgagccgccccctccccggccagcatggcatctgaagaagcctctctcagggcattggaaagtctgatgacagaattttttcacgattgtacaaccaatgaaagaaaacgtgagatagaggagcttcttaataactttgcccagcaaataggagcctggagattctgcctgtactttctctccagcactaggaatgactatgtaatgatgtacagtttaacagtttttgagaatctgatcaataaaatgtggcttggggtcccatctcaggataagatggaaatccgtagctgtctgcccaaactccttttggctcaccataaaaccttaccttactttatccggaacaagctctgcaaagttattgttgatattggacgtcaggattggcccatgttctaccacgacttttttactaacattttacagttgatccagtcccctgtgacaaccccccttgggctgatcatgttgaagacaacttcagaagagctggcttgtccccgtgaggacctcagtgtggctcggaaggaggagttgcggaagctgctactggaccaggtgcagacagtgcttgggctactgacaggtatcttggagactgtctgggacaaacacagtgttactgctgccactccaccaccatccccgacctcaggagaaagtggtgacttactgagtaacctgttgcagagtcccagttcagccaaactgttgaatcagccaattcccatccttgatgtggagagtgagtatatctgttccctggctttggagtgcctggcccatctcttcagttggattcctctgtctgccagcatcaccccatccctccttaccaccatcttccactttgcacgatttggctgtgacatccgggccagaaagatggcgtcagttaacggcagcagccagaactgtgtctcgggtcaggagcgcggccggctgggggtcctggccatgtcctgcatcaatgaactcatgtccaagaactgtgtgcctatggaatttgaggagtatttactgcgtatgttccagcagactttctacctcctgcagaaaatcaccaaggataacaatgcccacacagtgaagagcaggctagaagagctcgatgagagctatatcgagaagtttactgactttcttcggctctttgtgagtgttcacctaagaagaatcgagtcttactcccagttccctgtggtggagtttttgacacttttgttcaagtacacatttcatcagcctactcatgaaggttacttctcttgtttggatatctggacgctgtttttggactatctgacaagtaaaattaaaagtcgtcttggagacaaggaagcagttctcaacaggtacgaagatgccctggtgctcctgctcacagaggtgttgaatcgaatccagttcagatacaaccaagcccagctggaggagttggatgatgagactctggatgacgatcagcagacggagtggcagcggtacttacggcagagcttggaggtggtggccaaagtgatggagctcctgcccacgcacgccttctccacactgttccctgttcttcaggacaatttagaagtttatttgggattcgacgataaatgtcaacaccagggtcaggaaacgaatgattacaggtacagagctgattc

SEQ ID NO: 345690 - DNA, 1741 bp, Homo sapiens
gcggccgcgcggtactagcgggcggctccagggcgggcgcgcgcaaggatgctctagggggcggcggcagtggccgtgtgggttgaggctgcgaggacagcgcgggcccccgggcctctcccctgagccggccgcctgggccgcgcggtcgaggcctgtcagcctccgcccgttcagcctcggggccggggccgccgccacctctgcccgcggaggccggggagcccctgcctgggcccgcagcctcccccgcgggggtcgggcccgggcgggggtcccgagcagctgccctcctcgccggcatccgagcctcatttcctgctttttcagtttccttggggaggggcgggtgggtctggatgaattgtctcggggtcccccgatgaggcgacccgggcggccctgccctttttagagggtcccctcggggcccggtggggaaggggttgtctttgcatgggtgggggacttcccgagtctgccgggaccatgacctgaactgtgcgagcgggacgtgtccgaagcccaagaaccagctcatctgagccgccccctccccggccagcatggcatctgaagaagcctctctcagggcattggaaagtctgatgacagaattttttcacgattgtacaaccaatgaaagaaaacgtgagatagaggagcttcttaataactttgcccagcaaataggagcctggagattctgcctgtactttctctccagcactaggaatgactatgtaatgatgtacagtttaacagtttttgagaatctgatcaataaaatgtggcttggggtcccatctcaggataagatggaaatccgtagctgtctgcccaaactccttttggctcaccataaaaccttaccttactttatccggaacaagctctgcaaagttattgttgatattggacgtcaggattggcccatgttctaccacgacttttttactaacattttacagttgatccagtcccctgtgacaaccccccttgggctgatcatgttgaagacaacttcagaagagctggcttgtccccgtgaggacctcagtgtggctcggaaggaggagttgcggaagctgctactggaccaggtgcagacagtgcttgggctactgacaggtatcttggagactgtctgggacaaacacagtgttactgctgccactccaccaccatccccgacctcaggagaaagtggtgacttactgagtaacctgttgcagagtcccagttcagccaaactgttgaatcagccaattcccatccttgatgtggagagtgagtatatctgttccctggctttggagtgcctggcccatctcttcagttggattcctctgtctgccagcatcaccccatccctccttaccaccatcttccactttgcacgatttggctgtgacatccgggccagaaagatggcgtcagttaacggcagcagccagaactgtgtctcgggtcaggagcgcggccggctgggggtcctggccatgtcctgcatcaatgaactcatgtccaagaactgtgtgcctatggaatttgaggagtatttactgcgtatgttccagcagactttctacctcctgcagaaaatcaccaaggataacaatgcccacacagtgaagagcaggctagaagagctcgatgagagaatatggggctcctggtgaggaacagaaaggtaggtgtgtgccagtaagtctgagattagctggaagggcttgggtgg

SEQ ID NO: 345691 - DNA, 691 bp, Homo sapiens
ggcctctcactgattgattgtgttgagagtgttagcaattagaacttctaaaatggatttgcacaaataaaatttcaattttctcttttacttactggtttataaaatgttgctttgtttaaaatgaagttgttgactgctttaaaaagtttgataaccactgagcgaaagtaattatattcaaattatggagtttcaaacatttgccagaagctaagggagcagctggactttctgcttgaaacctcattaataggtgactgtctaccctgcatatggatacaactgtccaggtacccatcatgcaaaagtttatttaaaaactaattaacatattatattgtccagacagttttcagtgatttcattcacatttaacaatgatactcttttcttcgggcagaatttcccaaaacccagcaaggactccactgatggaaaatgagatgggttagtgggtacatggatgaatgttttaaaagtttaatggttttatatttactattacagttgtcttctctttgtggtaagaaatgctgaattttttactatcatttataatgttaatcaaaattttcttttaaaaattaattcaagtaaaaatagagtaaaacatcctacctaagtgataatttagaagatacttagatgttgccaaaattgtgaaggtgaagccagaaagactaaagtt

SEQ ID NO: 345692 - DNA, 755 bp, Homo sapiens
cccgtggcatttctgagtcacatatttccagcatgcctagtgcatggtcagacactgtgttaggtgctttttcattgatccacacagccgttgggagggaaggatgaaaaccaacattctacagataaggcaacaggagctctgcagggttgtaccatacacccaaggtcacttagctaagaaggaacactggggatttggacccaggtcctcttctctttaccccacccagtacttcagtcaactcaatcatcatcacaaccatgcctgtccctcacctcaattcatacatccttggtagagtcaccatgaattcagctttgctctggcatgaagatattccatactaggcaactgaattgaatttgtgattaaaatggaaacttactagaaatctcatcagggagagtgctctgagttttcttagattcttatatttgtccatttggcattcattcatcacagggccaattgtattaactgattttttatattctaaggagcatgcctttcatatgctaactaaccaatccagagctgcaaacatctcctttattaaataaactctcacaccccagatcaatattttccctgctctaaatcaacccagggctacgtaccagacaacccagagttcttcaaatcagccagtcctaaactgttcgccatcttgccatgcctttcccacagaaaaacacaataaaggctctgatctaagctttccccacatgccctctgcttctaaccaactgacc

SEQ ID NO: 345693 - DNA, 398 bp, Homo sapiens
tgttcggatggcacaagtcaccacctctagaagcaaaaacttcaacctcctgtgtatctgaggcacctcgccctgactggtaaagcaaagaaactggataggagaaggcctgtgttgagggcatcaatggctaactgtcagcagggacaacagccattatcccatatccagtgagtacaacagacttgctgcagttttacatccagttcactgatcaactatcaaactgaaggatagcttgtcactgcatctgcagtgactcacttgccttggggaaaaatacatgtcacacatttacattttggcttttaagtgaggaaacttcatggttttcagaacagagtaagattcttgaaaactaaaacaataaatccaatgctgattgtgaaaaatgatga

SEQ ID NO: 345694 - DNA, 463 bp, Homo sapiens
tgttcggatggcacaagtcaccacctctagaagcaaaaacttcaacctcctgtgtatctgaggcacctcgccctgactggtaaagcaaagaaactggataggagaaggcctgtgttgagggcatcaatggctaactgtcagcagggacaacagccattatcccatatccagtgagtacaacagcatgaagtcttgctaccttgccagatgctatcaccatgcccttggacttcccaacctccaggattacttgctgcagttttacatccagttcactgatcaactatcaaactgaaggatagcttgtcactgcatctgcagtgactcacttgccttggggaaaaatacatgtcacacatttacattttggcttttaagtgaggaaacttcatggttttcagaacagagtaagattcttgaaaactaaaacaataaatccaatgctgattgtgaaaaatgatga

SEQ ID NO: 345695 - DNA, 568 bp, Homo sapiens
aatttataaagaaaggaagtttaattggctcatggttctgcagggtgtacaggaagcatggtgctggcatctgcttctggtaagggttcaggaagcttacaatcatagtggaagatgaaggggtagtatgcacatcacatggtgagagcaggagcaagagagggaggtgagagatgccacacactgttaaacaaccagatctctcatgaactcactcatcaccaaggggatgtcactaaaccattcataaaccattcatgagggatatgcccccaatgatccaagcacctcccaccaggtcccaccttcaacactggggttacatttcaacatgagatttggaggagacaaatatccaaattttatcagcgtttttagtgaattccttaggattttctatatataagatcatgacatctgcaatagaggtagttttagtcttcctttccaatctgtgaatgcctgttacttattttccttgcctagttgccatggctagaacctctagtatcatgtcaaatatcagtgatgagtgcagatccttgtcttgttcctaatcttagggaga

SEQ ID NO: 345696 - DNA, 513 bp, Homo sapiens
aatttataaagaaaggaagtttaattggctcatggttctgcagggtgtacaggaagcatggtgctggcatctgcttctggtaagggttcaggaagcttacaatcatagtggaagatgaaggggtagtatgcacatcacatggtgagagcaggagcaagagagggaggtgagagatgccacacactgttaaacaaccagatctctcatgaactcactcatcaccaaggggatgtcactaaaccattcataaaccattcatgagggatatgcccccaatgatccaagcacctcccaccaggtcccaccttcaacaccgtttttagtgaattccttaggattttctatatataagatcatgacatctgcaatagaggtagttttagtcttcctttccaatctgtgaatgcctgttacttattttccttgcctagttgccatggctagaacctctagtatcatgtcaaatatcagtgatgagtgcagatccttgtcttgttcctaatcttagggaga

SEQ ID NO: 345697 - DNA, 288 bp, Homo sapiens
ggagagtaaaatagctaatgaaggattataaagcactttgctaatataaaatgcaacatcaaagctgaataataatcttaatttagggtgaagggttccattagcagagtaaaaataaaaaggacaaagggtagtgttgctttgtaccttgataacagtgtacaaatcaaaagtgctgctattgatcctcattgccctgtgaactctcaacccaggaatttggctcccctccctaactctctaagtacttcccttacccactcagtgtggtgatggcacctccctgaa

SEQ ID NO: 345698 - DNA, 421 bp, Homo sapiens
ctcccaaagtgctaggattacaggcatgagccacggtgtccggcctattgtgtaactttttaaattaaaaatgacagcataatatgtcaaacaagagataacaccttgtcatgttagtacctacatctccggcatttatttttaacagctgcatagaatactcttgcatcagtatatcatcatttaatcctgtattaatgtacacttgagggtggtttttccactaatttttcctattaaacagactgctgaaataaaaacctttggagacccaagaaaaattttacttgtaaatctgtaactgtatacacatatgtatatacgtatacacacacgtatatgtgtacatattagatgctcagttggatatggttctagaagtggaattgcaaaataaaaacatatttacaacttgcttacc

SEQ ID NO: 345699 - DNA, 4583 bp, Homo sapiens
gcggtggcggtggcggccgcgtcccggcggcagtcgtgctacctgtgtgacctgccccgcatgccctgggccatgatctgggacttcaccgaacccgtctgccgcggctgcgtcaactacgagggcgccgaccgcgtcgagttcgtcatcgagacggcgcggcagctcaagcgggcgcacggctgcttcccggagggtcgctccccacccggcgccgcggccccggccgccgccaagccgccgccgctctccgccaaggacatccttttgcagcagcagcagcagcttggccacggcggccccgaggcggccccgcgcgcgccgcaggccttggagcgctacccgttggcggccgcggccgagaggcccccgcgcctcggctctgacttcggcagcagccgcccggcagcgagcctggcccagccgccgacgccgcagccgccgcccgtgaacggcatcctggtgcccaacggcttctccaagctagaggagccgcccgagctgaatcgccagagcccgaacccgcggcgcggccacgcggtgccgcccaccctggtgccgctcatgaacggctcggccacgccgctgcccaccgcgctcggcctcggcggccgcgctgccgcctccttagccgcggtgtccggaaccgcggccgccagcctgggctccgcgcagcccaccgatctgggcgcccacaagcggccggcatccgtgtcgagcagcgctgccgtggagcacgagcagcgtgaggcggcagccaaggagaaacaaccgccgccgcctgcgcaccggggcccggccgacagcctgtccaccgcggccggggccgccgagctgagcgcggaaggtgcgggcaagagccgcgggtctggagagcaggactgggtcaacaggcccaagaccgtgcgcgacacgctgctggcgctgcaccagcacggccactcggggcccttcgagagcaagtttaagaaggagccggccctgactgcagttgcaagaacagcaaggaaaaggaagccctctccagaaccagaaggtgaagtcgggccccctaagatcaacggagaggcccagccgtggctgtccacatccacagaggggctcaagatccccatgactcctacatcctcttttgtgtctccgccaccacccactgcctcacctcattccaaccggaccacaccgcctgaagcggcccagaatggccagtcccccatggcagccctgatcttagtagcagacaatgcagggggcagtcatgcctcaaaagatgccaaccaggttcactccactaccaggaggaatagcaacagtccgccctctccgtcctctatgaaccaaagaaggctgggccccagagaggtggggggccagggagcaggcaacacaggaggactggagccagtgcaccctgccagcctcccggactcctctctggcaaccagtgccccgctgtgctgcaccctctgccacgagcggctggaggacacccattttgtgcagtgcccgtccgtcccttcgcacaagttctgcttcccttgctccagacaaagcatcaaacagcagggagctagtggagaggtctattgtcccagtggggaaaaatgccctcttgtgggctccaatgtcccctgggcctttatgcaaggggaaattgcaaccatccttgctggagatgtgaaagtgaaaaaagagagagactcgtgacttttccggtttcagaaaaacccaatgattacccttaattaaaactgcttgaattgtatatatatctccatatatatatatatccaagacaagggaaatgtagacttcataaacatggctgtataattttgattttttttgaatacattgtgtttctatattttttttgacgacaaaaggtatgtacttataaagacatttttttcttttgttaacgttattagcatatctttgtgctttattatcctggtgacagttaccgttctatgtaggctgtgacttgcgctgcttttttagagcacttggcaaatcagaaatgcttctagctgtatttgtatgcacttattttaaaaagaaaaaaaaagccaaatacattttctgacattgtaagattgccttactgtctgtcattccttattgctggcccctttctcaggccggaggccaagtggtggagaaggaaaggaaatgatcgaacgggcatgttgtcaagtgggcatgccactgggaaataccaccagtttaccctgaaacattgtcctcagaggagtaggaaagtggattttgaatctctattttgctcaaaagttcagttcctgagatactgatgactgagagtgctgctgggaaattttcaggattgtgtggtcttttggggttttttgtttttttttttttaagacaaagttgaccgctgttcactgtccacgtgatcagttgtaagattacaatgctgcatgctagttggttacataagatacaattccagtgatggaaggcggttataatggatggtggtgtgtacaagatggcactgccatctttgagcagagcccagctctgcagcgccacttcatctttttaaacaccctagaggtctgtttgttgttgctgttgtcctttattttgaaagagttgcaagagaagttacagtccaggtgaacttggagattgtgggattggttttgtttctgttttgttttgtttatcatttacctgtagtgctattgctgttgatactatcacctataccctgtttctagtgagtgctgaatacagtatggtacaatgacagtaacagccgcgtggtgctgccaggactgcccttgggcatatcagtgacagcccaaatgtgggtggaggaaacctgtaatttccttcttaacatgtgtttgaaataccaagtgaataatactgttctggaaaaaaatgataaactagtggaaattaaagaaattaagggttttatataatagacaggccccacctctcaaaatatttttagaagtctttttgtaaactaatttcttttgatcactattttgcatcagtaaaatgatttttttaaaaccaataaatcatcaattattagaaatagttgtctcacagtgatactggtttttcttttgtgctgttatgatttaacattgacaggaacactattttaaatccttacgttcaggtgtttgtaacttggccttataattaggctgaattatggcttcaaggtctacaatttatgtgtatggttcacagcctagcttctatttacatttgaaaatacagatttttaccaactttggattcttttttagttatatgtttgtctttcctttttaaattgttcaaaactattttttaatggtcaagttactaacacttgaaaatcagatactgcaccaaatacagtgtttttccgtagtgtttttaatgagtgcacctattactactgtgcgagaattcatgttttaccagtcattgttatattacaaacagacttgcatgattaaccagttgttacacttactttttcaagttggagtatatatgactcagtgcagactggtctctcttatgtgaatgcacacatgcagaaatgcagagtcaattttacatgcccataaagacatttgtaaagaattcagctcttatggtctgttgtataaatgtgtatctaggcacttattataactggaatttgacctcacagatgttacaacttgatcagtcgtttgacctaatttgtggtagctatctgtatgttttgcaatcttaatacagacatgctttccaaaaagattaatacagaaccatcctgccgttttggataagtctatccagctgtggaaagggcaacctgtggtttctctgtactggtgtttaatgggggaagaatatgaacagctttaaagagctgtgtattgtggttactactattaaaaaataagatctgcacgagtctgactggcctttgggtggcctttgtggacggctcgtagctggaaagtgttgatctgggttttctggcattcttttaagttaaaaagttaacatcgggacatgggtttgatcttttgttgtacctgatgacagtgcagagattctccacagctggataaaaatgtcacaaagctacttactgtacatgggcagtatcagatttcaaatcctaatatttcagctgtgcttttaatactcaaaatattaggggatggggtgttgaagctttcccttttttgcttttaacaatttatagaatttaacagatgtactgtctttcatgtggcctcacatttaaagttatgagaacatacacatggtttacaacttttactatatacctttccttggccaccaagtattttaaaagtgtgccaccttttaacctttactttttttaagttgaaggtgatactttttctatatatgatgaaactcatgtcaactgaagtgagtgtaatctcagatatcaacattattatattttaaaatcacgctatggaaatatcacctgaattctgtcatttgtcagatttacagtacctttttttctttaacttttagcattaaataaaaataaaattgggagcactgaa

SEQ ID NO: 345700 - DNA, 4475 bp, Homo sapiens
ggctggccgctgacgctggcgctggagagcggcgacgccaggagctgtgagagagcgctcaagcgggcgcacggctgcttcccggagggtcgctccccacccggcgccgcggccccggccgccgccaagccgccgccgctctccgccaaggacatccttttgcagcagcagcagcagcttggccacggcggccccgaggcggccccgcgcgcgccgcaggccttggagcgctacccgttggcggccgcggccgagaggcccccgcgcctcggctctgacttcggcagcagccgcccggcagcgagcctggcccagccgccgacgccgcagccgccgcccgtgaacggcatcctggtgcccaacggcttctccaagctagaggagccgcccgagctgaatcgccagagcccgaacccgcggcgcggccacgcggtgccgcccaccctggtgccgctcatgaacggctcggccacgccgctgcccaccgcgctcggcctcggcggccgcgctgccgcctccttagccgcggtgtccggaaccgcggccgccagcctgggctccgcgcagcccaccgatctgggcgcccacaagcggccggcatccgtgtcgagcagcgctgccgtggagcacgagcagcgtgaggcggcagccaaggagaaacaaccgccgccgcctgcgcaccggggcccggccgacagcctgtccaccgcggccggggccgccgagctgagcgcggaaggtgcgggcaagagccgcgggtctggagagcaggactgggtcaacaggcccaagaccgtgcgcgacacgctgctggcgctgcaccagcacggccactcggggcccttcgagagcaagtttaagaaggagccggccctgactgcagttgcaagaacagcaaggaaaaggaagccctctccagaaccagaaggtgaagtcgggccccctaagatcaacggagaggcccagccgtggctgtccacatccacagaggggctcaagatccccatgactcctacatcctcttttgtgtctccgccaccacccactgcctcacctcattccaaccggaccacaccgcctgaagcggcccagaatggccagtcccccatggcagccctgatcttagtagcagacaatgcagggggcagtcatgcctcaaaagatgccaaccaggttcactccactaccaggaggaatagcaacagtccgccctctccgtcctctatgaaccaaagaaggctgggccccagagaggtggggggccagggagcaggcaacacaggaggactggagccagtgcaccctgccagcctcccggactcctctctggcaaccagtgccccgctgtgctgcaccctctgccacgagcggctggaggacacccattttgtgcagtgcccgtccgtcccttcgcacaagttctgcttcccttgctccagacaaagcatcaaacagcagggagctagtggagaggtctattgtcccagtggggaaaaatgccctcttgtgggctccaatgtcccctgggcctttatgcaaggggaaattgcaaccatccttgctggagatgtgaaagtgaaaaaagagagagactcgtgacttttccggtttcagaaaaacccaatgattacccttaattaaaactgcttgaattgtatatatatctccatatatatatatatccaagacaagggaaatgtagacttcataaacatggctgtataattttgattttttttgaatacattgtgtttctatattttttttgacgacaaaaggtatgtacttataaagacatttttttcttttgttaacgttattagcatatctttgtgctttattatcctggtgacagttaccgttctatgtaggctgtgacttgcgctgcttttttagagcacttggcaaatcagaaatgcttctagctgtatttgtatgcacttattttaaaaagaaaaaaaaagccaaatacattttctgacattgtaagattgccttactgtctgtcattccttattgctggcccctttctcaggccggaggccaagtggtggagaaggaaaggaaatgatcgaacgggcatgttgtcaagtgggcatgccactgggaaataccaccagtttaccctgaaacattgtcctcagaggagtaggaaagtggattttgaatctctattttgctcaaaagttcagttcctgagatactgatgactgagagtgctgctgggaaattttcaggattgtgtggtcttttggggttttttgtttttttttttttaagacaaagttgaccgctgttcactgtccacgtgatcagttgtaagattacaatgctgcatgctagttggttacataagatacaattccagtgatggaaggcggttataatggatggtggtgtgtacaagatggcactgccatctttgagcagagcccagctctgcagcgccacttcatctttttaaacaccctagaggtctgtttgttgttgctgttgtcctttattttgaaagagttgcaagagaagttacagtccaggtgaacttggagattgtgggattggttttgtttctgttttgttttgtttatcatttacctgtagtgctattgctgttgatactatcacctataccctgtttctagtgagtgctgaatacagtatggtacaatgacagtaacagccgcgtggtgctgccaggactgcccttgggcatatcagtgacagcccaaatgtgggtggaggaaacctgtaatttccttcttaacatgtgtttgaaataccaagtgaataatactgttctggaaaaaaatgataaactagtggaaattaaagaaattaagggttttatataatagacaggccccacctctcaaaatatttttagaagtctttttgtaaactaatttcttttgatcactattttgcatcagtaaaatgatttttttaaaaccaataaatcatcaattattagaaatagttgtctcacagtgatactggtttttcttttgtgctgttatgatttaacattgacaggaacactattttaaatccttacgttcaggtgtttgtaacttggccttataattaggctgaattatggcttcaaggtctacaatttatgtgtatggttcacagcctagcttctatttacatttgaaaatacagatttttaccaactttggattcttttttagttatatgtttgtctttcctttttaaattgttcaaaactattttttaatggtcaagttactaacacttgaaaatcagatactgcaccaaatacagtgtttttccgtagtgtttttaatgagtgcacctattactactgtgcgagaattcatgttttaccagtcattgttatattacaaacagacttgcatgattaaccagttgttacacttactttttcaagttggagtatatatgactcagtgcagactggtctctcttatgtgaatgcacacatgcagaaatgcagagtcaattttacatgcccataaagacatttgtaaagaattcagctcttatggtctgttgtataaatgtgtatctaggcacttattataactggaatttgacctcacagatgttacaacttgatcagtcgtttgacctaatttgtggtagctatctgtatgttttgcaatcttaatacagacatgctttccaaaaagattaatacagaaccatcctgccgttttggataagtctatccagctgtggaaagggcaacctgtggtttctctgtactggtgtttaatgggggaagaatatgaacagctttaaagagctgtgtattgtggttactactattaaaaaataagatctgcacgagtctgactggcctttgggtggcctttgtggacggctcgtagctggaaagtgttgatctgggttttctggcattcttttaagttaaaaagttaacatcgggacatgggtttgatcttttgttgtacctgatgacagtgcagagattctccacagctggataaaaatgtcacaaagctacttactgtacatgggcagtatcagatttcaaatcctaatatttcagctgtgcttttaatactcaaaatattaggggatggggtgttgaagctttcccttttttgcttttaacaatttatagaatttaacagatgtactgtctttcatgtggcctcacatttaaagttatgagaacatacacatggtttacaacttttactatatacctttccttggccaccaagtattttaaaagtgtgccaccttttaacctttactttttttaagttgaaggtgatactttttctatatatgatgaaactcatgtcaactgaagtgagtgtaatctcagatatcaacattattatattttaaaatcacgctatggaaatatcacctgaattctgtcatttgtcagatttacagtacctttttttctttaacttttagcattaaataaaaataaaattgggagcactgaa

SEQ ID NO: 345701 - DNA, 4631 bp, Homo sapiens
gcggtggcggtggcggccgcgtcccggcggcagtcgtgctacctgtgtgacctgccccgcatgccctgggccatgatctgggacttcaccgaacccgtctgccgcggctgcgtcaactacgagggcgccgaccgcgtcgagttcgtcatcgagacggcgcggcagctcaagcgggcgcacggctgcttcccggagggtcgctccccacccggcgccgcggccccggccgccgccaagccgccgccgctctccgccaaggacatccttttgcagcagcagcagcagcttggccacggcggccccgaggcggccccgcgcgcgccgcaggccttggagcgctacccgttggcggccgcggccgagaggcccccgcgcctcggctctgacttcggcagcagccgcccggcagcgagcctggcccagccgccgacgccgcagccgccgcccgtgaacggcatcctggtgcccaacggcttctccaagctagaggagccgcccgagctgaatcgccagagcccgaacccgcggcgcggccacgcggtgccgcccaccctggtgccgctcatgaacggctcggccacgccgctgcccaccgcgctcggcctcggcggccgcgctgccgcctccttagccgcggtgtccggaaccgcggccgccagcctgggctccgcgcagcccaccgatctgggcgcccacaagcggccggcatccgtgtcgagcagcgctgccgtggagcacgagcagcgtgaggcggcagccaaggagaaacaaccgccgccgcctgcgcaccggggcccggccgacagcctgtccaccgcggccggggccgccgagctgagcgcggaaggtgcgggcaagagccgcgggtctggagagcaggactgggtcaacaggcccaagaccgtgcgcgacacgctgctggcgctgcaccagcacggccactcggggcccttcgagagcaagtttaagaaggagccggccctgactgcaggcaggttgttgggtttcgaggccaacggggccaacgggtctaaagcagttgcaagaacagcaaggaaaaggaagccctctccagaaccagaaggtgaagtcgggccccctaagatcaacggagaggcccagccgtggctgtccacatccacagaggggctcaagatccccatgactcctacatcctcttttgtgtctccgccaccacccactgcctcacctcattccaaccggaccacaccgcctgaagcggcccagaatggccagtcccccatggcagccctgatcttagtagcagacaatgcagggggcagtcatgcctcaaaagatgccaaccaggttcactccactaccaggaggaatagcaacagtccgccctctccgtcctctatgaaccaaagaaggctgggccccagagaggtggggggccagggagcaggcaacacaggaggactggagccagtgcaccctgccagcctcccggactcctctctggcaaccagtgccccgctgtgctgcaccctctgccacgagcggctggaggacacccattttgtgcagtgcccgtccgtcccttcgcacaagttctgcttcccttgctccagacaaagcatcaaacagcagggagctagtggagaggtctattgtcccagtggggaaaaatgccctcttgtgggctccaatgtcccctgggcctttatgcaaggggaaattgcaaccatccttgctggagatgtgaaagtgaaaaaagagagagactcgtgacttttccggtttcagaaaaacccaatgattacccttaattaaaactgcttgaattgtatatatatctccatatatatatatatccaagacaagggaaatgtagacttcataaacatggctgtataattttgattttttttgaatacattgtgtttctatattttttttgacgacaaaaggtatgtacttataaagacatttttttcttttgttaacgttattagcatatctttgtgctttattatcctggtgacagttaccgttctatgtaggctgtgacttgcgctgcttttttagagcacttggcaaatcagaaatgcttctagctgtatttgtatgcacttattttaaaaagaaaaaaaaagccaaatacattttctgacattgtaagattgccttactgtctgtcattccttattgctggcccctttctcaggccggaggccaagtggtggagaaggaaaggaaatgatcgaacgggcatgttgtcaagtgggcatgccactgggaaataccaccagtttaccctgaaacattgtcctcagaggagtaggaaagtggattttgaatctctattttgctcaaaagttcagttcctgagatactgatgactgagagtgctgctgggaaattttcaggattgtgtggtcttttggggttttttgtttttttttttttaagacaaagttgaccgctgttcactgtccacgtgatcagttgtaagattacaatgctgcatgctagttggttacataagatacaattccagtgatggaaggcggttataatggatggtggtgtgtacaagatggcactgccatctttgagcagagcccagctctgcagcgccacttcatctttttaaacaccctagaggtctgtttgttgttgctgttgtcctttattttgaaagagttgcaagagaagttacagtccaggtgaacttggagattgtgggattggttttgtttctgttttgttttgtttatcatttacctgtagtgctattgctgttgatactatcacctataccctgtttctagtgagtgctgaatacagtatggtacaatgacagtaacagccgcgtggtgctgccaggactgcccttgggcatatcagtgacagcccaaatgtgggtggaggaaacctgtaatttccttcttaacatgtgtttgaaataccaagtgaataatactgttctggaaaaaaatgataaactagtggaaattaaagaaattaagggttttatataatagacaggccccacctctcaaaatatttttagaagtctttttgtaaactaatttcttttgatcactattttgcatcagtaaaatgatttttttaaaaccaataaatcatcaattattagaaatagttgtctcacagtgatactggtttttcttttgtgctgttatgatttaacattgacaggaacactattttaaatccttacgttcaggtgtttgtaacttggccttataattaggctgaattatggcttcaaggtctacaatttatgtgtatggttcacagcctagcttctatttacatttgaaaatacagatttttaccaactttggattcttttttagttatatgtttgtctttcctttttaaattgttcaaaactattttttaatggtcaagttactaacacttgaaaatcagatactgcaccaaatacagtgtttttccgtagtgtttttaatgagtgcacctattactactgtgcgagaattcatgttttaccagtcattgttatattacaaacagacttgcatgattaaccagttgttacacttactttttcaagttggagtatatatgactcagtgcagactggtctctcttatgtgaatgcacacatgcagaaatgcagagtcaattttacatgcccataaagacatttgtaaagaattcagctcttatggtctgttgtataaatgtgtatctaggcacttattataactggaatttgacctcacagatgttacaacttgatcagtcgtttgacctaatttgtggtagctatctgtatgttttgcaatcttaatacagacatgctttccaaaaagattaatacagaaccatcctgccgttttggataagtctatccagctgtggaaagggcaacctgtggtttctctgtactggtgtttaatgggggaagaatatgaacagctttaaagagctgtgtattgtggttactactattaaaaaataagatctgcacgagtctgactggcctttgggtggcctttgtggacggctcgtagctggaaagtgttgatctgggttttctggcattcttttaagttaaaaagttaacatcgggacatgggtttgatcttttgttgtacctgatgacagtgcagagattctccacagctggataaaaatgtcacaaagctacttactgtacatgggcagtatcagatttcaaatcctaatatttcagctgtgcttttaatactcaaaatattaggggatggggtgttgaagctttcccttttttgcttttaacaatttatagaatttaacagatgtactgtctttcatgtggcctcacatttaaagttatgagaacatacacatggtttacaacttttactatatacctttccttggccaccaagtattttaaaagtgtgccaccttttaacctttactttttttaagttgaaggtgatactttttctatatatgatgaaactcatgtcaactgaagtgagtgtaatctcagatatcaacattattatattttaaaatcacgctatggaaatatcacctgaattctgtcatttgtcagatttacagtacctttttttctttaacttttagcattaaataaaaataaaattgggagcactgaa

SEQ ID NO: 345702 - DNA, 4487 bp, Homo sapiens
  misc_feature (4463)..(4463): n is a, c, g, or t
gcggtggcggtggcggccgcgtcccggcggcagtcgtgctacctgtgtgacctgccccgcatgccctgggccatgatctgggacttcaccgaacccgtctgccgcggctgcgtcaactacgagggcgccgaccgcgtcgagttcgtcatcgagacggcgcggcagctcaagcgggcgcacggctgcttcccggagggtcgctccccacccggcgccgcggccccggccgccgccaagccgccgccgctctccgccaaggacatccttttgcagcagcagcagcagcttggccacggcggccccgaggcggccccgcgcgcgccgcaggccttggagcgctacccgttggcggccgcggccgagaggcccccgcgcctcggctctgacttcggcagcagccgcccggcagcgagcctggcccagccgccgacgccgcagccgccgcccgtgaacggcatcctggtgcccaacggcttctccaagctagaggagccgcccgagctgaatcgccagagcccgaacccgcggcgcggccacgcggtgccgcccaccctggtgccgctcatgaacggctcggccacgccgctgcccaccgcgctcggcctcggcggccgcgctgccgcctccttagccgcggtgtccggaaccgcggccgccagcctgggctccgcgcagcccaccgatctgggcgcccacaagcggccggcatccgtgtcgagcagcgctgccgtggagcacgagcagcgtgaggcggcagccaaggagaaacaaccgccgccgcctgcgcaccggggcccggccgacagcctgtccaccgcggccggggccgccgagctgagcgcggaaggtgcgggcaagagccgcgggtctggagagcaggactgggtcaacaggcccaagaccgtgcgcgacacgctgctggcgctgcaccagcacggccactcggggcccttcgagagcaagtttaagaaggagccggccctgactgcagttgcaagaacagcaaggaaaaggaagccctctccagaaccagaaggtgaagtcgggccccctaagatcaacggagaggcccagccgtggctgtccacatccacagaggggctcaagatccccatgactcctacatcctcttttgtgtctccgccaccacccactgcctcacctcattccaaccggaccacaccgcctgaagcggcccagaatggccagtcccccatggcagccctgatcttagtagcagacaatgcagggggcagtcatgcctcaaaagatgccaaccaggttcactccactaccaggaggaatagcaacagtccgccctctccgtcctctatgaaccaaagaaggctgggccccagagaggtggggggccagggagcaggcaacacaggaggactggagccagtgcaccctgccagcctcccggactcctctctggcaaccagtgccccgctgtgctgcaccctctgccacgagcggctggaggacacccattttgtgcagtgcccgtccgtcccttcgcacaagttctgcttcccttgctccagacaaagcatcaaacagcagggagctagtggagaggtctattgtcccagtggggaaaaatgccctcttgtgggctccaatgtcccctgggcctttatgcaaggggaaattgcaaccatccttgctggagatgtgaaagtgaaaaaagagagagactcgtgacttttccggtttcagaaaaacccaatgattacccttaattaaaactgcttgaattgtatatatatctccatatatatatatatccaagacaagggaaatgtagacttcataaacatggctgtataattttgattttttttgaatacattgtgtttctatattttttttgacgacaaaaggtatgtacttataaagacatttttttcttttgttaacgttattagcatatctttgtgctttattatcctggtgacagttaccgttctatgtaggctgtgacttgcgctgcttttttagagcacttggcaaatcagaaatgcttctagctgtatttgtatgcacttattttaaaaagaaaaaaaaagccaaatacattttctgacattgtaagattgccttactgtctgtcattccttattgctggcccctttctcaggccggaggccaagtggtggagaaggaaaggaaatgatcgaacgggcatgttgtcaagtgggcatgccactgggaaataccaccagtttaccctgaaacattgtcctcagaggagtaggaaagtggattttgaatctctattttgctcaaaagttcagttcctgagatactgatgactgagagtgctgctgggaaattttcaggattgtgtggtcttttggggttttttgtttttttttttttaagacaaagttgaccgctgttcactgtccacgtgatcagttgtaagattacaatgctgcatgctagttggttacataagatacaattccagtgatggaaggcggttataatggatggtggtgtgtacaagatggcactgccatctttgagcagagcccagctctgcagcgccacttcatctttttaaacaccctagaggtctgtttgttgttgctgttgtcctttattttgaaagagttgcaagagaagttacagtccaggtgaacttggagattgtgggattggttttgtttctgttttgttttgtttatcatttacctgtagtgctattgctgttgatactatcacctataccctgtttctagtgagtgctgaatacagtatggtacaatgacagtaacagccgcgtggtgctgccaggactgcccttgggcatatcagtgacagcccaaatgtgggtggaggaaacctgtaatttccttcttaacatgtgtttgaaataccaagtgaataatactgttctggaaaaaaatgataaactagtggaaattaaagaaattaagggttttatataatagacaggccccacctctcaaaatatttttagaagtctttttgtaaactaatttcttttgatcactattttgcatcagtaaaatgatttttttaaaaccaataaatcatcaattattagaaatagttgtctcacagtgatactggtttttcttttgtgctgttatgatttaacattgacaggaacactattttaaatccttacgttcaggtgtttgtaacttggccttataattaggctgaattatggcttcaaggtctacaatttatgtgtatggttcacagcctagcttctatttacatttgaaaatacagatttttaccaactttggattcttttttagttatatgtttgtctttcctttttaaattgttcaaaactattttttaatggtcaagttactaacacttgaaaatcagatactgcaccaaatacagtgtttttccgtagtgtttttaatgagtgcacctattactactgtgcgagaattcatgttttaccagtcattgttatattacaaacagacttgcatgattaaccagttgttacacttactttttcaagttggagtatatatgactcagtgcagactggtctctcttatgtgaatgcacacatgcagaaatgcagagtcaattttacatgcccataaagacatttgtaaagaattcagctcttatggtctgttgtataaatgtgtatctaggcacttattataactggaatttgacctcacagatgttacaacttgatcagtcgtttgacctaatttgtggtagctatctgtatgttttgcaatcttaatacagacatgctttccaaaaagattaatacagaaccatcctgccgttttggataagtctatccagctgtggaaagggcaacctgtggtttctctgtactggtgtttaatgggggaagaatatgaacagctttaaagagctgtgtattgtggttactactattaaaaaataagatctgcacgagtctgactggcctttgggtggcctttgtggacggctcgtagctggaaagtgttgatctgggttttctggcattcttttaagttaaaaagttaacatcgggacatgggtttgatcttttgttgtacctgatgacagtgcagagattctccacagctggataaaaatgtcacaaagctacttactgtacatgggcagtatcagatttcaaatcctaatatttcagctgtgcttttaatactcaaaatattaggggatggggtgttgaagctttcccttttttgcttttaacaatttatagaatttaacagatgtactgtctttcatgtggcctcacatttaaagttatgagaacatacacatggtttacaacttttactatatacctttccttggccaccaagtattttaaaagtgtgccaccttttaacctttactttttttaagttgaaggtgatactttttctatatatgatgaaactcatgtcaactgaagtgagtgtaatctcagatatcaaccngtgaaatcggtcccgagctgatga

SEQ ID NO: 345703 - DNA, 3947 bp, Homo sapiens
attcttggatgggagcatgagggcaccagtcaccttttaacctattgggggacattagcagtcacatgttgagtgcaaacgagggtacttttgtgcatgtgtacaaacaggcagttacaagcgtgtcattttcagtggctccattttaaatcagtctgctgcctcagaatcccgtacgcctgaaggttttaagttgcatgtgcacctgaaactcgtatatgagtattttctgtctgtgcttttagagaggaggaattctgtaacgacttttgtttcgggttaggaagagaatgatctctttcagtgcaccgccacttatgttacctttttccttttatttctttgtgtttccagtttgcaagaacagcaaggaaaaggaagccctctccagaaccagaaggtgaagtcgggccccctaagatcaacggagaggcccagccgtggctgtccacatccacagaggggctcaagatccccatgactcctacatcctcttttgtgtctccgccaccacccactgcctcacctcattccaaccggaccacaccgcctgaagcggcccagaatggccagtcccccatggcagccctgatcttagtagcagacaatgcagggggcagtcatgcctcaaaagatgccaaccaggttcactccactaccaggaggaatagcaacagtccgccctctccgtcctctatgaaccaaagaaggctgggccccagagaggtggggggccagggagcaggcaacacaggaggactggagccagtgcaccctgccagcctcccggactcctctctggcaaccagtgccccgctgtgctgcaccctctgccacgagcggctggaggacacccattttgtgcagtgcccgtccgtcccttcgcacaagttctgcttcccttgctccagacaaagcatcaaacagcagggagctagtggagaggtctattgtcccagtggggaaaaatgccctcttgtgggctccaatgtcccctgggcctttatgcaaggggaaattgcaaccatccttgctggagatgtgaaagtgaaaaaagagagagactcgtgacttttccggtttcagaaaaacccaatgattacccttaattaaaactgcttgaattgtatatatatctccatatatatatatatccaagacaagggaaatgtagacttcataaacatggctgtataattttgattttttttgaatacattgtgtttctatattttttttgacgacaaaaggtatgtacttataaagacatttttttcttttgttaacgttattagcatatctttgtgctttattatcctggtgacagttaccgttctatgtaggctgtgacttgcgctgcttttttagagcacttggcaaatcagaaatgcttctagctgtatttgtatgcacttattttaaaaagaaaaaaaaagccaaatacattttctgacattgtaagattgccttactgtctgtcattccttattgctggcccctttctcaggccggaggccaagtggtggagaaggaaaggaaatgatcgaacgggcatgttgtcaagtgggcatgccactgggaaataccaccagtttaccctgaaacattgtcctcagaggagtaggaaagtggattttgaatctctattttgctcaaaagttcagttcctgagatactgatgactgagagtgctgctgggaaattttcaggattgtgtggtcttttggggttttttgtttttttttttttaagacaaagttgaccgctgttcactgtccacgtgatcagttgtaagattacaatgctgcatgctagttggttacataagatacaattccagtgatggaaggcggttataatggatggtggtgtgtacaagatggcactgccatctttgagcagagcccagctctgcagcgccacttcatctttttaaacaccctagaggtctgtttgttgttgctgttgtcctttattttgaaagagttgcaagagaagttacagtccaggtgaacttggagattgtgggattggttttgtttctgttttgttttgtttatcatttacctgtagtgctattgctgttgatactatcacctataccctgtttctagtgagtgctgaatacagtatggtacaatgacagtaacagccgcgtggtgctgccaggactgcccttgggcatatcagtgacagcccaaatgtgggtggaggaaacctgtaatttccttcttaacatgtgtttgaaataccaagtgaataatactgttctggaaaaaaatgataaactagtggaaattaaagaaattaagggttttatataatagacaggccccacctctcaaaatatttttagaagtctttttgtaaactaatttcttttgatcactattttgcatcagtaaaatgatttttttaaaaccaataaatcatcaattattagaaatagttgtctcacagtgatactggtttttcttttgtgctgttatgatttaacattgacaggaacactattttaaatccttacgttcaggtgtttgtaacttggccttataattaggctgaattatggcttcaaggtctacaatttatgtgtatggttcacagcctagcttctatttacatttgaaaatacagatttttaccaactttggattcttttttagttatatgtttgtctttcctttttaaattgttcaaaactattttttaatggtcaagttactaacacttgaaaatcagatactgcaccaaatacagtgtttttccgtagtgtttttaatgagtgcacctattactactgtgcgagaattcatgttttaccagtcattgttatattacaaacagacttgcatgattaaccagttgttacacttactttttcaagttggagtatatatgactcagtgcagactggtctctcttatgtgaatgcacacatgcagaaatgcagagtcaattttacatgcccataaagacatttgtaaagaattcagctcttatggtctgttgtataaatgtgtatctaggcacttattataactggaatttgacctcacagatgttacaacttgatcagtcgtttgacctaatttgtggtagctatctgtatgttttgcaatcttaatacagacatgctttccaaaaagattaatacagaaccatcctgccgttttggataagtctatccagctgtggaaagggcaacctgtggtttctctgtactggtgtttaatgggggaagaatatgaacagctttaaagagctgtgtattgtggttactactattaaaaaataagatctgcacgagtctgactggcctttgggtggcctttgtggacggctcgtagctggaaagtgttgatctgggttttctggcattcttttaagttaaaaagttaacatcgggacatgggtttgatcttttgttgtacctgatgacagtgcagagattctccacagctggataaaaatgtcacaaagctacttactgtacatgggcagtatcagatttcaaatcctaatatttcagctgtgcttttaatactcaaaatattaggggatggggtgttgaagctttcccttttttgcttttaacaatttatagaatttaacagatgtactgtctttcatgtggcctcacatttaaagttatgagaacatacacatggtttacaacttttactatatacctttccttggccaccaagtattttaaaagtgtgccaccttttaacctttactttttttaagttgaaggtgatactttttctatatatgatgaaactcatgtcaactgaagtgagtgtaatctcagatatcaacattattatattttaaaatcacgctatggaaatatcacctgaattctgtcatttgtcagatttacagtacctttttttctttaacttttagcattaaataaaaataaaattgggagcactgaa

SEQ ID NO: 345704 - DNA, 3661 bp, Homo sapiens
  misc_feature (41)..(41): n is a, c, g, or t
aagagaagaagaaagaaaagagaaaagagaaagaaagaaantcgacaaagaagacgggcctagtcgcagttgcaagaacagcaaggaaaaggaagccctctccagaaccagaaggtgaagtcgggccccctaagatcaacggagaggcccagccgtggctgtccacatccacagaggggctcaagatccccatgactcctacatcctcttttgtgtctccgccaccacccactgcctcacctcattccaaccggaccacaccgcctgaagcggcccagaatggccagtcccccatggcagccctgatcttagtagcagacaatgcagggggcagtcatgcctcaaaagatgccaaccaggttcactccactaccaggaggaatagcaacagtccgccctctccgtcctctatgaaccaaagaaggctgggccccagagaggtggggggccagggagcaggcaacacaggaggactggagccagtgcaccctgccagcctcccggactcctctctggcaaccagtgccccgctgtgctgcaccctctgccacgagcggctggaggacacccattttgtgcagtgcccgtccgtcccttcgcacaagttctgcttcccttgctccagacaaagcatcaaacagcagggagctagtggagaggtctattgtcccagtggggaaaaatgccctcttgtgggctccaatgtcccctgggcctttatgcaaggggaaattgcaaccatccttgctggagatgtgaaagtgaaaaaagagagagactcgtgacttttccggtttcagaaaaacccaatgattacccttaattaaaactgcttgaattgtatatatatctccatatatatatatatccaagacaagggaaatgtagacttcataaacatggctgtataattttgattttttttgaatacattgtgtttctatattttttttgacgacaaaaggtatgtacttataaagacatttttttcttttgttaacgttattagcatatctttgtgctttattatcctggtgacagttaccgttctatgtaggctgtgacttgcgctgcttttttagagcacttggcaaatcagaaatgcttctagctgtatttgtatgcacttattttaaaaagaaaaaaaaagccaaatacattttctgacattgtaagattgccttactgtctgtcattccttattgctggcccctttctcaggccggaggccaagtggtggagaaggaaaggaaatgatcgaacgggcatgttgtcaagtgggcatgccactgggaaataccaccagtttaccctgaaacattgtcctcagaggagtaggaaagtggattttgaatctctattttgctcaaaagttcagttcctgagatactgatgactgagagtgctgctgggaaattttcaggattgtgtggtcttttggggttttttgtttttttttttttaagacaaagttgaccgctgttcactgtccacgtgatcagttgtaagattacaatgctgcatgctagttggttacataagatacaattccagtgatggaaggcggttataatggatggtggtgtgtacaagatggcactgccatctttgagcagagcccagctctgcagcgccacttcatctttttaaacaccctagaggtctgtttgttgttgctgttgtcctttattttgaaagagttgcaagagaagttacagtccaggtgaacttggagattgtgggattggttttgtttctgttttgttttgtttatcatttacctgtagtgctattgctgttgatactatcacctataccctgtttctagtgagtgctgaatacagtatggtacaatgacagtaacagccgcgtggtgctgccaggactgcccttgggcatatcagtgacagcccaaatgtgggtggaggaaacctgtaatttccttcttaacatgtgtttgaaataccaagtgaataatactgttctggaaaaaaatgataaactagtggaaattaaagaaattaagggttttatataatagacaggccccacctctcaaaatatttttagaagtctttttgtaaactaatttcttttgatcactattttgcatcagtaaaatgatttttttaaaaccaataaatcatcaattattagaaatagttgtctcacagtgatactggtttttcttttgtgctgttatgatttaacattgacaggaacactattttaaatccttacgttcaggtgtttgtaacttggccttataattaggctgaattatggcttcaaggtctacaatttatgtgtatggttcacagcctagcttctatttacatttgaaaatacagatttttaccaactttggattcttttttagttatatgtttgtctttcctttttaaattgttcaaaactattttttaatggtcaagttactaacacttgaaaatcagatactgcaccaaatacagtgtttttccgtagtgtttttaatgagtgcacctattactactgtgcgagaattcatgttttaccagtcattgttatattacaaacagacttgcatgattaaccagttgttacacttactttttcaagttggagtatatatgactcagtgcagactggtctctcttatgtgaatgcacacatgcagaaatgcagagtcaattttacatgcccataaagacatttgtaaagaattcagctcttatggtctgttgtataaatgtgtatctaggcacttattataactggaatttgacctcacagatgttacaacttgatcagtcgtttgacctaatttgtggtagctatctgtatgttttgcaatcttaatacagacatgctttccaaaaagattaatacagaaccatcctgccgttttggataagtctatccagctgtggaaagggcaacctgtggtttctctgtactggtgtttaatgggggaagaatatgaacagctttaaagagctgtgtattgtggttactactattaaaaaataagatctgcacgagtctgactggcctttgggtggcctttgtggacggctcgtagctggaaagtgttgatctgggttttctggcattcttttaagttaaaaagttaacatcgggacatgggtttgatcttttgttgtacctgatgacagtgcagagattctccacagctggataaaaatgtcacaaagctacttactgtacatgggcagtatcagatttcaaatcctaatatttcagctgtgcttttaatactcaaaatattaggggatggggtgttgaagctttcccttttttgcttttaacaatttatagaatttaacagatgtactgtctttcatgtggcctcacatttaaagttatgagaacatacacatggtttacaacttttactatatacctttccttggccaccaagtattttaaaagtgtgccaccttttaacctttactttttttaagttgaaggtgatactttttctatatatgatgaaactcatgtcaactgaagtgagtgtaatctcagatatcaacattattatattttaaaatcacgctatggaaatatcacctgaattctgtcatttgtcagatttacagtacctttttttctttaacttttagcattaaataaaaataaaattgggagcactgaa

SEQ ID NO: 345705 - DNA, 3749 bp, Homo sapiens
gcggtggcggtggcggccgcgtcccggcggcagtcgtgctacctgtgtgacctgccccgcatgccctgggccatgatctgggacttcaccgaacccgtctgccgcggctgcgtcaactacgagggcgccgaccgcgtcgagttcgtcatcgagacggcgcggcagctcaagcgggcgcacggctgcttcccggagggtcgctccccacccggcgccgcggccccggccgccgccaagccgccgccgctctccgccaaggacatccttttgcagcagcagcagcagcttggccacggcggccccgaggcggccccgcgcgcgccgcaggccttggagcgctacccgttggcggccgcggccgagaggcccccgcgcctcggctctgacttcggcagcagccgcccggcagcgagcctggcccagccgccgacgccgcagccgccgcccgtgaacggcatcctggtgcccaacggcttctccaagctagaggagccgcccgagctgaatcgccagagcccgaacccgcggcgcggccacgcggtgccgcccaccctggtgccgctcatgaacggctcggccacgccgctgcccaccgcgctcggcctcggcggccgcgctgccgcctccttagccgcggtgtccggaaccgcggccgccagcctgggctccgcgcagcccaccgatctgggcgcccacaagcggccggcatccgtgtcgagcagcgctgccgtggagcacgagcagcgtgaggcggcagccaaggagaaacaaccgccgccgcctgcgcaccggggcccggccgacagcctgtccaccgcggccggggccgccgagctgagcgcggaaggtgcgggcaagagccgcgggtctggagagcaggactgggtcaacaggcccaagaccgtgcgcgacacgctgctggcgctgcaccagcacggccactcggggcccttcgagagcaagtttaagaaggagccggccctgactgcagttgcaagaacagcaaggaaaaggaagccctctccagaaccagaaggtgaagtcgggccccctaagatcaacggagaggcccagccgtggctgtccacatccacagaggggctcaagatccccatgactcctacatcctcttttgtgtctccgccaccacccactgcctcacctcattccaaccggaccacaccgcctgaagcggcccagaatggccagtcccccatggcagccctgatcttagtagcagacaatgcagggggcagtcatgcctcaaaagatgccaaccaggttcactccactaccaggaggaatagcaacagtccgccctctccgtcctctatgaaccaaagaaggctgggccccagagaggtggggggccagggagcaggcaacacaggaggactggagccagtgcaccctgccagcctcccggactcctctctggcaaccagtgccccgctgtgctgcaccctctgccacgagcggctggaggacacccattttgtgcagtgcccgtccgtcccttcgcacaagttctgcttcccttgctccagacaaagcatcaaacagcagggagctagtggagaggtctattgtcccagtggggaaaaatgccctcttgtgggctccaatgtcccctgggcctttatgcaaggggaaattgcaaccatccttgctggagatgtgaaagtgaaaaaagagagagactcgtgacttttccggtttcagaaaaacccaatgattacccttaattaaaactgcttgaattgtatatatatctccatatatatatatatccaagacaagggaaatgtagacttcataaacatggctgtataattttgattttttttgaatacattgtgtttctatattttttttgacgacaaaaggtatgtacttataaagacatttttttcttttgttaacgttattagcatatctttgtgctttattatcctggtgacagttaccgttctatgtaggctgtgacttgcgctgcttttttagagcacttggcaaatcagaaatgcttctagctgtatttgtatgcacttattttaaaaagaaaaaaaaagccaaatacattttctgacattgtaagattgccttactgtctgtcattccttattgctggcccctttctcaggccggaggccaagtggtggagaaggaaaggaaatgatcgaacgggcatgttgtcaagtgggcatgccactgggaaataccaccagtttaccctgaaacattgtcctcagaggagtaggaaagtggattttgaatctctattttgctcaaaagttcagttcctgagatactgatgactgagagtgctgctgggaaattttcaggattgtgtggtcttttggggttttttgtttttttttttttaagacaaagttgaccgctgttcactgtccacgtgatcagttgtaagattacaatgctgcatgctagttggttacataagatacaattccagtgatggaaggcggttataatggatggtggtgtgtacaagatggcactgccatctttgagcagagcccagctctgcagcgccacttcatctttttaaacaccctagaggtctgtttgttgttgctgttgtcctttattttgaaagagttgcaagagaagttacagtccaggtgaacttggagattgtgggattggttttgtttctgttttgttttgtttatcatttacctgtagtgctattgctgttgatactatcacctataccctgtttctagtgagtgctgaatacagtatggtacaatgacagtaacagccgcgtggtgctgccaggactgcccttgggcatatcagtgacagcccaaatgtgggtggaggaaacctgtaatttccttcttaacatgtgtttgaaataccaagtgaataatactgttctggaaaaaaatgataaactagtggaaattaaagaaattaagggttttatataatagacaggccccacctctcaaaatatttttagaagtctttttgtaaactaatttcttttgatcactattttgcatcagtaaaatgatttttttaaaaccaataaatcatcaattattagaaatagttgtctcacagtgatactggtttttcttttgtgctgttatgatttaacattgacaggaacactattttaaatccttacgttcaggtgtttgtaacttggccttataattaggctgaattatggcttcaaggtctacaatttatgtgtatggttcacagcctagcttctatttacatttgaaaatacagatttttaccaactttggattcttttttagttatatgtttgtctttcctttttaaattgttcaaaactattttttaatggtcaagttactaacacttgaaaatcagatactgcaccaaatacagtgtttttccgtagtgtttttaatgagtgcacctattactactgtgcgagaattcatgttttaccagtcattgttatattacaaacagacttgcatgattaaccagttgttacacttactttttcaagttggagtatatatgactcagtgcagactggtctctcttatgtgaatgcaccattccgaatctttttgccaattttacctgccctattaagcattttgtattgccttaacttcatatgttcttgtttacttatattcccttctagccactttggtttctccctccccgctcgtccaactgatagcctgttttcttaattcgcgtactttatttactcaaataattaa

SEQ ID NO: 345706 - DNA, 3080 bp, Homo sapiens
gcggtggcggtggcggccgcgtcccggcggcagtcgtgctacctgtgtgacctgccccgcatgccctgggccatgatctgggacttcaccgaacccgtctgccgcggctgcgtcaactacgagggcgccgaccgcgtcgagttcgtcatcgagacggcgcggcagctcaagcgggcgcacggctgcttcccggagggtcgctccccacccggcgccgcggccccggccgccgccaagccgccgccgctctccgccaaggacatccttttgcagcagcagcagcagcttggccacggcggccccgaggcggccccgcgcgcgccgcaggccttggagcgctacccgttggcggccgcggccgagaggcccccgcgcctcggctctgacttcggcagcagccgcccggcagcgagcctggcccagccgccgacgccgcagccgccgcccgtgaacggcatcctggtgcccaacggcttctccaagctagaggagccgcccgagctgaatcgccagagcccgaacccgcggcgcggccacgcggtgccgcccaccctggtgccgctcatgaacggctcggccacgccgctgcccaccgcgctcggcctcggcggccgcgctgccgcctccttagccgcggtgtccggaaccgcggccgccagcctgggctccgcgcagcccaccgatctgggcgcccacaagcggccggcatccgtgtcgagcagcgctgccgtggagcacgagcagcgtgaggcggcagccaaggagaaacaaccgccgccgcctgcgcaccggggcccggccgacagcctgtccaccgcggccggggccgccgagctgagcgcggaaggtgcgggcaagagccgcgggtctggagagcaggactgggtcaacaggcccaagaccgtgcgcgacacgctgctggcgctgcaccagcacggccactcggggcccttcgagagcaagtttaagaaggagccggccctgactgcagttgcaagaacagcaaggaaaaggaagccctctccagaaccagaaggtgaagtcgggccccctaagatcaacggagaggcccagccgtggctgtccacatccacagaggggctcaagatccccatgactcctacatcctcttttgtgtctccgccaccacccactgcctcacctcattccaaccggaccacaccgcctgaagcggcccagaatggccagtcccccatggcagccctgatcttagtagcagacaatgcagggggcagtcatgcctcaaaagatgccaaccaggttcactccactaccaggaggaatagcaacagtccgccctctccgtcctctatgaaccaaagaaggctgggccccagagaggtggggggccagggagcaggcaacacaggaggactggagccagtgcaccctgccagcctcccggactcctctctggcaaccagtgccccgctgtgctgcaccctctgccacgagcggctggaggacacccattttgtgcagtgcccgtccgtcccttcgcacaagttctgcttcccttgctccagacaaagcatcaaacagcagggagctagtggagaggtctattgtcccagtggggaaaaatgccctcttgtgggctccaatgtcccctgggcctttatgcaaggggaaattgcaaccatccttgctggagatgtgaaagtgaaaaaagagagagactcgtgacttttccggtttcagaaaaacccaatgattacccttaattaaaactgcttgaattgtatatatatctccatatatatatatatccaagacaagggaaatgtagacttcataaacatggctgtataattttgattttttttgaatacattgtgtttctatattttttttgacgacaaaaggtatgtacttataaagacatttttttcttttgttaacgttattagcatatctttgtgctttattatcctggtgacagttaccgttctatgtaggctgtgacttgcgctgcttttttagagcacttggcaaatcagaaatgcttctagctgtatttgtatgcacttattttaaaaagaaaaaaaaagccaaatacattttctgacattgtaagattgccttactgtctgtcattccttattgctggcccctttctcaggccggaggccaagtggtggagaaggaaaggaaatgatcgaacgggcatgttgtcaagtgggcatgccactgggaaataccaccagtttaccctgaaacattgtcctcagaggagtaggaaagtggattttgaatctctattttgctcaaaagttcagttcctgagatactgatgactgagagtgctgctgggaaattttcaggattgtgtggtcttttggggttttttgtttttttttttttaagacaaagttgaccgctgttcactgtccacgtgatcagttgtaagattacaatgctgcatgctagttggttacataagatacaattccagtgatggaaggcggttataatggatggtggtgtgtacaagatggcactgccatctttgagcagagcccagctctgcagcgccacttcatctttttaaacaccctagaggtctgtttgttgttgctgttgtcctttattttgaaagagttgcaagagaagttacagtccaggtgaacttggagattgtgggattggttttgtttctgttttgttttgtttatcatttacctgtagtgctattgctgttgatactatcacctataccctgtttctagtgagtgctgaatacagtatggtacaatgacagtaacagccgcgtggtgctgccaggactgcccttgggcatatcagtgacagcccaaatgtgggtggaggaaacctgtaatttccttcttaacatgtgtttgaaataccaagtgaataatactgttctggaaaaaaatgataaactagtggaaattaaagaaattaagggttttatataatagacaggccccacctctcaaaatatttttagaagtctttttgtaaactaatttcttttgatcactattttgcatcagtaaaatgatttttttaaaaccaataaatcatcaattattaga

SEQ ID NO: 345707 - DNA, 2097 bp, Homo sapiens
gcggtggcggtggcggccgcgtcccggcggcagtcgtgctacctgtgtgacctgccccgcatgccctgggccatgatctgggacttcaccgaacccgtctgccgcggctgcgtcaactacgagggcgccgaccgcgtcgagttcgtcatcgagacggcgcggcagctcaagcgggcgcacggctgcttcccggagggtcgctccccacccggcgccgcggccccggccgccgccaagccgccgccgctctccgccaaggacatccttttgcagcagcagcagcagcttggccacggcggccccgaggcggccccgcgcgcgccgcaggccttggagcgctacccgttggcggccgcggccgagaggcccccgcgcctcggctctgacttcggcagcagccgcccggcagcgagcctggcccagccgccgacgccgcagccgccgcccgtgaacggcatcctggtgcccaacggcttctccaagctagaggagccgcccgagctgaatcgccagagcccgaacccgcggcgcggccacgcggtgccgcccaccctggtgccgctcatgaacggctcggccacgccgctgcccaccgcgctcggcctcggcggccgcgctgccgcctccttagccgcggtgtccggaaccgcggccgccagcctgggctccgcgcagcccaccgatctgggcgcccacaagcggccggcatccgtgtcgagcagcgctgccgtggagcacgagcagcgtgaggcggcagccaaggagaaacaaccgccgccgcctgcgcaccggggcccggccgacagcctgtccaccgcggccggggccgccgagctgagcgcggaaggtgcgggcaagagccgcgggtctggagagcaggactgggtcaacaggcccaagaccgtgcgcgacacgctgctggcgctgcaccagcacggccactcggggcccttcgagagcaagtttaagaaggagccggccctgactgcagttgcaagaacagcaaggaaaaggaagccctctccagaaccagaaggtgaagtcgggccccctaagatcaacggagaggcccagccgtggctgtccacatccacagaggggctcaagatccccatgactcctacatcctcttttgtgtctccgccaccacccactgcctcacctcattccaaccggaccacaccgcctgaagcggcccagaatggccagtcccccatggcagccctgatcttagtagcagacaatgcagggggcagtcatgcctcaaaagatgccaaccaggttcactccactaccaggaggaatagcaacagtccgccctctccgtcctctatgaaccaaagaaggctgggccccagagaggtggggggccagggagcaggcaacacaggaggactggagccagtgcaccctgccagcctcccggactcctctctggcaaccagtgccccgctgtgctgcaccctctgccacgagcggctggaggacacccattttgtgcagtgcccgtccgtcccttcgcacaagttctgcttcccttgctccagacaaagcatcaaacagcagggagctagtggagaggtctattgtcccagtggggaaaaatgccctcttgtgggctccaatgtcccctgggcctttatgcaaggggaaattgcaaccatccttgctggagatgtgaaagtgaaaaaagagagagactcgtgacttttccggtttcagaaaaacccaatgattacccttaattaaaactgcttgaattgtatatatatctccatatatatatatatccaagacaagggaaatgtagacttcataaacatggctgtataattttgattttttttgaatacattgtgtttctatattttttttgacgacaaaaggtatgtacttataaagacatttttttcttttgttaacgttattagcatatctttgtgctttattatcctggtgacagttaccgttctatgtaggctgtgacttgcgctgcttttttagagcacttggcaaatcagaaatgcttctagctgtatttgtatgcacttattttaaaaagaaaaaaaaagccaaatacattttctgacattgtaa

SEQ ID NO: 345708 - DNA, 2130 bp, Homo sapiens
  misc_feature (2122)..(2122): n is a, c, g, or t
gcggtggcggtggcggccgcgtcccggcggcagtcgtgctacctgtgtgacctgccccgcatgccctgggccatgatctgggacttcaccgaacccgtctgccgcggctgcgtcaactacgagggcgccgaccgcgtcgagttcgtcatcgagacggcgcggcagctcaagcgggcgcacggctgcttcccggagggtcgctccccacccggcgccgcggccccggccgccgccaagccgccgccgctctccgccaaggacatccttttgcagcagcagcagcagcttggccacggcggccccgaggcggccccgcgcgcgccgcaggccttggagcgctacccgttggcggccgcggccgagaggcccccgcgcctcggctctgacttcggcagcagccgcccggcagcgagcctggcccagccgccgacgccgcagccgccgcccgtgaacggcatcctggtgcccaacggcttctccaagctagaggagccgcccgagctgaatcgccagagcccgaacccgcggcgcggccacgcggtgccgcccaccctggtgccgctcatgaacggctcggccacgccgctgcccaccgcgctcggcctcggcggccgcgctgccgcctccttagccgcggtgtccggaaccgcggccgccagcctgggctccgcgcagcccaccgatctgggcgcccacaagcggccggcatccgtgtcgagcagcgctgccgtggagcacgagcagcgtgaggcggcagccaaggagaaacaaccgccgccgcctgcgcaccggggcccggccgacagcctgtccaccgcggccggggccgccgagctgagcgcggaaggtgcgggcaagagccgcgggtctggagagcaggactgggtcaacaggcccaagaccgtgcgcgacacgctgctggcgctgcaccagcacggccactcggggcccttcgagagcaagtttaagaaggagccggccctgactgcagttgcaagaacagcaaggaaaaggaagccctctccagaaccagaaggtgaagtcgggccccctaagatcaacggagaggcccagccgtggctgtccacatccacagaggggctcaagatccccatgactcctacatcctcttttgtgtctccgccaccacccactgcctcacctcattccaaccggaccacaccgcctgaagcggcccagaatggccagtcccccatggcagccctgatcttagtagcagacaatgcagggggcagtcatgcctcaaaagatgccaaccaggttcactccactaccaggaggaatagcaacagtccgccctctccgtcctctatgaaccaaagaaggctgggccccagagaggtggggggccagggagcaggcaacacaggaggactggagccagtgcaccctgccagcctcccggactcctctctggcaaccagtgccccgctgtgctgcaccctctgccacgagcggctggaggacacccattttgtgcagtgcccgtccgtcccttcgcacaagttctgcttcccttgctccagacaaagcatcaaacagcagggagctagtggagaggtctattgtcccagtggggaaaaatgccctcttgtgggctccaatgtcccctgggcctttatgcaaggggaaattgcaaccatccttgctggagatgtgaaagtgaaaaaagagagagactcgtgacttttccggtttcagaaaaacccaatgattacccttaattaaaactgcttgaattgtatatatatctccatatatatatatatccaagacaagggaaatgtagacttcataaacatggctgtataattttgattttttttgaatacattgtgtttctatattttttttgacgacaaaaggtatgtacttataaagacatttttttcttttgttaacgttattagcatatctttgtgctttattatcctggtgacagttaccgttctatgtaggctgtgacttgcgctgcttttttagagcacttggcaaatcagaaatgcttctagctgtatttgtatgcacttattttaaaaagaaaaaaaaagccaaatacattttctgacattgtaaaaccaaaaccgaagaaaaacaaaanaaccttgt

SEQ ID NO: 345709 - DNA, 1995 bp, Homo sapiens
  misc_feature (1979)..(1979): n is a, c, g, or t
  misc_feature (1984)..(1984): n is a, c, g, or t
  misc_feature (1986)..(1986): n is a, c, g, or t
gcggtggcggtggcggccgcgtcccggcggcagtcgtgctacctgtgtgacctgccccgcatgccctgggccatgatctgggacttcaccgaacccgtctgccgcggctgcgtcaactacgagggcgccgaccgcgtcgagttcgtcatcgagacggcgcggcagctcaagcgggcgcacggctgcttcccggagggtcgctccccacccggcgccgcggccccggccgccgccaagccgccgccgctctccgccaaggacatccttttgcagcagcagcagcagcttggccacggcggccccgaggcggccccgcgcgcgccgcaggccttggagcgctacccgttggcggccgcggccgagaggcccccgcgcctcggctctgacttcggcagcagccgcccggcagcgagcctggcccagccgccgacgccgcagccgccgcccgtgaacggcatcctggtgcccaacggcttctccaagctagaggagccgcccgagctgaatcgccagagcccgaacccgcggcgcggccacgcggtgccgcccaccctggtgccgctcatgaacggctcggccacgccgctgcccaccgcgctcggcctcggcggccgcgctgccgcctccttagccgcggtgtccggaaccgcggccgccagcctgggctccgcgcagcccaccgatctgggcgcccacaagcggccggcatccgtgtcgagcagcgctgccgtggagcacgagcagcgtgaggcggcagccaaggagaaacaaccgccgccgcctgcgcaccggggcccggccgacagcctgtccaccgcggccggggccgccgagctgagcgcggaaggtgcgggcaagagccgcgggtctggagagcaggactgggtcaacaggcccaagaccgtgcgcgacacgctgctggcgctgcaccagcacggccactcggggcccttcgagagcaagtttaagaaggagccggccctgactgcagttgcaagaacagcaaggaaaaggaagccctctccagaaccagaaggtgaagtcgggccccctaagatcaacggagaggcccagccgtggctgtccacatccacagaggggctcaagatccccatgactcctacatcctcttttgtgtctccgccaccacccactgcctcacctcattccaaccggaccacaccgcctgaagcggcccagaatggccagtcccccatggcagccctgatcttagtagcagacaatgcagggggcagtcatgcctcaaaagatgccaaccaggttcactccactaccaggaggaatagcaacagtccgccctctccgtcctctatgaaccaaagaaggctgggccccagagaggtggggggccagggagcaggcaacacaggaggactggagccagtgcaccctgccagcctcccggactcctctctggcaaccagtgccccgctgtgctgcaccctctgccacgagcggctggaggacacccattttgtgcagtgcccgtccgtcccttcgcacaagttctgcttcccttgctccagacaaagcatcaaacagcagggagctagtggagaggtctattgtcccagtggggaaaaatgccctcttgtgggctccaatgtcccctgggcctttatgcaaggggaaattgcaaccatccttgctggagatgtgaaagtgaaaaaagagagagactcgtgacttttccggtttcagaaaaacccaatgattacccttaattaaaactgcttgaattgtatatatatatccaagacaagggaaatgtagacttcataaacatggctgtataattttgattttttttgaatacattgtgtttctatattttttttgacgacaaaaggtatgtacttataaagacatttttttcttttgttaacgttattagcatatctgatttgccaagtgctctaaaaaagcagcgcaagtcacagcctacatagaacggtaantgtcncncaggataat

SEQ ID NO: 345710 - DNA, 1602 bp, Homo sapiens
gcggtggcggtggcggccgcgtcccggcggcagtcgtgctacctgtgtgacctgccccgcatgccctgggccatgatctgggacttcaccgaacccgtctgccgcggctgcgtcaactacgagggcgccgaccgcgtcgagttcgtcatcgagacggcgcggcagctcaagcgggcgcacggctgcttcccggagggtcgctccccacccggcgccgcggccccggccgccgccaagccgccgccgctctccgccaaggacatccttttgcagcagcagcagcagcttggccacggcggccccgaggcggccccgcgcgcgccgcaggccttggagcgctacccgttggcggccgcggccgagaggcccccgcgcctcggctctgacttcggcagcagccgcccggcagcgagcctggcccagccgccgacgccgcagccgccgcccgtgaacggcatcctggtgcccaacggcttctccaagctagaggagccgcccgagctgaatcgccagagcccgaacccgcggcgcggccacgcggtgccgcccaccctggtgccgctcatgaacggctcggccacgccgctgcccaccgcgctcggcctcggcggccgcgctgccgcctccttagccgcggtgtccggaaccgcggccgccagcctgggctccgcgcagcccaccgatctgggcgcccacaagcggccggcatccgtgtcgagcagcgctgccgtggagcacgagcagcgtgaggcggcagccaaggagaaacaaccgccgccgcctgcgcaccggggcccggccgacagcctgtccaccgcggccggggccgccgagctgagcgcggaaggtgcgggcaagagccgcgggtctggagagcaggactgggtcaacaggcccaagaccgtgcgcgacacgctgctggcgctgcaccagcacggccactcggggcccttcgagagcaagtttaagaaggagccggccctgactgcagttgcaagaacagcaaggaaaaggaagccctctccagaaccagaaggtgaagtcgggccccctaagatcaacggagaggcccagccgtggctgtccacatccacagaggggctcaagatccccatgactcctacatcctcttttgtgtctccgccaccacccactgcctcacctcattccaaccggaccacaccgcctgaagcggcccagaatggccagtcccccatggcagccctgatcttagtagcagacaatgcagggggcagtcatgcctcaaaagatgccaaccaggttcactccactaccaggaggaatagcaacagtccgccctctccgtcctctatgaaccaaagaaggctgggccccagagaggtggggggccagggagcaggcaacacaggaggactggagccagtgcaccctgccagcctcccggactcctctctggcaaccagtgccccgctgtgctgcaccctctgccacgagcggctggaggacacccattttgtgcagtgcccgtccgtcccttcgcacaagttctgcttcccttgctccagacaaagcatcaaacagcagggatgtttacccaatcaagctacgttgtacacgtag

SEQ ID NO: 345711 - DNA, 4905 bp, Homo sapiens
gcggtggcggtggcggccgcgtcccggcggcagtcgtgctacctgtgtgacctgccccgcatgccctgggccatgatctgggacttcaccgaacccgtctgccgcggctgcgtcaactacgagggcgccgaccgcgtcgagttcgtcatcgagacggcgcggcagctcaagcgggcgcacggctgcttcccggagggtcgctccccacccggcgccgcggccccggccgccgccaagccgccgccgctctccgccaaggacatccttttgcagcagcagcagcagcttggccacggcggccccgaggcggccccgcgcgcgccgcaggccttggagcgctacccgttggcggccgcggccgagaggcccccgcgcctcggctctgacttcggcagcagccgcccggcagcgagcctggcccagccgccgacgccgcagccgccgcccgtgaacggcatcctggtgcccaacggcttctccaagctagaggagccgcccgagctgaatcgccagagcccgaacccgcggcgcggccacgcggtgccgcccaccctggtgccgctcatgaacggctcggccacgccgctgcccaccgcgctcggcctcggcggccgcgctgccgcctccttagccgcggtgtccggaaccgcggccgccagcctgggctccgcgcagcccaccgatctgggcgcccacaagcggccggcatccgtgtcgagcagcgctgccgtggagcacgagcagcgtgaggcggcagccaaggagaaacaaccgccgccgcctgcgcaccggggcccggccgacagcctgtccaccgcggccggggccgccgagctgagcgcggaaggtgcgggcaagagccgcgggtctggagagcaggactgggtcaacaggcccaagaccgtgcgcgacacgctgctggcgctgcaccagcacggccactcggggcccttcgagagcaagtttaagaaggagccggccctgactgcagttgcaagaacagcaaggaaaaggaagccctctccagaaccagaaggtgaagtcgggccccctaagatcaacggagaggcccagccgtggctgtccacatccacagaggggctcaagatccccatgactcctacatcctcttttgtgtctccgccaccacccactgcctcacctcattccaaccggaccacaccgcctgaagcggcccagaatggccagtcccccatggcagccctgatcttagtagcagacaatgcagggggcagtcatgcctcaaaagatgccaaccaggttcactccactaccaggaggaatagcaacagtccgccctctccgtcctctatgaaccaaagaaggctgggccccagagaggtggggggccagggagcaggcaacacaggaggactggagccagtgcaccctgccagcctcccggactcctctctggcaaccagtgccccgctgtgctgcaccctctgccacgagcggctggaggacacccattttgtgcagtgcccgtccgtcccttcgcacaagttctgcttcccttgctccagacaaagcatcaaacagcagggagctagtggagaggtctattgtcccagtggggaaaaatgccctcttgtgggctccaatgtcccctgggcctttatgcaaggggaaattgcaaccatccttgctggagatgtgaaagtgaaaaaagagagagactcgtgacttttccggtttcagaaaaacccaatgattacccttaattaaaactgcttgaattgtatatatatctccatatatatatatatccaagacaagggaaatgtagacttcataaacatggctgtataattttgattttttttgaatacattgtgtttctatattttttttgacgacaaaaggtatgtacttataaagacatttttttcttttgttaacgttattagcatatctttgtgctttattatcctggtgacagttaccgttctatgtaggctgtgacttgcgctgcttttttagagcacttggcaaatcagaaatgcttctagctgtatttgtatgcacttattttaaaaagaaaaaaaaagccaaatacattttctgacattgtaagattgccttactgtctgtcattccttattgctggcccctttctcaggccggaggccaagtggtggagaaggaaaggaaatgatcgaacgggcatgttgtcaagtgggcatgccactgggaaataccaccagtttaccctgaaacattgtcctcagaggagtaggaaagtggattttgaatctctattttgctcaaaagttcagttcctgagatactgatgactgagagtgctgctgggaaattttcaggattgtgtggtcttttggggttttttgtttttttttttttaagacaaagttgaccgctgttcactgtccacgtgatcagttgtaagattacaatgctgcatgctagttggttacataagatacaattccagtgatggaaggcggttataatggatggtggtgtgtacaagatggcactgccatctttgagcagagcccagctctgcagcgccacttcatctttttaaacaccctagaggtctgtttgttgttgctgttgtcctttattttgaaagagttgcaagagaagttacagtccaggtgaacttggagattgtgggattggttttgtttctgttttgttttgtttatcatttacctgtagtgctattgctgttgatactatcacctataccctgtttctagtgagtgctgaatacagtatggtacaatgacagtaacagccgcgtggtgctgccaggactgcccttgggcatatcagtgacagcccaaatgtgggtggaggaaacctgtaatttccttcttaacatgtgtttgaaataccaagtgaataatactgttctggaaaaaaatgataaactagtggaaattaaagaaattaagggttttatataatagacaggccccacctctcaaaatatttttagaagtctttttgtaaactaatttcttttgatcactattttgcatcagtaaaatgatttttttaaaaccaataaatcatcaattattagaaatagttgtctcacagtgatactggtttttcttttgtgctgttatgatttaacattgacaggaacactattttaaatccttacgttcaggtgtttgtaacttggccttataattaggctgaattatggcttcaaggtctacaatttatgtgtatggttcacagcctagcttctatttacatttgaaaatacagatttttaccaactttggattcttttttagttatatgtttgtctttcctttttaaattgttcaaaactattttttaatggtcaagttactaacacttgaaaatcagatactgcaccaaatacagtgtttttccgtagtgtttttaatgagtgcacctattactactgtgcgagaattcatgttttaccagtcattgttatattacaaacagacttgcatgattaaccagttgttacacttactttttcaagttggagtatatatgactcagtgcagactggtctctcttatgtgaatgcacacatgcagaaatgcagagtcaattttacatgcccataaagacatttgtaaagaattcagctcttatggtctgttgtataaatgtgtatctaggcacttattataactggaatttgacctcacagatgttacaacttgatcagtcgtttgacctaatttgtggtagctatctgtatgttttgcaatcttaatacagacatgctttccaaaaagattaatacagaaccatcctgccgttttggataagtctatccagctgtggaaagggcaacctgtggtttctctgtactggtgtttaatgggggaagaatatgaacagctttaaagagctgtgtattgtggttactactattaaaaaataagatctgcacgagtctgactggcctttgggtggcctttgtggacggctcgtagctggaaagtgttgatctgggttttctggcattcttttaagttaaaaagttaacatcgggacatgggtttgatcttttgttgtacctgatgacagtgcagagattctccacagctggataaaaatgtcacaaagctacttactgtacatgggcagtatcagatttcaaatcctaatatttcagctgtgcttttaatactcaaaatattaggggatggggtgttgaagctttcccttttttgcttttaacaatttatagaatttaacagatgtactgtctttcatgtggcctcacatttaaagttatgagaacatacacatggtttacaacttttactatatacctttccttggccaccaagtattttaaaagtgtgccaccttttaacctttactttttttaagttgaaggtgatactttttctatatatgatgaaactcatgtcaactgaagtgagtgtaatctcagatatcaacattattatattttaaaatcacgctatggaaatatcacctgaattctgtcatttgtcagatttacagtacctttttttctttaacttttagcattaaataaaaataaaattgggagcactgaaaaaaaaaaaaaaaaaaaaaaaaaaaaaaaaaaaaaaaaaaaaaaaaaaaaaaaaaaaaaaaaaaaaaaaaaaaaaaaaaaaaaaaaaaaaaaaaaaaaaaaaaaaaaaaaaatttgagctccattggcccaaagtaatttaaaattagaaaattttttctgtgcggccccaatttgggctctattgggaaaatcccccttatgggggggattttaaaatttaatgggcctgtttttaaaaagttggggatggggaaaaccctggggttcccaaaataaaactcttttggcaatccctttttcccagggggcatttatggccc

SEQ ID NO: 345712 - DNA, 4415 bp, Homo sapiens
  misc_feature (4195)..(4195): n is a, c, g, or t
gcggtggcggtggcggccgcgtcccggcggcagtcgtgctacctgtgtgacctgccccgcatgccctgggccatgatctgggacttcaccgaacccgtctgccgcggctgcgtcaactacgagggcgccgaccgcgtcgagttcgtcatcgagacggcgcggcagctcaagcgggcgcacggctgcttcccggagggtcgctccccacccggcgccgcggccccggccgccgccaagccgccgccgctctccgccaaggacatccttttgcagcagcagcagcagcttggccacggcggccccgaggcggccccgcgcgcgccgcaggccttggagcgctacccgttggcggccgcggccgagaggcccccgcgcctcggctctgacttcggcagcagccgcccggcagcgagcctggcccagccgccgacgccgcagccgccgcccgtgaacggcatcctggtgcccaacggcttctccaagctagaggagccgcccgagctgaatcgccagagcccgaacccgcggcgcggccacgcggtgccgcccaccctggtgccgctcatgaacggctcggccacgccgctgcccaccgcgctcggcctcggcggccgcgctgccgcctccttagccgcggtgtccggaaccgcggccgccagcctgggctccgcgcagcccaccgatctgggcgcccacaagcggccggcatccgtgtcgagcagcgctgccgtggagcacgagcagcgtgaggcggcagccaaggagaaacaaccgccgccgcctgcgcaccggggcccggccgacagcctgtccaccgcggccggggccgccgagctgagcgcggaaggtgcgggcaagagccgcgggtctggagagcaggactgggtcaacaggcccaagaccgtgcgcgacacgctgctggcgctgcaccagcacggccactcggggcccttcgagagcaagtttaagaaggagccggccctgactgcagttgcaagaacagcaaggaaaaggaagccctctccagaaccagaaggtgaagtcgggccccctaagatcaacggagaggcccagccgtggctgtccacatccacagaggggctcaagatccccatgactcctacatcctcttttgtgtctccgccaccacccactgcctcacctcattccaaccggaccacaccgcctgaagcggcccagaatggccagtcccccatggcagccctgatcttagtagcagacaatgcagggggcagtcatgcctcaaaagatgccaaccaggttcactccactaccaggaggaatagcaacagtccgccctctccgtcctctatgaaccaaagaaggctgggccccagagaggtggggggccagggagcaggcaacacaggaggactggagccagtgcaccctgccagcctcccggactcctctctggcaaccagtgccccgctgtgctgcaccctctgccacgagcggctggaggacacccattttgtgcagtgcccgtccgtcccttcgcacaagttctgcttcccttgctccagacaaagcatcaaacagcagggagctagtggagaggtctattgtcccagtggggaaaaatgccctcttgtgggctccaatgtcccctgggcctttatgcaaggggaaattgcaaccatccttgctggagatgtgaaagtgaaaaaagagagagactcgtgacttttccggtttcagaaaaacccaatgattacccttaattaaaactgcttgaattgtatatatatctccatatatatatatatccaagacaagggaaatgtagacttcataaacatggctgtataattttgattttttttgaatacattgtgtttctatattttttttgacgacaaaaggtatgtacttataaagacatttttttcttttgttaacgttattagcatatctttgtgctttattatcctggtgacagttaccgttctatgtaggctgtgacttgcgctgcttttttagagcacttggcaaatcagaaatgcttctagctgtatttgtatgcacttattttaaaaagaaaaaaaaagccaaatacattttctgacattgtaagattgccttactgtctgtcattccttattgctggcccctttctcaggccggaggccaagtggtggagaaggaaaggaaatgatcgaacgggcatgttgtcaagtgggcatgccactgggaaataccaccagtttaccctgaaacattgtcctcagaggagtaggaaagtggattttgaatctctattttgctcaaaagttcagttcctgagatactgatgactgagagtgctgctgggaaattttcaggattgtgtggtcttttggggttttttgtttttttttttttaagacaaagttgaccgctgttcactgtccacgtgatcagttgtaagattacaatgctgcatgctagttggttacataagatacaattccagtgatggaaggcggttataatggatggtggtgtgtacaagatggcactgccatctttgagcagagcccagctctgcagcgccacttcatctttttaaacaccctagaggtctgtttgttgttgctgttgtcctttattttgaaagagttgcaagagaagttacagtccaggtgaacttggagattgtgggattggttttgtttctgttttgttttgtttatcatttacctgtagtgctattgctgttgatactatcacctataccctgtttctagtgagtgctgaatacagtatggtacaatgacagtaacagccgcgtggtgctgccaggactgcccttgggcatatcagtgacagcccaaatgtgggtggaggaaacctgtaatttccttcttaacatgtgtttgaaataccaagtgaataatactgttctggaaaaaaatgataaactagtggaaattaaagaaattaagggttttatataatagacaggccccacctctcaaaatatttttagaagtctttttgtaaactaatttcttttgatcactattttgcatcagtaaaatgatttttttaaaaccaataaatcatcaattattagaaatagttgtctcacagtgatactggtttttcttttgtgctgttatgatttaacattgacaggaacactattttaaatccttacgttcaggtgtttgtaacttggccttataattaggctgaattatggcttcaaggtctacaatttatgtgtatggttcacagcctagcttctatttacatttgaaaatacagatttttaccaactttggattcttttttagttatatgtttgtctttcctttttaaattgttcaaaactattttttaatggtcaagttactaacacttgaaaatcagatactgcaccaaatacagtgtttttccgtagtgtttttaatgagtgcacctattactactgtgcgagaattcatgttttaccagtcattgttatattacaaacagacttgcatgattaaccagttgttacacttactttttcaagttggagtatatatgactcagtgcagactggtctctcttatgtgaatgcacacatgcagaaatgcagagtcaattttacatgcccataaagacatttgtaaagaattcagctcttatggtctgttgtataaatgtgtatctaggcacttattataactggaatttgacctcacagatgttacaacttgatcagtcgtttgacctaatttgtggtagctatctgtatgttttgcaatcttaatacagacatgctttccaaaaagattaatacagaaccatcctgccgttttggataagtctatccagctgtggaaagggcaacctgtggtttctctgtactggtgtttaatgggggaagaatatgaacagctttaaagagctgtgtattgtggttactactattaaaaaataagatctgcacgagtctgactggcctttgggtggcctttgtggacggctcgtagctggaaagtgttgatctgggttttctggcattcttttaagttaaaaagttaacatcgggacatgggtttgatcttttgttgtacctgatgacagtgcagagattctccacagctggataaaaatgtcacaaagctacttactgtacatgggcagtatcagatttcaaatcctaatatttcagctgtgcttttaatactcaaaatagggngggggtggaaggttccttttgggtttaacattttgaatttaggaagtgtgtgtagggggccattaggttggaacacacgggttacttatatatttggtgcattaaggggtactttaggaggggtttaatagaacggggagggcaaatatataagaggaaacaggtgggaaagttttgtaagaaaaaaggcttggtgtgggtggaatagtgttgggggatt

SEQ ID NO: 345713 - DNA, 4297 bp, Homo sapiens
gcggtggcggtggcggccgcgtcccggcggcagtcgtgctacctgtgtgacctgccccgcatgccctgggccatgatctgggacttcaccgaacccgtctgccgcggctgcgtcaactacgagggcgccgaccgcgtcgagttcgtcatcgagacggcgcggcagctcaagcgggcgcacggctgcttcccggagggtcgctccccacccggcgccgcggccccggccgccgccaagccgccgccgctctccgccaaggacatccttttgcagcagcagcagcagcttggccacggcggccccgaggcggccccgcgcgcgccgcaggccttggagcgctacccgttggcggccgcggccgagaggcccccgcgcctcggctctgacttcggcagcagccgcccggcagcgagcctggcccagccgccgacgccgcagccgccgcccgtgaacggcatcctggtgcccaacggcttctccaagctagaggagccgcccgactgagcgcggaaggtgcgggcaagagccgcgggtctggagagcaggactgggtcaacaggcccaagaccgtgcgcgacacgctgctggcgctgcaccagcacggccactcggggcccttcgagagcaagtttaagaaggagccggccctgactgcaggcaggttgttgggtttcgaggccaacggggccaacgggtctaaagcagttgcaagaacagcaaggaaaaggaagccctctccagaaccagaaggtgaagtcgggccccctaagatcaacggagaggcccagccgtggctgtccacatccacagaggggctcaagatccccatgactcctacatcctcttttgtgtctccgccaccacccactgcctcacctcattccaaccggaccacaccgcctgaagcggcccagaatggccagtcccccatggcagccctgatcttagtagcagacaatgcagggggcagtcatgcctcaaaagatgccaaccaggttcactccactaccaggaggaatagcaacagtccgccctctccgtcctctatgaaccaaagaaggctgggccccagagaggtggggggccagggagcaggcaacacaggaggactggagccagtgcaccctgccagcctcccggactcctctctggcaaccagtgccccgctgtgctgcaccctctgccacgagcggctggaggacacccattttgtgcagtgcccgtccgtcccttcgcacaagttctgcttcccttgctccagacaaagcatcaaacagcagggagctagtggagaggtctattgtcccagtggggaaaaatgccctcttgtgggctccaatgtcccctgggcctttatgcaaggggaaattgcaaccatccttgctggagatgtgaaagtgaaaaaagagagagactcgtgacttttccggtttcagaaaaacccaatgattacccttaattaaaactgcttgaattgtatatatatctccatatatatatatatccaagacaagggaaatgtagacttcataaacatggctgtataattttgattttttttgaatacattgtgtttctatattttttttgacgacaaaaggtatgtacttataaagacatttttttcttttgttaacgttattagcatatctttgtgctttattatcctggtgacagttaccgttctatgtaggctgtgacttgcgctgcttttttagagcacttggcaaatcagaaatgcttctagctgtatttgtatgcacttattttaaaaagaaaaaaaaagccaaatacattttctgacattgtaagattgccttactgtctgtcattccttattgctggcccctttctcaggccggaggccaagtggtggagaaggaaaggaaatgatcgaacgggcatgttgtcaagtgggcatgccactgggaaataccaccagtttaccctgaaacattgtcctcagaggagtaggaaagtggattttgaatctctattttgctcaaaagttcagttcctgagatactgatgactgagagtgctgctgggaaattttcaggattgtgtggtcttttggggttttttgtttttttttttttaagacaaagttgaccgctgttcactgtccacgtgatcagttgtaagattacaatgctgcatgctagttggttacataagatacaattccagtgatggaaggcggttataatggatggtggtgtgtacaagatggcactgccatctttgagcagagcccagctctgcagcgccacttcatctttttaaacaccctagaggtctgtttgttgttgctgttgtcctttattttgaaagagttgcaagagaagttacagtccaggtgaacttggagattgtgggattggttttgtttctgttttgttttgtttatcatttacctgtagtgctattgctgttgatactatcacctataccctgtttctagtgagtgctgaatacagtatggtacaatgacagtaacagccgcgtggtgctgccaggactgcccttgggcatatcagtgacagcccaaatgtgggtggaggaaacctgtaatttccttcttaacatgtgtttgaaataccaagtgaataatactgttctggaaaaaaatgataaactagtggaaattaaagaaattaagggttttatataatagacaggccccacctctcaaaatatttttagaagtctttttgtaaactaatttcttttgatcactattttgcatcagtaaaatgatttttttaaaaccaataaatcatcaattattagaaatagttgtctcacagtgatactggtttttcttttgtgctgttatgatttaacattgacaggaacactattttaaatccttacgttcaggtgtttgtaacttggccttataattaggctgaattatggcttcaaggtctacaatttatgtgtatggttcacagcctagcttctatttacatttgaaaatacagatttttaccaactttggattcttttttagttatatgtttgtctttcctttttaaattgttcaaaactattttttaatggtcaagttactaacacttgaaaatcagatactgcaccaaatacagtgtttttccgtagtgtttttaatgagtgcacctattactactgtgcgagaattcatgttttaccagtcattgttatattacaaacagacttgcatgattaaccagttgttacacttactttttcaagttggagtatatatgactcagtgcagactggtctctcttatgtgaatgcacacatgcagaaatgcagagtcaattttacatgcccataaagacatttgtaaagaattcagctcttatggtctgttgtataaatgtgtatctaggcacttattataactggaatttgacctcacagatgttacaacttgatcagtcgtttgacctaatttgtggtagctatctgtatgttttgcaatcttaatacagacatgctttccaaaaagattaatacagaaccatcctgccgttttggataagtctatccagctgtggaaagggcaacctgtggtttctctgtactggtgtttaatgggggaagaatatgaacagctttaaagagctgtgtattgtggttactactattaaaaaataagatctgcacgagtctgactggcctttgggtggcctttgtggacggctcgtagctggaaagtgttgatctgggttttctggcattcttttaagttaaaaagttaacatcgggacatgggtttgatcttttgttgtacctgatgacagtgcagagattctccacagctggataaaaatgtcacaaagctacttactgtacatgggcagtatcagatttcaaatcctaatatttcagctgtgcttttaatactcaaaatattaggggatggggtgttgaagctttcccttttttgcttttaacaatttatagaatttaacagatgtactgtctttcatgtggcctcacatttaaagttatgagaacatacacatggtttacaacttttactatatacctttccttggccaccaagtattttaaaagtgtgccaccttttaacctttactttttttaagttgaaggtgatactttttctatatatgatgaaactcatgtcaactgaagtgagtgtaatctcagatatcaacattattatattttaaaatcacgctatggaaatatcacctgaattctgtcatttgtcagatttacagtacctttttttctttaacttttagcattaaataaaaataaaattgggagcactgaa

SEQ ID NO: 345714 - DNA, 4545 bp, Homo sapiens
gcggtggcggtggcggccgcgtcccggcggcagtcgtgctacctgtgtgacctgccccgcatgccctgggccatgatctgggacttcaccgaacccgtctgccgcggctgcgtcaactacgagggcgccgaccgcgtcgagttcgtcatcgagacggcgcggcagctcaagcgggcgcacggctgcttcccggagggtcgctccccacccggcgccgcggccccggccgccgccaagccgccgccgctctccgccaaggacatccttttgcagcagcagcagcagcttggccacggcggccccgaggcggccccgcgcgcgccgcaggccttggagcgctacccgttggcggccgcggccgagaggcccccgcgcctcggctctgacttcggcagcagccgcccggcagcgagcctggcccagccgccgacgccgcagccgccgcccgtgaacggcatcctggtgcccaacggcttctccaagctagaggagccgcccgagctgaatcgccagagcccgaacccgcggcgcggccacgcggtgccgcccaccctggtgccgctcatgaacggctcggccacgccgctgcccaccgcgctcggcctcggcggccgcgctgccgcctccttagccgcggtgtccggaaccgcggccgccagcctgggctccgcgcagcccaccgatctgggcgcccacaagcggccggcatccgtgtcgagcagcgctgccgtggagcacgagcagcgtgaggcggcagccaaggagaaacaaccgccgccgcctgcgcaccggggcccggccgacagcctgtccaccgcggccggggccgccgagctgagcgcggaaggtgcgggcaagagccgcgggtctggagagcaggactgggtcaacaggcccaagaccgtgcgcgacacgctgctggcgctgcaccagcacggccactcggggcccttcgagagcaagtttaagaaggagccggccctgactgcaggcaggttgttgggtttcgaggccaacggggccaacgggtctaaagcagtggctgtccacatccacagaggggctcaagatccccatgactcctacatcctcttttgtgtctccgccaccacccactgcctcacctcattccaaccggaccacaccgcctgaagcggcccagaatggccagtcccccatggcagccctgatcttagtagcagacaatgcagggggcagtcatgcctcaaaagatgccaaccaggttcactccactaccaggaggaatagcaacagtccgccctctccgtcctctatgaaccaaagaaggctgggccccagagaggtggggggccagggagcaggcaacacaggaggactggagccagtgcaccctgccagcctcccggactcctctctggcaaccagtgccccgctgtgctgcaccctctgccacgagcggctggaggacacccattttgtgcagtgcccgtccgtcccttcgcacaagttctgcttcccttgctccagacaaagcatcaaacagcagggagctagtggagaggtctattgtcccagtggggaaaaatgccctcttgtgggctccaatgtcccctgggcctttatgcaaggggaaattgcaaccatccttgctggagatgtgaaagtgaaaaaagagagagactcgtgacttttccggtttcagaaaaacccaatgattacccttaattaaaactgcttgaattgtatatatatctccatatatatatatatccaagacaagggaaatgtagacttcataaacatggctgtataattttgattttttttgaatacattgtgtttctatattttttttgacgacaaaaggtatgtacttataaagacatttttttcttttgttaacgttattagcatatctttgtgctttattatcctggtgacagttaccgttctatgtaggctgtgacttgcgctgcttttttagagcacttggcaaatcagaaatgcttctagctgtatttgtatgcacttattttaaaaagaaaaaaaaagccaaatacattttctgacattgtaagattgccttactgtctgtcattccttattgctggcccctttctcaggccggaggccaagtggtggagaaggaaaggaaatgatcgaacgggcatgttgtcaagtgggcatgccactgggaaataccaccagtttaccctgaaacattgtcctcagaggagtaggaaagtggattttgaatctctattttgctcaaaagttcagttcctgagatactgatgactgagagtgctgctgggaaattttcaggattgtgtggtcttttggggttttttgtttttttttttttaagacaaagttgaccgctgttcactgtccacgtgatcagttgtaagattacaatgctgcatgctagttggttacataagatacaattccagtgatggaaggcggttataatggatggtggtgtgtacaagatggcactgccatctttgagcagagcccagctctgcagcgccacttcatctttttaaacaccctagaggtctgtttgttgttgctgttgtcctttattttgaaagagttgcaagagaagttacagtccaggtgaacttggagattgtgggattggttttgtttctgttttgttttgtttatcatttacctgtagtgctattgctgttgatactatcacctataccctgtttctagtgagtgctgaatacagtatggtacaatgacagtaacagccgcgtggtgctgccaggactgcccttgggcatatcagtgacagcccaaatgtgggtggaggaaacctgtaatttccttcttaacatgtgtttgaaataccaagtgaataatactgttctggaaaaaaatgataaactagtggaaattaaagaaattaagggttttatataatagacaggccccacctctcaaaatatttttagaagtctttttgtaaactaatttcttttgatcactattttgcatcagtaaaatgatttttttaaaaccaataaatcatcaattattagaaatagttgtctcacagtgatactggtttttcttttgtgctgttatgatttaacattgacaggaacactattttaaatccttacgttcaggtgtttgtaacttggccttataattaggctgaattatggcttcaaggtctacaatttatgtgtatggttcacagcctagcttctatttacatttgaaaatacagatttttaccaactttggattcttttttagttatatgtttgtctttcctttttaaattgttcaaaactattttttaatggtcaagttactaacacttgaaaatcagatactgcaccaaatacagtgtttttccgtagtgtttttaatgagtgcacctattactactgtgcgagaattcatgttttaccagtcattgttatattacaaacagacttgcatgattaaccagttgttacacttactttttcaagttggagtatatatgactcagtgcagactggtctctcttatgtgaatgcacacatgcagaaatgcagagtcaattttacatgcccataaagacatttgtaaagaattcagctcttatggtctgttgtataaatgtgtatctaggcacttattataactggaatttgacctcacagatgttacaacttgatcagtcgtttgacctaatttgtggtagctatctgtatgttttgcaatcttaatacagacatgctttccaaaaagattaatacagaaccatcctgccgttttggataagtctatccagctgtggaaagggcaacctgtggtttctctgtactggtgtttaatgggggaagaatatgaacagctttaaagagctgtgtattgtggttactactattaaaaaataagatctgcacgagtctgactggcctttgggtggcctttgtggacggctcgtagctggaaagtgttgatctgggttttctggcattcttttaagttaaaaagttaacatcgggacatgggtttgatcttttgttgtacctgatgacagtgcagagattctccacagctggataaaaatgtcacaaagctacttactgtacatgggcagtatcagatttcaaatcctaatatttcagctgtgcttttaatactcaaaatattaggggatggggtgttgaagctttcccttttttgcttttaacaatttatagaatttaacagatgtactgtctttcatgtggcctcacatttaaagttatgagaacatacacatggtttacaacttttactatatacctttccttggccaccaagtattttaaaagtgtgccaccttttaacctttactttttttaagttgaaggtgatactttttctatatatgatgaaactcatgtcaactgaagtgagtgtaatctcagatatcaacattattatattttaaaatcacgctatggaaatatcacctgaattctgtcatttgtcagatttacagtacctttttttctttaacttttagcattaaataaaaataaaattgggagcactgaa

SEQ ID NO: 345715 - DNA, 3765 bp, Homo sapiens
attcttggatgggagcatgagggcaccagtcaccttttaacctattgggggacattagcagtcacatgttgagtgcaaacgagggtacttttgtgcatgtgtacaaacaggcagttacaagcgtgtcattttcagtggctccattttaaatcagtctgctgcctcagaatcccttgcaagaacagcaaggaaaaggaagccctctccagaaccagaaggtgaagtcgggccccctaagatcaacggagaggcccagccgtggctgtccacatccacagaggggctcaagatccccatgactcctacatcctcttttgtgtctccgccaccacccactgcctcacctcattccaaccggaccacaccgcctgaagcggcccagaatggccagtcccccatggcagccctgatcttagtagcagacaatgcagggggcagtcatgcctcaaaagatgccaaccaggttcactccactaccaggaggaatagcaacagtccgccctctccgtcctctatgaaccaaagaaggctgggccccagagaggtggggggccagggagcaggcaacacaggaggactggagccagtgcaccctgccagcctcccggactcctctctggcaaccagtgccccgctgtgctgcaccctctgccacgagcggctggaggacacccattttgtgcagtgcccgtccgtcccttcgcacaagttctgcttcccttgctccagacaaagcatcaaacagcagggagctagtggagaggtctattgtcccagtggggaaaaatgccctcttgtgggctccaatgtcccctgggcctttatgcaaggggaaattgcaaccatccttgctggagatgtgaaagtgaaaaaagagagagactcgtgacttttccggtttcagaaaaacccaatgattacccttaattaaaactgcttgaattgtatatatatctccatatatatatatatccaagacaagggaaatgtagacttcataaacatggctgtataattttgattttttttgaatacattgtgtttctatattttttttgacgacaaaaggtatgtacttataaagacatttttttcttttgttaacgttattagcatatctttgtgctttattatcctggtgacagttaccgttctatgtaggctgtgacttgcgctgcttttttagagcacttggcaaatcagaaatgcttctagctgtatttgtatgcacttattttaaaaagaaaaaaaaagccaaatacattttctgacattgtaagattgccttactgtctgtcattccttattgctggcccctttctcaggccggaggccaagtggtggagaaggaaaggaaatgatcgaacgggcatgttgtcaagtgggcatgccactgggaaataccaccagtttaccctgaaacattgtcctcagaggagtaggaaagtggattttgaatctctattttgctcaaaagttcagttcctgagatactgatgactgagagtgctgctgggaaattttcaggattgtgtggtcttttggggttttttgtttttttttttttaagacaaagttgaccgctgttcactgtccacgtgatcagttgtaagattacaatgctgcatgctagttggttacataagatacaattccagtgatggaaggcggttataatggatggtggtgtgtacaagatggcactgccatctttgagcagagcccagctctgcagcgccacttcatctttttaaacaccctagaggtctgtttgttgttgctgttgtcctttattttgaaagagttgcaagagaagttacagtccaggtgaacttggagattgtgggattggttttgtttctgttttgttttgtttatcatttacctgtagtgctattgctgttgatactatcacctataccctgtttctagtgagtgctgaatacagtatggtacaatgacagtaacagccgcgtggtgctgccaggactgcccttgggcatatcagtgacagcccaaatgtgggtggaggaaacctgtaatttccttcttaacatgtgtttgaaataccaagtgaataatactgttctggaaaaaaatgataaactagtggaaattaaagaaattaagggttttatataatagacaggccccacctctcaaaatatttttagaagtctttttgtaaactaatttcttttgatcactattttgcatcagtaaaatgatttttttaaaaccaataaatcatcaattattagaaatagttgtctcacagtgatactggtttttcttttgtgctgttatgatttaacattgacaggaacactattttaaatccttacgttcaggtgtttgtaacttggccttataattaggctgaattatggcttcaaggtctacaatttatgtgtatggttcacagcctagcttctatttacatttgaaaatacagatttttaccaactttggattcttttttagttatatgtttgtctttcctttttaaattgttcaaaactattttttaatggtcaagttactaacacttgaaaatcagatactgcaccaaatacagtgtttttccgtagtgtttttaatgagtgcacctattactactgtgcgagaattcatgttttaccagtcattgttatattacaaacagacttgcatgattaaccagttgttacacttactttttcaagttggagtatatatgactcagtgcagactggtctctcttatgtgaatgcacacatgcagaaatgcagagtcaattttacatgcccataaagacatttgtaaagaattcagctcttatggtctgttgtataaatgtgtatctaggcacttattataactggaatttgacctcacagatgttacaacttgatcagtcgtttgacctaatttgtggtagctatctgtatgttttgcaatcttaatacagacatgctttccaaaaagattaatacagaaccatcctgccgttttggataagtctatccagctgtggaaagggcaacctgtggtttctctgtactggtgtttaatgggggaagaatatgaacagctttaaagagctgtgtattgtggttactactattaaaaaataagatctgcacgagtctgactggcctttgggtggcctttgtggacggctcgtagctggaaagtgttgatctgggttttctggcattcttttaagttaaaaagttaacatcgggacatgggtttgatcttttgttgtacctgatgacagtgcagagattctccacagctggataaaaatgtcacaaagctacttactgtacatgggcagtatcagatttcaaatcctaatatttcagctgtgcttttaatactcaaaatattaggggatggggtgttgaagctttcccttttttgcttttaacaatttatagaatttaacagatgtactgtctttcatgtggcctcacatttaaagttatgagaacatacacatggtttacaacttttactatatacctttccttggccaccaagtattttaaaagtgtgccaccttttaacctttactttttttaagttgaaggtgatactttttctatatatgatgaaactcatgtcaactgaagtgagtgtaatctcagatatcaacattattatattttaaaatcacgctatggaaatatcacctgaattctgtcatttgtcagatttacagtacctttttttctttaacttttagcattaaataaaaataaaattgggagcactgaa

SEQ ID NO: 345716 - DNA, 3442 bp, Homo sapiens
gcggtggcggtggcggccgcgtcccggcggcagtcgtgctacctgtgtgacctgccccgcatgcccagtcccccatggcagccctgatcttagtagcagacaatgcagggggcagtcatgcctcaaaagatgccaaccaggttcactccactaccaggaggaatagcaacagtccgccctctccgtcctctatgaaccaaagaaggctgggccccagagaggtggggggccagggagcaggcaacacaggaggactggagccagtgcaccctgccagcctcccggactcctctctggcaaccagtgccccgctgtgctgcaccctctgccacgagcggctggaggacacccattttgtgcagtgcccgtccgtcccttcgcacaagttctgcttcccttgctccagacaaagcatcaaacagcagggagctagtggagaggtctattgtcccagtggggaaaaatgccctcttgtgggctccaatgtcccctgggcctttatgcaaggggaaattgcaaccatccttgctggagatgtgaaagtgaaaaaagagagagactcgtgacttttccggtttcagaaaaacccaatgattacccttaattaaaactgcttgaattgtatatatatctccatatatatatatatccaagacaagggaaatgtagacttcataaacatggctgtataattttgattttttttgaatacattgtgtttctatattttttttgacgacaaaaggtatgtacttataaagacatttttttcttttgttaacgttattagcatatctttgtgctttattatcctggtgacagttaccgttctatgtaggctgtgacttgcgctgcttttttagagcacttggcaaatcagaaatgcttctagctgtatttgtatgcacttattttaaaaagaaaaaaaaagccaaatacattttctgacattgtaagattgccttactgtctgtcattccttattgctggcccctttctcaggccggaggccaagtggtggagaaggaaaggaaatgatcgaacgggcatgttgtcaagtgggcatgccactgggaaataccaccagtttaccctgaaacattgtcctcagaggagtaggaaagtggattttgaatctctattttgctcaaaagttcagttcctgagatactgatgactgagagtgctgctgggaaattttcaggattgtgtggtcttttggggttttttgtttttttttttttaagacaaagttgaccgctgttcactgtccacgtgatcagttgtaagattacaatgctgcatgctagttggttacataagatacaattccagtgatggaaggcggttataatggatggtggtgtgtacaagatggcactgccatctttgagcagagcccagctctgcagcgccacttcatctttttaaacaccctagaggtctgtttgttgttgctgttgtcctttattttgaaagagttgcaagagaagttacagtccaggtgaacttggagattgtgggattggttttgtttctgttttgttttgtttatcatttacctgtagtgctattgctgttgatactatcacctataccctgtttctagtgagtgctgaatacagtatggtacaatgacagtaacagccgcgtggtgctgccaggactgcccttgggcatatcagtgacagcccaaatgtgggtggaggaaacctgtaatttccttcttaacatgtgtttgaaataccaagtgaataatactgttctggaaaaaaatgataaactagtggaaattaaagaaattaagggttttatataatagacaggccccacctctcaaaatatttttagaagtctttttgtaaactaatttcttttgatcactattttgcatcagtaaaatgatttttttaaaaccaataaatcatcaattattagaaatagttgtctcacagtgatactggtttttcttttgtgctgttatgatttaacattgacaggaacactattttaaatccttacgttcaggtgtttgtaacttggccttataattaggctgaattatggcttcaaggtctacaatttatgtgtatggttcacagcctagcttctatttacatttgaaaatacagatttttaccaactttggattcttttttagttatatgtttgtctttcctttttaaattgttcaaaactattttttaatggtcaagttactaacacttgaaaatcagatactgcaccaaatacagtgtttttccgtagtgtttttaatgagtgcacctattactactgtgcgagaattcatgttttaccagtcattgttatattacaaacagacttgcatgattaaccagttgttacacttactttttcaagttggagtatatatgactcagtgcagactggtctctcttatgtgaatgcacacatgcagaaatgcagagtcaattttacatgcccataaagacatttgtaaagaattcagctcttatggtctgttgtataaatgtgtatctaggcacttattataactggaatttgacctcacagatgttacaacttgatcagtcgtttgacctaatttgtggtagctatctgtatgttttgcaatcttaatacagacatgctttccaaaaagattaatacagaaccatcctgccgttttggataagtctatccagctgtggaaagggcaacctgtggtttctctgtactggtgtttaatgggggaagaatatgaacagctttaaagagctgtgtattgtggttactactattaaaaaataagatctgcacgagtctgactggcctttgggtggcctttgtggacggctcgtagctggaaagtgttgatctgggttttctggcattcttttaagttaaaaagttaacatcgggacatgggtttgatcttttgttgtacctgatgacagtgcagagattctccacagctggataaaaatgtcacaaagctacttactgtacatgggcagtatcagatttcaaatcctaatatttcagctgtgcttttaatactcaaaatattaggggatggggtgttgaagctttcccttttttgcttttaacaatttatagaatttaacagatgtactgtctttcatgtggcctcacatttaaagttatgagaacatacacatggtttacaacttttactatatacctttccttggccaccaagtattttaaaagtgtgccaccttttaacctttactttttttaagttgaaggtgatactttttctatatatgatgaaactcatgtcaactgaagtgagtgtaatctcagatatcaacattattatattttaaaatcacgctatggaaatatcacctgaattctgtcatttgtcagatttacagtacctttttttctttaacttttagcattaaataaaaataaaattgggagcactgaa

SEQ ID NO: 345717 - DNA, 2220 bp, Homo sapiens
gcggtggcggtggcggccgcgtcccggcggcagtcgtgctacctgtgtgacctgccccgcatgccctgggccatgatctgggacttcaccgaacccgtctgccgcggctgcgtcaactacgagggcgccgaccgcgtcgagttcgtcatcgagacggcgcggcagctcaagcgggcgcacggctgcttcccggagggtcgctccccacccggcgccgcggccccggccgccgccaagccgccgccgctctccgccaaggacatccttttgcagcagcagcagcagcttggccacggcggccccgaggcggccccgcgcgcgccgcaggccttggagcgctacccgttggcggccgcggccgagaggcccccgcgcctcggctctgacttcggcagcagccgcccggcagcgagcctggcccagccgccgacgccgcagccgccgcccgtgaacggcatcctggtgcccaacggcttctccaagctagaggagccgcccgagctgaatcgccagagcccgaacccgcggcgcggccacgcggtgccgcccaccctggtgccgctcatgaacggctcggccacgccgctgcccaccgcgctcggcctcggcggccgcgctgccgcctccttagccgcggtgtccggaaccgcggccgccagcctgggctccgcgcagcccaccgatctgggcgcccacaagcggccggcatccgtgtcgagcagcgctgccgtggagcacgagcagcgtgaggcggcagccaaggagaaacaaccgccgccgcctgcgcaccggggcccggccgacagcctgtccaccgcggccggggccgccgagctgagcgcggaaggtgcgggcaagagccgcgggtctggagagcaggactgggtcaacaggcccaagaccgtgcgcgacacgctgctggcgctgcaccagcacggccactcggggcccttcgagagcaagtttaagaaggagccggccctgactgcagttgcaagaacagcaaggaaaaggaagccctctccagaaccagaaggtgaagtcgggccccctaagatcaacggagaggcccagccgtggctgtccacatccacagaggggctcaagatccccatgactcctacatcctcttttgtgtctccgccaccacccactgcctcacctcattccaaccggaccacaccgcctgaagcggcccagaatggccagtcccccatggcagccctgatcttagtagcagacaatgcagggggcagtcatgcctcaaaagatgccaaccaggttcactccactaccaggaggaatagcaacagtccgccctctccgtcctctatgaaccaaagaaggctgggccccagagaggtggggggccagggagcaggcaacacaggaggactggagccagtgcaccctgccagcctcccggactcctctctggcaaccagtgccccgctgtgctgcaccctctgccacgagcggctggaggacacccattttgtgcagtgcccgtccgtcccttcgcacaagttctgcttcccttgctccagacaaagcatcaaacagcagggagctagtggagaggtctattgtcccagtggggaaaaatgccctcttgtgggctccaatgtcccctgggcctttatgcaaggggaaattgcaaccatccttgctggagatgtgaaagtgaaaaaagagagagactcgtgacttttccggtttcagaaaaacccaatgattacccttaattaaaactgcttgaattgtatatatatctccatatatatatatatccaagacaagggaaatgtagacttcataaacatggctgtataattttgattttttttgaatacattgtgtttctatattttttttgacgacaaaaggtatgtacttataaagacatttttttcttttgttaacgttattagcatatctttgtgctttattatcctggtgacagttaccgttctatgtaggctgtgacttgcgctgcttttttagagcacttggcaaatcagaaatgcttctagctgtatttgtatgcacttattttaaaaagaaaaaaatgtctttataagtacataccttttgttaaccgttattagcatatctttgtgctttattatcctggtgacagttaccgttctatgtaggctgtgacttgcgctgcttttttagagcacttgggcaaatcagaaatgcttctagctgtatttg

SEQ ID NO: 345718 - DNA, 1804 bp, Homo sapiens
gcggtggcggtggcggccgcgtcccggcggcagtcgtgctacctgtgtgacctgccccgcatgccctgggccatgatctgggacttcaccgaacccgtctgccgcggctgcgtcaactacgagggcgccgaccgcgtcgagttcgtcatcgagacggcgcggcagctcaagcgggcgcacggctgcttcccggagggtcgctccccacccggcgccgcggccccggccgccgccaagccgccgccgctctccgccaaggacatccttttgcagcagcagcagcagcttggccacggcggccccgaggcggccccgcgcgcgccgcaggccttggagcgctacccgttggcggccgcggccgagaggcccccgcgcctcggctctgacttcggcagcagccgcccggcagcgagcctggcccagccgccgacgccgcagccgccgcccgtgaacggcatcctggtgcccaacggcttctccaagctagaggagccgcccgagctgaatcgccagagcccgaacccgcggcgcggccacgcggtgccgcccaccctggtgccgctcatgaacggctcggccacgccgctgcccaccgcgctcggcctcggcggccgcgctgccgcctccttagccgcggtgtccggaaccgcggccgccagcctgggctccgcgcagcccaccgatctgggcgcccacaagcggccggcatccgtgtcgagcagcgctgccgtggagcacgagcagcgtgaggcggcagccaaggagaaacaaccgccgccgcctgcgcaccggggcccggccgacagcctgtccaccgcggccggggccgccgagctgagcgcggaaggtgcgggcaagagccgcgggtctggagagcaggactgggtcaacaggcccaagaccgtgcgcgacacgctgctggcgctgcaccagcacggccactcggggcccttcgagagcaagtttaagaaggagccggccctgactgcagttgcaagaacagcaaggaaaaggaagccctctccagaaccagaaggtgaagtcgggccccctaagatcaacggagaggcccagccgtggctgtccacatccacagaggggctcaagatccccatgactcctacatcctcttttgtgtctccgccaccacccactgcctcacctcattccaaccggaccacaccgcctgaagcggcccagaatggccagtcccccatggcagccctgatcttagtagcagacaatgcagggggcagtcatgcctcaaaagatgccaaccaggttcactccactaccaggaggaatagcaacagtccgccctctccgtcctctatgaaccaaagaaggctgggccccagagaggtggggggccagggagcaggcaacacaggaggactggagccagtgcaccctgccagcctcccggactcctctctggcaaccagtgccccgctgtgctgcaccctctgccacgagcggctggaggacacccattttgtgcagtgcccgtccgtcccttcgcacaagttctgcttcccttgctccagacaaagcatcaaacagcagggagctagtggagaggtctattgtcccagtggggaaaaatgccctcttgtgggctccaatgtcccctgggcctttatgcaaggggaaattgcaaccatccttgctggagatgtgaaagtgaaaaacaaaaaaaaaacctcgagactagttctctctctactctcccagccttacgggcccgaaccctcgttgttgacgggtgcagacctaagccggagcggggtacaggcggccggcc

SEQ ID NO: 345719 - DNA, 1240 bp, Homo sapiens
gcggtggcggtggcggccgcgtcccggcggcagtcgtgctacctgtgtgacctgccccgcatgccctgggccatgatctgggacttcaccgaacccgtctgccgcggctgcgtcaactacgagggcgccgaccgcgtcgagttcgtcatcgagacggcgcggcagctcaagcgggcgcacggctgcttcccggagggtcgctccccacccggcgccgcggccccggccgccgccaagccgccgccgctctccgccaaggacatccttttgcagcagcagcagcagcttggccacggcggccccgaggcggccccgcgcgcgccgcaggccttggagcgctacccgttggcggccgcggccgagaggcccccgcgcctcggctctgacttcggcagcagccgcccggcagcgagcctggcccagccgccgacgccgcagccgccgcccgtgaacggcatcctggtgcccaacggcttctccaagctagaggagccgcccgagctgaatcgccagagcccgaacccgcggcgcggccacgcggtgccgcccaccctggtgccgctcatgaacggctcggccacgccgctgcccaccgcgctcggcctcggcggccgcgctgccgcctccttagccgcggtgtccggaaccgcggccgccagcctgggctccgcgcagcccaccgatctgggcgcccacaagcggccggcatccgtgtcgagcagcgctgccgtggagcacgagcagcgtgaggcggcagccaaggagaaacaaccgccgccgcctgcgcaccggggcccggccgacagcctgtccaccgcggccggggccgccgagctgagcgcggaaggtgcgggcaagagccgcgggtctggagagcaggactgggtcaacaggcccaagaccgtgcgcgacacgctgctggcgctgcaccagcacggccactcggggcccttcgagagcaagtttaagaaggagccggccctgactgcaggcaggttgttgggtttcgaggccaacggggccaacgggtctaaagcaggtaggggcggctgtgaagtgagggggtctaggggagaaaaggggacggagagcagaggaagggtggttctttggattcaccattttaccccagcccagaaacaacaaacaccccacttcctgatctgcctgaggcggaaccagtgcttggtggcaacgtgttcatgtctgaagcagcataacagagatgagtcagactggg

SEQ ID NO: 345720 - DNA, 666 bp, Homo sapiens
aaacaaggacacagcacccatggataacaccttcttaatggtcaaaccaaatggtcctggttttactgggggcggatttcctctcaggtcaaccaaaatgacgttctaacctgaagctgctggctgtttccagttgaacaactcatgaaatctgctctgggacattttgggggaatctcaaagtccttggatcatagaactgagtgctgagaatccaggatggaaagaaatgcagaactatcatagtcacatacatataagagggatggtgttttgtctggttcacgttgatattaacagatcataattctctctgttcagttaggctgacctattgcatgaagcaaatcttttgttgctaccccattgattgaaatgtactagaccttaatttctttattacagacattggtgtacttgaaggttttatatttaaaagtatttttgaaatgcaatgtgtcccctctcaccttattaacaataatctattttaattattcctcattaacaagtcattgcatgagatgagaaagaaggacaaactcttaagaatttaaaaagtgttttgagaatgatttctatatggaatttcttttcaggcccggaatgggaaaatctattccaaagagacacactaataaatacttcattataaaaaataaaaaa

SEQ ID NO: 345721 - DNA, 998 bp, Homo sapiens
gtttcctgctgaggcctcagtggaagtcgtcatcagtgatgctttaggggtctagtgacaccaatgaccgtgatctcagtggaaaagggcacagtgtgtcccaggcatttcgcgtttatgttaaaacgggtggaagatagcaagccggcagaggccgggccgctgcacccgcctgttccgaggtgggtagggggtggggggctgttcccaggattcccctctacgctttctgtggtgaccacggattactgcgtgacaacgggaagccgggagccgaggcccggtccctgaccacgcgtgcctggccacccctgcaggaggactgccaccagaagatcgatgacctcttctccgggaagctgtacctcatcggcattgctgccatcgtggtcgctgtgatcatgatcttcgagatgatcctgagcatggtgctgtgctgtggcatccggaacagctccgtgtactgaggccccgcagctctggccacagggacctctgcagtgccccctaagtgacccggacacttccgagggggccatcaccgcctgtgtatataacgtttccggtattactctgctacacgtagcctttttacttttggggttttgtttttgttctgaactttcctgttaccttttcagggctgacgtcacatgtaggtggcgtgtatgagtggagacgggcctgggtcttggggactggagggcaggggtccttctgccctggggtcccagggtgctctgcctgctcagccaggcctctcctgggagccactcgcccagagactcagcttggccaacttggggggctgtgtccacccagcccgcccgtcctgtgggctgcacagctcaccttgttccctcctgccccggttcgagagccgagtctgtgggcactctctgccttcatgcacctgtcctttctaacacgtcgccttcaactgtaatcacaacatcctgactccgtcatttaataaagaaggaacatcaggcatgcta

SEQ ID NO: 345722 - DNA, 727 bp, Homo sapiens
tggtagcgtgcccgagggacacaacatcatcagcaacctcttcaaggaggactgccaccagaagatcgatgacctcttctccgggaagctgtacctcatcggcattgctgccatcgtggtcgctgtgatcatgatcttcgagatgatcctgagcatggtgctgtgctgtggcatccggaacagctccgtgtactgaggccccgcagctctggccacagggacctctgcagtgccccctaagtgacccggacacttccgagggggccatcaccgcctgtgtatataacgtttccggtattactctgctacacgtagcctttttacttttggggttttgtttttgttctgaactttcctgttaccttttcagggctgacgtcacatgtaggtggcgtgtatgagtggagacgggcctgggtcttggggactggagggcaggggtccttctgccctggggtcccagggtgctctgcctgctcagccaggcctctcctgggagccactcgcccagagactcagcttggccaacttggggggctgtgtccacccagcccgcccgtcctgtgggctgcacagctcaccttgttccctcctgccccggttcgagagccgagtctgtgggcactctctgccttcatgcacctgtcctttctaacacgtcgccttcaactgtaatcacaacatcctgactccgtcatttaataaagaaggaacatcaggcatgcta

SEQ ID NO: 345723 - DNA, 573 bp, Homo sapiens
gtgctaccttcaggctgattgcaggcgacagcgatttctaggtagtcagtagaattagaattgtgaagatgataagtgtacagggaaggttaatggttgatattgctagggcggcgcttccaattaggtgcatgagtaggtggcctgcaatcattccaggcttgattgaggccgtggtggatgatgacgccaacaacgccaaggctgtggtgaagaccttccacgagacgcttgactgctgtggctccagcacactgactgctttgaccacctcagtgctcaagaacaatttgtgtccctcgggcagcaacatcatcagcaacctcttcaaggaggactgccaccagaagatcgatgacctcttctccgggaagctgtacctcatcggcattgctgccatcgtggtcgctgtgatcatgatcttcgagatgatcctgagcatggtgctgtgctgtggcatccggaacagctccgtgtactgaggccccgcagctctggccacagggacctctgcagtgccccctaagtgacccggacacttccgagggggcaatcagcctggaagggaccgac

SEQ ID NO: 345724 - DNA, 1354 bp, Homo sapiens
ccattgtgctggaaaggcgcgcaacggcggcgacggcggcgaccccaccgcgcatcctgccaggcctccggcgcccagcggcccacgcgcccccgccgccgcccgcgccgccatgggagtggagggctgcaccaagtgcatcaagtacctgctcttcgtcttcaatttcgtcttctggctggctggaggcgtgatcctgggtgtggccctgtggctccgccatgacccgcagaccaccaacctcctgtatctggagctgggagacaagcccgcgcccaacaccttctatgtaggcatctacatcctcatcgctgtgggcgctgtcatgatgttcgttggcttcctgggctgctacggggccatccaggaatcccagtgcctgctggggacgttcttcacctgcctggtcatcctgtttgcctgtgaggtggccgccggcatctggggctttgtcaacaaggaccagatcgccaaggatgtgaagcagttctatgaccaggccctacagcaggccgtggtggatgatgacgccaacaacgccaaggctgtggtgaagaccttccacgagacgcttgactgctgtggctccagcacactgactgctttgaccacctcagtgctcaagaacaatttgtgtccctcgggcagcaacatcatcagcaacctcttcaaggaggactgccaccagaagatcgatgacctcttctccgggaagctgtacctcatcggcattgctgccatcgtggtcgctgtgatcatgatcttcgagatgatcctgagcatggtgctgtgctgtggcatccggaacagctccgtgtactgaggccccgcagctctggccacagggacctctgcagtgccccctaagtgacccggacacttccgagggggccatcaccgcctgtgtatataacgtttccggtattactctgctacacgtagcctttttacttttggggttttgtttttgttctgaactttcctgttaccttttcagggctgacgtcacatgtaggtggcgtgtatgagtggagacgggcctgggtcttggggactggagggcaggggtccttctgccctggggtcccagggtgctctgcctgctcagccaggcctctcctgggagccactcgcccagagactcagcttggccaacttggggggctgtgtccacccagcccgcccgtcctgtgggctgcacagctcaccttgttccctcctgccccggttcgagagccgagtctgtgggcactctctgccttcatgcacctgtcctttctaacacgtcgccttcaactgtaatcacaacatcctgactccgtcatttaataaagaaggaacatcaggcatgcta

SEQ ID NO: 345725 - DNA, 1209 bp, Homo sapiens
ggtgggagcaggtggcagagaggcttcccacagctggctggaggcgtgatcctgggtgtggccctgtggctccgccatgacccgcagaccaccaacctcctgtatctggagctgggagacaagcccgcgcccaacaccttctatgtaggcatctacatcctcatcgctgtgggcgctgtcatgatgttcgttggcttcctgggctgctacggggccatccaggaatcccagtgcctgctggggacgttcttcacctgcctggtcatcctgtttgcctgtgaggtggccgccggcatctggggctttgtcaacaaggaccagatcgccaaggatgtgaagcagttctatgaccaggccctacagcaggccgtggtggatgatgacgccaacaacgccaaggctgtggtgaagaccttccacgagacgcttgactgctgtggctccagcacactgactgctttgaccacctcagtgctcaagaacaatttgtgtccctcgggcagcaacatcatcagcaacctcttcaaggaggactgccaccagaagatcgatgacctcttctccgggaagctgtacctcatcggcattgctgccatcgtggtcgctgtgatcatgatcttcgagatgatcctgagcatggtgctgtgctgtggcatccggaacagctccgtgtactgaggccccgcagctctggccacagggacctctgcagtgccccctaagtgacccggacacttccgagggggccatcaccgcctgtgtatataacgtttccggtattactctgctacacgtagcctttttacttttggggttttgtttttgttctgaactttcctgttaccttttcagggctgacgtcacatgtaggtggcgtgtatgagtggagacgggcctgggtcttggggactggagggcaggggtccttctgccctggggtcccagggtgctctgcctgctcagccaggcctctcctgggagccactcgcccagagactcagcttggccaacttggggggctgtgtccacccagcccgcccgtcctgtgggctgcacagctcaccttgttccctcctgccccggttcgagagccgagtctgtgggcactctctgccttcatgcacctgtcctttctaacacgtcgccttcaactgtaatcacaacatcctgactccgtcatttaataaagaaggaacatcaggcatgcta

SEQ ID NO: 345726 - DNA, 1452 bp, Homo sapiens
tgattacccagaggcgcacccgtgccgtggcctgcccgtcgtctatgcacccgtgctgtggcgtgcccgtcgtctgtgtggcatgcctgtctgtgcacccgtgctgtggcgtgcccgtcgtctgtgtggcatgcctgtctgtgcacccgtgcgtggcgtgcccgtcgtctgtgcacccgtgctgtggtgtgcccttcgtctgttccttttattgccgggcagggttgcacccacatgtgcaagccagcgacggaccccaggttcacccgttcaccgctggctggaggcgtgatcctgggtgtggccctgtggctccgccatgacccgcagaccaccaacctcctgtatctggagctgggagacaagcccgcgcccaacaccttctatgtaggcatctacatcctcatcgctgtgggcgctgtcatgatgttcgttggcttcctgggctgctacggggccatccaggaatcccagtgcctgctggggacgttcttcacctgcctggtcatcctgtttgcctgtgaggtggccgccggcatctggggctttgtcaacaaggaccagatcgccaaggatgtgaagcagttctatgaccaggccctacagcaggccgtggtggatgatgacgccaacaacgccaaggctgtggtgaagaccttccacgagacgcttgactgctgtggctccagcacactgactgctttgaccacctcagtgctcaagaacaatttgtgtccctcgggcagcaacatcatcagcaacctcttcaaggaggactgccaccagaagatcgatgacctcttctccgggaagctgtacctcatcggcattgctgccatcgtggtcgctgtgatcatgatcttcgagatgatcctgagcatggtgctgtgctgtggcatccggaacagctccgtgtactgaggccccgcagctctggccacagggacctctgcagtgccccctaagtgacccggacacttccgagggggccatcaccgcctgtgtatataacgtttccggtattactctgctacacgtagcctttttacttttggggttttgtttttgttctgaactttcctgttaccttttcagggctgacgtcacatgtaggtggcgtgtatgagtggagacgggcctgggtcttggggactggagggcaggggtccttctgccctggggtcccagggtgctctgcctgctcagccaggcctctcctgggagccactcgcccagagactcagcttggccaacttggggggctgtgtccacccagcccgcccgtcctgtgggctgcacagctcaccttgttccctcctgccccggttcgagagccgagtctgtgggcactctctgccttcatgcacctgtcctttctaacacgtcgccttcaactgtaatcacaacatcctgactccgtcatttaataaagaaggaacatcaggcatgcta

SEQ ID NO: 345727 - DNA, 1227 bp, Homo sapiens
cagacacaggatgtccctctgccagcccctgaagccccgtcccctgacgagctggctggaggcgtgatcctgggtgtggccctgtggctccgccatgacccgcagaccaccaacctcctgtatctggagctgggagacaagcccgcgcccaacaccttctatgtaggcatctacatcctcatcgctgtgggcgctgtcatgatgttcgttggcttcctgggctgctacggggccatccaggaatcccagtgcctgctggggacgttcttcacctgcctggtcatcctgtttgcctgtgaggtggccgccggcatctggggctttgtcaacaaggaccagatcgccaaggatgtgaagcagttctatgaccaggccctacagcaggccgtggtggatgatgacgccaacaacgccaaggctgtggtgaagaccttccacgagacgcttgactgctgtggctccagcacactgactgctttgaccacctcagtgctcaagaacaatttgtgtccctcgggcagcaacatcatcagcaacctcttcaaggaggactgccaccagaagatcgatgacctcttctccgggaagctgtacctcatcggcattgctgccatcgtggtcgctgtgatcatgatcttcgagatgatcctgagcatggtgctgtgctgtggcatccggaacagctccgtgtactgaggccccgcagctctggccacagggacctctgcagtgccccctaagtgacccggacacttccgagggggccatcaccgcctgtgtatataacgtttccggtattactctgctacacgtagcctttttacttttggggttttgtttttgttctgaactttcctgttaccttttcagggctgacgtcacatgtaggtggcgtgtatgagtggagacgggcctgggtcttggggactggagggcaggggtccttctgccctggggtcccagggtgctctgcctgctcagccaggcctctcctgggagccactcgcccagagactcagcttggccaacttggggggctgtgtccacccagcccgcccgtcctgtgggctgcacagctcaccttgttccctcctgccccggttcgagagccgagtctgtgggcactctctgccttcatgcacctgtcctttctaacacgtcgccttcaactgtaatcacaacatcctgactccgtcatttaataaagaaggaacatcaggcatgcta

SEQ ID NO: 345728 - DNA, 1309 bp, Homo sapiens
catgaggtgcccagtccccatgtggcctccttagtctccgtcctgtgtcatggaagaggtaactgaggcacagaaaactcaccaggccaggctgggatgtgaggtcccttgctgctcatccctggcagtcagcaaccctacatcttcccagctgggcggcccgtggtgggttcggcacccaggaccctccggggtcttgggctgtggcgagtgtgtaggcacccacctggtgtctctctccccgcaaggcatctacatcctcatcgctgtgggcgctgtcatgatgttcgttggcttcctgggctgctacggggccatccaggaatcccagtgcctgctggggacgttcttcacctgcctggtcatcctgtttgcctgtgaggtggccgccggcatctggggctttgtcaacaaggaccagatcgccaaggatgtgaagcagttctatgaccaggccctacagcaggccgtggtggatgatgacgccaacaacgccaaggctgtggtgaagaccttccacgagacgcttgactgctgtggctccagcacactgactgctttgaccacctcagtgctcaagaacaatttgtgtccctcgggcagcaacatcatcagcaacctcttcaaggaggactgccaccagaagatcgatgacctcttctccgggaagctgtacctcatcggcattgctgccatcgtggtcgctgtgatcatgatcttcgagatgatcctgagcatggtgctgtgctgtggcatccggaacagctccgtgtactgaggccccgcagctctggccacagggacctctgcagtgccccctaagtgacccggacacttccgagggggccatcaccgcctgtgtatataacgtttccggtattactctgctacacgtagcctttttacttttggggttttgtttttgttctgaactttcctgttaccttttcagggctgacgtcacatgtaggtggcgtgtatgagtggagacgggcctgggtcttggggactggagggcaggggtccttctgccctggggtcccagggtgctctgcctgctcagccaggcctctcctgggagccactcgcccagagactcagcttggccaacttggggggctgtgtccacccagcccgcccgtcctgtgggctgcacagctcaccttgttccctcctgccccggttcgagagccgagtctgtgggcactctctgccttcatgcacctgtcctttctaacacgtcgccttcaactgtaatcacaacatcctgactccgtcatttaataaagaaggaacatcaggcatgcta

SEQ ID NO: 345729 - DNA, 949 bp, Homo sapiens
cggacgcgtgggtcgacccacgcgtcgggccgcggatctggggcttgtcaacaaggaccagatcgccaaggatgtgaagcagttctatgaccaggccctacagcaggccgtggtggatgatgacgccaacaacgccaaggctgtggtgaagaccttccacgagacgcttgactgctgtggctccagcacactgactgctttgaccacctcagtgctcaagaacaatttgtgtccctcgggcagcaacatcatcagcaacctcttcaaggaggactgccaccagaagatcgatgacctcttctccgggaagctgtacctcatcggcattgctgccatcgtggtcgctgtgatcatgatcttcgagatgatcctgagcatggtgctgtgctgtggcatccggaacagctccgtgtactgaggccccgcagctctggccacagggacctctgcagtgccccctaagtgacccggacacttccgagggggccatcaccgcctgtgtatataacgtttccggtattactctgctacacgtagcctttttacttttggggttttgtttttgttctgaactttcctgttaccttttcagggctgacgtcacatgtaggtggcgtgtatgagtggagacgggcctgggtcttggggactggagggcaggggtccttctgccctggggtcccagggtgctctgcctgctcagccaggcctctcctgggagccactcgcccagagactcagcttggccaacttggggggctgtgtccacccagcccgcccgtcctgtgggctgcacagctcaccttgttccctcctgccccggttcgagagccgagtctgtgggcactctctgccttcatgcacctgtcctttctaacacgtcgccttcaactgtaatcacaacatcctgactccgtcatttaataaagaaggaacatcaggcatgcta

SEQ ID NO: 345730 - DNA, 1737 bp, Homo sapiens
  misc_feature (1559)..(1559): n is a, c, g, or t
  misc_feature (1562)..(1562): n is a, c, g, or t
ccattgtgctggaaaggcgcgcaacggcggcgacggcggcgaccccaccgcgcatcctgccaggcctccggcgcccagcggcccacgcgcccccgcgtccccgcgccccgcgcccctttcttcgcgcccccgcccctcggcccgccaggcccccttgccggccacccgccaggccccgcgccggcccgcccgccgcccaggaccggcccgcgccccgcaggccgcccgccgcccgcgccgccatgggagtggagggctgcaccaagtgcatcaagtacctgctcttcgtcttcaatttcgtcttctggctggctggaggcgtgatcctgggtgtggccctgtggctccgccatgacccgcagaccaccaacctcctgtatctggagctgggagacaagcccgcgcccaacaccttctatgtaggcatctacatcctcatcgctgtgggcgctgtcatgatgttcgttggcttcctgggctgctacggggccatccaggaatcccagtgcctgctggggacgttcttcacctgcctggtcatcctgtttgcctgtgaggtggccgccggcatctggggctttgtcaacaaggaccagatcgccaaggatgtgaagcagttctatgaccaggccctacagcaggccgtggtggatgatgacgccaacaacgccaaggctgtggtgaagaccttccacgagacgcttgactgctgtggctccagcacactgactgctttgaccacctcagtgctcaagaacaatttgtgtccctcgggcagcaacatcatcagcaacctcttcaaggaggactgccaccagaagatcgatgacctcttctccgggaagctgtacctcatcggcattgctgccatcgtggtcgctgtgatcatgatcttcgagatgatcctgagcatggtgctgtgctgtggcatccggaacagctccgtgtactgaggccccgcagctctggccacagggacctctgcagtgccccctaagtgacccggacacttccgagggggccatcaccgcctgtgtatataacgtttccggtattactctgctacacgtagcctttttacttttggggttttgtttttgttctgaactttcctgttaccttttcagggctgacgtcacatgtaggtggcgtgtatgagtggagacgggcctgggtcttggggactggagggcaggggtccttctgccctggggtcccagggtgctctgcctgctcagccaggcctctcctgggagccactcgcccagagactcagcttggccaacttggggggctgtgtccacccagcccgcccgtcctgtgggctgcacagctcaccttgttccctcctgccccggttcgagagccgagtctgtgggcactctctgccttcatgcacctgtcctttctaacacgtcgccttcaactgtaatcacaacatcctgactccgtcatttaataaagaaggaacatcaggcatgctaaaaaaaaaaaaaaaaaaaaaaaaaaaaaaaaaaaaaaaaaaaaaaaaaaaaaaaaaaaaaggggggggggcgcgnaanaaagaaactcaccaccaagcgaggggacccccacaatatgacacgagcacaacacaggcaatatagtcaggacaaaacaaggggcgcacccaaaaaaaagagggcgcagcaataaaaagcaacgaatacgaagaagcgaccacgctgtaaaaaaaacgacgaccgcggcaggaac

SEQ ID NO: 345731 - DNA, 2091 bp, Homo sapiens
ccattgtgctggaaaggcgcgcaacggcggcgacggcggcgaccccaccgcgcatcctgccaggcctccggcgcccagcggcccacgcgcccccgcgtccccgcgccccgcgcccctttcttcgcgcccccgcccctcggcccgccaggcccccttgccggccacccgccaggccccgcgccggcccgcccgccgcccaggaccggcccgcgccccgcaggccgcccgccgcccgcgccgccatgggagtggagggctgcaccaagtgcatcaagtacctgctcttcgtcttcaatttcgtcttctggctggctggaggcgtgatcctgggtgtggccctgtggctccgccatgacccgcagaccaccaacctcctgtatctggagctgggagacaagcccgcgcccaacaccttctatgtaggcatctacatcctcatcgctgtgggcgctgtcatgatgttcgttggcttcctgggctgctacggggccatccaggaatcccagtgcctgctggggacgttcttcacctgcctggtcatcctgtttgcctgtgaggtggccgccggcatctggggctttgtcaacaaggaccagatcgccaaggatgtgaagcagttctatgaccaggccctacagcaggccgtggtggatgatgacgccaacaacgccaaggctgtggtgaagaccttccacgagacgcttgactgctgtggctccagcacactgactgctttgaccacctcagtgctcaagaacaatttgtgtccctcgggcagcaacatcatcagcaacctcttcaaggaggactgccaccagaagatcgatgacctcttctccgggaagctgtacctcatcggcattgctgccatcgtggtcgctgtgatcatgatcttcgagatgatcctgagcatggtgctgtgctgtggcatccggaacagctccgtgtactgaggccccgcagctctggccacagggacctctgcagtgccccctaagtgacccggacacttccgagggggccatcaccgcctgtgtatataacgtttccggtattactctgctacacgtagcctttttacttttggggttttgtttttgttctgaactttcctgttaccttttcagggctgacgtcacatgtaggtggcgtgtatgagtggagacgggcctgggtcttggggactggagggcaggggtccttctgccctggggtcccagggtgctctgcctgctcagccaggcctctcctgggagccactcgcccagagactcagcttggccaacttggggggctgtgtccacccagcccgcccgtcctgtgggctgcacagctcaccttgttccctcctgccccggttcgagagccgagtctgtgggcactctctgccttcatgcacctgtcctttctaacacgtcgccttcaactgtaatcacaacatcctgactccgtcatttaataaagaaggaacatcaggcatgctaaaaaaaaaaaaaaaaaaaaaaaaaaaaaaaaaaaaaaaaaaaaaaaaaaaaaaaggggggggccccccaaaaaatcctcccccgaagggggcgcccaacacgcttcaccgccgagctacccgcgctttctggtggcgacaaaggggggccccatatagggcggagcgcggattatataaagccccgcagacgcgagcgggcgccgcgggtaataaacaacagcggtcggcgagcgggggagaaaagcggctggacccgggggagagctctcttgggggagaaaggagagaaccctctctactctctgtggggggggggggcgagaccatatcttgtggggcgaacaatatctctccttatcgagagaatatttataaagagcctcttaaagggggaaagaatatattaagaaaattttttcaagaaggggggtctatatgcgggggggggatgaaacacccatggggggcgcaaatatgtgtgctgcggcggggcgcgttagtcgaaaaaaaagttttgtggggataaatgcgcgggggtatgatagtattgtttgaggagaaagcacttttttttcacccccggggggggcctctgcggtggtaaa

SEQ ID NO: 345732 - DNA, 760 bp, Homo sapiens
agttgacatgatagaatcgagctcggtacctgaacattcgtgtccctcgcggcagcaacatatcagcaacctcttcaaggaggactgccaccagaagatcgatgacctcttctccgggaagctgtacctcatcggcattgctgccatcgtggtcgctgtgatcatgatcttcgagatgatcctgagcatggtgctgtgctgtggcatccggaacagctccgtgtactgaggccccgcagctctggccacagggacctctgcagtgccccctaagtgacccggacacttccgagggggccatcaccgcctgtgtatataacgtttccggtattactctgctacacgtagcctttttacttttggggttttgtttttgttctgaactttcctgttaccttttcagggctgacgtcacatgtaggtggcgtgtatgagtggagacgggcctgggtcttggggactggagggcaggggtccttctgccctggggtcccagggtgctctgcctgctcagccaggcctctcctgggagccactcgcccagagactcagcttggccaacttggggggctgtgtccacccagcccgcccgtcctgtgggctgcacagctcaccttgttccctcctgccccggttcgagagccgagtctgtgggcactctctgccttcatgcacctgtcctttctaacacgtcgccttcaactgtaatcacaacatcctgactccgtcatttaataaagaaggaacatcaggcatgcta

SEQ ID NO: 345733 - DNA, 1571 bp, Homo sapiens
ccattgtgctggaaaggcgcgcaacggcggcgacggcggcgaccccaccgcgcatcctgccaggcctccggcgcccagcggcccacgcgcccccgcgtccccgcgccccgcgcccctttcttcgcgcccccgcccctcggcccgccaggcccccttgccggccacccgccaggccccgcgccggcccgcccgccgcccaggaccggcccgcgccccgcaggccgcccgccgcccgcgccgccatgggagtggagggctgcaccaagtgcatcaagtacctgctcttcgtcttcaatttcgtcttctggctggctggaggcgtgatcctgggtgtggccctgtggctccgccatgacccgcagaccaccaacctcctgtatctggagctgggagacaagcccgcgcccaacaccttctatgtaggcatctacatcctcatcgctgtgggcgctgtcatgatgttcgttggcttcctgggctgctacggggccatccaggaatcccagtgcctgctggggacgttcttcacctgcctggtcatcctgtttgcctgtgaggtggccgccggcatctggggctttgtcaacaaggaccagatcgccaaggatgtgaagcagttctatgaccaggccctacagcaggccgtggtggatgatgacgccaacaacgccaaggctgtggtgaagaccttccacgagacgcttgactgctgtggctccagcacactgactgctttgaccacctcagtgctcaagaacaatttgtgtccctcgggcagcaacatcatcagcaacctcttcaaggaggactgccaccagaagatcgatgacctcttctccgggaagctgtacctcatcggcattgctgccatcgtggtcgctgtgatcatggtgagcgggcgggggcggaggggctgctctctgggctgccccttccgcggggccttgtgctgactgcgccccccacacctcctgcagatcttcgagatgatcctgagcatggtgctgtgctgtggcatccggaacagctccgtgtactgaggccccgcagctctggccacagggacctctgcagtgccccctaagtgacccggacacttccgagggggccatcaccgcctgtgtatataacgtttccggtattactctgctacacgtagcctttttacttttggggttttgtttttgttctgaactttcctgttaccttttcagggctgacgtcacatgtaggtggcgtgtatgagtggagacgggcctgggtcttggggactggagggcaggggtccttctgccctggggtcccagggtgctctgcctgctcagccaggcctctcctgggagccactcgcccagagactcagcttggccaacttggggggctgtgtccacccagcccgcccgtcctgtgggctgcacagctcaccttgttccctcctgccccggttcgagagccgagtctgtgggcactctctgccttcatgcacctgtcctttctaacacgtcgccttcaactgtaatcacaacatcctgactccgtcatttaataaagaaggaacatcaggcatgcta

SEQ ID NO: 345734 - DNA, 1847 bp, Homo sapiens
agcagcatgtggtgtggttggtctttttcgtggcagccagtccactgggtgcgctcggcatgtggctgcagcttgacctgggtttcctggtccctggcaaggtggagcatctcttcatgtgcttttttgctgtgtgtggatcttgcggggaagggtctgttcctgttttttgcccatctttcaaagattgggttgccagttttcttgctgttgagtttggaaagctctgcatacgttcagggcacaggtcctttaccaggctctgccccaggtctttcggagagcaggtgtctttcgcattcctgactctggggaacctctagccctgccacatggggtttgttatggggcaggggcacctgtgcctttcccaccacggggcttggggatttggtgctgccattgccctccctcgtaggtggccctaggggggtccctccgcctccgtttcctcatccagaaaccggcagtgaccatcaccaccattgttgtcacctagctccagctcaaggtccctgctgaaggtcggagagcttggcatggccccgtttgtccatgctagggctgggaagaccaaggctcagctggctggaggcgtgatcctgggtgtggccctgtggctccgccatgacccgcagaccaccaacctcctgtatctggagctgggagacaagcccgcgcccaacaccttctatgtaggcatctacatcctcatcgctgtgggcgctgtcatgatgttcgttggcttcctgggctgctacggggccatccaggaatcccagtgcctgctggggacgttcttcacctgcctggtcatcctgtttgcctgtgaggtggccgccggcatctggggctttgtcaacaaggaccagatcgccaaggatgtgaagcagttctatgaccaggccctacagcaggccgtggtggatgatgacgccaacaacgccaaggctgtggtgaagaccttccacgagacgcttgactgctgtggctccagcacactgactgctttgaccacctcagtgctcaagaacaatttgtgtccctcgggcagcaacatcatcagcaacctcttcaaggaggactgccaccagaagatcgatgacctcttctccgggaagctgtacctcatcggcattgctgccatcgtggtcgctgtgatcatggtgagcgggcgggggcggaggggctgctctctgggctgccccttccgcggggccttgtgctgactgcgccccccacacctcctgcagatcttcgagatgatcctgagcatggtgctgtgctgtggcatccggaacagctccgtgtactgaggccccgcagctctggccacagggacctctgcagtgccccctaagtgacccggacacttccgagggggccatcaccgcctgtgtatataacgtttccggtattactctgctacacgtagcctttttacttttggggttttgtttttgttctgaactttcctgttaccttttcagggctgacgtcacatgtaggtggcgtgtatgagtggagacgggcctgggtcttggggactggagggcaggggtccttctgccctggggtcccagggtgctctgcctgctcagccaggcctctcctgggagccactcgcccagagactcagcttggccaacttggggggctgtgtccacccagcccgcccgtcctgtgggctgcacagctcaccttgttccctcctgccccggttcgagagccgagtctgtgggcactctctgccttcatgcacctgtcctttctaacacgtcgccttcaactgtaatcacaacatcctgactccgtcatttaataaagaaggaacatcaggcatgcta

SEQ ID NO: 345735 - DNA, 1371 bp, Homo sapiens
  misc_feature (1355)..(1355): n is a, c, g, or t
ccattgtgctggaaaggcgcgcaacggcggcgacggcggcgaccccaccgcgcatcctgccaggcctccggcgcccagcggcccacgcgcccccgcgtccccgcgccccgcgcccctttcttcgcgcccccgcccctcggcccgccaggcccccttgccggccacccgccaggccccgcgccggcccgcccgccgcccaggaccggcccgcgccccgcaggccgcccgccgcccgcgccgccatgggagtggagggctgcaccaagtgcatcaagtacctgctcttcgtcttcaatttcgtcttctggctggctggaggcgtgatcctgggtgtggccctgtggctccgccatgacccgcagaccaccaacctcctgtatctggagctgggagacaagcccgcgcccaacaccttctatgtaggcatctacatcctcatcgctgtgggcgctgtcatgatgttcgttggcttcctgggctgctacggggccatccaggaatcccagtgcctgctggggacgttcttcacctgcctggtcatcctgtttgcctgtgaggtggccgccggcatctggggctttgtcaacaaggaccagatcgccaaggatgtgaagcagttctatgaccaggccctacagcaggccgtggtggatgatgacgccaacaacgccaaggctgtggtgaagaccttccacgagacgcttgactgctgtggctccagcacactgactgctttgaccacctcagtgctcaagaacaatttgtgtccctcgggcagcaacatcatcagcaacctcttcaaggaggactgccaccagaagatcgatgacctcttctccgggaagctgtacctcatcggcattgctgccatcgtggtcgctgtgatcatgatcttcgagatgatcctgagcatggtgctgtgctgtggcatccggaacagctccgtgtactgaggccccgcagctctggccacagggacctctgcagtgccccctaagtgacccggacacttccgagggggccatcaccgcctgtgtatataacgtttccggtattactctgctacacgtagcctttttacttttggggttttgtttttgttctgaactttcctgttaccttttcagggctgacgtcacatgtaggtggcgtgtatgagtggagacgggcctgggtcttggggactggagggcaggggtccttctgccctggggtcccagggtgctctgcctgctcagccaggcctctcctgggagccactcgcccagagactcagcttggccaacttggggggctgtgtccacaacacacaagacacacagccacagatacacatagatagagagctgcacaancatcaacacatatagt

SEQ ID NO: 345736 - DNA, 1420 bp, Homo sapiens
ccattgtgctggaaaggcgcgcaacggcggcgacggcggcgaccccaccgcgcatcctgccaggcctccggcgcccagcggcccacgcgcccccgcgtccccgcgccccgcgcccctttcttcgcgcccccgcccctcggcccgccaggcccccttgccggccacccgccaggccccgcgccggcccgcccgccgcccaggaccggcccgcgccccgcaggccgcccgccgcccgcgccgccatgggagtggagggctgcaccaagtgcatcaagtacctgctcttcgtcttcaatttcgtcttctggctggctggaggcgtgatcctgggtgtggccctgtggctccgccatgacccgcagaccaccaacctcctgtatctggagctgggagacaagcccgcgcccaacaccttctatgtaggcatctacatcctcatcgctgtgggcgctgtcatgatgttcgttggcttcctgggctgctacggggccatccaggaatcccagtgcctgctggggacgttcttcacctgcctggtcatcctgtttgcctgtgaggtggccgccggcatctggggctttgtcaacaaggaccagatcgccaaggatgtgaagcagttctatgaccaggccctacagcaggccgtggtggatgatgacgccaacaacgccaaggctgtggtgaagaccttccacgagacgcttgactgctgtggctccagcacactgactgctttgaccacctcagtgctcaagaacaatttgtgtccctcgggcagcaacatcatcagcaacctcttcaaggaggactgccaccagaagatcgatgacctcttctccgggaagctgtacctcatcggcattgctgccatcgtggtcgctgtgatcatgatcttcgagatgatcctgagcatggtgctgtgctgtggcatccggaacagctccgtgtactgaggccccgcagctctggccacagggacctctgcagtgccccctaagtgacccggacacttccgagggggccatcaccgcctgtgtatataacgtttccggtattactctgctacacgtagcctttttacttttggggttttgtttttgttctgaactttcctgttaccttttcagggctgacgtcacatgtaggtggcgtgtatgagtggagacgggctcagccaggcctctcctgggagccactcgcccagagactcagcttggccaacttggggggctgtgtccacccagcccgcccgtcctgtgggctgcacagctcaccttgttccctcctgccccggttcgagagccgagtctgtgggcactctctgccttcatgcacctgtcctttctaacacgtcgccttcaactgtaatcacaacatcctgactccgtcatttaataaagaaggaacatcaggcatgcta

SEQ ID NO: 345737 - DNA, 980 bp, Homo sapiens
  misc_feature (802)..(802): n is a, c, g, or t
  misc_feature (805)..(805): n is a, c, g, or t
tggtagcgtgcccgagggacacaacatcatcagcaacctcttcaaggaggactgccaccagaagatcgatgacctcttctccgggaagctgtacctcatcggcattgctgccatcgtggtcgctgtgatcatgatcttcgagatgatcctgagcatggtgctgtgctgtggcatccggaacagctccgtgtactgaggccccgcagctctggccacagggacctctgcagtgccccctaagtgacccggacacttccgagggggccatcaccgcctgtgtatataacgtttccggtattactctgctacacgtagcctttttacttttggggttttgtttttgttctgaactttcctgttaccttttcagggctgacgtcacatgtaggtggcgtgtatgagtggagacgggcctgggtcttggggactggagggcaggggtccttctgccctggggtcccagggtgctctgcctgctcagccaggcctctcctgggagccactcgcccagagactcagcttggccaacttggggggctgtgtccacccagcccgcccgtcctgtgggctgcacagctcaccttgttccctcctgccccggttcgagagccgagtctgtgggcactctctgccttcatgcacctgtcctttctaacacgtcgccttcaactgtaatcacaacatcctgactccgtcatttaataaagaaggaacatcaggcatgctaaaaaaaaaaaaaaaaaaaaaaaaaaaaaaaaaaaaaaaaaaaaaaaaaaaaaaaaaaaaaggggggggggcgcgnaanaaagaaactcaccaccaagcgaggggacccccacaatatgacacgagcacaacacaggcaatatagtcaggacaaaacaaggggcgcacccaaaaaaaagagggcgcagcaataaaaagcaacgaatacgaagaagcgaccacgctgtaaaaaaaacgacgaccgcggcaggaac

SEQ ID NO: 345738 - DNA, 1193 bp, Homo sapiens
  misc_feature (1084)..(1084): n is a, c, g, or t
  misc_feature (1125)..(1125): n is a, c, g, or t
ccattgtgctggaaaggcgcgcaacggcggcgacggcggcgaccccaccgcgcatcctgccaggcctccggcgcccagcggcccacgcgcccccgcgtccccgcgccccgcgcccctttcttcgcgcccccgcccctcggcccgccaggcccccttgccggccacccgccaggccccgcgccggcccgcccgccgcccaggaccggcccgcgccccgcaggccgcccgccgcccgcgccgccatgggagtggagggctgcaccaagtgcatcaagtacctgctcttcgtcttcaatttcgtcttctggctggctggaggcgtgatcctgggtgtggccctgtggctccgccatgacccgcagaccaccaacctcctgtatctggagctgggagacaagcccgcgcccaacaccttctatgtaggcatctacatcctcatcgctgtgggcgctgtcatgatgttcgttggcttcctgggctgctacggggccatccaggaatcccagtgcctgctggggacgttcttcacctgcctggtcatcctgtttgcctgtgaggtggccgccggcatctggggctttgtcaacaaggaccagatcgccaaggatgtgaagcagttctatgaccaggccctacagcaggccgtggtggatgatgacgccaacaacgccaaggctgtggtgaagaccttccacgagacgcttgactgctgtggctccagcacactgactgctttgaccacctcagtgctcaagaacaatttgtgtccctcgggcagcaacatcatcagcaacctcttcaaggaggactgccaccagaagatcgatgacctcttctccgggaagctgtacctcatcggcattgctgccatcgtggtcgctgtgatcatgatcttcgagatgatcctgagcatggtgctcaatgataatctttgtattataggaaaagtaaggattagtggaagacagggtttctatccaaaccaacaacataaacggcaatataattgttaaaattagcctttatatgccatatgttatgcctggtacatagtagactcccaataaatctttggtggcttganttgaagaggtaaagttcagatgaaatctttggcctcctttnctggccggggacagtaagattctcatgctaagcaataaaatggtcttatctcttaataatccccatcc

SEQ ID NO: 345739 - DNA, 1041 bp, Homo sapiens
ccattgtgctggaaaggcgcgcaacggcggcgacggcggcgaccccaccgcgcatcctgccaggcctccggcgcccagcggcccacgcgcccccgcgtccccgcgccccgcgcccctttcttcgcgcccccgcccctcggcccgccaggcccccttgccggccacccgccaggccccgcgccggcccgcccgccgcccaggaccggcccgcgccccgcaggccgcccgccgcccgcgccgccatgggagtggagggctgcaccaagtgcatcaagtacctgctcttcgtcttcaatttcgtcttctggctggctggaggcgtgatcctgggtgtggccctgtggctccgccatgacccgcagaccaccaacctcctgtatctggagctgggagacaagcccgcgcccaacaccttctatgtaggcatctacatcctcatcgctgtgggcgctgtcatgatgttcgttggcttcctgggctgctacggggccatccaggaatcccagtgcctgctggggacgttcttcacctgcctggtcatcctgtttgcctgtgaggtggccgccggcatctggggctttgtcaacaaggaccagatcgccaaggatgtgaagcagttctatgaccaggccctacagcaggccgtggtggatgatgacgccaacaacgccaaggctgtggtgaagaccttccacgagacgcttgactgctgtggctccagcacactgactgctttgaccacctcagtgctcaagaacaatttgtgtccctcgggcagcaacatcatcagcaacctcttcaaggaggactgccaccagaagatcgatgaccatgcaagcccgaggcttcggctcggatcagtccgagaatgtcgaccggggcgcgggctccatccgggaagccggtggggccttcggaaagagagagcaggctgaagaggaacgatatttccgagcacagagtagagaacaactggcagctttgaaaaaacaccatgaagaagaaatcgttcatcataagaaggagattgagcgtctgcag

SEQ ID NO: 345740 - DNA, 637 bp, Homo sapiens
ccattgtgctggaaaggcgcgcaacggcggcgacggcggcgaccccaccgcgcatcctgccaggcctccggcgcccagcggcccacgcgcccccgcgtccccgcgccccgcgcccctttcttcgcgcccccgcccctcggcccgccaggcccccttgccggccacccgccaggccccgcgccggcccgcccgccgcccaggaccggcccgcgccccgcaggccgcccgccgcccgcgccgccatgggagtggagggctgcaccaagtgcatcaagtacctgctcttcgtcttcaatttcgtcttctggctggctggaggcgtgatcctgggtgtggccctgtggctccgccatgacccgcagaccaccaacctcctgtatctggagctgggagacaagcccgcgcccaacaccttctatgtaggcatctacatcctcatcgctgtgggcgctgtcatgatgttcgttggcttcctgggctgctacggggccatccaggaatcccagtgcctgctggggacgttcttcacctgcctggtcatcctgtttgcctgtgaggtggccgccggcatctggggctttgtcaacaaggaccagactcgccaaggatgtgaagcagcaccagcagcaccacaatc

SEQ ID NO: 345741 - DNA, 1484 bp, Homo sapiens
ccattgtgctggaaaggcgcgcaacggcggcgacggcggcgaccccaccgcgcatcctgccaggcctccggcgcccagcggcccacgcgcccccgcgtccccgcgccccgcgcccctttcttcgcgcccccgcccctcggcccgccaggcccccttgccggccacccgccaggccccgcgccggcccgcccgccgcccaggaccggcccgcgccccgcaggccgcccgccgcccgcgccgccatgggagtggagggctgcaccaagtgcatcaagtacctgctcttcgtcttcaatttcgtcttctggctggctggaggcgtgatcctgggtgtggccctgtggctccgccatgacccgcagaccaccaacctcctgtatctggagctgggagacaagcccgcgcccaacaccttctatgtaggcatctacatcctcatcgctgtgggcgctgtcatgatgttcgttggcttcctgggctgctacggggccatccaggaatcccagtgcctgctggggacgttcttcacctgcctggtcatcctgtttgcctgtgaggtggccgccggcatctggggctttgtcaacaaggaccagatcgccaaggatgtgaagcagttctatgaccaggccctacagcaggccgtggtggatgatgacgccaacaacgccaaggctgtggtgaagaccttccacgagacgcttgactgctgtggctccagcacactgactgctttgaccacctcagtgctcaagaacaatttgtgtccctcgggcagcaacatcatcagcaacctcttcaaggaggactgccaccagaagatcgatgacctcttctccgggaagctgtacctcatcggcattgctgccatcgtggtcgctgtgatcatgatcttcgagatgatcctgagcatggtgctgtgctgtggcatccggaacagctccgtgtactgaggccccgcagctctggccacagggacctctgcagtgccccctaagtgacccggacacttccgagggggccatcaccgcctgtgtatataacgtttccggtattactctgctacacgtagcctttttacttttggggttttgtttttgttctgaactttcctgttaccttttcagggctgacgtcacatgtaggtggcgtgtatgagtggagacgggcctgggtcttggggactggagggcaggggtccttctgccctggggtcccagggtgctctgcctgctcagccaggcctctcctgggagccactcgcccagagactcagcttggccaacttggggggctgtgtccacccagcccgcccgtcctgtgggctgcacagctcaccttgttccctcctgccccggttcgagagccgagtctgtgggcactctctgccttcatgcacctgtcctttctaacacgtcgccttcaactgtaatcacaacatcctgactccgtcatttaataaagaaggaacatcaggcatgcta

SEQ ID NO: 345742 - DNA, 265 bp, Homo sapiens
tgctgttctagaggatccctgtgatgttatcgcccaacaccttctatgtaggcatctacatcctcatcgctgtgggcgctgtcatgatgttcgttggcttcctgggctgctacggggccatccaggaatcccagtgcctgctggggacgttcttcacctgcctggtcatcctgtttgcctgtgaggtggccgccggcatctggggctttgtcaacaaggaccagactcgccaaggatgtgaagcagcaccagcagcaccacaatc

SEQ ID NO: 345743 - DNA, 1760 bp, Homo sapiens
agcagcatgtggtgtggttggtctttttcgtggcagccagtccactgggtgcgctcggcatgtggctgcagcttgacctgggtttcctggtccctggcaaggtggagcatctcttcatgtgcttttttgctgtgtgtggatcttgcggggaagggtctgttcctgttttttgcccatctttcaaagattgggttgccagttttcttgctgttgagtttggaaagctctgcatacgttcagggcacaggtcctttaccaggctctgccccaggtctttcggagagcaggtgtctttcgcattcctgactctggggaacctctagccctgccacatggggtttgttatggggcaggggcacctgtgcctttcccaccacggggcttggggatttggtgctgccattgccctccctcgtaggtggccctaggggggtccctccgcctccgtttcctcatccagaaaccggcagtgaccatcaccaccattgttgtcacctagctccagctcaaggtccctgctgaaggtcggagagcttggcatggccccgtttgtccatgctagggctgggaagaccaaggctcagctggctggaggcgtgatcctgggtgtggccctgtggctccgccatgacccgcagaccaccaacctcctgtatctggagctgggagacaagcccgcgcccaacaccttctatgtaggcatctacatcctcatcgctgtgggcgctgtcatgatgttcgttggcttcctgggctgctacggggccatccaggaatcccagtgcctgctggggacgttcttcacctgcctggtcatcctgtttgcctgtgaggtggccgccggcatctggggctttgtcaacaaggaccagatcgccaaggatgtgaagcagttctatgaccaggccctacagcaggccgtggtggatgatgacgccaacaacgccaaggctgtggtgaagaccttccacgagacgcttgactgctgtggctccagcacactgactgctttgaccacctcagtgctcaagaacaatttgtgtccctcgggcagcaacatcatcagcaacctcttcaaggaggactgccaccagaagatcgatgacctcttctccgggaagctgtacctcatcggcattgctgccatcgtggtcgctgtgatcatgatcttcgagatgatcctgagcatggtgctgtgctgtggcatccggaacagctccgtgtactgaggccccgcagctctggccacagggacctctgcagtgccccctaagtgacccggacacttccgagggggccatcaccgcctgtgtatataacgtttccggtattactctgctacacgtagcctttttacttttggggttttgtttttgttctgaactttcctgttaccttttcagggctgacgtcacatgtaggtggcgtgtatgagtggagacgggcctgggtcttggggactggagggcaggggtccttctgccctggggtcccagggtgctctgcctgctcagccaggcctctcctgggagccactcgcccagagactcagcttggccaacttggggggctgtgtccacccagcccgcccgtcctgtgggctgcacagctcaccttgttccctcctgccccggttcgagagccgagtctgtgggcactctctgccttcatgcacctgtcctttctaacacgtcgccttcaactgtaatcacaacatcctgactccgtcatttaataaagaaggaacatcaggcatgcta

SEQ ID NO: 345744 - DNA, 1362 bp, Homo sapiens
agcagcatgtggtgtggttggtctttttcgtggcagccagtccactgggtgcgctcggcatgtggctgcagcttgacctgggtttcctggtccctggcaagctccagctcaaggtccctgctgaaggtcggagagcttggcatggccccgtttgtccatgctagggctgggaagaccaaggctcagctggctggaggcgtgatcctgggtgtggccctgtggctccgccatgacccgcagaccaccaacctcctgtatctggagctgggagacaagcccgcgcccaacaccttctatgtaggcatctacatcctcatcgctgtgggcgctgtcatgatgttcgttggcttcctgggctgctacggggccatccaggaatcccagtgcctgctggggacgttcttcacctgcctggtcatcctgtttgcctgtgaggtggccgccggcatctggggctttgtcaacaaggaccagatcgccaaggatgtgaagcagttctatgaccaggccctacagcaggccgtggtggatgatgacgccaacaacgccaaggctgtggtgaagaccttccacgagacgcttgactgctgtggctccagcacactgactgctttgaccacctcagtgctcaagaacaatttgtgtccctcgggcagcaacatcatcagcaacctcttcaaggaggactgccaccagaagatcgatgacctcttctccgggaagctgtacctcatcggcattgctgccatcgtggtcgctgtgatcatgatcttcgagatgatcctgagcatggtgctgtgctgtggcatccggaacagctccgtgtactgaggccccgcagctctggccacagggacctctgcagtgccccctaagtgacccggacacttccgagggggccatcaccgcctgtgtatataacgtttccggtattactctgctacacgtagcctttttacttttggggttttgtttttgttctgaactttcctgttaccttttcagggctgacgtcacatgtaggtggcgtgtatgagtggagacgggcctgggtcttggggactggagggcaggggtccttctgccctggggtcccagggtgctctgcctgctcagccaggcctctcctgggagccactcgcccagagactcagcttggccaacttggggggctgtgtccacccagcccgcccgtcctgtgggctgcacagctcaccttgttccctcctgccccggttcgagagccgagtctgtgggcactctctgccttcatgcacctgtcctttctaacacgtcgccttcaactgtaatcacaacatcctgactccgtcatttaataaagaaggaacatcaggcatgcta

SEQ ID NO: 345745 - DNA, 1345 bp, Homo sapiens
tggccacatttccagtacccagtagtcatctgtgccagggggttatccaggtacagaacattcccatcgttgcagaaggttctatcagctagcactgggttggacgacacttgccaagacgagctggctagaggatggttctccggacctggtcccacgtggttcccagctggctggaggcgtgatcctgggtgtggccctgtggctccgccatgacccgcagaccaccaacctcctgtatctggagctgggagacaagcccgcgcccaacaccttctatgtaggcatctacatcctcatcgctgtgggcgctgtcatgatgttcgttggcttcctgggctgctacggggccatccaggaatcccagtgcctgctggggacgttcttcacctgcctggtcatcctgtttgcctgtgaggtggccgccggcatctggggctttgtcaacaaggaccagatcgccaaggatgtgaagcagttctatgaccaggccctacagcaggccgtggtggatgatgacgccaacaacgccaaggctgtggtgaagaccttccacgagacgcttgactgctgtggctccagcacactgactgctttgaccacctcagtgctcaagaacaatttgtgtccctcgggcagcaacatcatcagcaacctcttcaaggaggactgccaccagaagatcgatgacctcttctccgggaagctgtacctcatcggcattgctgccatcgtggtcgctgtgatcatgatcttcgagatgatcctgagcatggtgctgtgctgtggcatccggaacagctccgtgtactgaggccccgcagctctggccacagggacctctgcagtgccccctaagtgacccggacacttccgagggggccatcaccgcctgtgtatataacgtttccggtattactctgctacacgtagcctttttacttttggggttttgtttttgttctgaactttcctgttaccttttcagggctgacgtcacatgtaggtggcgtgtatgagtggagacgggcctgggtcttggggactggagggcaggggtccttctgccctggggtcccagggtgctctgcctgctcagccaggcctctcctgggagccactcgcccagagactcagcttggccaacttggggggctgtgtccacccagcccgcccgtcctgtgggctgcacagctcaccttgttccctcctgccccggttcgagagccgagtctgtgggcactctctgccttcatgcacctgtcctttctaacacgtcgccttcaactgtaatcacaacatcctgactccgtcatttaataaagaaggaacatcaggcatgcta

SEQ ID NO: 345746 - DNA, 1187 bp, Homo sapiens
gctggcattgggcttgtcacaaggaccagatcgccaaggatgtgaagcagttctatgaccaggccctacagcaggccgtggtggatgatgacgccgacaacgccaaggctgtggtgaagaccttccgcatctacatcctcatcgctgtgggcgctgtcatgatgttcgttggcttcctgggctgctacggggccatccaggaatcccagtgcctgctggggacgttcttcacctgcctggtcatcctgtttgcctgtgaggtggccgccggcatctggggctttgtcaacaaggaccagatcgccaaggatgtgaagcagttctatgaccaggccctacagcaggccgtggtggatgatgacgccaacaacgccaaggctgtggtgaagaccttccacgagacgcttgactgctgtggctccagcacactgactgctttgaccacctcagtgctcaagaacaatttgtgtccctcgggcagcaacatcatcagcaacctcttcaaggaggactgccaccagaagatcgatgacctcttctccgggaagctgtacctcatcggcattgctgccatcgtggtcgctgtgatcatgatcttcgagatgatcctgagcatggtgctgtgctgtggcatccggaacagctccgtgtactgaggccccgcagctctggccacagggacctctgcagtgccccctaagtgacccggacacttccgagggggccatcaccgcctgtgtatataacgtttccggtattactctgctacacgtagcctttttacttttggggttttgtttttgttctgaactttcctgttaccttttcagggctgacgtcacatgtaggtggcgtgtatgagtggagacgggcctgggtcttggggactggagggcaggggtccttctgccctggggtcccagggtgctctgcctgctcagccaggcctctcctgggagccactcgcccagagactcagcttggccaacttggggggctgtgtccacccagcccgcccgtcctgtgggctgcacagctcaccttgttccctcctgccccggttcgagagccgagtctgtgggcactctctgccttcatgcacctgtcctttctaacacgtcgccttcaactgtaatcacaacatcctgactccgtcatttaataaagaaggaacatcaggcatgcta

SEQ ID NO: 345747 - DNA, 869 bp, Homo sapiens
ccaagaagcttagtatactagtaaaggccgtggtggatgatgacgccaacaacgccaaggctgtggtgaagaccttccacgagacgcttgactgctgtggctccagcacactgactgctttgaccacctcagtgctcaagaacaatttgtgtccctcgggcagcaacatcatcagcaacctcttcaaggaggactgccaccagaagatcgatgacctcttctccgggaagctgtacctcatcggcattgctgccatcgtggtcgctgtgatcatgatcttcgagatgatcctgagcatggtgctgtgctgtggcatccggaacagctccgtgtactgaggccccgcagctctggccacagggacctctgcagtgccccctaagtgacccggacacttccgagggggccatcaccgcctgtgtatataacgtttccggtattactctgctacacgtagcctttttacttttggggttttgtttttgttctgaactttcctgttaccttttcagggctgacgtcacatgtaggtggcgtgtatgagtggagacgggcctgggtcttggggactggagggcaggggtccttctgccctggggtcccagggtgctctgcctgctcagccaggcctctcctgggagccactcgcccagagactcagcttggccaacttggggggctgtgtccacccagcccgcccgtcctgtgggctgcacagctcaccttgttccctcctgccccggttcgagagccgagtctgtgggcactctctgccttcatgcacctgtcctttctaacacgtcgccttcaactgtaatcacaacatcctgactccgtcatttaataaagaaggaacatcaggcatgcta

SEQ ID NO: 345748 - DNA, 1752 bp, Homo sapiens
ccattgtgctggaaaggcgcgcaacggcggcgacggcggcgaccccaccgcgcatcctgccaggcctccggcgcccagcggcccacgcgcccccgcgtccccgcgccccgcgcccctttcttcgcgcccccgcccctcggcccgccaggcccccttgccggccacccgccaggccccgcgccggcccgcccgccgcccaggaccggcccgcgccccgcaggccgcccgccgcccgcgccgccatgggagtggagggctgcaccaagtgcatcaagtacctgctcttcgtcttcaatttcgtcttctggctggctggaggcgtgatcctgggtgtggccctgtggctccgccatgacccgcagaccaccaacctcctgtatctggagctgggagacaagcccgcgcccaacaccttctatgtaggcatctacatcctcatcgctgtgggcgctgtcatgatgttcgttggcttcctgggctgctacggggccatccaggaatcccagtgcctgctggggacgttcttcacctgcctggtcatcctgtttgcctgtgaggtggccgccggcatctggggctttgtcaacaaggaccagatcgccaaggatgtgaagcagttctatgaccaggccctacagcaggccgtggtggatgatgacgccaacaacgccaaggctgtggtgaagaccttccacgagacgcttgactgctgtggctccagcacactgactgctttgaccacctcagtgctcaagaacaatttgtgtccctcgggcagcaacatcatcagcaacctcttcaaggaggactgccaccagaagatcgatgacctcttctccgggaagctgtacctcatcggcattgctgccatcgtggtcgctgtgatcatgatcttcgagatgatcctgagcatggtgctgtgctgtggcatccggaacagctccgtgtactgaggccccgcagctctggccacagggacctctgcagtgccccctaagtgacccggacacttccgagggggccatcaccgcctgtgtatataacgtttccggtattactctgctacacgtagcctttttacttttggggttttgtttttgttctgaactttcctgttaccttttcagggctgacgtcacatgtaggtggcgtgtatgagtggagacgggcctgggtcttggggactggagggcaggggtccttctgccctggggtcccagggtgctctgcctgctcagccaggcctctcctgggagccactcgcccagagactcagcttggccaacttggggggctgtgtccacccagcccgcccgtcctgtgggctgcacagctcaccttgttccctcctgccccggttcgagagccgagtctgtgggcactctctgccttcatgcacctgtcctttctaacacgtcgccttcaactgtaatcacaacatcctgactccgtcatttaataaagaaggaacatcaggcatgctaaaaaaaaaaaaaaaaaaaaaaaaaaaaaaaaaaaaaaaaaaaaaaaaaaaaaaacatacacaaaaaacaaaaaaaaaaaaacaaacaactcacccacaaaaaaaacaaaaaaaaaaaaacaaccgggccacaaacaacaaacatacacctcttggtcccgccttcctccacttccctttttatctccaccctttctctctcgcgccctttttatctttttgcccattccccccatacagggctcctcacactacagggcccgcctttc

SEQ ID NO: 345749 - DNA, 1512 bp, Homo sapiens
ccattgtgctggaaaggcgcgcaacggcggcgacggcggcgaccccaccgcgcatcctgccaggcctccggcgcccagcggcccacgcgcccccgcgtccccgcgccccgcgcccctttcttcgcgcccccgcccctcggcccgccaggcccccttgccggccacccgccaggccccgcgccggcccgcccgccgcccaggaccggcccgcgccccgcaggccgcccgccgcccgcgccgccatgggagtggagggctgcaccaagtgcatcaagtacctgctcttcgtcttcaatttcgtcttctggctggctggaggcgtgatcctgggtgtggccctgtggctccgccatgacccgcagaccaccaacctcctgtatctggagctgggagacaagcccgcgcccaacaccttctatgtaggcatctacatcctcatcgctgtgggcgctgtcatgatgttcgttggcttcctgggctgctacggggccatccaggaatcccagtgcctgctggggacgttcttcacctgcctggtcatcctgtttgcctgtgaggtggccgccggcatctggggctttgtcaacaaggaccagatcgccaaggatgtgaagcagttctatgaccaggccctacagcaggccgtggtggatgatgacgccaacaacgccaaggctgtggtgaagaccttccacgagacgcttgactgctgtggctccagcacactgactgctttgaccacctcagtgctcaagaacaatttgtgtccctcgggcagcaacatcatcagcaacctcttcaaggaggactgccaccagaagatcgatgacctcttctccgggaagctgtacctcatcggcattgctgccatcgtggtcgctgtgatcatgatcttcgagatgatcctgagcatggtgctgtgctgtggcatccggaacagctccgtgtactgaggccccgcagctctggccacagggacctctgcagtgccccctaagtgacccggacacttccgagggggccatcaccgcctgtgtatataacgtttccggtattactctgctacacgtagcctttttacttttggggttttgtttttgttctgaactttcctgttaccttttcagggctgacgtcacatgtaggtggcgtgtatgagtggagacgggcctgggtcttggggactggagggcaggggtccttctgccctggggtcccagggtgctctgcctgctcagccaggcctctcctgggagccactcgcccagagactcagcttggccaacttggggggctgtgtccacccagcccgcccgtcctgtgggctgcacagctcaccttgttccctcctgccccggttcgagagccgagtctgtgggcactctctgccttcatgcacctgtcctttctaacacgtcgccttcaactgtaatcacaacatcctgactccgtcatttaataaagaaggaacatcaggcatgctaccaggcctgtgcagtccctcagtgccag

SEQ ID NO: 345750 - DNA, 1464 bp, Homo sapiens
ccattgtgctggaaaggcgcgcaacggcggcgacggcggcgaccccaccgcgcatcctgccaggcctccggcgcccagcggcccacgcgcccccgcgtccccgcgccccgcgcccctttcttcgcgcccccgcccctcggcccgccaggcccccttgccggccacccgccaggccccgcgccggcccgcccgccgcccaggaccggcccgcgccccgcaggccgcccgccgcccgcgccgccatgggagtggagggctgcaccaagtgcatcaagtacctgctcttcgtcttcaatttcgtcttctggctggctggaggcgtgatcctgggtgtggccctgtggctccgccatgacccgcagaccaccaacctcctgtatctggagctgggagacaagcccgcgcccaacaccttctatgtaggcatctacatcctcatcgctgtgggcgctgtcatgatgttcgttggcttcctgggctgctacggggccatccaggaatcccagtgcctgctggggacgttcttcacctgcctggtcatcctgtttgcctgtgaggtggccgccggcatctggggctttgtcaacaaggaccagatcgccaaggatgtgaagcagttctatgaccaggccctacagcaggccgtggtggatgatgacgccaacaacgccaaggctgtggtgaagaccttccacgagacgcttgactgctgtggctccagcacactgactgctttgaccacctcagtgctcaagaacaatttgtgtccctcgggcagcaacatcatcagcaacctcttcaaggaggactgccaccagaagatcgatgacctcttctccgggaagctgtacctcatcggcattgctgccatcgtggtcgctgtgatcatgatcttcgagatgatcctgagcatggtgctgtgctgtggcatccggaacagctccgtgtactgaggccccgcagctctggccacagggacctctgcagtgccccctaagtgacccggacacttccgagggggccatcaccgcctgtgtatataacgtttccggtattactctgctacacgtagcctttttacttttggggttttgtttttgttctgaactttcctgttaccttttcagggctgacgtcacatgtaggtggcgtgtatgagtggagacgggcctgggtcttggggactggagggcaggggtccttctgccctggggtcccagggtgctctgcctgccaacttggggggctgtgtccacccagcccgcccgtcctgtgggctgcacagctcaccttgttccctcctgccccggttcgagagccgagtctgtgggcactctctgccttcatgcacctgtcctttctaacacgtcgccttcaactgtaatcacaacatcctgactccgtcatttaataaagaaggaacatcaggcatgctaccaggcctgtgcagtccctcagtgccag

SEQ ID NO: 345751 - DNA, 1047 bp, Homo sapiens
ccattgtgctggaaaggcgcgcaacggcggcgacggcggcgaccccaccgcgcatcctgccaggcctccggcgcccagcggcccacgcgcccccgcgtccccgcgccccgcgcccctttcttcgcgcccccgcccctcggcccgccaggcccccttgccggccacccgccaggccccgcgccggcccgcccgccgcccaggaccggcccgcgccccgcaggccgcccgccgcccgcgccgccatgggagtggagggctgcaccaagtgcatcaagtacctgctcttcgtcttcaatttcgtcttctggctggctggaggcgtgatcctgggtgtggccctgtggctccgccatgacccgcagaccaccaacctcctgtatctggagctgggagacaagcccgcgcccaacaccttctatgtaggcatctacatcctcatcgctgtgggcgctgtcatgatgttcgttggcttcctgggctgctacggggccatccaggaatcccagtgcctgctggggacgttcttcacctgcctggtcatcctgtttgcctgtgaggtggccgccggcatctggggctttgtcaacaaggaccagatcgccaaggatgtgaagcagttctatgaccaggccctacagcaggccgtggtggatgatgacgccaacaacgccaaggctgtggtgaagaccttccacgagacgcttgactgctgtggctccagcacactgactgctttgaccacctcagtgctcaagaacaatttgtgtccctcgggcagcaacatcatcagcaacctcttcaaggaggactgccaccagaagatcgatgacctcttctccgggaagctgtacctcatcggcattgctgccatcgtggtcgctgtgatcatgatcttcgagatgatcctgagcatggtgctgtgctgtggcatccggaacagctccgtgtactgaggccccgcagctctggccacagggacctctgcagtgccccctaagtgacccggacacttccgagggggaatgttcaggacacgaatgttcaggc

SEQ ID NO: 345752 - DNA, 579 bp, Homo sapiens
tggccacatttccagtacccagtagtcatctgtgccagggggttatccaggtacagaacattcccatcgttgcagaaggttctatcagctagcactgggttggacgacacttgccaagacgagctggctagaggatggttctccggacctggtcccacgtggttcccagctggctggaggcgtgatcctgggtgtggccctgtggctccgccatgacccgcagaccaccaacctcctgtatctggagctgggagacaagcccgcgcccaacaccttctatgtaggtgagtgcacatgtggccgcagacgcattcagggagggcttctaggaggaggcaggtcctagccttttggatggggacatggagggtgaaagacagtcgggcatggcgtgtccgggcagggaggcggccctggaaagggctctgggcacaagggttgagatggaggtgggcctgtggcctgctggcccttctggtctgagccagggcagggggtggcagctaggcctgggcagggactgtgtggagaccttgcttattttaagtgttggggatacatcacggaggctccctgaga

SEQ ID NO: 345753 - DNA, 571 bp, Homo sapiens
gagagcaggtgtctttcgcattcctgactctggggaacctctagccctgccacatggggtttgttatggggcaggggcacctgtgcctttcccaccacggggcttggggatttggtgctgccattgccctccctcgtaggtggccctaggggggtccctccgcctccgtttcctcatccagaaaccggcagtgaccatcaccaccattgttgtcacctagctccagctcaaggtccctgctgaaggtcggagagcttggcatggccccgtttgtccatgctagggctgggaagaccaaggctcaggtgaggcctctgcccagtgcctggcactccttcttgccccatttttccacccagggtggctcccgactacttctggtagcctcggggacagttgaggtggacaggctggcgtcacccccatttccggctgtccctcccaccccctcctggcccagctgttctgccctattaaaagtcacatgggccctcgggtccttcctggtgttggcccaggctctttcaggccctgcaggccaggaccagccttccctgcaaccctcggcaga

SEQ ID NO: 345754 - DNA, 367 bp, Homo sapiens
aatgtatttcatattaacagacaaaaaaaaacccatatgattaccccaatacattcagaatgcaggagaaacattttgcaaaactaaaaaaaaaaaacaacaacaacaacaaaaaaaagaaaacccaaaaacagctaaaacctttcagcaaactaggactggagacaactctctcaatataataaagtatgtagttgaaaaaaaccctacatcacactcaatgacaaaaggttgtagttaattctcaagtttaaggcaaagatactgctctcattacctatgtgcattattttaatatagtcctagacagtttaataaggaaaaaaagaaggaaaggaaggaagaaagaaagaatgtcaaaggataa

SEQ ID NO: 345755 - DNA, 383 bp, Homo sapiens
gagttaacctcaccgaaagatacaaccgatttaagaagaaaatgttaaaactctcttcaagggcctatagaagaaacgggatgaatggaaacgtgattcactctgtggactggcagatacctctggaaatctggtgttctattgtaataagttctcgggaaggtagagacttttatttgggacatagaggcttggccaaccagaatggaggacccacccaagtcccgcccccaagcctgagccctctcctttgctccacccactctgcctgaagtcccctcaacccctccgacttcgcagtctcccagcccggccttctggggctggtcttcattggaagccacgcccccaggtctgtcggataaacattttacaacctattc

SEQ ID NO: 345756 - DNA, 337 bp, Homo sapiens
agcgacagagtgagactccgtctcaaaaaaaaaaaaaattgcgaaactattattattatctccttttaccagaagagttcactgaggcccgagacgcaaagttatgctttcaaaattacaccaataagttaaccacgggacaggaaaccagcagccagtgttcttggctccaaatttcactgaccagacaatcggatgtattgggtgatattatggctttgcctctgttccctcggatccctttctactgtttttgtagattcccttcgggatttctttgattttcaaaagtgacgtctgctgcttttctgtggagaaccaccatctagcactgggg

SEQ ID NO: 345757 - DNA, 387 bp, Homo sapiens
gtacccaattgcaagcagggaagagaaaatcaaaagaacggatgagacttatatacactgttccttgtagattctggatattgggcctttgtcagatgcatagattgcaaaaattttctcccactctgccaaaagaggagtacatctgaacagcaatagagcagaggaagaaaccctaagtcatgttgtagcctaataccatggagtagcacagactttgaaaccaggcagaaccaggtttgaactttaattgagccacttgctaaatgtatgaccttattatgcgtgttacttaagcttcaacgtcttcacagagaaatggaaataatagtacataacatcactgaattctttggagttaaataagaataaatgtaaaatagcaaa

SEQ ID NO: 345758 - DNA, 1293 bp, Homo sapiens
aaccctcttctgttccaagcactgtgtgagaccctgccttggataagtcaaatgcatgagcttaggaaagtagagtaactgctacaaataataaaaaacagatacatctgcagtcaagacagtcaccaccgaagagtacctggtgaaccctgtgggcatgaaccgctacagcgtggacacctccgcctccacctttaaccacaggggctccttgcacccctcctcctcgctgtactgcaagaggcagaactctggagacagccaccttgggggtggtcctgctgccaccgctggtggtccccgcactagccccatgtcttctggtggcccctcggcacctgggctgaggcctccagcctccagccccaagagaaacacgacctctcttgaaggaaacagatgtgcctcaagcccttctcaggatgcgcaggatgccaggcggccacggagcaggaacccctccgcctggactgtggaggacgtggtgtggtttgtgaaggacgccgacccacaggctctggggcctcacgtggagctcttcagaaagcacgagattgatggcaacgctctgctgttgctgaagagtgacatggtcatgaagtacctgggcctgaagctgggacccgcactgaaactctgctaccacattgacaaactgaagcaagccaagttctgacgtttttaaaaagacagaagcgaaacccaaaacaacagatcccaagattatcttctgccttaccaatatcccgccaacatcacaaaatagactctcctcttaaaattaacagccacagagacgtggtctttttataaaactgtgtgaatctttgccttttgaagaatttaacatggaccttttcgagaggctcctctgtcttcataatttgccaaaaaattacaaaagcctgtgatttttaacatccctgttatgctgatttctctttaagtgggtcctatttgcataacgagagagtggggaactgaatgcttatgcccaaggagagttctggagggttcaaaggatgaaagaaggacctttgtccctgcggtctctgcagggacaaccccctcagcacatctgcctctaactctgacctggggacctatccatgtgagccttgtttgcctcagtctggaagctgacttctgaagatgactgcctcaccttgcactgtctggacaaacttgaattattttacgccgtgaaagcaacaaaggaaacaaaaaaacatttttttgggcctaagaaaatctgaggaagggggtccttctccgctagagggcagactgcta

SEQ ID NO: 345759 - DNA, 1603 bp, Homo sapiens
gatctgaactgcagagacaaccttagagagaaaatccatactggccagagaccaagttaatggaaaatttaattgaagcaaatgaaatgctcagcctcataggtagtatggccctgtgccctttgaaccagaaaggctgggccaggaggccacagagggccctaagggaaaactcccttatctgcaagaacaaggggcgggactgagtttgagaaaagaaaatctgcaaacctccacaggagcctcagtgaaaggctgcatgcaggggaggaaaccttcaggttttggtcaccaggaagtccgttagagattcacagcagaaggcccctctgcatcccacagcaccaagcacgtgctggaaaccggcggtcccccagaggacagtgggagaggctgccgggtggcagagacacaaccaccaagtcaagacagtcaccaccgaagagtacctggtgaaccctgtgggcatgaaccgctacagcgtggacacctccgcctccacctttaaccacaggggctccttgcacccctcctcctcgctgtactgcaagaggcagaactctggagacagccaccttgggggtggtcctgctgccaccgctggtggtccccgcactagccccatgtcttctggtggcccctcggcacctgggctgaggcctccagcctccagccccaagagaaacacgacctctcttgaaggaaacagatgtgcctcaagcccttctcaggatgcgcaggatgccaggcggccacggagcaggaacccctccgcctggactgtggaggacgtggtgtggtttgtgaaggacgccgacccacaggctctggggcctcacgtggagctcttcagaaagcacgagattgatggcaacgctctgctgttgctgaagagtgacatggtcatgaagtacctgggcctgaagctgggacccgcactgaaactctgctaccacattgacaaactgaagcaagccaagttctgacgtttttaaaaagacagaagcgaaacccaaaacaacagatcccaagattatcttctgccttaccaatatcccgccaacatcacaaaatagactctcctcttaaaattaacagccacagagacgtggtctttttataaaactgtgtgaatctttgccttttgaagaatttaacatggaccttttcgagaggctcctctgtcttcataatttgccaaaaaattacaaaagcctgtgatttttaacatccctgttatgctgatttctctttaagtgggtcctatttgcataacgagagagtggggaactgaatgcttatgcccaaggagagttctggagggttcaaaggatgaaagaaggacctttgtccctgcggtctctgcagggacaaccccctcagcacatctgcctctaactctgacctggggacctatccatgtgagccttgtttgcctcagtctggaagctgacttctgaagatgactgcctcaccttgcactgtctggacaaacttgaattattttacgccgtgaaagcaacaaaggaaacaaaaaaacatttttttgggcctaagaaaatctgaggaagggggtccttctccgctagagggcagactgcta

SEQ ID NO: 345760 - DNA, 362 bp, Homo sapiens
aatgcggcaatggacggcagatctgccgttactgcaatgtctaaattgtccttcaattaagctggagagctttctgagagctttaattgatctctttttagatacaatgagctatcaaaaatggaatactgaataacaggcttgttgtccccgtctgctattcaagggaggagggagctatttaaaatgtgttcccagcatattaattgcaggaggccttgactgcactgcagacccacctggaggacgcccttcacaggcaactctttgaagttggaaggacctggcgcagccctccagatgaggcctggtagaggagggcgggcaggacgcccggcttctgcttctcagggtttcgtttc

SEQ ID NO: 345761 - DNA, 453 bp, Homo sapiens
tgctgtctctttcttgggtcttacagcctcctcctctctctcggctcacaatatccaggctgagaattacctggcagtctcccagctcttccttccctcatgcatgcccttctcgatcacagcctcctcctctccctacaggcatccacttggccttttccccctgggcctctgtgctctgctcccagtctttcctgggctttgatccttccctcttcccttccctctagcaccaaactattcaattctgggttactatctgatggctaagaaagagtttcatgaatcttgcagaagttaaggggatcagagtcagaaaccaacgttatgggctggaaggtaactggtaagggagaaaacctctcacccctgagacactgactgccctggacattaaacagcccagacacggcaaccatcacttccaactacttcaggagatgaaaggaacac

SEQ ID NO: 345762 - DNA, 462 bp, Homo sapiens
tggagtataatatggaagtgtatagagtgaaatgggttgcttttcttccatcttttttccccctttacatttgcttttgcttgagtggttggtccctgaagaggcagtaactatgggcatacatatgtgtatgtatgtccctgcaacatttaaagtgtgtaaatgagaagaccttgcctaaacctgaataagagtttacatgattaacctaactaaaccctctctttccttatgtttccacaggagtctccccaggacagtgctatcacccgggatattaaccgaacattcccagcccatgactactttaaggacacaggaggagatggacaagattccttatataaaatatgcaaggtatttcatgtcaaaaaaaaaaaggactcaattctgagtggtggttctactttgaaattacataagaaacaactacaaagtgtaatttgtatttgatgttcaaga

SEQ ID NO: 345763 - DNA, 580 bp, Homo sapiens
ataatgatgaacctctcctgagtggatctggtgatgtatccaaagaatgtgcagaaaaaattcttgaaacatggggagaactgttgtcaaaatggcatctcaacttgaatgtgagaccgaagcagttgtcatccttagtaagaaacggtgtccctgaagctcttcgaggagaagtctggcagctgctagcaggctgtcataacaatgaccacctggtagagaaataccgcattcttatcacaaaggtaacagtacttgagtatttcctgcttcttgggcctctccatgatggattgctgtgaaggagaatcaacaatagcaaaccaggaaaaggttgacagtgcagttagcatttatgtcttatttatacatgatttgggaccgttttgccaaacattgaataattttcctgtgggaaacttgagccctaaaaggaaatgaacatagctaaaaggctgcatatcacatgggacttagatttatttttagaatggcactataatgccatatttggattgaaacaatgtgatagcagtaaaatatttcattaaataaagagccatcttttctgaggaagtca

SEQ ID NO: 345764 - DNA, 3399 bp, Homo sapiens
ataatgatgaacctctcctgagtggatctggtgatgtatccaaagaatgtgcagaaaaaattcttgaaacatggggagaactgttgtcaaaatggcatctcaacttgaatgtgagaccgaagcagttgtcatccttagtaagaaacggtgtccctgaagctcttcgaggagaagtctggcagctgctagcaggctgtcataacaatgaccacctggtagagaaataccgcattcttatcacaaaggagtctccccaggacagtgctatcacccgggatattaaccgaacattcccagcccatgactactttaaggacacaggaggagatggacaagattccttatataaaatatgcaaggcttattctgtgtatgatgaagagattggttattgccagggccagtcatttcttgctgctgtgctccttctccattttaaaatgcttggcaagaataccacacaggtgatgtcagcaaagagttttgagtacctgttatgatctgtactgtgctgaagatcagagatgcctgaagaacaggcattcagtgttctggtcaagatcatgtttgactatgggctcagggaacttttcaagcaaaacttcgaagatttgcattgcaaattttaccagttggagcgcctcatgcaggaatacattcctgacctgtacaaccacttcctggatataagccttgaagcacacatgtatgcctcccagtggtttcttactcttttcactgcaaaattccctctctacatggtcttccatatcatcgacctgcttttatgtgagggaataagtgttatttttaatgtcgcccttggattattaaagacttcgaaagatgacctgctgttgacagactttgaaggtgccttgaagttctttagggttcagcttcctaagagataccgctcagaagaaaatgcaaaaaaactaatggaattagcctgcaacatgaagattagtcagaagaagttgaaaaaatacgagaaagaatatcacaccatgagggaacagcaggcccagcaagaagaccccatcgagcgatttgagcgggagaataggcgtctacaagaagctaacatgaggttggaacaggaaaacgatgacttagcccatgagctggtgaccagcaagattgcactacggaaggacctggataacgctgaggaaaaggcagatgctctgaataaggagctgctgatgaccaaacagaagttgattgatgcagaagaagagaaaagacggctggaagaagagtctgctcagttaaaagaaatgtgccgtcgggaactcgacaaggcagaatctgagattaaaaaaaacagttctatcattggtgactataagcagatttgttctcagttgagtgaaagattggagaagcagcagacagccaataaggtggaaattgagaaaattcggcaaaaagtggatgactgtgagcggtgccgggaatttttcaacaaagaagggcgtgtaaaaggcataagctcaaccaaggaggttttagatgaggacacggatgaagagaaagagacgctcaagaaccagctgagagaaatggagctagaactggcacagaccaaactccagctggtggaggccgagtgtaagatacaggacttggaacaccatttagggcttgccctcaatgaggtgcaggcagccaagaagacgtggtttaaccgaacactgagctccataaagacagcaaccggggttcaagggaaagagacttgctgagagcagctgccgcctcccgacaccttcagaaaacacgacaccttttgttgccttctttggccagatgtgtgattctgtgacttgtcccaggaccagaatgtacctaagtcagatccatagacgcatgttggtaggtcactggaccagagcttgtgaagcaggcaacctctggggtaagactactgatactaacaggcctgctagctcagccgacgctctggacactctagaaatcactcctcagtgtgacctcccaggcctcttccccgtgtacgtcaacacctcacccagcctaaaggctgagtttacatgatcagagttaggggatccttcagtctgttgattttttttctaaaccttttttttttaatatacatatatatatatatatatatatatatatatatatatatagtgggggtggggcaagggatcagaaattcaaataattcttttctgcttcaatgccagcagaaggtcccccaggtagacatggagaagcactttgttttaaataggagggtttcatagttgcatctgaagccacctggttctgttaaactgtatcgtgcaggttttgggtttggcattattcatgtttctgatcaattctatgcaactctcatagttcctgttactttttagcattagctgccaaatgacttcaaaaggctggggtgggtgacttgactgtgagactggattataacatggacaaatcttattttgcttaatgtgtttgtgtgtgtgtgtgtgtgtgtgtgtgtatgtatatatatatatataaatatctttcccaatatgccccgttgacagtgtttaaattccagactaggactgctgatctgcacaatttaattatgtggttattcgagcacttaatttcactcaaggttcattgggctctgctctcctccctgccattacgggagctgtggacagagctccctcacttcaagattcctagtgtttttgcacaacaggttgtccaagtgagaaagactgagttgcgtgtctgtaaatgtctgcgcagggtgcacatgctgcgaggtctccatcctccgggcctgtccctcccagatgggctgggcctttgggccctcctcagagtatgcctgggtacaaacctcactgttcagatgggctgtaagttctcacttcaaagctatggaatggattttagcacctttaaaaaaaaaaaaaaactttgacttttaatttatatagtgatatgctgacaggctgacacgcagatggttttgtcctgttttctgcgttcagtgttgaggcggctgcttacaagaggcactggttttgtatataaagacactcgggttgttttgtagctctttttcttattggctgtactaacgcttgctgaggttatctgtaataagggaggtaacaagtggcaaccccctccccaccaaccatcccctttgctgctttctgtgtctttcttgttcagttaccaaaatagctgtaagcctatctaatgctaggtgtgtggacattgtgctaaggtagtttcagtgtgtcaactttatgaattgaaatataaaccagtaaaattgtattactgtttcttttgttggttttattttaacagcatattgattaaatattttggtacaaacaaacagcattg

SEQ ID NO: 345765 - DNA, 2490 bp, Homo sapiens
agaatgtaagaagcaaatgagatgttggtccgtgtaaaagttctattatttaccagattagtcagaagaagttgaaaaaatacgagaaagaatatcacaccatgagggaacagcaggcccagcaagaagaccccatcgagcgatttgagcgggagaataggcgtctacaagaagctaacatgaggttggaacaggaaaacgatgacttagcccatgagctggtgaccagcaagattgcactacggaaggacctggataacgctgaggaaaaggcagatgctctgaataaggagctgctgatgaccaaacagaagttgattgatgcagaagaagagaaaagacggctggaagaagagtctgctcagttaaaagaaatgtgccgtcgggaactcgacaaggcagaatctgagattaaaaaaaacagttctatcattggtgactataagcagatttgttctcagttgagtgaaagattggagaagcagcagacagccaataaggtggaaattgagaaaattcggcaaaaagtggatgactgtgagcggtgccgggaatttttcaacaaagaagggcgtgtaaaaggcataagctcaaccaaggaggttttagatgaggacacggatgaagagaaagagacgctcaagaaccagctgagagaaatggagctagaactggcacagaccaaactccagctggtggaggccgagtgtaagatacaggacttggaacaccatttagggcttgccctcaatgaggtgcaggcagccaagaagacgtggtttaaccgaacactgagctccataaagacagcaaccggggttcaagggaaagagacttgctgagagcagctgccgcctcccgacaccttcagaaaacacgacaccttttgttgccttctttggccagatgtgtgattctgtgacttgtcccaggaccagaatgtacctaagtcagatccatagacgcatgttggtaggtcactggaccagagcttgtgaagcaggcaacctctggggtaagactactgatactaacaggcctgctagctcagccgacgctctggacactctagaaatcactcctcagtgtgacctcccaggcctcttccccgtgtacgtcaacacctcacccagcctaaaggctgagtttacatgatcagagttaggggatccttcagtctgttgattttttttctaaaccttttttttttaatatacatatatatatatatatatatatatatatatatatatatagtgggggtggggcaagggatcagaaattcaaataattcttttctgcttcaatgccagcagaaggtcccccaggtagacatggagaagcactttgttttaaataggagggtttcatagttgcatctgaagccacctggttctgttaaactgtatcgtgcaggttttgggtttggcattattcatgtttctgatcaattctatgcaactctcatagttcctgttactttttagcattagctgccaaatgacttcaaaaggctggggtgggtgacttgactgtgagactggattataacatggacaaatcttattttgcttaatgtgtttgtgtgtgtgtgtgtgtgtgtgtgtgtatgtatatatatatatataaatatctttcccaatatgccccgttgacagtgtttaaattccagactaggactgctgatctgcacaatttaattatgtggttattcgagcacttaatttcactcaaggttcattgggctctgctctcctccctgccattacgggagctgtggacagagctccctcacttcaagattcctagtgtttttgcacaacaggttgtccaagtgagaaagactgagttgcgtgtctgtaaatgtctgcgcagggtgcacatgctgcgaggtctccatcctccgggcctgtccctcccagatgggctgggcctttgggccctcctcagagtatgcctgggtacaaacctcactgttcagatgggctgtaagttctcacttcaaagctatggaatggattttagcacctttaaaaaaaaaaaaaaactttgacttttaatttatatagtgatatgctgacaggctgacacgcagatggttttgtcctgttttctgcgttcagtgttgaggcggctgcttacaagaggcactggttttgtatataaagacactcgggttgttttgtagctctttttcttattggctgtactaacgcttgctgaggttatctgtaataagggaggtaacaagtggcaaccccctccccaccaaccatcccctttgctgctttctgtgtctttcttgttcagttaccaaaatagctgtaagcctatctaatgctaggtgtgtggacattgtgctaaggtagtttcagtgtgtcaactttatgaattgaaatataaaccagtaaaattgtattactgtttcttttgttggttttattttaacagcatattgattaaatattttggtacaaacaaacagcattg

SEQ ID NO: 345766 - DNA, 1792 bp, Homo sapiens
caccaagcccagcatcctcatgcacactgttcctcttgcaggacttggaacaccatttagggcttgccctcaatgaggtgcaggcagccaagaagacgtggtttaaccgaacactgagctccataaagacagcaaccggggttcaagggaaagagacttgctgagagcagctgccgcctcccgacaccttcagaaaacacgacaccttttgttgccttctttggccagatgtgtgattctgtgacttgtcccaggaccagaatgtacctaagtcagatccatagacgcatgttggtaggtcactggaccagagcttgtgaagcaggcaacctctggggtaagactactgatactaacaggcctgctagctcagccgacgctctggacactctagaaatcactcctcagtgtgacctcccaggcctcttccccgtgtacgtcaacacctcacccagcctaaaggctgagtttacatgatcagagttaggggatccttcagtctgttgattttttttctaaaccttttttttttaatatacatatatatatatatatatattgggggtggggcaagggatcagaaattcaaataattcttttctgcttcaatgccagcagaaggtcccccaggtagacatggagaagcactttgttttaaataggagggtttcatagttgcatctgaagccacctggttctgttaaactgtatcgtgcaggttttgggtttggcattattcatgtttctgatcaattctatgcaactctcatagttcctgttactttttagcattagctgccaaatgacttcaaaaggctggggtgggtgacttgactgtgagactggattataacatggacaaatcttattttgcttaatgtgtttgtgtgtgtgtgtgtgtgtgtgtgtgtatgtatatatatatatataaatatctttcccaatatgccccgttgacagtgtttaaattccagactaggactgctgatctgcacaatttaattatgtggttattcgagcacttaatttcactcaaggttcattgggctctgctctcctccctgccattacgggagctgtggacagagctccctcacttcaagattcctagtgtttttgcacaacaggttgtccaagtgagaaagactgagttgcgtgtctgtaaatgtctgcgcagggtgcacatgctgcgaggtctccatcctccgggcctgtccctcccagatgggctgggcctttgggccctcctcagagtatgcctgggtacaaacctcactgttcagatgggctgtaagttctcacttcaaagctatggaatggattttagcacctttaaaaaaaaaaaaaaactttgacttttaatttatatagtgatatgctgacaggctgacacgcagatggttttgtcctgttttctgcgttcagtgttgaggcggctgcttacaagaggcactggttttgtatataaagacactcgggttgttttgtagctctttttcttattggctgtactaacgcttgctgaggttatctgtaataagggaggtaacaagtggcaaccccctccccaccaaccatcccctttgctgctttctgtgtctttcttgttcagttaccaaaatagctgtaagcctatctaatgctaggtgtgtggacattgtgctaaggtagtttcagtgtgtcaactttatgaattgaaatataaaccagtaaaattgtattactgtttcttttgttggttttattttaacagcatattgattaaatattttggtacaaacaaacagcattg

SEQ ID NO: 345767 - DNA, 1524 bp, Homo sapiens
atatcggtacagtgatctctttagcttctagtatgtgtacggattttttagcatctgtgttcatcagggatattggcttatagtttttagttatgtctatgtctggttttggtatcatggtaatgcttgccttgtagaatgagttcagaataattcccttcttatttttctggaagagtttgagaagaattggtactggttctttaacattttggcagaatttagcagtgaagtcatgtggtcctgggcttttctttgatgggagactttttattactgattcaatctcattactcaatatttatctgttcagatttttaatttcttcttggttcaattttggtaggttgtatgtgtccaggaatttatccatttctttcaggttttccaattggttggcatatagttgttcataatagtctctaatgaccctttgtatttccgtggcatcgtttgtaatgtttattattcatgtttctgatcaattctatgcaactctcatagttcctgttactttttagcattagctgccaaatgacttcaaaaggctggggtgggtgacttgactgtgagactggattataacatggacaaatcttattttgcttaatgtgtttgtgtgtgtgtgtgtgtgtgtgtgtgtatgtatatatatatatataaatatctttcccaatatgccccgttgacagtgtttaaattccagactaggactgctgatctgcacaatttaattatgtggttattcgagcacttaatttcactcaaggttcattgggctctgctctcctccctgccattacgggagctgtggacagagctccctcacttcaagattcctagtgtttttgcacaacaggttgtccaagtgagaaagactgagttgcgtgtctgtaaatgtctgcgcagggtgcacatgctgcgaggtctccatcctccgggcctgtccctcccagatgggctgggcctttgggccctcctcagagtatgcctgggtacaaacctcactgttcagatgggctgtaagttctcacttcaaagctatggaatggattttagcacctttaaaaaaaaaaaaaaactttgacttttaatttatatagtgatatgctgacaggctgacacgcagatggttttgtcctgttttctgcgttcagtgttgaggcggctgcttacaagaggcactggttttgtatataaagacactcgggttgttttgtagctctttttcttattggctgtactaacgcttgctgaggttatctgtaataagggaggtaacaagtggcaaccccctccccaccaaccatcccctttgctgctttctgtgtctttcttgttcagttaccaaaatagctgtaagcctatctaatgctaggtgtgtggacattgtgctaaggtagtttcagtgtgtcaactttatgaattgaaatataaaccagtaaaattgtattactgtttcttttgttggttttattttaacagcatattgattaaatattttggtacaaacaaacagcattg

SEQ ID NO: 345768 - DNA, 3052 bp, Homo sapiens
ataatgatgaacctctcctgagtggatctggtgatgtatccaaagaatgtgcagaaaaaattcttgaaacatggggagaactgttgtcaaaatggcatctcaacttgaatgtgagaccgaagcagttgtcatccttagtaagaaacggtgtccctgaagctcttcgaggagaagtctggcagctgctagcaggctgtcataacaatgaccacctggtagagaaataccgcattcttatcacaaaggagtctccccaggacagtgctatcacccgggatattaaccgaacattcccagcccatgactactttaaggacacaggaggagatggacaagattccttatataaaatatgcaaggcttattctgtgtatgatgaagagattggttattgccagggccagtcatttcttgctgctgtgctccttctccatatgcctgaagaacaggcattcagtgttctggtcaagatcatgtttgactatgggctcagggaacttttcaagcaaaacttcgaagatttgcattgcaaattttaccagttggagcgcctcatgcaggaatacattcctgacctgtacaaccacttcctggatataagccttgaagcacacatgtatgcctcccagtggtttcttactcttttcactgcaaaattccctctctacatggtcttccatatcatcgacctgcttttatgtgagggaataagtgttatttttaatgtcgcccttggattattaaagacttcgaaagatgacctgctgttgacagactttgaaggtgccttgaagttctttagggttcagcttcctaagagataccgctcagaagaaaatgcaaaaaaactaatggaattagcctgcaacatgaagattagtcagaagaagttgaaaaaatacgagaaagaatatcacaccatgagggaacagcaggcccagcaagaagaccccatcgagcgatttgagcgggagaataggcgtctacaagaagctaacatgaggttggaacaggaaaacgatgacttagcccatgagctggtgaccagcaagattgcactacggaaggacctggataacgctgaggaaaaggcagatgctctgaataaggagctgctgatgaccaaacagaagttgattgatgcagaagaagagaaaagacggctggaagaagagtctgctcagttaaaagaaatgtgccgtcgggaactcgacaaggcagaatctgagattaaaaaaaacagttctatcattggtgactataagcagatttgttctcagttgagtgaaagattggagaagcagcagacagccaataaggtggaaattgagaaaattcggcaaaaagtggatgactgtgagcggtgccgggaatttttcaacaaagaagggcgtgtaaaaggcataagctcaaccaaggaggttttagatgaggacacggatgaagagaaagagacgctcaagaaccagctgagagaaatggagctagaactggcacagaccaaactccagctggtggaggccgagtgtaagatacaggacttggaacaccatttagggcttgccctcaatgaggtgcaggcagccaagaagacgtggtttaaccgaacactgagctccataaagacagcaaccggggttcaagggaaagagacttgctgagagcagctgccgcctcccgacaccttcagaaaacacgacaccttttgttgccttctttggccagatgtgtgattctgtgacttgtcccaggaccagaatgtacctaagtcagatccatagacgcatgttggtaggtcactggaccagagcttgtgaagcaggcaacctctggggtaagactactgatactaacaggcctgctagctcagccgacgctctggacactctagaaatcactcctcagtgtgacctcccaggcctcttccccgtgtacgtcaacacctcacccagcctaaaggctgagtttacatgatcagagttaggggatccttcagtctgttgattttttttctaaaccttttttttttaatatacatatatatatatatatatattgggggtggggcaagggatcagaaattcaaataattcttttctgcttcaatgccagcagaaggtcccccaggtagacatggagaagcactttgttttaaataggagggtttcatagttgcatctgaagccacctggttctgttaaactgtatcgtgcaggttttgggtttggcattattcatgtttctgatcaattctatgcaactctcatagttcctgttactttttagcattagctgccaaatgacttcaaaaggctggggtgggtgacttgactgtgagactggattataacatggacaaatcttattttgcttaatgtgtttgtgtgtgtgtgtgtgtgtgtgtgtgtatgtatatatatatatataaatatctttcccaatatgccccgttgacagtgtttaaattccagactaggactgctgatctgcacaatttaattatgtggttattcgagcacttaatttcactcaaggttcattgggctctgctctcctccctgccattacgggagctgtggacagagctccctcacttcaagattcctagtgtttttgcacaacaggttgtccaagtgagaaagactgagttgcgtgtctgtaaatgtctgcgcagggtgcacatgctgcgaggtctccatcctccgggcctgtccctcccagatgggctgggcctttgggccctcctcagagtatgcctgggtacaaacctcactgttcagatgggctgtaagttctcacttcaaagctatggaatggattttagcacctttaaaaaaaaaaaaaaactttgacttttaatttatatagtgatatgctgacaggctgacacgcagatggttttgtcctgttttctgcgttcagtgttgaggcggctgcttacaagaggcactggttttgtatataaagacactcgggttgttttgtaggggagggggttgccacttgttacctcccttattacagataacctcagcaagcgttagtacagcca

SEQ ID NO: 345769 - DNA, 1504 bp, Homo sapiens
ataatgatgaacctctcctgagtggatctggtgatgtatccaaagaatgtgcagaaaaaattcttgaaacatggggagaactgttgtcaaaatggcatctcaacttgaatgtgagaccgaagcagttgtcatccttagtaagaaacggtgtccctgaagctcttcgaggagaagtctggcagctgctagcaggctgtcataacaatgaccacctggtagagaaataccgcattcttatcacaaaggagtctccccaggacagtgctatcacccgggatattaaccgaacattcccagcccatgactactttaaggacacaggaggagatggacaagattccttatataaaatatgcaaggcttattctgtgtatgatgaagagattggttattgccagggccagtcatttcttgctgctgtgctccttctccatatgcctgaagaacaggcattcagtgttctggtcaagatcatgtttgactatgggctcagggaacttttcaagcaaaacttcgaagatttgcattgcaaattttaccagttggagcgcctcatgcaggaatacattcctgacctgtacaaccacttcctggatataagccttgaagcacacatgtatgcctcccagtggtttcttactcttttcactgcaaaattccctctctacatggtcttccatatcatcgacctgcttttatgtgagggaataagtgttatttttaatgtcgcccttggattattaaagacttcgaaagatgacctgctgttgacagactttgaaggtgccttgaagttctttagggttcagcttcctaagagataccgctcagaagaaaatgcaaaaaaactaatggaattagcctgcaacatgaagattagtcagaagaagttgaaaaaatacgagaaagaatatcacaccatgagggaacagcaggcccagcaagaagaccccatcgagcgatttgagcgggagaataggcgtctacaagaagctaacatgaggttggaacaggaaaacgatgacttagcccatgagctggtgaccagcaagattgcactacggaaggacctggataacgctgaggaaaaggcagatgctctgaataaggagctgctgatgaccaaacagaagttgattgatgcagaagaagagaaaagacggactggttttgtatataaagacactcgggttgttttgtagctctttttcttattggctgtactaacgcttgctgaggttatctgtaataagggaggtaacaagtggcaaccccctccccaccaaccatcccctttgctgctttctgtgtctttcttgttcagttaccaaaatagctgtaagcctatctaatgctaggtgtgtggacattgtgctaaggtagtttcagtgtgtcaactttatgaattgaaatataaaccagtaaaattgtattactgtttcttttgttggttttattttaacagcatattgattaaatattttggtacaaacaaacagcattg

SEQ ID NO: 345770 - DNA, 354 bp, Homo sapiens
attactttgttaccttgtcacgtatttgtaagccatttaaattgactttgataaaagtaacattctttagagaatcttatcttccttttatgatttatggtttatggccttatttttaggcatctcaacttgaatgtgagaccgaagcagttgtcatccttagtaagaaacggtgtccctgaagctcttcgaggagaagtctggcagctgctagcaggctgtcataacaatgaccacctggtagagaaataccgcattcttatcacaaaggtaagggggtgataattcagcttcagcattaatccttttagagatttgtgatgaaaagatcattatagttatttgacttataag

SEQ ID NO: 345771 - DNA, 321 bp, Homo sapiens
caagaagctaacatgaggttggaacaggaaaacgatgacttagcccatgagctggtgaccagcaagattgcactacggaaggacctggataacgtaagtccaacgggtctgaagggaaagatctcactgagacacttgacttttcccctcaagagaaatcctggaattttagtgattgttattctagccacctgtaaagtttcccgcttgtgatacaacttgcttgtcagtgtcacttccctcctttccttcaggaattatctgttgtctcacaaagccctccttaccacattcttttctcattgtgcacataatccttga
